United States Patent Application Publication US 2005/0228172 A9 - sequence listing, part 102

SEQ ID NO: 469838 - DNA, 601 bp, Homo sapiens
gtttttctagatcagccttcctcaagtactcgctcagacgcagcgagccaggctcggtcgagacatgagtgtggcgactcaaaattccccagagggggaacacggtaaacctattcccccagtttgctgaaaaagagccacgcttccagcttctagagactcttttaagctcaattttaaaaatatatattttttcttttttggtccaaagtgacggtggttaaatgaacaacagtttctgtcttatttactaacccttgtatagtcctatgtacgttcaattaacgttgagaatgtgggttctgattaagatgaaacatgttaaaaacgatgaacattaatttgctcatcgcgttaaacctgttgaatgaatatgcaagatacagaaactattattacaggatcaagattttatgcagtggactgagatctgaaagttccgtgaatgaatgctcctgtatctttctaaataaaatggcattttatttctaaatgaaatawaagtctgaatctttctaaataaaaaggcatgttgggaaattaaagcattaagttccatgttattttaatgctaaaaggacaagtgattctgttaaactga

SEQ ID NO: 469839 - DNA, 650 bp, Homo sapiens
tttttcacagaggctaaattagagggctcccactgtgaaaataatttttttggccttgaatgtgaatcatagactgaatttaaaactaaaactaaaaaggctgatatttgagagtatttttgtgcataaaaaagggcctcaaaagatacataactcagattgcctgagctgttcaagctaggcttctctgttttcttttctttttttttttttcgagacagagtctcactctgtctcccaggctggagtgmagtggcgcgatctcgggtcactacaactttgcctcctgggttccagtagttctcctgcctaagtctcccaagtagctgggattacaggcacacaccaccatgcccggctaatttttgtatttttagtagagacagggtttcaccatcttggccaggctggtctggaactcctgacctcaagtgatgtgcccgccttggcttcccaaagtgctgggattacaggcatcagccaccacgcccagcctgtctctgttttcaagcattcagcaaacacttgtcaactgtcttctaggtgcaggctttgtgccagttgctgggaatgagattgtgaacaagacaaacatgatcttgatcctcatggaacttgctttctgttggagtgacatgtaggcacaaaag

SEQ ID NO: 469840 - DNA, 632 bp, Homo sapiens
gtaaaaatacatctttattttcactattctttaactaaaatttaatatttaatcatgaaagtgggcaacaaccacagcagtgttagcaatacctgtgattttgataccaataggaatcatagtaagtttatgtcatgttaaagttattgcagaaacaagaaaatagcattatatccacaacaactttaaaaatgtggtgattagtggcccccaccactagattttatttaaagcattaatgaaagagtatatattttataatggcacatttraaatattttgataatattaaaagcattttaatattactgtctttctttgatttttgttatgcattttaaaattttttgaggagggattttagcagattaccaaagggggtcatggcacaaaaagttttcaggacacccaccatagggatgcaaatttatagaatacacaaaggacagagatggagggaaaacatactttaaaatgtaaacagattatcctgctaaccacagtatgacagaactaaatataagcccatctgcaaaagttatttcaatctaatgtatatttctcctaacttgattagcgtctgggtacaaatggggcaatgttaatggtgaaagccacatttcccttgtatc

SEQ ID NO: 469841 - DNA, 609 bp, Homo sapiens
tggcagaacatagaagtaccaccaagatctgcatgctggtcactacaatctctgcctcctttctttgtttctatgtgacccaaggtggtctaaccatgccattatccccagttttccctgtgaggtgaggcgagattggagtgggcttcctggaatgctaggaaagctggataactgtctctgagtatcttttctcccagtagaaactgtgggcccatggaaatcctctctgtttagcactgggctgaactgagggagaggtagcacagctgtaatgaggctgttctccttacccttctaatttaattccattcagttctgtggaccacattggtgtctcaggcttgttccttgcattggggttttcaaaaagttgttctggtctttggatagttgctagttgaattttctgtggggaaaagtggaggctacaacttcctattccaccatcttgcagacgtcatccctgaagatatcttaaatgagctcatgatcttcctcttttagccactcttawaatatctatgccccaaggtgcattctttgagaatcaaagtttattttctgtagttcctaagttacaaagccccatttggccagaaaaatgcc

SEQ ID NO: 469842 - DNA, 655 bp, Homo sapiens
ctttggttcaatgtctctcccatgcctacaatcaagatgttggtttgggctgggaaacgacatccacttcccagctcactcacatggctgttggcaaacttcagttctccaaggggtgttggactaaggacttcagttccttgctgctggcttttggtggaggctgccctcacttctttcccacgtgggtctgtccacagggcagcttacaacatggcggctgactttctcaacaggagctagggagagagtgggagcaagacaaaagacgcagtcttctgtagcccaatctcagaaatgacattccactacttttgccatattctattcattgtaagtgagtccctaggtctggcccacactcaagatggggagattatacaacggcattaataccaggaggtaagaaccactggggcrtcttagaaggctgcctgccatggcatgtgaatcttactctgccaactcaggggtccaagcaatataacctttattttcctgtaacgctttctagtttgagcccatttttaaatgaagaaagtttgatctttgttaattccgggctttctgaccctttcctcaggttgaagtttcagtgagattacagtggggaattagaagcatgccacagggagggagagttgacaagcccttg

SEQ ID NO: 469843 - DNA, 552 bp, Homo sapiens
cttttcaccaggaaagatctcagggcctcatcccttatcacytgctgcttgtcaaccagcacttgggagagagagggctcctccaccagtcccctgccagtcttggggtgagggggcagcgtagctctcataatgcctccctctggtagctcttctgagcttggtgagaagcgcacactcatctggggttactttccaaggagaaggtatttttaaatagaaacgagaagtaattataaagaaatgactgcctggcaacagaaatctaaatcccaagccccaagctggtgacagttgtagcatgaacatctggtgattctataattaaaacattgacacctcaccgtcgctcggctccctgcagccccacagaaaacctggtgtaactttgctcttctttacggggggaaaaaaagttattttcttccctttcttctctgttcagacataacatcatcaacatagctctttaaatatctgtgccgggaagctatatttagctactatttggccctcaaaatgagcctgatttcctgtggcaaaaagttctca

SEQ ID NO: 469844 - DNA, 528 bp, Homo sapiens
cagctggagagtttggagcgctggatctggagaggcaaagagatttttagcgcagaggattctcaggggtgtacctccaaggaaaaacaccagacaagcagatgatattcttaataacattgcytctttgagcccattctctgtcttgtgccctcgtcactctctggacccagctaaagaatgatttatgaccctttgcccagagtttatgccttcaataaacacggcccctttaaacagggattaagggctcagcctagttcttaataggaataaaccagactaggaatcaggaatttgtggtttggagggaccctgtgtggaaaggactcaagcgagttaccttcctctgtgaaactcagagagagttaaaactaaggaccttggctgggcgtggtggctcacgcctgtaatctcaacactttgggaggccgaggtgggcagatcacgaggccaggagtttgagaccagcctggccaatatagtgaaaccccatctctaataaaaatacaaaaattagctgggcat

SEQ ID NO: 469845 - DNA, 260 bp, Homo sapiens
cctaaccttaagaagtaagtcagtaccttgataagcaagaaggtaatagtagcctaaaacratagccaaggaagctagaaccatgggatgtttggttctcctataaaaactaggccaggcctatcaacctctctctctccgtttatcctcacctgcttttaaactggggtcgctaacttaaaaaccaaaccaaaccatcttcaacctcacactctcctccagctatgaccccccttcttcctttcccaattaaacttctt

SEQ ID NO: 469846 - DNA, 622 bp, Homo sapiens
tgagtgaatctttgggactcgggaaaaataatccacacagacattgcaaatccctgtgttagcccaggcccaaactcctcacccaaatccaaagcctttcccgagggcagattttaccaggaacattcaccggggctggtaacctctcccatttctgtgtcagatgttcatagctgagtaacagataagcaaggaaaaagagcagggtccgasctaatctttatccacacatacgcccagagggccagtggctcatgtgggatgtgggtaccaagcttgagggctcagggtcacttctggaaacaaagctgacaggctgatggttcttactgacctgtcatagcttcctcagcagtctttcatcctaactgaaatatgacccactatggcaggggttcacgcccttggctgcaccctggaccttcttggggagctatagagaaatcctgatagcaggcctaccctggagattctgaggtaggcaagggtgagagacctgggcactaggaattttccaagctatgtaaatgattcttgtgtgcacatgtggtttagaaccacctcatcatgtcagccccactctggctttagggaactcaactcatcacctgacacaggctaa

SEQ ID NO: 469847 - DNA, 634 bp, Homo sapiens
aagtatacataccatacattggttacataactgtgtataaatacctttacataagtataatatacaatgtatatataggcacatacctgggcatgcacatgtgcaaaatttattaattgatatgcaaatttctataaaaatagacaactattctcaagacttgagttcttgacactgtgaagaactgatataaactggattctgtttaaaaaggggagggggaatgacatctaattcttctgacaagtttaaatttacatatatgcacagttcagtgcattctacaaactcattcatgcaacagatttttttgaggggcttactatatgccaggaaccgtgctagccttggygatgtagttaaaaaagagagctggaagaaaagggttttaggtagataataaaacatctggacttgatcctaggacaatgggaaatcattgatgactttgggcaaagaattaaaaccaacagatttgcatttcctaagagattactgagcagtgtggagcattggtcaaggaagcatgggagactagagctcaacacggctggagcaatgacgttgagaggccagaagctggtacaattatggcttggagagtttaccagattggaggaagagctgaacccag

SEQ ID NO: 469848 - DNA, 590 bp, Homo sapiens
gttattcagaagcaagcccagatgccccaccggaggtgggtggaggctgccctccrcagtctcgctctcctgcatctctggggttcccctctctcctcttgagaacaagagatctggagtgagacaggcatccgtaaaatcccacgatcgtgaggctttgggcaaagcacttgacccttctgaaagtatctttcttgtggaaaatgacagtattcataatggtggcaataataaacacatttagagtgttttctctgtgctgagcagttctgatttgcatatatttgcctctcttggtcctcccaacaactctctgagttaggtacttttattttcccagttgtcttatgagaagccggagcacagagaggttgagtggcatgtcctgatacatcgtggtaccgtgcgaaggggtaaatgtgatgggaaagtgcctggcagggcgagcacctagtagctattagtgatatagatgtcccaaactcaactcatgatggttcgactgacaatatttcaactttatgatgagtatctatctatcatctatctatctatctatctatctatctatctatctatctatctatcta

SEQ ID NO: 469849 - DNA, 580 bp, Homo sapiens
ctttgcaaaaaggaaagtgtgaccatgttacagttgaggggcacatgctgaagcatggcagcagaagggattgcctttaaaaattcagtacagtccttcaatctgtaatagtcattaaagaaaaaatatcttagaagtgcagtttcccttggattactgaataaatccaggtcacatagatgccttcttttagacatagttcactgagtttaattatgcttcatgcttccaggaaaaaccttggtaattaccagttagattaaggattctgcagcaaggaaactccctccacccaacactaaggtctcacatatagtgttttaaaattctgaatttgaagcttagtaaagaagccttggtcttataccataaaataaaaacrggggaggttacatttataaaaggcaggcaacacaatggcattttatggaatacaatcattaaacatatgtttgctgttgatactgttattataggtgaccaaatcatggaatgaaacagatattgttcatataacatttgtttcttcattttattttctctcgctagatggcataaggcagagagtagggtttccagc

SEQ ID NO: 469850 - DNA, 580 bp, Homo sapiens
ctttgcaaaaaggaaagtgtgaccatgttacagttgaggggcacatgctgaagcatggcagcagaagggattgcctttaaaaattcagtacagtccttcaatctgtaatagtcattaaagaaaaaatatcttagaagtgcagtttcccttggattactgaataaatccaggtcacatagatgccttcttttagacatagttcactgagtttaattatgcttcatgcttccaggaaaaaccttggtaattaccagttagattaaggattctgcagcaaggaaactccctccacccaacactaaggtctcacatatagtgttttaaaattctgaatttgaagcttagtaaagaagccttggtcttataccataaaataaaaacgggggaggttacatttatwaaaggcaggcaacacaatggcattttatggaatacaatcattaaacatatgtttgctgttgatactgttattataggtgaccaaatcatggaatgaaacagatattgttcatataacatttgtttcttcattttattttctctcgctagatggcataaggcagagagtagggtttccagc

SEQ ID NO: 469851 - DNA, 580 bp, Homo sapiens
ctttgcaaaaaggaaagtgtgaccatgttacagttgaggggcacatgctgaagcatggcagcagaagggattgcctttaaaaattcagtacagtccttcaatctgtaatagtcattaaagaaaaaatatcttagaagtgcagtttcccttggattactgaataaatccaggtcacatagatgccttcttttagacatagttcactgagtttaattatgcttcatgcttccaggaaaaaccttggtaattaccagttagattaaggattctgcagcaaggaaactccctccacccaacactaaggtctcacatatagtgttttaaaattctgaatttgaagcttagtaaagaagccttggtcttataccataaaataaaaacgggggaggttacatttataaaaggcaggcaacacaatggcattttatgsaatacaatcattaaacatatgtttgctgttgatactgttattataggtgaccaaatcatggaatgaaacagatattgttcatataacatttgtttcttcattttattttctctcgctagatggcataaggcagagagtagggtttccagc

SEQ ID NO: 469852 - DNA, 580 bp, Homo sapiens
ctttgcaaaaaggaaagtgtgaccatgttacagttgaggggcacatgctgaagcatggcagcagaagggattgcctttaaaaattcagtacagtccttcaatctgtaatagtcattaaagaaaaaatatcttagaagtgcagtttcccttggattactgaataaatccaggtcacatagatgccttcttttagacatagttcactgagtttaattatgcttcatgcttccaggaaaaaccttggtaattaccagttagattaaggattctgcagcaaggaaactccctccacccaacactaaggtctcacatatagtgttttaaaattctgaatttgaagcttagtaaagaagccttggtcttataccataaaataaaaacgggggaggttacatttataaaaggcaggcaacacaatggcattttatggaatacaatcattaaacatatgtttgctgttgatactgttattatargtgaccaaatcatggaatgaaacagatattgttcatataacatttgtttcttcattttattttctctcgctagatggcataaggcagagagtagggtttccagc

SEQ ID NO: 469853 - DNA, 456 bp, Homo sapiens
gctcctccctgccactaccagacccctctccctttctgttctataatctcagctctattttctgatatcatcctctatatttctagccttttagtgccatgagactaacaagtctttccctttagcaccctgagactaagaattctttaacccctcaagaccctatactccatcaatcctatcaccattttactgtctttccagcccccatatctttatattcctcctattgcacctaaattccatgatccaccactttcagcctcttgcatacaacctcaggtcaagcacttactcctctcttactttatcatactcacttggcaatttccaaactcacttcacaagtgcactcacatsctgtacattgctagaaggtaacatacatcataaggactggtatcatcctaaattcatgaccattgactttaaacagactattactccagataatca

SEQ ID NO: 469854 - DNA, 612 bp, Homo sapiens
tgcataaaatgaaaatgtacagttcgatgatttatcaaaaaggaaagctctatgtaactaccacttggtcagtgttttgtaaatattccatgtgcatcttttacatttttggtatgcaatgtagaaaatgtgtccattctgtcagtttgctaatcacgttgtttatattttctatatctctactggatttttgtttatttgttctgtcagttgttgaaatagttgtgtaacaatttcccactatgattgcacatttctgtttctgttagtgttggaaacttgattcatgcatttatattttgaggctcttttattagatgcatgcaattttagaatagtgacatcatcctctgagttgaataatttagctttttgtaatgtcactatttatctctgataatgcagtctaccttaaagtcctttatctttgaatattaacctagtggtttccctgttatctttttcaaccctttatttacaatctttctgtgtctctgtgttttagacacagctcttgtaaacggtatatattttagttttgcattatttatttatttatttatttttgagasagggtgtcagtctgtcacctaggctggagagcagtggcgt

SEQ ID NO: 469855 - DNA, 602 bp, Homo sapiens
ttttctaaggccgattgtgtctccacccctcccaggcttctccactttatgtttcctctctctgcattatgtttttaggcagccttttctccggatttcccatccgcgctgagaacaaatgacatgctgatgtgttcaatcagtgtcatacgtggtagctttgagagtaagtgccagaatgtgtcagggaagctatgggatggtggaaggtatccatggcaatattgccctgtttagcaaacatgtgaagaaaatttatgctgagataatcaaaaagtaacttagaggtacactttggtagctccaagttcaaaaccagtattttccgctggttgactgcaaggcaaaaataatactcaygcactttgtgccttgaactttatggcaatagtgaagcaggctttctcagaccgggataattatcacactctcacatgattttgaggtgtatccataactcatgacaacgtcaaatttcatttagaacaagtctacacaccgtttccctgcagtaaggtgccccttggtaatatctagttcatcaaatatttcatttttattgttgtttttcttgcaagttctgcaagtattttaagctataa

SEQ ID NO: 469856 - DNA, 616 bp, Homo sapiens
ctaagtttggggggacttgacctaatcccacatcmcagccccagtaatacagccctggaatttatcacagaaagcctagaatcccatgcatatcccatgcatatgcatccctagtcctatgggttcaaggcttggagctctccctggatttagctgggaaaagttggcagacagttcttctctgtcttctagaaatatggactagaatcgtgagtgtgagattgcaagtaacttttaaaatcatctagtttaacttcaccccatttcatagaccaagaaactgagaccagagagagaaatggactttcaagttcaccctgctagttactgatggatcacaagtcaaatctcctgattctagcactgtttctcttacaccacaccacctttgaaagtgtgtcaatcaaatcttactttagttgcagaggatgactttagtttctgaagataaaattgtgagtcaatcaagatgagtcccaagacaatagcctgtttagcccttataagttcagggatgaaaggttagaaagaaacaggatggaaggaggactggagaaaaaaacaaaagaggaaggaaggaggaggaagcaaacaggaaaaaaaaagaatgtgcata

SEQ ID NO: 469857 - DNA, 616 bp, Homo sapiens
ctaagtttggggggacttgacctaatcccacatcacagccccagtaatacagccctggaatttatcacagaaagcctagaatcccatgcatatcccatgcatatgcatccctagtcctatgggttcaaggcttggagctctccctggatttagctgggaaaagttggcagacagttcttctctgtcttctagaaatatggactagaatcgtgagtgtgagattgcaagtaacttttaaaatcatctagtttaacttcaccccatttcatagaccaagaaactgagaccagagagagaaatggactttcaagttcaccctgctagttactgatggatcacaagtcaaatctcctgattctagcactgtttctcttacaccacaccacctttgaaagtgtgtcaatcaaatcttactttagttgcagaggatgactttagtttctgaagataaaattgtgagtcaatcaagatsagtcccaagacaatagcctgtttagcccttataagttcagggatgaaaggttagaaagaaacaggatggaaggaggactggagaaaaaaacaaaagaggaaggaaggaggaggaagcaaacaggaaaaaaaaagaatgtgcata

SEQ ID NO: 469858 - DNA, 514 bp, Homo sapiens
tgtgtgtgtttgtgtgtgtaggtgtgtgtgtgcacacatgtgtgtttgtctatgtgtgtgtctgagagacagagggagaaagagttcattcttattgagagttatcttgttagatatcgttgaagcctcagttgaaggtgtgatcctctaaaacaggatttgtgtttgtataaccaggttaaactaaacacttggcttggggttttcctgggccacataggtaaagtgaattctggtccccaataagtgtgagaatcagcttacagttacaaattctcatgaaagaagttttgcttatatttgggccatggccaagacaagcaagattccttactatcaccctttgtggaaatttttttctggctctctatttcgctaaagatgtcacttttcagaaatcctgatttctcctctagtctctgataaatccactgatctctctstgttcctatccttgacctattaaaactaaagcctccaggccactagaaatctgcagattagcccagggcag

SEQ ID NO: 469859 - DNA, 483 bp, Homo sapiens
ctgggaaatgttgccagaggaataaacattgccattgtcaactgtaagttactaaacattttctttaaacttctctaaaagctctctggtcagattttcaaaggtaccttgggttttcgagacttttgcrcgtgatttagtctaggtttgtattttaatgcattttaagattatatactcaattatttttacaagtctcacttcacagattatttgtggttctaacaacaaataaacaactgaaaaccaaatatagactttattttaaaaaaagaaaaaaacagagggataggccaaagttagggttaacaccagaagggccgccaagggggtgcagcctgtggtcctggactgagcctctcatttgctcccagagtcccagtgtctgctcaggggctgacaccatagaccatctcatccttctgtgtgataaaagccactgcaacctcgtgggaaacaaaacttggcctttctcttaggtct

SEQ ID NO: 469860 - DNA, 531 bp, Homo sapiens
gcacatcgtctccacaggccaacttcaacagaggtggcacatggcaagcaaaatgstggatctccttgtgtccacagaaggcgaggtggaaaatggccgaggtcaccaccatccccatgaccaagccaccagcccaggagcagcccaccaggcaggcgcagccccgcgggctcatgagcacgttgtagcgcagggggtggcagatggccacgtagcggtcgtagcccatgacggtgagcaggaaggagtgggtgaagccgaagctgaaggagaagaacatctgactggcacaggccaggaaggcgatggagcgctgggtggacagcaggtcggccagcatgcgcgggatgatggccacggtgtagaggatctcggagacggagagggcgcacaggaagaggtacatgggcgtgtggaggctgcgctcgctccagacggtggccatgatgagcaggttgcccagcagcgtgaacaggtacatcagcaggaacagcaggaagagcatcagctggaggtgggggaagacagaga

SEQ ID NO: 469861 - DNA, 531 bp, Homo sapiens
gcacatcgtctccacaggccaacttcaacagaggtggcacatggcaagcaaaatggtggatctccttgtgtccacagaaggcgaggtggaaaatggccgaggtcaccaccatccccatgaccragccaccagcccaggagcagcccaccaggcaggcgcagccccgcgggctcatgagcacgttgtagcgcagggggtggcagatggccacgtagcggtcgtagcccatgacggtgagcaggaaggagtgggtgaagccgaagctgaaggagaagaacatctgactggcacaggccaggaaggcgatggagcgctgggtggacagcaggtcggccagcatgcgcgggatgatggccacggtgtagaggatctcggagacggagagggcgcacaggaagaggtacatgggcgtgtggaggctgcgctcgctccagacggtggccatgatgagcaggttgcccagcagcgtgaacaggtacatcagcaggaacagcaggaagagcatcagctggaggtgggggaagacagaga

SEQ ID NO: 469862 - DNA, 531 bp, Homo sapiens
gcacatcgtctccacaggccaacttcaacagaggtggcacatggcaagcaaaatggtggatctccttgtgtccacagaaggcgaggtggaaaatggccgaggtcaccaccatccccatgaccaagccaccagcccaggagcagcccaccaggcaggcgcagccccgygggctcatgagcacgttgtagcgcagggggtggcagatggccacgtagcggtcgtagcccatgacggtgagcaggaaggagtgggtgaagccgaagctgaaggagaagaacatctgactggcacaggccaggaaggcgatggagcgctgggtggacagcaggtcggccagcatgcgcgggatgatggccacggtgtagaggatctcggagacggagagggcgcacaggaagaggtacatgggcgtgtggaggctgcgctcgctccagacggtggccatgatgagcaggttgcccagcagcgtgaacaggtacatcagcaggaacagcaggaagagcatcagctggaggtgggggaagacagaga

SEQ ID NO: 469863 - DNA, 531 bp, Homo sapiens
gcacatcgtctccacaggccaacttcaacagaggtggcacatggcaagcaaaatggtggatctccttgtgtccacagaaggcgaggtggaaaatggccgaggtcaccaccatccccatgaccaagccaccagcccaggagcagcccaccaggcaggcgcagccccgcgggctcatgagcacgttgtagcgcagggggtggcagatggccacgtagcggtcgtagcccatgacggtgagcaggaaggagtgggtgaagccgaagctgaaggagaagaacatctgactggcacaggccaggaaggcgatggagcgctgggtggacagcaggtcggccagcatgcgcgggatgatggccacggtgtagaggatctcggagackgagagggcgcacaggaagaggtacatgggcgtgtggaggctgcgctcgctccagacggtggccatgatgagcaggttgcccagcagcgtgaacaggtacatcagcaggaacagcaggaagagcatcagctggaggtgggggaagacagaga

SEQ ID NO: 469864 - DNA, 529 bp, Homo sapiens
aaaggcttttgtaaacagaggcgtttyatgtggttttcctttcctttccttatatgtgaaaaggtgacagaaaagaaatcttcctaaaagagtcagccactgctctgtggaacgatgatcatttaaatgccacgtcgatttgaaacgtacaacaaagggactaacagttgagaaccatgtggattgcagtggagacgctggcgttagagaatgcggggagggaaacgttcattacaagatttacggccagcccaagggggagcgaggctgggggaccgggtcgcggagacccggcttcgcacaccttttggaagactcagggagaagcgggggccgccttcggggggaaaggcgggactggggagcccacaggccatggctcctcccacaggatccccaggccggaggcgggatccccccatgatcctcccgtggcccccgcacaatctggggagatgcggagctgcccagagagggctctggggcgacagtcactgcgcagggacaggacaggactcccggagtccca

SEQ ID NO: 469865 - DNA, 618 bp, Homo sapiens
tgagagcgcttcccttcacccagtcctctccaccccgtaagaacctacctagtccagcttcccaccacctgtcttccagaggactcccaatatctcctcactggccaccctgctgccttgaactttctcatcctttcccccacagcaggtgcacctgagcttcacctcgcctcccctggttgaaaaccccgcaagtcctccaatgctcctagcatgaagcctcaacctcttttgcctttaataaactatgtgtatatatataatttttttggagagatggtctcactccaacgcccaggctggagtgcagtggcacaatcacaactcactgcagcctygacctcccaggctcaggtggtcctcccacatcagcctcctaagtagctgggaccacaggtgtgcaccaccacgcctggctaattttttgtattttttgtagagatgaggtttcgccaaattgctcaggctggtatatattcatttttaaaatgagaaaaacactacaaatgtcaagatttacaatactactattcaggattttgtgtgcatgtgtggttacaacacaaagtcttgacttttaaagaaacaaaaaaaaatacaggaatgttttgtctccac

SEQ ID NO: 469866 - DNA, 607 bp, Homo sapiens
gggatgcagtcctgttagactgcaaagggtggaggcgatggctccatttctgggctccatacctggagttccacgggtctctcaggagaagtatctggccgtggatgaggcaaatgggaccccacctcatctgaacccccactgcatctccagtgccagtgggcacacagtaggggctctatcaacttgttatgccccccttctccttgtgtccatcagaactcaagatttcaggtcctttcccaggcccgcctcccyagcctcagtcagcacctgcccactccagatccaagtgccaggacttgaagatcaaagctctccgtcctctgttctgtatcatagctcctggggagctctaaatctaatccagccctgccaccccctcaaggcccagtgcggcaccacagaaatgtcagccctggtaaatggctcaggggaacagggcctttcaggtgactcacagagcactgggcacagtgtgggacctggggaggagggggcccacagaggccagggacatctccaaacccctggcttcctctggaccaacagagtcatctgacctcaaagtaaaatctctttcttggcctgcaaaaccgtggccaac

SEQ ID NO: 469867 - DNA, 531 bp, Homo sapiens
aagttatcttaattttatttagaccttatcttacttttcactttctcaggtgttagtccaagctgcaccattttgtaaggcccccaccatttcacagaccctggtcagagtgaaacattccacaggggtttgggctgtgagaaacatctttcctaacaacctgatcacagccacaggaacatccttttttatttttatttttatttgttttgagatggagtttctctcttgtcacccaggctggagtgcaatggcacgatctcagctcattgcaacctccgcctcccaggttcaagcaaccctcctgcctcagtctcccaagtctctgggattacaggtgcctgccaccatagccggctaatttttgtacttttagtaaacatgggatttcaccatgttggccaagctggtctccaactcctgacctcagatggtccacctgcctcagccttcctaartgttgggattacaggtgtgagccacagcaccctgccaggaacatccttatcataccctgctgggcaaagcccc

SEQ ID NO: 469868 - DNA, 605 bp, Homo sapiens
tgccagcccacctctggttatctaagttctataatggagtccaaatgtrgctgaaaccttttcaaagctttgaatattttcgtaagtcatgccccacttatcaatgaagaataaatttccgagtgggagcagtggtccaaaactttaccatctctcatttacatacctttcactccctcaccccattccactttattctaaagtacaaatggaatgtgtctccttcctgcttaaaacctttcagtggctcctgtcacttaaagttcaggcttctctatatagttccaatccatctccatgctttttattattattgtcttcatacttagcattgcaaaactatatctatcatctatctatccacccatttgtctcttatattggatttctatatattttctaatttctgatattatgactatattatagatttaaatgacatatatttaaatgacatatatttaatgtcatatatttaaatgacagttattaaaatttatagtgaccactttctactgggcttaaaataaatcaatggaatatttcgaaaaagtatgtgcaagggaggaggggtggtacttgtatgtgtatatgtgcatgtatgt

SEQ ID NO: 469869 - DNA, 446 bp, Homo sapiens
ctccagggtagcctgtgcccaaggttcctgacatctctgtgctgcctgctccacactggccttcctagccacccatggagaaggactgggctgggttgcctcagatgagggccacacctatactttaaaaaggaggacccagacactatccctagaaggtgtcgccatcctggagaaggcctggggtgactatgcccagcactttctgttctgtggctccttttccactttctgagcctcttggaagtgggatcaggccaggaaaaacatgtgatgctatagcaagctgaaaccaaagacttgactttgggcctggccaagccgagaatcttggcagtgattgactrggaagcctgctgttttctatggcattttctgagtcccctaactctgggaagagggaaccagataagtcctaaaaatggatatgaatcagtagagcttct

SEQ ID NO: 469870 - DNA, 605 bp, Homo sapiens
gcagttgctctccacagggatcccccctttctccatgccatgcgaactggaaacccagtgcaatggattttctcactttgaccccagtgagggagggagatttttgataactgacaaagagcttttgttcaggtttgcaacaggatggatcagccagccccacctcatggccccatgcttcttccaggttcatcttccccttctgccccagaaaagcccccagccacagcctccttgcctccaagtcgccagcactccgccccctcctccgcctgcctctcagtctggaaaacagctttgcacgttaacctccasgggcattcactgggtttccagaggggtccccagccccacaggctgccaaaataggctctttacactccatagatgggagagaaaaatctgcttgttcggttgcaactgtcaagcaaaggacatgctgagctcagatagaaatagcagcagggtcagggcagggcaaggccccagcatttcattagctcggcccagctaagggtgattgaatgcacacagtggcccatgaatggggccatggagggcagccacacagtgcagcacagaaaaatcattctttggccgctgtc

SEQ ID NO: 469871 - DNA, 599 bp, Homo sapiens
gtctttgacaggctgttgtacacaagatgctgcagaaagcaactcttcataggagttttcagcctgcctgccctgtcatctgccattattcttgctcagctgtggtggattagagataacagccaaccaacactttttttcctaacacttacatactatcaaggtcacatgctggtggctactggaggcacgtcatcagctgcacagctaattacagacagtgcattctcatcatgaaggccatcggacatattaacggagaaggaggccctaaactgctatgcrtaaaagagaaagaacagagaaaaatgatctacaactttaagtatctttctctaaagaatatcagaccccaaagaaaattgctaaccctgggaaaataaatcctacatagtaagcagtaggaaggagagctatgacccctctttgcaactgcccagagctaccaataatgagatctccaaggcagcttcctaatcctttcaaggagtaggagaagggttcctctgtgcatattgtatgggctgagtgcaaggtgcccattatggcaaactttggtcctgtctatgtgctaaaaggtcagctagcaatgatttatg

SEQ ID NO: 469872 - DNA, 599 bp, Homo sapiens
gtctttgacaggctgttgtacacaagatgctgcagaaagcaactcttcataggagttttcagcctgcctgccctgtcatctgccattattcttgctcagctgtggtggattagagataacagccaaccaacactttttttcctaacacttacatactatcaaggtcacatgctggtggctactggaggcacgtcatcagctgcacagctaattacagacagtgcattctcatcatgaaggccatcggacatattaacggagaaggaggccctaaactgctatgcataaaagagaaagaacagagaaaaatgatctacaactttaagtatcttyctctaaagaatatcagaccccaaagaaaattgctaaccctgggaaaataaatcctacatagtaagcagtaggaaggagagctatgacccctctttgcaactgcccagagctaccaataatgagatctccaaggcagcttcctaatcctttcaaggagtaggagaagggttcctctgtgcatattgtatgggctgagtgcaaggtgcccattatggcaaactttggtcctgtctatgtgctaaaaggtcagctagcaatgatttatg

SEQ ID NO: 469873 - DNA, 517 bp, Homo sapiens
acccatcagatctcatgagacttactcactatcacaagaacagcacaggaaagaccagcccccatgattcagttacttccccctgggtccctcccacaacacgtgggaattctgggagaaacaattcaagttgagatttgggtggggacacagccaaaccatatcaacctccaactacctccctgacctcaaatggctttgaagaagcaaaaaggagctattcttgataagaaattgaggcatccaatgcattgccagagcctgtttatgtcattggaagcataggtgggtgaagttggggccttggttttcttttctttaggatggggacaataacaccccttctcccaggtttgcrgtgaggatgcagcgaggtaagctcacaggcttggtctcgaggttaccttgtaggtacacttacctcatagccccaactagtgagctcatagccccaactggcctggcccagaggaggtactcagcatggctactgaatttttaataacatattctcaca

SEQ ID NO: 469874 - DNA, 562 bp, Homo sapiens
ctggccctgtaggtaaaaacagatctgggcaaaccggtccagtgtggagacagggaatgagataaactccacctgaaaaatgggacgaatcacaccagatacattcatatgaatactgtcactgcctctattttgctcaattgggggaaaaattaattttaacctgaaatttaaggcaaacagtacccaatacaataacaagtttctccaacagaacaaggcgacccacaggtacagccatgtagcccagtggtatacagattcctgggccccaggcccaggaggttaggattaagtctctttcagagccctggtatctgtattttcaacaagccccaatcccccacccccaccgggtgattctgatgcaggagggctgcagccctgccttaacactgatccagtttctttaaagactcaacagacctggctgagctaaataagctgctgagttaattaacgaaacagccaatctttattgatttcctcccacgtgcaggactctgtgctgrgtcttagcaagagaggcaattgtttcccatcctccctcactttctgcccc

SEQ ID NO: 469875 - DNA, 583 bp, Homo sapiens
atgtggcttgtttgtttttttctgtcttcatcttcaatgtgcctggattcttcctgctatcatgcttttaaccaacctacattcaggtctttcattaccttcctgataaagtgctatttataagttttcagtactctttctactttgaagccctgacttcttttcccccaaccactttattctctctctacagtcactggttttttgtttttgtttttgtttcgtttgtttgttttttttttgagatggagtctcactgtgttgcccaagctggtcttaaactcctgggctcaagccctcctcccacctcagcctcccgagtagctgggattacagacgtgaacaaccacactggctcttctctgtctacattcagcaccaccatagattattttttgttttttggggtttkgttttgttttgttttgtttgagacagagtctccctctgttgcccaggccggagtacagtgtacagtggcgcgatattggctcactgcaacgtctgcctcctgggcttaaccgattctcattcctcagcctccggagtggctgggaatgcaggcgtgcaccaccacacccgg

SEQ ID NO: 469876 - DNA, 531 bp, Homo sapiens
cagaacaggcaaccgagaaggtagagcrgctggtgtggagacagtaaaaaaaaccatgagacagcagaagtatttggaaagagaagactcagggtgggggtcatgagcaggtccagaccagcatagtcagagttgatgaactggagaagacagtgagctccctgtccctggtatgtaaacaactcctcactgtgggggtatggttggattaactgagtgtgtggttggaccaagggcaatgaagtctcctttcatgctgagtgtctgtgtgtctctgattcttagaaagacataggagggcttaccatggagggagataattatggaccgaatgtgctgctttcaacctctgccaaattcatatgctgaaggcttaacccacaatgtggctgtatttggagatgaggccgctaaggaagtaattaaggtgaaatgagctcagaagggtgggaccctgatctgataatgttagtgcccttataagaagagacaccagggagtttgccctcaatctccctcacagcaagaagg

SEQ ID NO: 469877 - DNA, 531 bp, Homo sapiens
cagaacaggcaaccgagaaggtagagcagctggtgtggagacagtaaaaaaaaccatgagacagcagaagtatttggaaagagaagactcagggtggrggtcatgagcaggtccagaccagcatagtcagagttgatgaactggagaagacagtgagctccctgtccctggtatgtaaacaactcctcactgtgggggtatggttggattaactgagtgtgtggttggaccaagggcaatgaagtctcctttcatgctgagtgtctgtgtgtctctgattcttagaaagacataggagggcttaccatggagggagataattatggaccgaatgtgctgctttcaacctctgccaaattcatatgctgaaggcttaacccacaatgtggctgtatttggagatgaggccgctaaggaagtaattaaggtgaaatgagctcagaagggtgggaccctgatctgataatgttagtgcccttataagaagagacaccagggagtttgccctcaatctccctcacagcaagaagg

SEQ ID NO: 469878 - DNA, 531 bp, Homo sapiens
cagaacaggcaaccgagaaggtagagcagctggtgtggagacagtaaaaaaaaccatgagacagcagaagtatttggaaagagaagactcagggtgggggtcatgagcaggtccagaccagcayagtcagagttgatgaactggagaagacagtgagctccctgtccctggtatgtaaacaactcctcactgtgggggtatggttggattaactgagtgtgtggttggaccaagggcaatgaagtctcctttcatgctgagtgtctgtgtgtctctgattcttagaaagacataggagggcttaccatggagggagataattatggaccgaatgtgctgctttcaacctctgccaaattcatatgctgaaggcttaacccacaatgtggctgtatttggagatgaggccgctaaggaagtaattaaggtgaaatgagctcagaagggtgggaccctgatctgataatgttagtgcccttataagaagagacaccagggagtttgccctcaatctccctcacagcaagaagg

SEQ ID NO: 469879 - DNA, 531 bp, Homo sapiens
cagaacaggcaaccgagaaggtagagcagctggtgtggagacagtaaaaaaaaccatgagacagcagaagtatttggaaagagaagactcagggtgggggtcatgagcaggtccagaccagcatagtcagagttgatgaactggagaagacagtgagctccctgtccctggtatgtaaacaactcctcactgtgggggtatggttggattaactgagtgtgtggttggaccaagggcaatgaagtctcctttcatgctgagtgtctgtgtgtctctgattcttagaaagacataggagggyttaccatggagggagataattatggaccgaatgtgctgctttcaacctctgccaaattcatatgctgaaggcttaacccacaatgtggctgtatttggagatgaggccgctaaggaagtaattaaggtgaaatgagctcagaagggtgggaccctgatctgataatgttagtgcccttataagaagagacaccagggagtttgccctcaatctccctcacagcaagaagg

SEQ ID NO: 469880 - DNA, 333 bp, Homo sapiens
tgtggcctagagtgagtccgacctctctgggcctcagcttcctccgggatgaatgcagtcacggaacgcgccaatgcaggaggcccccaggacatcctgagcgctcgggagacgccaggcgcggcagcgggcacgggtagcggaaaggggcgcgaccccgcggaatcctccggcagggcagggcctttgggtggctccgggtgtccagaggaaggggtgggctcggggacgcggagggaaactggggacgccgagggaaactgaggtcgcggaggacgccggccgttggcarctcgcttgcgcctgccggccccgcgtgggccgcccactcgg

SEQ ID NO: 469881 - DNA, 329 bp, Homo sapiens
gatttcagttgagcacaaaaccatccttgtactagctctttgctagtgttattattctgctgtagaaagtatccttgaactggaaacagtccacgatggagtatcgagtcattcaacactatcaattcctgggtgactttttgaaaaagtagtatctcttgttgcaagaaatgctgcatctgtgagtccatgtctctcactggaattggatggaagtggtgaatttcagccaaagtggccaaagaaatcctgttcctgtgattctgacatcatcagcctctgcacstttatattcccttctgccacttgttgtttgctctccgtgactt

SEQ ID NO: 469882 - DNA, 329 bp, Homo sapiens
gatttcagttgagcacaaaaccatccttgtactagctctttgctagtgttattattctgctgtagaaagtatccttgaactggaaacagtccacgatggagtatcgagtcattcaacactatcaattcctgggtgactttttgaaaaagtagtatctcttgttgcaagaaatgctgcatctgtgagtccatgtctctcactggaattggatggaagtggtgaatttcagccaaagtggccaaagaaatcctgttcctgtgattctgacatcatcagcctctgcacctttatmttcccttctgccacttgttgtttgctctccgtgactt

SEQ ID NO: 469883 - DNA, 573 bp, Homo sapiens
gccgcatgctgccctggcttcttccatgttgtgctggtcactacccaccaagggggttcagatgcaggcacgatgcaggacggttgtctctgaacctgcgtcttggttatcatggagctggactgggcctggtgacagggcccttatggggttgtcctgggtggtcacgggggtgatgagaaaagatgcagaatggaattgctgcgaggatgaatgagacgaccgtcagcacagaacaggcacccggtgagtgttcagggattcccctcagtagctgcccagaggccaaaaccacccacctcatagtgactgtccccaagccaggaggaagagaaaagagcaggtcccactcacctgagtctgatcagtgagctgtgttgagatgtgcctctcatctagaaaacggtccttcacacagagccactcacgacactgctgtgtgtctctaactgctccacaacacagaggcgatgggractcagcaacagtgacactgtggggtgacacaacccaccacaatggaagcctgcttgggtcaacagggcccagagtcagtgtcctctatcccctgaa

SEQ ID NO: 469884 - DNA, 388 bp, Homo sapiens
agaaggcttctgtgaccaaatgtgtggagagttttccccaccaacaagcaagcaatcattcctgctgatggcacaattcaattctcacaccctatcttcagattacatcagatttaatttataaattaaactttatcatagatatgtatgtataggaaaaaacagtttgtgattcagtactattcatggtttcttgcatccactgggggtcttggaatgtatctcccacaattaagggggaactactgcacttattttgttataacacaacacagcctctctagctcttcagttcaaactgttcagtttaggataaaacaccctatcaccagaagccagsaaaacataggaatcagaccagaaacaggaatccttgcaaaaactttcc

SEQ ID NO: 469885 - DNA, 602 bp, Homo sapiens
gctgttggtaaactagcaattcataggctgttacttaaatcttagagccccaattgccaacaggtgaaagtcatacaatataattacgtaaacattactagamatgccaaaatatatgcagacccacattatgtttgagtttaaatgatggctcttaaaaaagcttgctcttgcttgtgactctcccaagcctccctgaacaaactcactcctcttaaattccactgttacttgaacctcatatggcatgcctgggcaaatttgatgacttggatattgttttagaagccaggcctactgccaagtctgctgtgtctactcccctgacccaccaggacagctttacacaacaccttccttatttatgttactgctgtgagcaaactactgcttactatcaaatgaggctcaacctactcaggtttcctatcttttaagagcaatgtgactgccttcactatattatggcttcttcaacctcacctcttatttaaaacaaaacattaccatactgaattatctactactcaactagcaataatgagagggaaatcagtgatacaactcattaacttctcttaaaaggtccccattttatatat

SEQ ID NO: 469886 - DNA, 543 bp, Homo sapiens
cctgccacttctcctcccacacctgggcactaccatgttctctaccgagggtgtggagaaactcaggtaggctggcatggggagacgtactgcctggttggtggctaccgggtccatggggatgctcctttggccaccccaacaaaggctgaagcagagaagccagcccccaggcgtgctcccaagagacgtcaagctacgatagagtcagataaagacctgggttgctctagccccaaaattcggcgcttggagcatcgtggcaggagactgaccccacagaagcttgctggctgagccatttgggagaaaggacaaatgtttagctgtctaagacagctaatgcctcttctgcggtgacctcycctgcccaccactgcagatagagcctgagtcattctgcctatgccttcctcatccagaagcccccttccatgctaactacccatggccaaggagcctcagaaactgtggtttaaaatgagaggttgctttgaacatcccaaggctgaagacggcctggaagaaaacctgatgttcctc

SEQ ID NO: 469887 - DNA, 597 bp, Homo sapiens
tattctttctgccaatatcagtttctccttttcgaagttctatatctgaattgcggagtttcaaaatacctgcacaatcaatactaaagagaaaaatacaaaaatttaatttgtttattgataatcatggttataaacaactcaactacatagaaattgttaatttgtcagaaaaaaactacccaaaattaggtcaaaaaagaaagatatgtatgattgctattcactgctaaactgaagtttaggcattaaaaatatttttgtacgataaaagtgcaaaacttagcagattgtctgcaaagttaataattcctcttcattccagtacttgcatgcctttcctcctgccattaagacgtagagtatctatgcctgctctccttgagaactggcctatgacttgctttgacaaatggagtgtggccaagtgacaatatgcaagttatgagcctagcactgaagaaggctggtaacttccacttttgctattttggagtcctgagtaagaagtccaactagcatggtgcagagaaaggcccagacaatccctaaccactmcagccacccagccaccctagccgttttggatgttcaacc

SEQ ID NO: 469888 - DNA, 535 bp, Homo sapiens
aagtcttcagtatatatttaaaaagaatagaatttttctcttgcagaggtgtgatatcactcatacaactgtaatactctgtcttcaattaaaataaaagccccgtccaaaccattttggatgctacatatattataatgtaattttattctggaaggtgtaatataactaaaatggaaagcaaaataagagaatagacaatacagtgaaataagattgcatccgtctatccatcaacccaacatacatcgttttcacatcttcttcttgtcccgccctgkgctgactgcttaagacacaaacattaatcctatatatgattcctcaaagagctcataagatcataagtgaggggcaaaaatactgtacccctagtataatacgtgaaaaatacgtgatgaatagaaacatatgtagacatatgttgaaatgtaggtgactagagtctgagctgtaagcagaaagcttgaaattggaaacaacattgtattgattgtaaggaagtgctccttggtttgagacgtacctagatttt

SEQ ID NO: 469889 - DNA, 636 bp, Homo sapiens
tgaaccattctgcatgaaaggtaacattattatttccattctatggatgtgagctcagatagatgaaattactcccatgccaataggattagaaatgaaagttagggatcctcactccacgtatttggcatttccctccacatcccattatgcttggtgggctttctctttgctttccttatctccctgaggtctctgaggtcatttcatacgtatcatttatctggctctctcttatgttgttgcatttcccaaaatgtattgcatagagtgttccctgaaaaagaaactcatgatcaagtccactagggaatgctgcctaatacattcattattttcataccaatgatgcatgcatattagcatagtacaagcactgagaagtcctagagtaaagaaagttctttgaataagttcaattaagcattttccaactgtatatgctgcacagacacttttgtactgtcttctatgatcattgttcaaatttcacagaactargttctaatttggtattctacctagacatcatctttcactcattccctgaataggacataggctattttccatgattttaatttggtatttttcgaacacttccactaatcaggttgggtagattatctccaaggg

SEQ ID NO: 469890 - DNA, 460 bp, Homo sapiens
catgaactaacctaaaatgaatagaaccatggtcaggtttaggagtttttcacagctttaaaagaaattttaacatgacatgacttcttgaagaaataagaaatggctgtcaggaaacattagatatgaaagtaatttgatagatgcattgcatgtataatagaaaataccttcattatcaactatgaatgaaatagaaataaaatctattgctaaaagctcatcaatttttggccagrcctggtagctcactcctatagttccagtgtttgggaggccaaggcaggaggaccacttgaggccaggaattctagaccagccaggacaacatagtgagaccttgtctctaccaaaaaattttttaaaaattagccaggtgtggtggcatgtgcttttagtcctacctatctggggggctgaggttgggaggatcacttgaatccaggagttggagactgca

SEQ ID NO: 469891 - DNA, 628 bp, Homo sapiens
taacctaaaaatatctgcagacacatccaagaataatttattgttagaaaatgtctttaatttatccttgatttggtaggttattttgattttttaaattgacaagtaataattgtgcatattcatggggtacatagtgatatatcagtacatataatatacagtgaccggatcagagtaattagcatatcgatcatctcaaacatttctcatctctgtgttggaaccagaaataattttcaacgaaatatctgtgcattcgatggccccgtcaagttgacatataaaattaactatcacaatttgcattttagcagtttaagcattgttttctataataatctaatcttttttctgatgagtttgttcagtgacttcagccatatttttctgttttttttttcctgtagatctcagagmccagagtcccctcttcatgcaagtgcgcacacacacacacacacccacaattttggactatcattgagatagatctgcacaccacttttactccttttagctctgacttatttcaggcctgaaagtaaatatagttcccttcccttggtatctgttagaacagcagtttccaaagtgtgttcagagcatgaaaggttccgtggtaggc

SEQ ID NO: 469892 - DNA, 628 bp, Homo sapiens
taacctaaaaatatctgcagacacatccaagaataatttattgttagaaaatgtctttaatttatccttgatttggtaggttattttgattttttaaattgacaagtaataattgtgcatattcatggggtacatagtgatatatcagtacatataatatacagtgaccggatcagagtaattagcatatcgatcatctcaaacatttctcatctctgtgttggaaccagaaataattttcaacgaaatatctgtgcattcgatggccccgtcaagttgacatataaaattaactatcacaatttgcattttagcagtttaagcattgttttctataataatctaatcttttttctgatgagtttgttcagtgacttcagccatatttttctgttttttttttcctgtagatctcagagaccagagtcccctcttcatgcaagtgcgcacacacacacacacmcccacaattttggactatcattgagatagatctgcacaccacttttactccttttagctctgacttatttcaggcctgaaagtaaatatagttcccttcccttggtatctgttagaacagcagtttccaaagtgtgttcagagcatgaaaggttccgtggtaggc

SEQ ID NO: 469893 - DNA, 473 bp, Homo sapiens
aattatctgaacatgagccaaaattggtggatgaatcacatttaaatcatcgggtgctttgctttcaccaggtaaaaagttccaatttcttcttattacattaaatcttaagaacctatttcactcttatccacaaaaaggaactcatttcccctagaaaggcaggctaatgaggtctgcttaatttatagctgggtccatttatgtggtggtttcattaacaaagacatctatttaattcaatagawtcctacacgtggtacacatagaagacactactacccccattcactccccatccattcattaccctaatgcttctgacacacacaaacaaaccttgttttacaaattgcttagagatttgattaagttgcatcatgcattttgttgtaacaagaaaggtgatttaaaatcattagtcctaaaatttagtcctgtgtgtgctttgaagtcaaggggaacaatttgtc

SEQ ID NO: 469894 - DNA, 552 bp, Homo sapiens
acttagagctttctgatgtggctatggaatagactggtgtccaatagaactttctgtgatgatggaaatgttttagatctgcactrttcagcccagtagccactatatgtggctatttaaacttttaattaaaattaaatacaattttaattcccaagtcacactaaccacatttcatgtgcttggtagacacatatggtagtggcttccatattggataattctggaatcaaaagagtcttctgtatgggtgatctttatagctggtatttgggaaatagttttcaacttttctgctaactctgatagatttatcaaccagaagggtctgcttgaagcattgtgtgggaaggacttgcaatcatatttagatacactgagagagaatgttgtggtagatggtaatctgagtgtgagaatgaggtacagtgctatggtttaattatttaccttttctcattttcaacttttcctcacatcagagagaccgtgtgtgttgagcaaacctttcaaaacctcgcttcccgtgtgatcctgcttcccatccgtttg

SEQ ID NO: 469895 - DNA, 528 bp, Homo sapiens
tcagatgaatattatagtcttcataaataaatatatatagtcttcataaataaatatagtcttctaaataaatatttagaaagtaaatattttgggggtttgaaactgtctttgttaaccccaatagagatattcatccatccagcagccagagaaatcctcttagagtataagttatctgctcaaattttccaagattcctcaacagcccataagactctatatttgagtacatactctggttcttggctccctctctgacatcacttttttctactctctcccttatttactgtattccagccacattgtccaccttgctgtcagccagatactcaattcaatttattctctcacagctctgcaggccgaaagcctgaaatccagacaccggcagagccatcctccttttagttactctagggacactcctttcttgcctctttcagtttctgatggttcctgatrttcctgggcttgtgggagcatcactccaatctctgcttctgtctttatatcaccttcttc

SEQ ID NO: 469896 - DNA, 545 bp, Homo sapiens
ttgtgaattacaagaacaagagagatatacacaagctcaatgtgactcctcactacaccttagtttcttagtcgaacttggtaggtgtgatttatatccaaaatacagtcagggattgcattttcaatatttaattctatgaacttccagaatagtttactagcaattgccagaaataaacttatatagcttgcccaatgagctgtttcaggaatttttaatgggaaatgytatctcccgtgaatttaactgagtcactgatatatagtttaataatatcttctaaggattccaactttaaagcaggaagctattccttaaaaagaatttgttttgctgtactttattgtgtattcaaagattttaacaggaattttagcaaataaaattaattatatgaatcaattaatttatagtagctattgtacagttatgctaaaatatacatttagaactaattttggtcattcattactgtttagtaaggttttaaaatttagtatctatctaatgatattgcaaatccaaaaccaacatggttcatt

SEQ ID NO: 469897 - DNA, 545 bp, Homo sapiens
ttgtgaattacaagaacaagagagatatacacaagctcaatgtgactcctcactacaccttagtttcttagtcgaacttggtaggtgtgatttatatccaaaatacagtcagggattgcattttcaatatttaattctatgaacttccagaatagtttactagcaattgccagaaataaacttatatagcttgcccaatgagctgtttcaggaatttttaatgggaaatgttatctcccgtgaatttaactgagtcactgatatatagtttaataatatcttctaaggattccaactttaaagcaggaagctattccttaaaaagaatttgttttgctgtactttattgtgtattcaaagattttaacaggaattttagcaaataaaattaattatatgaatcaattaatttatrgtagctattgtacagttatgctaaaatatacatttagaactaattttggtcattcattactgtttagtaaggttttaaaatttagtatctatctaatgatattgcaaatccaaaaccaacatggttcatt

SEQ ID NO: 469898 - DNA, 632 bp, Homo sapiens
tttaatctttacaacaaccctatgaagtaggaattgttactatccccacttagaagtgaggaaactgaggcaaggaacagttaaatacagtcagtgagttacggataaaacatttactcttatgttgtccaactcctaagcatgtgctgctaacaactgcaccaacaaaagtgttaaataaagctgagtatattttgaagacatggcaatatataaagtttaaagataaagtcaaaatgtatctctaatattttcatagcattaaaagcaataaactatacttaactaaaaacttttgataggaatcagtcttcagagatattttaatatttgaatgatccaaaagcaccctttcaaaattacattatattttartttatacaagacaatgcaaagatgggcctttaaaacatgtatttttttacaatatacactaataaaacgttaagttaaaaactgatctttttaacttaaaggttaatcagttttaaagatttattttgtgctaacagtagataaagtgtaaactcatttaaataaattttgagaaaacagaaagtaaatggttaattgctgatgatgtatttgcagactgcaaaaaaaaaagaaacaacaaaaaggaaattatgact

SEQ ID NO: 469899 - DNA, 601 bp, Homo sapiens
aacattttaacaactggttagggttgtaccagtgtaaatattctgattagcatccctgtgcataccgcatattaacatatagttagtaatcaaaaacatggtatttaatgactacaaagtctgacctgtagatattttatgtattgcatctttatattggtctctatcactttttccctttgctaaatcaatatggtcattatccattaaaaaaactctaccatatctcaataaaatttatgtaaattcctcttgatgaatcatctagtcccttcctcaaaatttcaccatatcatagcatctattacattatgtttaaatcatttcctgaaccatctatttgtcctaaaatgttatatgttctgcaagaacagggactgtgtcttggtcatgttttgtattattggtatttgttgttcagtaagcatttactgaaataractgtagtaatattatttctcaaattccctagatgtcttatttattaggctatgttaatatttacaacttcaaagagttttttaaaaaataaagagcttcatgaattaccatattactttcattttccctctgcctatccttttaggttagcctaattaaa

SEQ ID NO: 469900 - DNA, 596 bp, Homo sapiens
gaatacactcaattttattatgacaaaagatgtgctgtgacaccacttctacctttctcagaccctagttctctcaacttcctgggatatatgggttatggcagtcaggttgtgaagatttttgttaaaagaacatttcaacaaagaccttgattctacaggtctctctcactattgcttctatagtcaccacagaaggaataacaaggctaatactgtttggataaatgtgtatatggaacagattaatctgaatttggcaaaagttcagaggctatgaagaacaagatttggggagaaaatctgttttgaaagctaaattaacctattttgtttattttgcaactataaatagtagtattaatttttttcctggacttttatggttttatttgctctggatattttatttactaaaaaggartctttccagatggtctcataaattatcaatatgttccagaaatttcaacatatcagaaattaaaaatatatctcctaagtataaattagttcaaccattgtgaaagacagtgtggcaattccttaaagaccaagaggcagaaataccatttgacccagcaatcccatcactg

SEQ ID NO: 469901 - DNA, 355 bp, Homo sapiens
cttggtttaccttcctagcacccacttcttattatcatattcataagtgtggcctmtaatcagtcttcttaagtaaagttaacaagtatatgtgtgcactctcttgaaattgttttgcttagcctaagaagctgtcatggggttgagaaggctgccgctttaaccagatttcatctctgtgtgtcactgctcatgtcaaagtaaaaatgtgctcagacataagagttgtcctgctttcatcaagagcgccagcctgcctgagcctcgttccacttggttaagcttgttatttaaattgttaaaattgagacatcggcagtaaatttcagagaagatataacaattattagataca

SEQ ID NO: 469902 - DNA, 466 bp, Homo sapiens
gtgcaggggaggtgatactagtcacataacyagctcatttccttgtctggtgccagcgactgtgctgcatactatacacatagtattttgtttaaacctcacaatcaaccttgtgaagccatattatcaacctcattttacatttaagaaaatcgaggcttagagaggttaaataagcagacaagtctgtagcagagctaggatgcccaaaggagggctggcgctggctgtgcccgcttctgtgactgaatgagctttggcaaccatgtagacttttcttttctcatggcccctggaatcctggtcatggataatgtttgggattatattttggtatacgtgtatacgagcctaccccaaggggatatttgggctttttttttttttttttttttttttgaggctgtttgtgtcaccagtacattggggacttttctggagttgctacagggttctgctgttctgg

SEQ ID NO: 469903 - DNA, 466 bp, Homo sapiens
gtgcaggggaggtgatactagtcacataactagytcatttccttgtctggtgccagcgactgtgctgcatactatacacatagtattttgtttaaacctcacaatcaaccttgtgaagccatattatcaacctcattttacatttaagaaaatcgaggcttagagaggttaaataagcagacaagtctgtagcagagctaggatgcccaaaggagggctggcgctggctgtgcccgcttctgtgactgaatgagctttggcaaccatgtagacttttcttttctcatggcccctggaatcctggtcatggataatgtttgggattatattttggtatacgtgtatacgagcctaccccaaggggatatttgggctttttttttttttttttttttttttgaggctgtttgtgtcaccagtacattggggacttttctggagttgctacagggttctgctgttctgg

SEQ ID NO: 469904 - DNA, 475 bp, Homo sapiens
tgtacaacatcggatattttcagtgacttttgtcaaaattgagataccgtccttgactttaaatttcctaagttcctaagtagagactaaaatctttacagatgtattaaaacaatacacatatcacaagccctaccatttcctgagtttggccagattgtgggaaaatgttttgagtctacttgagtcatcaggaaagtggcagatgagcttcctgtgggcaagaataagtcaatgcactcagggaaaaatactcttaaaatcaggacacatggttgatgaggttgacaatagaaggaattatttaagattgaggccttgttggaaaatccaggargcatccttgctggactcgcaggctgagggttctgagttattggttatgactgaatttataagagtgggaatgggctgtggaggctgattcctgaccggcctgtgggctgctgccttggcaagggtcatctttgtgcta

SEQ ID NO: 469905 - DNA, 568 bp, Homo sapiens
cttgaaccagggaggcagaggttgcagtgagccaagattgcaacactgctctcaagtctggatgatacagccagaccttgtgataaagaaaaaaaagaaagaaagtgtgtttctgttgtggtttcctttcactccaaatatttccacagctttgcccatccacaggtggtctatcacaaacttaattctcattgtcatgcttattaactgtwgaaacttgatgttagaagttactagagactctgttccatttatgagcaatgcccctgccattccagatctctgactagggttgcagaggtgctcccacctgcccgccaggactacaactgtttgacactgccgtgttctggattttgtttctctaagatcaacacttgacctctgagctaggaggagtccttcataacaataatattaatatactccaacttgaaacattcccatcagattgtggttgatatgttaccctcttaagctctcaatcttcctatttatgtcacctaccaattctcattcttatttcactcagtaagcttttgtattataaacataatgtcttccccta

SEQ ID NO: 469906 - DNA, 529 bp, Homo sapiens
ggctgactctgattttaacacatacacacatatttagctacgtagacacaaacacaaatatttctcttaataatagtccttggaggtaatctttaaaaagggaagatgatggtgattccagcacagaagcttgtgaaggtgctttccatatcatttaaacaagaccacctttatgccaaaggagaatttcacagtagcagtaagaatttggggaatgggctgggtgcagtgrctcatgcctgtaatcccagcactttgggaggccaaggcgggcggatcacgaggtcaggagtttgagatcaccctggccaatatggtgaaaccccatctctactaaaaatacaaaaattagccagaagtggtggcacgtgcctgtagtcccagctacatgggaggctgaggcaggagaatcagagaatcgcttcatccttgaggcagaggttgcagtgagccgagattgcgccattgcactccagcccgggcgacagagcgagactctgtctcaaaaaaaaaaaaaaaaaaaaataga

SEQ ID NO: 469907 - DNA, 628 bp, Homo sapiens
tgctaagccctccacaaatattggctacataaattcatcattgaagaaagtgaggtagttgagactgtaccataaatgatttccccaaaataatttagaaactacttagccagtctgtcacccaataaacacaatgatcccaactgggtatttgtttcttcacaaatttcactttttaaatgggtttataaaagtgagcaactgtttggtcattctggtgtcaaacccattcattcagtcagaygtattgtttgattttattgaatcagacaatagaattcaaaactattgttctagaaacccaaatgaattttgctcactctaaacaaccagttaaaaaaggaaataattctttcttatagtgactatgtagatatgtctgacttatttgcttttccatgaggtgattcaaaattttcattttctgtacatacacatctagataatagtaaatagtctgagaaaaagaaaaaatatttaatcatttttttcttacatgatactaagctaacataaccattttttaattctcaaagataagctggatactttgatattatctagggaaaacctaacttaattgactcaatttgttgaatttcgttgggggcggggattgagctgtaga

SEQ ID NO: 469908 - DNA, 426 bp, Homo sapiens
ttgttgtaatgatatgcctctggcttcattttatcccatactaacctccccagtaaacagttttctgtttctctcttgaaaaagttttctgttagttttctctcttgaaaaagttttctctcttgaaaaagtcctttaattctgccatgtggtcaggttgagagttctttgaatgcctgagttttgtttcactttcaattataaattccacctttaaattatttctttcttytcatgttttgctatatgcagttaaaagtactcatgcatctccttcaatattttgcttagaaatttcttctgccagatatcctagtttaccactcttaaattctaccttctataaagctgtaggacagaaataaaattctgccaaattatttaccgttttataccacaaatggctttaacttcagtttccaatag

SEQ ID NO: 469909 - DNA, 621 bp, Homo sapiens
tgagaacaaaaccaagtccctgcmcacaaagagcatattgtctagtgactgagagtaaaaataaacacacaatataataccaggttgtgatgcacactaagaagaaatagagaacaggtatggagattgccagtaatggtgatggagggggcaatttttagatatgatagttagggaatgcctaagaaggtaaaattgagtgaagttataactagatactatcttatttggcccaatccactcaaacttttgtgtgtatgaatatagattatttgagaataatctgcattaaggatgttcattccctgcgaggttatggtaacagtgggtgatgataactgagatattaaatacaaagtaaatcgtagaaaaataagaaggatctttattttagattatagattattatataaacagcccaattttaagaatttgtcatcaggtattcaccctttcattaaaaagctttttaaaaaatgatctatcatatgctatacccgcatgaattagcagtaaacaaaatgcacattggttcttactctatggaactcaaattctagctgggaattctattcacatagatgagatagagccatcaaacactcttgacctagtaccatc

SEQ ID NO: 469910 - DNA, 621 bp, Homo sapiens
tgagaacaaaaccaagtccctgcacacaaagagcatattgtctagtgactgagagtaaaaataaacacacaatataataccaggttgtgatgcacactaagaagaaatagagaacaggtatggagatwgccagtaatggtgatggagggggcaatttttagatatgatagttagggaatgcctaagaaggtaaaattgagtgaagttataactagatactatcttatttggcccaatccactcaaacttttgtgtgtatgaatatagattatttgagaataatctgcattaaggatgttcattccctgcgaggttatggtaacagtgggtgatgataactgagatattaaatacaaagtaaatcgtagaaaaataagaaggatctttattttagattatagattattatataaacagcccaattttaagaatttgtcatcaggtattcaccctttcattaaaaagctttttaaaaaatgatctatcatatgctatacccgcatgaattagcagtaaacaaaatgcacattggttcttactctatggaactcaaattctagctgggaattctattcacatagatgagatagagccatcaaacactcttgacctagtaccatc

SEQ ID NO: 469911 - DNA, 621 bp, Homo sapiens
tgagaacaaaaccaagtccctgcacacaaagagcatattgtctagtgactgagagtaaaaataaacacacaatataataccaggttgtgatgcacactaagaagaaatagagaacaggtatggagattgccagtaatggtgatggagggggcaatttttagatatgatagttagggaatgcctaagaaggtaaaattgagtgaagttataactagatactatcttatttggcccaatccactcaaacttttgtgtgtatgaatatagattatttgagaataatctgcattaaggatgttcattccctgcgaggttatggtaacagtgggtgatgataactgagatattaaatacaaagtaaatcgtagaaaaataagaaggatctttattttagattatagattattatataaacagcccaattttaagaatttgtcatcaggtattcaccctttcattaaaaagctttttaaaaaatgatctatcatatgctatacccgcatgaattagcagtaaacaaaatgcacattggttcttactctayggaactcaaattctagctgggaattctattcacatagatgagatagagccatcaaacactcttgacctagtaccatc

SEQ ID NO: 469912 - DNA, 496 bp, Homo sapiens
cggaaacattgttgattttaatcttctaaggtggttccaatgcatccgaggttggtaatcattggtttggagagaggcaagacagaaaaaagactatttagaagctgttgtagaggatatttgggtgaaacaacagaattcaactagctcaagtaaaggagtactcgtgctacaaaaggcaatatcataaacataggaaacacagtaacgctgtacgaagcctcacaggaactggggctaagaagccactaaaaaccaagaatcctcttctctctctcagtggctgtataattcacttctttgattcttcctgtctcttatcctgaaccagctttcttttcttgcatgctgtcatctccagggccatgttgccttgtcarttctcatgtcagcaggcaaagactggattggttgggctgatttccttagtttgccactgatctcatcagttatagccagagtgtctcacattcactttgcaggagctctgggcaaa

SEQ ID NO: 469913 - DNA, 496 bp, Homo sapiens
cggaaacattgttgattttaatcttctaaggtggttccaatgcatccgaggttggtaatcattggtttggagagaggcaagacagaaaaaagactatttagaagctgttgtagaggatatttgggtgaaacaacagaattcaactagctcaagtaaaggagtactcgtgctacaaaaggcaatatcataaacataggaaacacagtaacgctgtacgaagcctcacaggaactggggctaagaagccactaaaaaccaagaatcctcttctctctctcagtggctgtataattcacttctttgattcttcctgtctcttatcctgaaccagctttcttttcttgcatgctgtcatctccagggccatgttgccttgtcagttctcatgtcagcrggcaaagactggattggttgggctgatttccttagtttgccactgatctcatcagttatagccagagtgtctcacattcactttgcaggagctctgggcaaa

SEQ ID NO: 469914 - DNA, 616 bp, Homo sapiens
gaacaacttccctcttcaagatttatgataaaggggagaaaaagaaatamcctacatattcaattgtcacctataggacaatatatttctatgggaaagaaatagcttacatagtaaaaaattatattagaaattttaaatgagaaataatgcttttataatagaagaaataatgctttaggacaaaattaaagtaaagaatgttaacatcagaaaaaacatcctaactattagcgaggtaggcactggaagaggtcactgtaagaaattgggtattaaagacattgctgaatttttgctttgaaatctttaagaacaaaatgtaaatatcttccttcaattgttatatttcttaaccccttggaagttcctacgtaattctttaaaattctacatgttttaggcaacttcataaatgatgaaatagtgaaagtaaaattaaaatcagtgtagttcagatttttcaaaattcaaaacaatttctaaatattagaagttaccttaagaaaaaaggttcatttctaatgaggtgaaaaagtagcacaaaatggagtcagaggtgagcttcctccaactcaggagaacgtcggcaattaagcgataacttgaaacacgt

SEQ ID NO: 469915 - DNA, 616 bp, Homo sapiens
gaacaacttccctcttcaagatttatgataaaggggagaaaaagaaataacctacatattcaattgtcacctataggacaatatatttctatgggaaagaaatagcttacatagtaaaaaattatattagaaattttaaatgagaaataatgcttttataatagaagaaataatgctttaggacaaaattaaagtaaagaatgttaacatcagaaaaaacatcctaactattagcgaggtaggcacyggaagaggtcactgtaagaaattgggtattaaagacattgctgaatttttgctttgaaatctttaagaacaaaatgtaaatatcttccttcaattgttatatttcttaaccccttggaagttcctacgtaattctttaaaattctacatgttttaggcaacttcataaatgatgaaatagtgaaagtaaaattaaaatcagtgtagttcagatttttcaaaattcaaaacaatttctaaatattagaagttaccttaagaaaaaaggttcatttctaatgaggtgaaaaagtagcacaaaatggagtcagaggtgagcttcctccaactcaggagaacgtcggcaattaagcgataacttgaaacacgt

SEQ ID NO: 469916 - DNA, 616 bp, Homo sapiens
gaacaacttccctcttcaagatttatgataaaggggagaaaaagaaataacctacatattcaattgtcacctataggacaatatatttctatgggaaagaaatagcttacatagtaaaaaattatattagaaattttaaatgagaaataatgcttttataatagaagaaataatgctttaggacaaaattaaagtaaagaatgttaacatcagaaaaaacatcctaactattagcgaggtaggcactggaagaggtcactgtaagaaattgggtattaaagacattgctgaatttttgctttgaaatctttaagaacaaaatgtaaatatcttccttcaattgttatatttcttaaccccttggaagttcctacgtaattctttaaaattctacatgttttaggcaacttcataaatgatgaaatagtgaaagtaaaattaaaatcagtgtagttcagatttttcaaaattcaaaacaatttctaaatattagaagttaccttaagaaaaaaggttcatttctaatgaggtgaaaaagtagcacaaaatggagtcagagrtgagcttcctccaactcaggagaacgtcggcaattaagcgataacttgaaacacgt

SEQ ID NO: 469917 - DNA, 562 bp, Homo sapiens
tagcctcgattgtgaaaaaaagcatgagaaaaatcatgtttgttttgtactgtttttgttgttgttgttgttgttgttgttgttgttgttaaggggtttttgccaaagttaaaatttccagctaataacctttgaagctctagcattaaccatagtaaaatataccatcgtaaccctaatctggggctttctgcaaagctgtttataacctgtcttaagtgatcctttataaaaatagaaaatagtgctctaatgctgttatcaaaaattctgtttaatcaaatttgtattacttttgttcggctgaaatgcagaggtcaaatatcacagtattcattattttattgccttaattctcaatgatgcttcaaaccccaaacaactgcatgtgataggcctttgtgaaaatttaattatggtcctgattgcaggggacatatttattctttgattctttatcttccatagaggtctgaggacatatattccattacctataaaggaacagaattatcccctacttgtgtactttaccccastcactaagttttcttatgagaaa

SEQ ID NO: 469918 - DNA, 561 bp, Homo sapiens
tgtcttgtctcctgtgtgtatatgaaatacacatgttgataaactgtttttctcttgttaatctctcttttgttagagagaatctgttgcaactagaacttatgatgactgaggaaaacattattttttcctctacaaagggcagggagcgtcctaggctaaggagttaacatgggaaggaaatgtggagacttggccttaccagtgggatccttctcccattccctgctctgcatgaggtctgggagttcggtacctcatcttctgtctgatccgtaaatgccaatgaaatggtgaggactgtrgatcctggtcagtgcccaggagacttggctggcagagactgctgccagcagcaagcagggaataagaaaagtctgacttgccttgagaacaaatgaggtggtagcacttctggattctgcccgagtccacagtacccagcttatcccaccctcttctctccagtacccaagccagcaatgatgctgtgaataagatgaaatactaatcgcactggagcacagccctgccttccagccagcaacttcggggcagaaa

SEQ ID NO: 469919 - DNA, 419 bp, Homo sapiens
caagcgggcttaagagtacctacctggctcgtatgttcgggggagttagcacggggctggcacattggaagtatttgttaaagaaatgaatgaggtgcacaagcggataaagccacccccaccgtaagcctatgtgaggcttaagcgtcctcccaggactcccctttggacacataaagaccccgaggtgggacctcaccttgacagttttcagcacccgcggggcagcagcaccgaggcggcccccgcgctccctcagrgcagcggccagggcgcccagagcgcgccgcgccttctctacgaactccttccgcggctgcagccttctggccacgaacctgtccagcgcagcggccggggtgctgtacaagtccatggccgcccggcgcaggtgcaaggggaagcagggctctggcgcg

SEQ ID NO: 469920 - DNA, 419 bp, Homo sapiens
caagcgggcttaagagtacctacctggctcgtatgttcgggggagttagcacggggctggcacattggaagtatttgttaaagaaatgaatgaggtgcacaagcggataaagccacccccaccgtaagcctatgtgaggcttaagcgtcctcccaggactcccctttggacacataaagaccccgaggtgggacctcaccttgacagttttcagcacccgcggggcagcagcaccgaggcggcccccgcgctccctcagggcagcggccagggcgcccagagcgcgccgcgccttctctacgaactccttccgcggctgcagcyttctggccacgaacctgtccagcgcagcggccggggtgctgtacaagtccatggccgcccggcgcaggtgcaaggggaagcagggctctggcgcg

SEQ ID NO: 469921 - DNA, 419 bp, Homo sapiens
caagcgggcttaagagtacctacctggctcgtatgttcgggggagttagcacggggctggcacattggaagtatttgttaaagaaatgaatgaggtgcacaagcggataaagccacccccaccgtaagcctatgtgaggcttaagcgtcctcccaggactcccctttggacacataaagaccccgaggtgggacctcaccttgacagttttcagcacccgcggggcagcagcaccgaggcggcccccgcgctccctcagggcagcggccagggcgcccagagcgcgccgcgccttctctacgaactccttccgcggctgcagccttctggccacgaacctgtccagcgcagcggccggggtgctgtacaagtccatggcckcccggcgcaggtgcaaggggaagcagggctctggcgcg

SEQ ID NO: 469922 - DNA, 646 bp, Homo sapiens
ggttggatgatccataaggcctaaaatatttactatattgcccttcacgggaaaacttggccaatctagcaactgctgggcacgtaggcrggacttcatgatagctgcagtgattctcatttcacaattctgttttgttcttctacatcaacaccaagaaaccttactcatgacacttatgattttcaaaaaagattttatttaatcaggtggcagtagatggggcattgagagcagaggtagagtgaggttcaaggggggatcagttgacaaaggaggaaacaacagtaagacagtgtgttcttccaggagctgatgccacttggagtcacagtgcttgaggaattgcacaataggctggaaatggcagatttctatgatgattcttggtcacaactaggaattatttgtgttacctccatttgacagattatgaaactgaggctcagagaagctgagcgacttgcctgggattgtacagcaaaggagggcgtggaatgtgtgcctgtggagcttaattaaatggacaaggaagcacagcagggtggagattaagagcacaggctttgagggctggcagtttagggtttgcatcccagctctgccactcaccagttgtgtgactttgggagcaatgatttcaacc

SEQ ID NO: 469923 - DNA, 646 bp, Homo sapiens
ggttggatgatccataaggcctaaaatatttactatattgcccttcacgggaaaacttggccaatctagcaactgctgggcacgtaggcaggacttcatgatagctgcagtgattctcatttcacaattctgttttgttcttctacatcaacaccaagaaaccttactcatgacacttatgattttcaaaaaagattttatttaatcaggtggcagtagatggggcattgagagcagrggtagagtgaggttcaaggggggatcagttgacaaaggaggaaacaacagtaagacagtgtgttcttccaggagctgatgccacttggagtcacagtgcttgaggaattgcacaataggctggaaatggcagatttctatgatgattcttggtcacaactaggaattatttgtgttacctccatttgacagattatgaaactgaggctcagagaagctgagcgacttgcctgggattgtacagcaaaggagggcgtggaatgtgtgcctgtggagcttaattaaatggacaaggaagcacagcagggtggagattaagagcacaggctttgagggctggcagtttagggtttgcatcccagctctgccactcaccagttgtgtgactttgggagcaatgatttcaacc

SEQ ID NO: 469924 - DNA, 293 bp, Homo sapiens
tctaaaataaagatgttaatagcacctacctcataggatttatatgaggattaaatgggttaacatttacaaagtgtttgggacagcacctgacatctggtaatggtttgataaataaaatctcattgcctgargctcttgtgtaggtaactccaggaaccaaacagaatatgcaacaaactcccaaatgcagaatttataaaggggctcctcagtcatgttaagaatacataaaggggttggagtgtggagaggagcaatgtttggcaaagagattgccctggagagaactg

SEQ ID NO: 469925 - DNA, 293 bp, Homo sapiens
tctaaaataaagatgttaatagcacctacctcataggatttatatgaggattaaatgggttaacatttacaaagtgtttgggacagcacctgacatctggtaatggtttgataaataaaatctcattgcctgaggctcttrtgtaggtaactccaggaaccaaacagaatatgcaacaaactcccaaatgcagaatttataaaggggctcctcagtcatgttaagaatacataaaggggttggagtgtggagaggagcaatgtttggcaaagagattgccctggagagaactg

SEQ ID NO: 469926 - DNA, 293 bp, Homo sapiens
tctaaaataaagatgttaatagcacctacctcataggatttatatgaggattaaatgggttaacatttacaaagtgtttgggacagcacctgacatctggtaatggtttgataaataaaatctcattgcctgaggctcttgtgtaggtaactccagraaccaaacagaatatgcaacaaactcccaaatgcagaatttataaaggggctcctcagtcatgttaagaatacataaaggggttggagtgtggagaggagcaatgtttggcaaagagattgccctggagagaactg

SEQ ID NO: 469927 - DNA, 581 bp, Homo sapiens
gctcagataagatactatagaggaargaagcttagggtaggtaggaattaagttgatttgttaaaatgagcaatccccaaattcctggggcttagacatactctgtccatcccctacattcagaccaggcagatgtcccacctctgggctcccgtcatccctctgcacagcacttataccatgcacaattggccgtgaacaacacgggtgtgaactgtgtgggtccacttatatgaggattttcttccacctctgccacccctgagacagcaagaccaaccgctcctcttcctcatcctcctcagcctactcaacatgaagaccatgaggatgaagaccttcatgatgatccacttccacttaatgaatagtaaatatatattatcttccttatgattttctcaataaatgttgaattttctttcagctagcttactttattgtaagaatacagtacataatacctaaagtatacaaaagatgtgttcattgattgtttatgttgtcaggaaggcttccaggcaacagtaggctaatagtagttaagtttttagggaatcaaaagttataccatagatttt

SEQ ID NO: 469928 - DNA, 315 bp, Homo sapiens
ccaattcagtatatttcaagagaactttggcataaacaaaatagatggatggatcaagttggcccacaggctgctagtttatgaacttgatgcctttctccatgggtactttacaaatgggacgtacattttgactagagtaactagacagggaccagagaaaggagatacacaggatatacacaatttgttacaaccttgataaataggctttcttatgtggatgtactgcacatcagtaaataaggagattatttgctatgttcaaaagtggaggctaaaacttgttrttacttcagaagctgtgcttttatt

SEQ ID NO: 469929 - DNA, 511 bp, Homo sapiens
gcaacggcttggtcttggctcactgcaacctctgcctcccgggttcaggtgattctcctgcctcagcctccygagtagctgggattacaggtgtctgccaccacgcctggcttatttttgtatttttagtagagacggggttttgccctattgcccaggctggtctcgaactcctgaccttaggtgatctacccgcctctgcctcccaaagtgctgggattacaggcatgagtcaccgtgcctggcctgaatttatttcctgaaatataactttcacatgtcttgttccatatttttttctataaacctctctggatttttggatcaatgtattgtttttgactggcagttaatgttatggtggctccttgttatatttgcacaaatttgagttctctttcccttaagcagttgtgataaattaaaaattctcttaattatataagaaaaggagaacttggactattatggcataaagatagaaccttctgaatgttgaatgagttggtag

SEQ ID NO: 469930 - DNA, 576 bp, Homo sapiens
ggcttattgcatcttgaccagtttttaaatttaaagaaagaattggtccaggcactgtggctaatgcctgtaatcccagcattttgagaggctgaggcaggaggatcgcttgagtccaggagtttgagaccagctcgggcaacacagtgagacccctgtctctacaaaaaaataaaaaaattatccaggcatagtggtgcacccctgtggtcccggctacatgggaagctgagatgggaggatygcttgagcctgggaagttgaggctgcagtgagctgggatcgcgtcactgcactccagcctggacaatagagcaagaccatgtctcaaaaaaagaaggagggagggaagtagaaagggaaggaaagaagggaggaaaggtagaagacggaaggaggaaaggaaggaaagaagggaggaagtgagggctttttgggcctttaagatctgataaggctgcattttaacatggcgtggtttatctggctctggggcagctctcaggcaccaaagtcatggctttggcctcactgtctttgtagcacttatgttttgtgtgcttttgaaagtggaga

SEQ ID NO: 469931 - DNA, 643 bp, Homo sapiens
cttgtgctgtgtaaatatcgtttcctttggcaaagtaattatcaaagtataaaactgaagacatttggaaagaattgctatattacctgtaatatgggtaattcatctgtttttttgtgatagcccttcctgcttttgcccatatatttacatgtgttaacactgtatgttggtttcctttttatctagtgcacagtctgagttttcatatgctcagtgttacctatatcatttacggtgcttttatcatggtcagatttgtcacctatagcagagtttgtaagtagttattaaatctctctggaatctattgccattttctgatgagcctttgtagctaactcatttttaccctgttctgctgtcaagttgcccaacaattattaagacctcaagtttttctcttgaaacttsgctgtttctcttttatcttggccgtttctctttgatcatatgctaagctctcagagtagtttgtatttgtggattctagtcaacatggcaacttttctgattttaactaaatatcacattttaactttgtaatttatgttgaaatttggtgagggcagttccttatttattactttacattttaaataattcttgcttttcttgtgtactaattcttcttgataaatta

SEQ ID NO: 469932 - DNA, 575 bp, Homo sapiens
tgccgggaaactcaaaaccaaatttgtagctcaaatcgctgcgtttacatttatggttggcacttcagcattcctcacttcttattttttatttctactttactagttctttttatttgtcttttgtcttgggaaactggaaacagccccctccatgtgtcaacacatccatcaataaatagtagcttctattcatttatatatgctgcctctaatccttttaataacctagtcataatgtccattaggtatgattatccttacytgcaagtgaagaaacaggctcagatagtccttgcctgaggcaataaagctattaagtggcacaatttttcagctccctttctgtctgcttctgaagtctatgccttgtgcctgggtacatgtaactgatgcattgatgagtctcaactcagtggtggactatacaggtgaaaccattttatttttcccaaccactgctttcaaccatgcagcaccaagtcccttttcccatcctttaatgacaccttgggtggacctcatgacttgctgggctctcttgtttggtaaagctgacagtcccaattacaatt

SEQ ID NO: 469933 - DNA, 638 bp, Homo sapiens
cttcatcattattaagatgtatatgtgtatgtacatatgcatatatatgtgtatatactatcattcattcattatttatcttgaatatttttgtttcctcccctgttgattctaggtagagtgaaatattatacttttctttctgagtcattttcgaaacggatagtagtacataattcggcagagtgaaagaatattctttggaagaaatttgggaattttcatatagtgagtgtttaataaatatggactaggcgatatcttcctcaattttgtctgctctgtggcatatattttaatgcattcttttgtactttgtatactgtcacttataatttatgtccctttggaaaggtaggtcttgggtttaaatatattattagcatcccgtgaacacatctgttttgtaaacattccatcaattctgtttccatggcatgtttatggtcaaattggacaacctcggaagargtaagagtaaggggaataaggatgttacaggtttctaaaactctggttggtgttaattgaaaatgaactttcattccccttgtcattttgatgtatctctgaatttttgtaaacagattttcttttaagcttcagagattacaagctatgcaatattccaccccagc

SEQ ID NO: 469934 - DNA, 522 bp, Homo sapiens
cgaacgctgaggcaccgatcccggctccgtcgccgcccgcgaggcccgccttggccacgggctctggaggccagtgcctcccgctcgccgcccgctgcgctcctcacccctgcctgcaccatcctccctcctgagagctcattcactccgccccgcccgcctcgcctagtctggtctcgccccatgcccttgactcccctggatgctgtactgtctgccaagccagccccaggggctgagcggtgagggcatacagcgtcaccaagtccactgtgggccctctccgcaccagaccctgggccgcagtgcctcgtgggaccggcgcccgcaggccgagcccctgcagcctccttgctgcgcaatgtcccggggcccccctcccgtggccgcttcgccctcctggtgaygtcctgctgcaactccccgagcactgcctgtcttcccgctctccagccctcgaggctccggcataggcctgagaaagccgtgccggagctgcccctgtgcctgctactaaatgaa

SEQ ID NO: 469935 - DNA, 574 bp, Homo sapiens
gtcttcaaaagaaaagaaaagaaaaagatagaatagccaattacattgagacagaaagtagaatgatggttaccaagggttagggggagaaggagtgagagtttctgtttattgggtacagaggtttagtatggtgagatgaaaaagttctggaaatggatagtgtgatggttacacaacactaaattgcacacttagaaatagttaatggtaagtcttacatcgggtatacagtggctggtagtcttaccctctataaatacacactttttggtactgccctttccctcccatgcatctctgtgtgtctccaagtgtgcatcactcactgtcctctgtgctttgtcccatgtgctgtgctcacagcctcatacagccagtgacttcagaaccaggacacagctcaggagtctgccccaaggctccttttcttcccatttttctacatcctcacctaggggaaaactttgcttccactggcagctcagtttagccagattccagacaggccacctgggcaccttcttgacacaccccrgccccaccccaggtagagtcagggcaaggccagtca

SEQ ID NO: 469936 - DNA, 614 bp, Homo sapiens
aatcagtaaaacaaaaggaagagtctgtagagatgaattgggaggggtcaggagaaaaatttgggatttgcttgtgcccatgggacacaggctgggaataaaaatgttttcctggttcttctcagaaagccaaatagacttcacctgaaaacctgttgccagtgctccccttaccagtgactgtgatcttcttgatcgtgaaacacctgctgtcagtggctgagttgcgaacgaaacagatgtagattccactattctttttagtgattttggagataaagagctcttgtgctgatttttggaacttcccattaatctgccaagaatactgtgggggtgggttagaggctgtgttgcaggagaggttgaggttttcccctggatggtaataggagtaagagggggaaatgttggggtcgtctgggccatctggagcaaaraaaatagagccaaaagtcatgtcatcagagggaaggaaaagctcctggtctgtggaagagccacagtgtccctctgagccaagtcacaaccctgaagtcccagccaaacccccgctgtggtcactgagccagagtctgagaattcacctgtttctcccattacaagctgtggac

SEQ ID NO: 469937 - DNA, 466 bp, Homo sapiens
tgcctcatcagcctccgagacgcccccctgcargcctgtccacaccccgcccctcccctccagccccctgcctagcttttcccctccgacatcctctctcagacaccccagcctctctctctttctttctctcctccgtaagtatggaatgagtaaatgatattggagctgtgatttgcaaaatgaggcgtttgcctggacaagggggtgagcaggaggcaccatcagtgccaaggccctggggcaggacagaccctggcgtgttggaggaacagcgagggggctcgtgtggctgcagcagagtgaggagggggagaggagggggtgaggaggaggagagggcagggaggggacagggcaaagtagggaagggacagggcaaggtgtgcagggctttacgggctgtggggaggacttcgggttttattcaagtggtactagggatccctgggagggatttgagtag

SEQ ID NO: 469938 - DNA, 466 bp, Homo sapiens
tgcctcatcagcctccgagacgcccccctgcaascctgtccacaccccgcccctcccctccagccccctgcctagcttttcccctccgacatcctctctcagacaccccagcctctctctctttctttctctcctccgtaagtatggaatgagtaaatgatattggagctgtgatttgcaaaatgaggcgtttgcctggacaagggggtgagcaggaggcaccatcagtgccaaggccctggggcaggacagaccctggcgtgttggaggaacagcgagggggctcgtgtggctgcagcagagtgaggagggggagaggagggggtgaggaggaggagagggcagggaggggacagggcaaagtagggaagggacagggcaaggtgtgcagggctttacgggctgtggggaggacttcgggttttattcaagtggtactagggatccctgggagggatttgagtag

SEQ ID NO: 469939 - DNA, 466 bp, Homo sapiens
tgcctcatcagcctccgagacgcccccctgcaagcctgtccacaccccgcccctccyctccagccccctgcctagcttttcccctccgacatcctctctcagacaccccagcctctctctctttctttctctcctccgtaagtatggaatgagtaaatgatattggagctgtgatttgcaaaatgaggcgtttgcctggacaagggggtgagcaggaggcaccatcagtgccaaggccctggggcaggacagaccctggcgtgttggaggaacagcgagggggctcgtgtggctgcagcagagtgaggagggggagaggagggggtgaggaggaggagagggcagggaggggacagggcaaagtagggaagggacagggcaaggtgtgcagggctttacgggctgtggggaggacttcgggttttattcaagtggtactagggatccctgggagggatttgagtag

SEQ ID NO: 469940 - DNA, 466 bp, Homo sapiens
tgcctcatcagcctccgagacgcccccctgcaagcctgtccacaccccgcccctcccctccagccccctgcctagcttttcccctccgacatcctctctcagacaccccagcctctctctctttctttctctcctccgtaagtatggaatgagtaaatgatattggagctgtgatttgcaaaatgaggcgtttgcctggacaagggggtgagcaggaggcaccatcagtgccaaggccctggggcaggacagaccctggcgtgttggaggaacagcgagggggctcgtgtggctgcagcagagtgaggagggggagaggagggggtgaggaggaggagagggcagggaggggacagggcaaagtagggaagggacagggcaaggtgtgcagggctttrcgggctgtggggaggacttcgggttttattcaagtggtactagggatccctgggagggatttgagtag

SEQ ID NO: 469941 - DNA, 568 bp, Homo sapiens
gataaaagcaagcatgtcaaaagacagttttattacagctcaattgtttcaccatccaaacactttctgaactcacagacactttacctaaacctcttttctgcatgcatctmtctttaacttatgtttaggcatcttgatccactacaaaaccatgtgaaccataaagacagaggcctcagcatattaattttttataacactgtgcttcacacaagacaggatttccattaaatgtttgcacaataaattaatcaatgacattttaagatgtgtgtcaaaagaaagaaacctgtttgggtgaacttcacactttcaaaacacactggctgggaagacaggctgacaaattgtgttgagaaaaatgaaggttataagtggatttgtgtgtatatgggaagaattattatggcaatttattatcattttcacataagggaaatagaatggaggggttgaagaagatagcttgaaaagaagggagaaactattgaatacagattcttcattacaaatttttatcaaaatctaaatctcagtagaataacaatctgaagtcactgggcaa

SEQ ID NO: 469942 - DNA, 642 bp, Homo sapiens
tatttcttgaccccgtcttggtgatgttgggtagataagagaaaccagggtggaaaagttatttatcaatcaacacagttgtaatctggagccagacagatacctaaatgctgtcttcctactgaagatattttgtaggttcttcaaaaaagccagtgaaaacaatctgctatattattcactgtcttgggcagtgccccaactagctggctatgaatgccatccacctgaacctctgcttcttgggtaatctttctatagcctcttagtgctgttgtctgttagccctcgcaggtaagccacatgttgggatcctttctaggtaatttatgcctcgctaccctctgtagggtccacactggctccactttttctccgtgttcagccatcaagactatttccagccaatctcctgtctttaaattttgcaggcaagagctggcctctttgttttccaaatccctcacatatcaagatctaaattccctcacttggcctgaggttagttaagaaagtatgaaggaaggaaagagaaatgctgagtaatgctgacaactgttccaaaaaaataaytgatcaattcccctaatgaatgcttaccttttgttgtataagggaaggcaggtgatggactaagagcag

SEQ ID NO: 469943 - DNA, 610 bp, Homo sapiens
aagtgctgcttgtgagatcctggggggacactaggtaagaacattccatcttttaggaacaaactattaatatgtaacagatatgttaacaattatttagccaggcaaaactattctgagtgcacgggagttagcagttctctacacctttgagaaaggacttagaatgacaagaatccatttttccatcctagatgagagtctgtgcaggaattgatttaaaaaaaaaaamacactaagggggtatattaaggacacattaagttcctattgctgcggtaacaaattactacaaacttaatggattagaaaaacctaaacctattaacttatatttttgtaggtcagaagtctgaagtgggcttcactgagctaaaaccaaggtgttggcagtgctgcattcttttctggaggctatgggagttaatctgtcttcttgcctttcagttgctagcaaccttttgcattccttggcttatgaccctcttccatattcaaagtcagcaatggccagccagtcgtctttctcacattacagcattctgatgttgactcctctgcctttcttgtccatatttaagaacactgtgattatggtgaacacacctgg

SEQ ID NO: 469944 - DNA, 478 bp, Homo sapiens
agaagactgtaacagaagtcagttacaggaaacaggaccccactatagaaaaagcaagttccagcttgctgattggggccttctggagaagggggacacaactccccaagggtaaggggtgagaagcaaaggtggctgtggaaagctgctctgtcttagtgcttcccagaaatgagagaggtctgctctgttcagggacctcagcctgcgaagtcagagctgcaaaaaacaaattccgaaaccccaatgccagagggataagatctcccayccacccaccaggctagacttcatcagttcttgcaaggccagttaaaactctcctaggggtggggtcttagaaaatacagctggaccagggcaagagctgactgataatatgctcagtaaatacatgttgaatgcattaatgagttaaaacaaacgaataatttaagcaaaaattggatgaatgtgaaaatgcttgccaactgttgga

SEQ ID NO: 469945 - DNA, 522 bp, Homo sapiens
gctgctggcctcggccacccagccgtctcctgtgaaggccatatttgataaacaggaacttgaggtacagccatgcagccttgacagtttttaatccacagcactaaattktgaacactttttttctagatgtatattttcttaaggatctattctgaatgttaaatgatagtacgcaaataattctaatgattcattggggtttaaccatgtttgtgcatagtctgcagaacattataatactaaagactgagagggttgaagtttaaccttattttgggtttgtgtaaattgtgaaaaaatattaactagatgcagcatgggttaaatgctcacatcttcatgaagggatctttttccaggaagtagaattattcaaagaggctcgtcaggactctggcagccgtttgtttcattcactcaggagcctcttgggggtgctctggtgccgccagcctctccgctctctccatgctgtggagcaggtgagggcagcagcgaggcacagggtcagggctacgg

SEQ ID NO: 469946 - DNA, 522 bp, Homo sapiens
gctgctggcctcggccacccagccgtctcctgtgaaggccatatttgataaacaggaacttgaggtacagccatgcagccttgacagtttttaatccacagcactaaattttgaacactttttttctagatgtatattttcttaaggatctattctgaatgttaaatgatagtacgcaaataattctaatgattcattggggtttaaccatgtttgtgcatagtctgcagaacattataatactaaagactgagagggttgaagtttaaccttattttgggtttgtgtaaattgtgaaaaaatattaactagatgcagcatgggttaaaygctcacatcttcatgaagggatctttttccaggaagtagaattattcaaagaggctcgtcaggactctggcagccgtttgtttcattcactcaggagcctcttgggggtgctctggtgccgccagcctctccgctctctccatgctgtggagcaggtgagggcagcagcgaggcacagggtcagggctacgg

SEQ ID NO: 469947 - DNA, 444 bp, Homo sapiens
gagccactctcaggtgctgatcctgtacttatgagccttcaatttctactgtttaaaaaaaaaaatctggctgggtgcagtggcttacacctgtaatcccagcactttgggaggctgaggcgggaggatcgccacctttcttttttttctctgtctctacaaaaaagaaaaaaatattagctgggcatggtggggggcgcctgtagtccctgctgcctgggaggctgagcctgggaggtsgaggctgcagtgagccatgatggttccactgcactccagcctggatgacagagtgagaccctgtctcaaagaaaaaaaacaacgtgagccctcatcctacctctgtctgcacacaagaaacatagtcccctccaagtagttctgaggatttctaggaaacagcccacagatgttgcttcccagtcctgcctggtgtctccctca

SEQ ID NO: 469948 - DNA, 624 bp, Homo sapiens
gctatgatgaggaatacggtggcttcgctgaggcccccaagtttcccacgccgggtcagtgccccacgcccgccttagcccaggctttggccttctgattcctatgctggtcagggacctactggctcctggcctcacccatagcttcctgtcctcctgactggcagtgacctccttgcccctagcctgtcggtagctatcggtgaagacccgactgctggtgtcagcagtgaccctctcaccttaacctagatgatgaccttctgtcccctgacttggtcagtkacccagtgaccctgacttggctaatgacattctgggctctagggggacaagtaacttactggtcctctgtgaaccaatgatattctgacctctggcttaggctattaccttctgtcctgtgggttgactcttgacctcacagcctgtccagagactgcctgttgagtgaactcccagcctctgcctggcccaaggcctcctgaccaccccgatctctgtccccactttcccattctctcacctgcatgttcttggtgcccccacagtgatcctgagcttcctgttctcctactggctcagccatcgactgactcaggatggctctcgggcccagcagat

SEQ ID NO: 469949 - DNA, 540 bp, Homo sapiens
agtatgaccaataagcccaagagatttgtggaggccacgcccagaccatgcctaccctagcctttctcgagctccgcccgtttctccaagactgggcccctccagcctgaagccccacccccaggacatccagctccgctccttccctyccccagtcccgcagccaagctcaactccagggtgggagattaaccaggtggagacctgggatttcgctctgggaccccctggtgacaaccctcacccccgtgccgcctgtctcctttcttccccaggcccgcccagagctgagctccgtcctccggctgctgcccaaatcaggggtcgtggacaaaggatgcctggggcctgcggccctacgccaggaccccgcgccgaatactctgattcttcgggctccctccaagggagtcccaaagaccccaatggccaataggaaagtgggttcggtctgggcagcagtctgattggctccagccttcgggagcggacccaggggcaaggggaggggagaggggcggtcctgggttttggggtggg

SEQ ID NO: 469950 - DNA, 577 bp, Homo sapiens
tgagtgggcaccgtgagtgtgctgtgcctagttagcttgtgtgtttacttttgagggcttcggggagctgggaaatatcatgtcacctacaccccaatgacagtggagaggtgggagtgggggtgctggtggggggaayaagcgtagaatgaactctgaggaatgttgccctgagggcagagaggcagtgactgtggctaaagcctctccttggcactgcctctgattaggaggccctgggggcaccatgacacctagcagtgtgcccagtgggcaggagggcacaggaggggggatccaaactggagagcttccgggggctggggaagaccaggaccatgatctacatgatgaggcctgtgagatttccaggaaacctcctgccaccgaggtgttccctgacttcccacacctccttgaagacttgcctcccactgacccagtgaccctcactgcctcactgcagcctgtctgtgcccctgtcctgggtgggtgggagcagcaggcaggcccatcagaagcagaggtgaggtgagctgaggagtctgaacagaagagcagagatttcagggtcagt

SEQ ID NO: 469951 - DNA, 496 bp, Homo sapiens
gtgggtagacaaggtcaaaacacaggggcagtgggtgctgatgaagccatgaccagggtcatggaaggggtggaggaaggttcccagctgcctaggccatagaagcctggcccaccagggctggaagagagcttagatatcaccctgtccacgtttctcaagaaatgaagtcccagagrcatcaaggagcttattgagatcacacagtgtataaaaggtatggagggggattggaggggactgagttagtccctgcccttggggacctctcagattagcagggaagacagactcttcataactaaatataatccaaggcacgccgtaacaaggtgtaaagctctgtaaagtattttgcccagagatgaaggtagggggacaggagagggagggtatgtgtggatgagtggaaaggaagagggcagacaaagaaggggctgaaagaacttgcccagtggaggggtagaagtccctggtctgactgcctgggaaaggg

SEQ ID NO: 469952 - DNA, 614 bp, Homo sapiens
agatcctcaggggatggttgtcagatatgaaaatgaagaagcaaactcctatcaattctatgatttccctttagttcattatcctggtgaaacgtacccattctcaatcacaaatggccatacttcacccaaggagagttccaagaacaaattatcacctcctttctctacttccataacccctgcctccctgcctgtaaatcctattatyagagcttaggtgaaatgcccctctagaagaggcttttcctcatctttccaatagaaataaagccttccctcatccctccaataaatataaatagacatattttatcccagcccctttttctgtgaaacaattttcttgttgttggtttgagttaaaatgacctgtcacacacttgtccctacccccattcatctgtgaatccctgaggcacccccagaaaagaacagtgccttatttggggcctgtgcagggccagatgcattctagatgtgcagtaagtgtgaattaggtgtgcactgatgtcacaccccttccttccactgcactggcacaaggcagcatcacgacccccccttactggtttgctccccatcagttgagctatatgacttgcctcttttga

SEQ ID NO: 469953 - DNA, 614 bp, Homo sapiens
agatcctcaggggatggttgtcagatatgaaaatgaagaagcaaactcctatcaattctatgatttccctttagttcattatcctggtgaaacgtacccattctcaatcacaaatggccatacttcacccaaggagagttccaagaacaaattatcacctcctttctctacttccataacccctgcctccctgcctgtaaatcctattattagagcttaggtgaaatgcccctctagaagaggcttttcctcatctttccaatagaaataaagccttccctcatccctccaataaatataaatagacatattttatcccagcccctttttctgtgaaacaattttcttgttgttggtttgagttmaaatgacctgtcacacacttgtccctacccccattcatctgtgaatccctgaggcacccccagaaaagaacagtgccttatttggggcctgtgcagggccagatgcattctagatgtgcagtaagtgtgaattaggtgtgcactgatgtcacaccccttccttccactgcactggcacaaggcagcatcacgacccccccttactggtttgctccccatcagttgagctatatgacttgcctcttttga

SEQ ID NO: 469954 - DNA, 614 bp, Homo sapiens
agatcctcaggggatggttgtcagatatgaaaatgaagaagcaaactcctatcaattctatgatttccctttagttcattatcctggtgaaacgtacccattctcaatcacaaatggccatacttcacccaaggagagttccaagaacaaattatcacctcctttctctacttccataacccctgcctccctgcctgtaaatcctattattagagcttaggtgaaatgcccctctagaagaggcttttcctcatctttccaatagaaataaagccttccctcatccctccaataaatataaatagacatattttatcccagcccctttttctgtgaaacaattttcttgttgttggtttgagttaaaatgacctgtcacacacttgtccctacccccattcatctgtgaatccctgaggcacccccagaaaagaacagtgccttatttggggcctgtgcagggccagatgcattctagatgtgcagtaagtgtgaattaggtgtgcactgatgtcacaccccttccttccactgcactggcacaaggcagcatcmcgacccccccttactggtttgctccccatcagttgagctatatgacttgcctcttttga

SEQ ID NO: 469955 - DNA, 615 bp, Homo sapiens
caggcagtgcagcggggaagctgagagatgatggtgccagaaaaaggcacgaggtagcgtaagtgaatagaagygtgggctcctgcaatgtggaaaatgacggtactcacgagaaaaccaagggtgaggaagcccagcaatcagctaaggcaaaaggagaagagtttgcggaaggaaggaggtggtcaacatccccaaaatctatggagagaaagtagctgaggatttagccatcagggttgctgtggtgggggcaggtgatgagaaaagggaggcagtcggtatgttcttcacgatgaactcagaagcatggtggtaacgaggtgttcaagacaggagagaccctaatggacttgaaggctgaggatggaacaggcagagaaggagggggcaacaggaaaaaggaaggtggttcaccaggtgtaaagggattcttctgttcctgttcctgagaagaagagatgcacaagaactcggccctcacagcctcagtgcagctaaatcaggaagaagtgggcccgctaaatggctggggatgggcagagaggcaggtctaggtctggacttggcagggctgcttcagggtcaggaagtgagctcagctcggctatgatg

SEQ ID NO: 469956 - DNA, 630 bp, Homo sapiens
ttttcttaccttgtttatcttgtcagtgatttagcacacccttttctagtgagtgaggaggtaagtttcagtccagttcatgtacagattgtcacaggcttggttttagaggcaaggctgaatagtttctctaaactgtgtracgaaaccagtggagagtcttgctgtcctccaggcaatgcaaccaagagtggccggcaccgtggagaggagtgcagccctgacctgcacgtgcaggcccacccccagcaggctcctggcccctgctttaagctcccaaactgcacacaaggggaactgccttggctcacctccactgttctcacttctggacattttccctgttatctcctctgcctgggattttgttaggactggacactattttgacattttaaatttctgtgggattttttacttaactgggatttcggagaatagtgcagatgaggaaggacttgaagttcctgggcctgtcatcctctctaggagatggctggccccatggagggaggacaacctgctgtacatcagagaggtgggaccatgcacagcctcaccatgcaaggcctggatgcagcagagagcccagacccgaagggctctcagtgaaggcccacagttgggcca

SEQ ID NO: 469957 - DNA, 545 bp, Homo sapiens
ctggcacattatgagaactatagcactttaatcatttaattttttattcacagtgtttactgagaatctaccatatgctaggccccattctagaaattcagacggaaataagatagacatggactctgcctttatggagcatacagtcttgagtagcaagtgaaataagagatttcagatgcaggtaattggtatgaagaaagcagagcaataggccagaaagtaatgaggggaagacagctctgttgtgtggtggtcagagagggtctctctgaggagataaccttccagctaagatggggatgcggagaaggagccagtcccatgacagtctagggaaacagcatgcaggcagagggaacgggatgttcaaaacgctgatatgaaacgagctcagcacattggaagcagaaaagccacccaagtgactggagcagagtcatgatgagaaaaacatggtaagacagaggtcagatcatagagaacctggsggagcagggtgaggacaccacttgtaagtgaggggaaaggaataggctgtttca

SEQ ID NO: 469958 - DNA, 470 bp, Homo sapiens
tactgtcttagttccatcttggaaacgtcacagagctttatcctatttattttcagtgcacagtaaccaccagcatcagtttgagtctgtgtattttaagagcatggctaaaatgtcatatgctgttacatatatagcaacgtagggagtggaacactcactcaatataaaaaaatcaaaatcmaaatccatttatacaatcagagtcaaatttatatcaatttgcctatgctatgacttttcgaatttcctctggaattatcctggtgatcctaattttgctcttaatgtcttccatgtatgccccaaataattaacataacgaagataattttattgtaaggttttttgataacttatttttgtctttgttttcccctgaaatgagtgtccttcacctagtccttaagtgtcctatctacaaaatggagaatgaaaaaggctgccaacactgtaacataggtaggagg

SEQ ID NO: 469959 - DNA, 595 bp, Homo sapiens
taacataatacaaagttaccagcttgcacttatgtaaggtcagagttctcaaatgggttggcaaatgggttccttctaggggctctaagggagaatcaatttccttgccttttccagcttctaaaggctgaccatattccttggctcayggccccacatcaccctcacctctgcttctgtcatcacttctcttgactcctgcctcccttttataaagcctcttgtgattacattaggctcaccctggtaattcaagataatcatccaactcaaaatccttcatcatagctgcagagtcccctttgctgtgtaatgtaaggtattcagaggttccagggaagaggacatggacatctttagtgccattattctgcctaccccaaggtgccaaggatgacagtaccgaaacagctgaagtgctttctttgctaacagcctgccaaccaatacctaagctccacctagtttttggagctacacaaacctttataactccaggatggcccttttccattttccattataatgtatgagatagaaaatatttcaatgtgattagaattagcagtgtcttatctcacacttggctcagtgg

SEQ ID NO: 469960 - DNA, 595 bp, Homo sapiens
taacataatacaaagttaccagcttgcacttatgtaaggtcagagttctcaaatgggttggcaaatgggttccttctaggggctctaagggagaatcaatttccttgccttttccagcttctaaaggctgaccatattccttggctcatggccccacatcaccctcacctctgcttctgtcatcacttctcttgactcctgcctcccttttataaagcctcttgtgattacattaggctcaccctggtaattcaagataatcatccaactcaaaatccttcatcatagctgcagagtcccctttgctgtgtaatgtaaggtattcagaggttccagggaagaggacatggacatctttagtgccattattctgcctaccccaaggtgccaaggatgacagtaccraaacagctgaagtgctttctttgctaacagcctgccaaccaatacctaagctccacctagtttttggagctacacaaacctttataactccaggatggcccttttccattttccattataatgtatgagatagaaaatatttcaatgtgattagaattagcagtgtcttatctcacacttggctcagtgg

SEQ ID NO: 469961 - DNA, 581 bp, Homo sapiens
taaaacatattcaaagtaactgagacttgccttttctcaagtgaaatttgaggcatgtatctcaagcacgttctgtaacaatgaggaggagatactacattaaggattaaaaaacctaaggtataaggtaagaagttgttttgattaatgttgttagttgcagacaacagaagccgctctaaggagtttaagcagaaaatgacttatgacagggttttagggaccttagagaaccacgactgctccagtagtaactcccttgtcaccaccactcacacccagcattggttaccggggactggacatgagaatctctgcgagctgccccagaaaaatcacacatactaggtctctaggaggggccaatctctctgtacagccactgcttggcaccgtctcctttcaaatgtcatgtaaatgtgtctgctcctcagagcctgggtcacatttagacttgttgtgcaagggagtctgggaartgtagtttttagctttccagtttctgtagttcaagcaggtttgcttaaaggagattggtcagagtgctcaactagcaacaccctgtctagcacagaagtcat

SEQ ID NO: 469962 - DNA, 690 bp, Homo sapiens
taaaagtgtaaaatatgatctgaatttgcatcttataggaaaaagactgttaggmtaaacaccagaatgttaacagagcttttctctgggtaatgggagtatagttcatttttcatttcatcttcattttttttgtagttttcaaattatctcatggcatgtcttagagtggaaaacaaccacaaagaaaaacgatgttagaatcacaccacctcaccagcttatttttgttctcctgatttttaccactgcaccaaatacctacagatacagatacctcacacactcaccaacaagtggatagatagagaaaaaaataataggaaaaccatggggggaaggggtgaactactggagaatcaagttctttgaggaagagcagtgagatttccaccctctgaggagcccagcacagcagcttgcatcaccacgcagtcaacgcactacagtgaaataaagttaactttgcaccttcttctctgtgaggccttcagggaaattttatccagatataaccaacccgtgaacatagtcctcatgcggaagttgccttttgtgagaagtttgcataatcggcatcattcaattacatgctagctatagatgatataaggtttatcaggcagcaaggaaaaagtccagcaagttttgctttgggagtgggaaggaagagtacagagaaggcagatg

SEQ ID NO: 469963 - DNA, 690 bp, Homo sapiens
taaaagtgtaaaatatgatctgaatttgcatcttataggaaaaagactgttaggataaacaccagaatgttaacagagcttttctctgggtaatgggagtatagttcatttttcatttcatcttcattttttttgtagttttcaaattatctcatggcatgtcttagagtggaaaacaaccacaaagaaaaacgatgttagaatcacaccacctcaccagcttatttttgttctcctgatttttaccactgcaccaaatacctacagatacagatacctcacacactcaccaacaagtggatagataragaaaaaaataataggaaaaccatggggggaaggggtgaactactggagaatcaagttctttgaggaagagcagtgagatttccaccctctgaggagcccagcacagcagcttgcatcaccacgcagtcaacgcactacagtgaaataaagttaactttgcaccttcttctctgtgaggccttcagggaaattttatccagatataaccaacccgtgaacatagtcctcatgcggaagttgccttttgtgagaagtttgcataatcggcatcattcaattacatgctagctatagatgatataaggtttatcaggcagcaaggaaaaagtccagcaagttttgctttgggagtgggaaggaagagtacagagaaggcagatg

SEQ ID NO: 469964 - DNA, 499 bp, Homo sapiens
aaggggaagactgggcgcagtggctcacgcctgtaatcccagcactttgggaggctgaggcaggcggatcacgaggtcaggagatcgagaccatcctggctaacacgctgaaaccccgtttctactaaaaaatacaaaaaattagccgggcatggtggcgggcacatgtagtcccagctaccgggaggctgaggcaggagaatggcrtgaacccgggagacggagcttgcagtgagccgagattgcgccactgcactccagcctgggcgacagagcgagactcaaaaaaaaaaaaagggggggggggggggaaacaaaaattcttctagccagaaagacttcaataatttttaccaagggaaaaaaaataggagcattaaatcttaccaaggaaagggtacaagaaatgtcatatttattgccactttatattaaaattaaaccaaccgaagtgtgggatcatcagaaaagttggattctagtcccattttcttatgtt

SEQ ID NO: 469965 - DNA, 499 bp, Homo sapiens
aaggggaagactgggcgcagtggctcacgcctgtaatcccagcactttgggaggctgaggcaggcggatcacgaggtcaggagatcgagaccatcctggctaacacgctgaaaccccgtttctactaaaaaatacaaaaaattagccgggcatggtggcgggcacatgtagtcccagctaccgggaggctgaggcaggagaatggcgtgaacccgggagacggagcttgcagtgagccgagattgcgccactgcactccagcctgggcgacagagcgagactcaaaaaaaaaaaaagggkgggggggggggaaacaaaaattcttctagccagaaagacttcaataatttttaccaagggaaaaaaaataggagcattaaatcttaccaaggaaagggtacaagaaatgtcatatttattgccactttatattaaaattaaaccaaccgaagtgtgggatcatcagaaaagttggattctagtcccattttcttatgtt

SEQ ID NO: 469966 - DNA, 634 bp, Homo sapiens
ggtgtttctagctactgagagactgcctttccctgttgctggctgtgaccaattactatattagagcgacagtttaacaactgcctgaccacctgatattcttggttgcggggttagggggtgctttctgtcctgctcacatctgactacctactgtaacatttcctcccttaagagtccaagaccccagttctttgrggaaaatggatggtcagtcttctgtaactgcttcttgctgacagggatgatggtggttgttctgtaggtcttggcctcttgctggctgtcagggcagggtggctctgtgggttgatgaaagctgaattcagccaggtccaagggagacaggggcaggattttgcctctgtcatgtcccactgatgggcagtctaggagtcccctatagaagggtgactcttggatattgagaggatggtattctttactgaggatcatctggagctggatggcctgaaggtgagaggagacaaatcagattattagatttagaagacagaggccaaaaacgacaagtagagatgttaagacaaaataaggggatgaggacagattaaagaattctgagaattctgagactcccaacatgccaggcaggtggctgcagtcatgccag

SEQ ID NO: 469967 - DNA, 665 bp, Homo sapiens
cagtgatatattgaggggagcttttagatgggatggtcaggaatggcatttctaaagaggagagatttgaactcagaccagaatattacaaaggaatcaactatgcaaagatctgggtgcaaaggcatccccacttagastggagagtatatgcaaagtccctaagaaggaaatgagcttgatttatttgagggccagaagagaggccagtatatcaggtgcagagtgagcaagggagagactaatagagatgagctctgagaagtcaatagaattaaacttaagtggggcctcggaggtcttgctctggagtttggtggcttactgatggcagtggaaataaagcagtatgttgaacttagctgtctgtgaaacatctagatgaagtcaattaacgggcttcaatatacaaactcaaatataatttgcctctgttattcattgaaataactttccaagttgtttaggcattgaacaaagaaatgctcacaatatggaggcttgaggagtgtgtcaaggacatggtcaggggaccagagggatcaggaatctctagcagttcttccccacccctcacccccagacttagctttgacttgaaactcatctagcagttctttaccaaaataaaggtcatcttaaatattattgcgacctttaaagta

SEQ ID NO: 469968 - DNA, 563 bp, Homo sapiens
ttactattttgaagtatgttccttcaatgycaaatttgttgagggtttatgacatgaagggatgttgaattttattgaaagcccgttctgtgcctattgagatgtggtttttgttttaaattctgtttatcaactcatcatctaggttttaagccccacatgcattaggtatttgtccttatgctctccctcaccctttcccccacccaccaacaggccctggtgtgtgatgttcccctccctgtgtcaagccaccatggcacatgtatacctatgtaacaaatgtgcacgttcagcacatgtatcccagaacttaaagtaagaaaaaaagttctcatctttcttttcttatataaaagatagatacaatgatactggtgagaattaaataaatttatacatgtaaaacacctcacctagaacataacacccaaacacaggctacataaattaatgtttgtccataaaaaatgcataaaaaattccgtttatgtgctgaatcacatgtactgatttgcatatgttgaaaagaatgaagtcatgtcctttgcagcaacatggag

SEQ ID NO: 469969 - DNA, 459 bp, Homo sapiens
ctgtgatggaaggagaggttggctatccctcagtatggcccttccttatcaatctttaaccagaattctccatccctgtctcctttgagactggaatcttcccatcctttgcatgagctaaaatctccctgggcagagaggtagcagtgagccctgtgtgctggaggaagaggtggaggctgcaggttcctgaatgctccctgaggctcttcctggcctctccagacccagaggacagcctttccagcgtggtttcctgtagaggcccatgggaatgayctgctgggaaggtcactgcaggaataaagctcacagcaccagttcaaggaggccctgggtctggctcctacacttgcctgcaggtgtcctgtgaaaacacctaaaaagggtgttttttgtgccttttccttagagccacttcattgaaggcagccccaggtggaggtggaccaagaggag

SEQ ID NO: 469970 - DNA, 526 bp, Homo sapiens
gctgaggaacagaatgttaaattttaaaatttgtttcatttcagttaatttagattttgatggccatgcatggctggtggtgaccgggggccagcatggatctaggtcacgccggtcactgcacagatcacacacatacacacacacatgtgcatgagtgaagaagcacatggtgactcggtgccttgttcgctctaggttggccacggttcagggcccgggagacccaggccccatctctggctctacaccatgaaggcaaaaggcgaccacgtcagaatgcttgcaaagtttgaggattctgcctcccagctacagagaragctccaacgtggtttcagagtgcaaggagggtggaggaaagaccacccccttcgcaaaccctcctgttgggaacacggccggcaacgggtcttggagaggaggcctcactcctcggcagggccatggggccgtggccttcctcttctgtgggtctgatttgtggtctcagatgcacccatggatctgtgtgttcaaagcatgg

SEQ ID NO: 469971 - DNA, 560 bp, Homo sapiens
ggctgagacttcgggagcacagacgtgcagtgtgttactgatgcctgtcttcgctgtggccgctggccaagaccctcgctgcccctagcctggcccggcccctcacccaccctcccaggcctggcaggtctggctttaagacccccgattccctacattcctaatcagtggcactgggactgtggtgactgatggacagagtcaaactgagcttctgccgtgrcccaggggaaatggctcagacctgtcctttgccgccagggctggtgtcaccagggcctgagaagcaggtgccagccctgggtaagggcaagggaggtgacacggtgtcgcttgcccgagcaaggcccctgcagccaggctctgagcccatctgatgctgtcaccgactcgccgcctctgctgcccggagacccagctcttgtgtgacccatggaatcctcagggggacagcagtgctggagcgtggctgctgtggcatttcctgctcagggcagaggcggacgctgccccaggcctgggtgtggggagcgccctggggaagcgtgagggggacagtg

SEQ ID NO: 469972 - DNA, 601 bp, Homo sapiens
ggatctcacctcaagaagccaaacataaagtatgtagctttggcatttgcagttctgctccaacaatggatagtcatagacagacctcaacatacctttcataaaacatcactcacattcttataaaataccctatcattctgctaaactatgtaaagtaaggtgctggctgccttatgatcagtcattaagtgtattaattattcatgtgtctcaaaactatgtaagtgaaataaaaagkgtaccagaaagcaagcaataataatgacttcaggcagttaaagcccccttttgtctctgctagaaaaccacctgagttgcttaaataatgcagaatctttctccaacactataaacatatctgacattaaaaaaaaaaaacaaaccagtaacaaaaaaaaaaaaaacacacaaaatctctgcaatttttaatttctgagatgtcaaataactttttccaccgggctacagctttatgaattctcgaatttagacaattctaaaactaaaatttagacattctaaaactaaaatacattttaaagtaaaaatcacatttcctagttgtctgtgtcagacaactttactagtatactatagt

SEQ ID NO: 469973 - DNA, 560 bp, Homo sapiens
acgtctcagcacacaagcgggcccctgaacttcctaagcgcatactgtcttctctcaaccttaggccccacctcaacatcaaatgcttggcagagcctggggatcggtgtacacagcctgctgtcagtcaaatgctagcgtcactgctcggraacgcttctctcctcttccccgagagctgcagaggcatttgtcagtggctccctgggcagcccagcactgaggagaaaacactcctgtacacgggcaccaaacatcaaaaccacagtcctggaagttctgtgtcaaggactacccctttaggaggggccctgcatgtggctcttttagccagaaagggtctggcttcaagctcacaattcaagaaagtcactgagaatcaggaaagaggcttagaagaggagcaaaatgatccaataactggaaattaggccccaagataaaaggtttgagaacattttctggagaaaagactactgaggaggcttggcatctttcaaacaagtgcaaagttattacagatgaaatttcattgctacaaatacaattacaatctctct

SEQ ID NO: 469974 - DNA, 560 bp, Homo sapiens
acgtctcagcacacaagcgggcccctgaacttcctaagcgcatactgtcttctctcaaccttaggccccacctcaacatcaaatgcttggcagagcctggggatcggtgtacacagcctgctgtcagtcaaatgctagcgtcactgctcggaaacgcttctctcctcttccccgagagctgcagaggcattygtcagtggctccctgggcagcccagcactgaggagaaaacactcctgtacacgggcaccaaacatcaaaaccacagtcctggaagttctgtgtcaaggactacccctttaggaggggccctgcatgtggctcttttagccagaaagggtctggcttcaagctcacaattcaagaaagtcactgagaatcaggaaagaggcttagaagaggagcaaaatgatccaataactggaaattaggccccaagataaaaggtttgagaacattttctggagaaaagactactgaggaggcttggcatctttcaaacaagtgcaaagttattacagatgaaatttcattgctacaaatacaattacaatctctct

SEQ ID NO: 469975 - DNA, 596 bp, Homo sapiens
gcatcagaatcaactggaaggcttgtgaaaacacagattgctggggcctacctctagagtctctgattcagtaggcctggggtggggccaagaatttacagttctaacaccttctcaggtgatgctgattcagagatcacactttgagaaccgctgctccagaagaattacctacaagaaactggggagtggaggctctggcaagaggagtcaatgtggttacaactctccagtgcttggcctcagtggattctctttggagaagaaaaagaaaggagccagttttcctttttccacccaagacattagtctgagacataacacactacataayaaaattaagctcctctaagggaacaaaacaagaatctcattcatttgcataatttataaaaactgtttctgtgaggagacatcatgcctcactcaccctccagagcttccccaggaggtaaatctaagtgtatttcatttaggaggaagcaatttaggtaattggttgcagcccccctcttcaaccgtatctgcacactccccttcacaaacctccactgcaagtcagccttctttcactttgaccccaccaaggctggaca

SEQ ID NO: 469976 - DNA, 641 bp, Homo sapiens
ctcccaaggtgttacaaatccagcagccacttgttcctgctcattcattctcgttcctctccaccccccacacaaaatctggcaaccaggcaggaacacagttccagctctgagtcactgccccactgtggccaaggggagcagtggctagaggtaatcaaccaggcaagcacttcatgtctctagaatccaattcttccgttctttgagacmgtggggttggctgcccttctagaatcaggacataaagaaacacccctatctacagctctggagtcagaacaaattgctcattcaggtttgccctaccatgctgagctgaaatcagccccaaaacagagcctatctttggtgaagaaacaatggctccttatcaatatttcataccagtcagggcagggaaaggtttgagtggttacaggtcagcaaacccactccccctggtaacaatgattctttcatcaatgcttgggatggctaaggttctctcagcaccgatttaaccatgtggcactcactcccagaacaggtctgaaaacgagaagggcagaggggttaaaaagagaaaccaggcaccaaagtgaaagatcaacactgtggctcttttcattgcaagctacgtagttctacaagtcacagtg

SEQ ID NO: 469977 - DNA, 641 bp, Homo sapiens
ctcccaaggtgttacaaatccagcagccacttgttcctgctcattcattctcgttcctctccaccccccacacaaaatctggcaaccaggcaggaacacagttccagctctgagtcactgccccactgtggccaaggggagcagtggctagaggtaatcaaccaggcaagcacttcatgtctctagaatccaattcttccgttctttgagacagtggggttggctgcccytctagaatcaggacataaagaaacacccctatctacagctctggagtcagaacaaattgctcattcaggtttgccctaccatgctgagctgaaatcagccccaaaacagagcctatctttggtgaagaaacaatggctccttatcaatatttcataccagtcagggcagggaaaggtttgagtggttacaggtcagcaaacccactccccctggtaacaatgattctttcatcaatgcttgggatggctaaggttctctcagcaccgatttaaccatgtggcactcactcccagaacaggtctgaaaacgagaagggcagaggggttaaaaagagaaaccaggcaccaaagtgaaagatcaacactgtggctcttttcattgcaagctacgtagttctacaagtcacagtg

SEQ ID NO: 469978 - DNA, 641 bp, Homo sapiens
ctcccaaggtgttacaaatccagcagccacttgttcctgctcattcattctcgttcctctccaccccccacacaaaatctggcaaccaggcaggaacacagttccagctctgagtcactgccccactgtggccaaggggagcagtggctagaggtaatcaaccaggcaagcacttcatgtctctagaatccaattcttccgttctttgagacagtggggttggctgcccttctagaaycaggacataaagaaacacccctatctacagctctggagtcagaacaaattgctcattcaggtttgccctaccatgctgagctgaaatcagccccaaaacagagcctatctttggtgaagaaacaatggctccttatcaatatttcataccagtcagggcagggaaaggtttgagtggttacaggtcagcaaacccactccccctggtaacaatgattctttcatcaatgcttgggatggctaaggttctctcagcaccgatttaaccatgtggcactcactcccagaacaggtctgaaaacgagaagggcagaggggttaaaaagagaaaccaggcaccaaagtgaaagatcaacactgtggctcttttcattgcaagctacgtagttctacaagtcacagtg

SEQ ID NO: 469979 - DNA, 634 bp, Homo sapiens
gccaaacacttgtcttccttttctgtctttcccaaccctaccactcagtgctgtgtgctctgatctgaccccagttcccaggttgtttgtataggtctaagaaagcaagaccaggaggggcaggttgagaaggaagtaagaggccaacagcagtggaaagtggcaggtagagctgtcattgctcaaagccacacacactgggtgcattgtatgaatttttctggattcaaaatcttttccctgtgtgtctatctagaaactcaccctcctcctactttcttctcattacattttctgtttctagtgcactygtttatgtccagagaatggccatgcaaatagttgacaatagaataaacaatgacgttttgtgagacttggtagctggcctttgttttttccaaaagagattgaggtttctaaaagctagcttttatgcagggctgtgcagttgtgagtgtagttttatggaacaggtgcataagtgaagggtgagatagaaaacaaaatgctggctgtttgtcaaatcctgaaagtgaatgggacaaaaatcatttttgaagaaggatgtcattcaggagaccttgtaaatcttagagtgtcctcttatcagatgaagtggaggatgaggttg

SEQ ID NO: 469980 - DNA, 634 bp, Homo sapiens
gccaaacacttgtcttccttttctgtctttcccaaccctaccactcagtgctgtgtgctctgatctgaccccagttcccaggttgtttgtataggtctaagaaagcaagaccaggaggggcaggttgagaaggaagtaagaggccaacagcagtggaaagtggcaggtagagctgtcattgctcaaagccacacacactgggtgcattgtatgaatttttctggattcaaaatcttttccctgtgtgtctatctagaaactcaccctcctcctactttcttctcattacattttctgtttctagtgcacttgtttatgtccagagaatggccatgcaaatagttgacaatagaataaacaatgacgttttgtgagacttggtagctggcctttgttttttccaaaagagattgaggtttctaaaagctagcttttatgcagggctgtgcagttgtgagtgtagttttatggaacaggtgcataagtgaagggtgagatagaaaacaaaatgctggctgtttgtcaaatcctgaaagtgaatgggacaaaaatcatttttgaagaaggatgtcattcaggagaccttgtaaatcttagagtgtcctcttaycagatgaagtggaggatgaggttg

SEQ ID NO: 469981 - DNA, 614 bp, Homo sapiens
ttttgtttgaaatgaacactgcttaaaactcgttgaatatraaaaattaaatataacaaatgtgtaaagtattaagttttctagatatttaaagagttatcaagttaaactggttatttttcactaaaaatggatgacttccaacctgagaaattcatgtgcattttgttatgaatattgatacaactgatgaaaatggtgtactctgtgtatctatatgaagggatgtgtgcatgcacatatataatgcataacacccttttctaccaaaaaatatgcttagttccttccatggctaatgaagtacacttaatcaactatttataaattaatacccttgccaaaatatgttaacttttatggcctatcaagtgtaccatgcatactatgaaataatacagcagggttcacccagtgcctcctgacaccttgggaacaatgggtacagaggagtgggtgggtggcttttacatggcttgaaaatttacagaatcttccagctcgtatatgtgtgtgttattgagtgatcttaccacgttaatttttaaaaagaactgttgagaattttaagtatacctttacattatgaaaaagcatttcataaatatttctaa

SEQ ID NO: 469982 - DNA, 517 bp, Homo sapiens
atatttaaattaattaaaagtatcaaacttccagtcccttagtcacacytcctgtatttcaggtggtcaatagccacacggtgctggcggcacccatcttagacattgcaaatatggaatatttctgttattgcaggaaactcttgagcagcactgggttagactcggaatctctgccccactctcactttggccaaatcactccacttaactttattcatctgtaaagtgaataataataatgatagtactaataatagtactactaatagtaccttcttcttgaggcaattgttgggatagttgaatgagagaatgcatgtagagcgcttggtagaatgactagaatactgctgcccagtagaactttctgctgtgatggaatggaaatgtcttatatctgcattgcgcatatggttgccacaagccacatgtgactattgagcacttaagatgtggccgatgtgattgagaaactaaagttttaattttgtttacttttaattaatagaaaatt

SEQ ID NO: 469983 - DNA, 535 bp, Homo sapiens
gtgaggaggggaacatcttgcctataaaggaacaaggataaaaattacagcagacttatcatcaggaaatatgcaagcaagaaagaaatggagttgaaataaagtattgaaagaaagaatccccagcaatttagaaatctatgtcctacaaaattatactttaaaagtaaaggagatatcataactttatctgacaaacaaaacagggactttatggttacgagatcttcctttcaataaacattaaaagaatttcactagaaaaaggaaaatgctatccatcagaaacttggacctrttatacatgaagaaaggaaggattcgggggaaagaataaatgatgatagattaaggtttttttttcctattctttatttataagttaattatttgtatgaagtaatattggtaacaatgtactgggtgattacaaaatatggataagtggaatgaattgtaagcaatgccatagggatcaaagtctcagggacaggtaagaagaattaggaatactcttttatcatgtacctgcctt

SEQ ID NO: 469984 - DNA, 470 bp, Homo sapiens
attctcccttgcaagcttccagcttgcttatctatgtctgcagcctgattttacaggctgcttttgttagaaaacaaatgatttgggggctgcttttcattaaaagggaaactttactgaggactctcttaccctcactacctgcctaaataatttctttttaatgcctgtatcatttaggatagaaattcccaggatccgtggtgcttccatagcaaaggaagaacgtctccagggagatgactttacagttgagccctggatgatgagattcgatcatgaaagaattggagaagagcatcctgagggcagggacaggcaagtcaaaaggtcccaagacaagaaaagatcatccatgcgggggccaaggccagggtggccacraagaagggagaagagctggagaggagatgtgaagagttagcagggctcagtggtgcacagtcccttaggctgtgaaaggagatcag

SEQ ID NO: 469985 - DNA, 344 bp, Homo sapiens
gggaagcagaggtttttattgtttcccagagtgaaaaacgcaaatgagacgctatttcgtctagttgtgtgcacaactcgagaggtacagctcttgatctgataacatgaccagctctctgtcctaggttggtctctacctttttggttaatttaataggagactaaaaaaccaatggaagaaagtarcctgctattaagtcaaccaaagagtaggacctgccttccggctcgaaaagcctgggtctggcccatcccaccctatggtgagctgccgtgtgaaccaatgctctgtctgaaggcggcacatcccggtcaggagccagtaagggaagcaaacacgga

SEQ ID NO: 469986 - DNA, 573 bp, Homo sapiens
cctttgcacataggagcaaagtgatttggggcaagataaccacactgatcataattttctcatttgagaaatagagataataaccttgatgagatttttacggagcaatatgatgatatctgtacatcacctcattgagtgctggtacatggtaatgttcaaggttagctagtatcattgtcattgatactactgtctctctgctgagacattctgaaaattatttctttctagaaataagccttttggtcagacttaacaaaaatgttattttatttttaatatatttgaaaatcaggactatcaggctctgttgctttttttccacgtggtacaaatacatgcagagttgatttgattttaaataagtaaggtatgagaatcttagtcaaaccttttttatgccaagaaatgtaaagattccttatttgaatattgttgtggttcttygtataaatgcaatcattatgaaatgtacattatgacttgcttctccatggcatcttggacaagagcttttgcttactttggcagaggtctgtgtgtataagggtgtcttcaaaatgcacagct

SEQ ID NO: 469987 - DNA, 627 bp, Homo sapiens
tctaggatctgatgttcttgatgtaggtaagactcattattcagaaacttgataaacagaaatataaactttttaatarcactaatgtaagtcatggaactgattcattatacattataaattcgtttacatatcttgtagttaattcaacattgtaaatgttatcttctattatttaatgtcctgtagtatatatctgggtaaatgtggttcttatttttttctgttactgtaatatattagattgctgcttctgtccttattttgcatatcttccttgctttaggccaaaccaatctttagattgtgtctgccaacagaattgggaagtacagttaaagaagcaaaggattacaggtcattgatctgttgcatgacaggcaaagatgcgatagaaagtaagtgatgttttagcttagtgtgttgtattcaaattagacacatgtatgtgtcttcttttcacttataaggctttggcactcatcagacagtcctatgctgggaaggggaattgtaactcctgctctcatttatctcatcatctcctagtcttgttgagaaatctactttgactttgcagatacattttcattgtatgacacagttaataattaggatttcaattta

SEQ ID NO: 469988 - DNA, 515 bp, Homo sapiens
tccctcccgcaggtgcccaggttctctctccataccacatggcgaactgctgtgaggggatggggkaagggtggcatcaaaatttgagattgtctttcttattctcttcagtgcctctttcagtgatatgaagttgaaaccagatactggtttttggttcttctgaaggtgcttttattgtgtagatagttgttaaatttggtgttcctgcagggaggacaattgggtgtcaggaggaggcttctattcggccatcttgctctacttccccagaatctgaactcttggctcttgaatttttcagccagatctcctttcaggttgctataatcagttataaaaaggcaaaaatgccaaagttattgtttcttaattaaaaataaaatgatttgggaaggttacacagagtctgacttaggagccactagggttgtggagaaaacacacgggttagataagagtcttcaagagaaaattccaggtgagggaaatggcaggcttgtaattacaatgca

SEQ ID NO: 469989 - DNA, 545 bp, Homo sapiens
taaactgagacataattgggctgatagaatgaaagaaaaagctggagacttgtaamtactgctcccatattatcatgtggtcacctggtaagtgtttagcagctgcaccaaatgttgttttgtaattaaattgggcccagggaattaaagttgattagttgtagactctacctctaggcctgggctgcagctatacattttgttttataattaagttaaagctcgactaggggcatgaagcattagagcctgtgaactgaagaaataataaaaagacttttttgctcccacattcctcacagatttcacaactttgttaatgacctcaaaacacttaaaatctatttgttttctgaaatattctttgtccagactcccagtgatcattaagatttgctgctgctgttcatttttccatttcccttctaaggaggaggcttggggagggttgtaagagaccccaggaggagttttgcatagcttctctgtcagagaagaaaacagagggatgtaagagagtcgcaagacaaaagagagcacaaaag

SEQ ID NO: 469990 - DNA, 545 bp, Homo sapiens
taaactgagacataattgggctgatagaatgaaagaaaaagctggagacttgtaactactgctcccatattatcatgtggtcacctggtaagtgtttagcagctgcaccaaatgttgttttgtaattaaattgggcccagggaattaaagttgattagttgtagactctacctctaggcctgggctgcagctatacattttgttttataattaagttaaagctcgactaggggcatgaagcattagagcctgtgaactgaagaaataataaaaagacttttttgctcccacattcctcacagatttcacaactttgttaatgacctcaaaacacttaaaatctatttgttttctgaaatattctttgtccagactcccagtgatcattaagatttgctgctgctgttcatttttccatttcccttctaaggaggaggcttggggagggttgtaagagaccccaggaggagttttgcatagcttctctgtcagagaagaaracagagggatgtaagagagtcgcaagacaaaagagagcacaaaag

SEQ ID NO: 469991 - DNA, 586 bp, Homo sapiens
ctctcactgaaagattgccaaaggatatttaagaagaaggaaatcaaaccaagaaagattgattaaagatgagaaaagaatttggtaaacccatggatagtctaattaagcagagatatgtatgaagcaatactaatattataatgtgcatttagttgatgaacaaaaataatataggataggaaacaataaggagagtattgcttaggaaaaaggtggaaatattgaacacccttctattttactaacattatgcatgttaaacatttaagcataattattaagtaataatacatattttggttttaataactattaatatattattgtatacttatgtattattatacactaatataatcaagtattaataattaagtaatgtgcatatatattgttccaatccaatagaaaaartgaaagaggctggataaaatttaatcaatttaatagaagtactaaataagaaaaaaataccgatttttttacacggactatctaataccaaataaagactagaattggagctttaaaatgtcagagtaaaagattattacagaaaattattttgttctaactataaact

SEQ ID NO: 469992 - DNA, 576 bp, Homo sapiens
tttgtatgtagcaaaggactctgatcaactaaaaagcagtgtgagaaaatagacttatcatggtctaggggttctagaacaagaggaaacgatgtgatgacaaccaagagccagataktgcttgcttagaccaaaatctttggagccatacttgattcttctctctctaacccccacaaccatttccttagaaaattttcctgactctgctttcaatatttatctgaccccttcacttccactatcatcttccagtccaagccactgtttcttgcctgtattattggaatagtctcctaacaggtaaccttgtgttccttgccctgcacaatcaattcttcgcatgacaacagagcatcattttaaatctgaagtctggctgtcactcttgtgtttaagcgacagtctgtggatttttttgtgataaataattatatttggagttgctcagcaaatgtgtggagctgtttgcagaacttttttgattagatactcaaattcttcttcagtacttactttgaaacaaggattatgatttcacaaattctaaatgctacagttttgttattatatttt

SEQ ID NO: 469993 - DNA, 576 bp, Homo sapiens
tttgtatgtagcaaaggactctgatcaactaaaaagcagtgtgagaaaatagacttatcatggtctaggggttctagaacaagaggaaacgatgtgatgacaaccaagagccagatattgcttgcttagaccaaaatctttggagccatacttgattcttctctctctaacccccacaaccatttccttagaaaattttcctgactctgctttcaatatttatctgaccccttcacttccactatcatcttccagtccaagccactgtttcttgcctgtattattggaatagtctcctaacaggtaaccttgtgttccttgccctgcacaatcaattcttcgcatgacaacagagcatcattttaaatctgaagtctggctgtcactcttgtgtttaagcgacagtctgtggatttttttgtgataaataattatatttggagttgctcagcaaatgtgtggagctgtttgcagaasttttttgattagatactcaaattcttcttcagtacttactttgaaacaaggattatgatttcacaaattctaaatgctacagttttgttattatatttt

SEQ ID NO: 469994 - DNA, 375 bp, Homo sapiens
gtgataactcagacctctagttaaggctggggccaactacactactaccctccttcattagctcctgattgccacaggctcctctgggttccatagggctggggccaccctccatcattttataaaaattctgcacagacctccttgcctgatcatctggatccctgacatcttcctcctttttttccacacactcactccgttctgcgaagaacaccagtgacacatggggatgtggctcatckccaataatagagccagtgtcttcatgtattctcacgtggtcttaatgatcagaacgtgctctttcattctctgccctaattgaaataattctgtccctttcctcatttactttttctctgatattcttac

SEQ ID NO: 469995 - DNA, 337 bp, Homo sapiens
aaggatagcaaaaatttttaaatctattagacaaccttaggagaatcagccacctagtgttgtcaaaggaataattttatcattgcagttctgaattctaggtcattctccctcttctgccccagtggttcttaatyttcaaaactggatggacattttgcctttaaagggtaatttttttcatagttttttgtttctttgtttttcctctgcaaggaaatatttgagagttactctaatttgaatacttaattgcctaacaagccaacatggagtggtggcaaatataaagacggaattaattggaattggttaaattttgacttaaaaaccagca

SEQ ID NO: 469996 - DNA, 551 bp, Homo sapiens
ctatattcccacaaagcctaaaatactatccagacctttgcaacaagtttgccaacctttcccatagaataaaatccaaagctttttacctctacttgcaagataatgcatgcagtggccctacctccctcacacctctcctctcctgtctctcgttacactcctgtcctgcttctcttgcttaatttgccctggatcatcatcagcttagggcctttccccagacaactccctctcttggaatgccctttgcctagacctctatgtggctttttcttgtcattccagtctcagcttaaatgttacctgcacagactggccttcctcacagactctaccatgttgctctaagtcacactctacaaagttactctgttttagttacatcatggcactccttatttcattgattctgcctccctcattcggataagcattcaatgagaggaacagccttctctacttgttttcctgcagcgtctgtagtgtctacagcaggaccaggcacagagtaggtacaygtttgctgcccgaaggcttgaatgaacaaa

SEQ ID NO: 469997 - DNA, 608 bp, Homo sapiens
ttttatgtagatgaggactaagattttactagtttcagagaatatgaaccaagttaactgccattaaaacaactgcgccctcctagaagctgaacattcacatgcagaagacttattcctccctcgcaagtgagtccagtgcagtctgtggggcttggttccatgctgccrttcaggatcccacagtgttctcttatggtatcccgtcttctatccatgcctccagaggcagtagggaagaaagacaaattcgagtggaggatcatgcaaaggatcatgccatgccaggaagtgcatcccttgtgcccaaattccactggccataactcagtcacataacttcaagaaatcacaaggcaggttgggatatgtggtttgtatgcattcagacattgacagatattagcattttctcctagtctgtgctagggaaaacaagaccggcccctggggatacacttaactgttccctgttctaccctcatcccaccccgccataccattctaatttttttgctacgtaccaacagatttcttcatgattctaacatttctgtaaataacaagcaggaatactttgagcaagccacttaacctctctttacctc

SEQ ID NO: 469998 - DNA, 608 bp, Homo sapiens
ttttatgtagatgaggactaagattttactagtttcagagaatatgaaccaagttaactgccattaaaacaactgcgccctcctagaagctgaacattcacatgcagaagacttattcctccctcgcaagtgagtccagtgcagtctgtggggcttggttccatgctgccattcaggatcccacagtgttctcttatggtatcccgtcttcwatccatgcctccagaggcagtagggaagaaagacaaattcgagtggaggatcatgcaaaggatcatgccatgccaggaagtgcatcccttgtgcccaaattccactggccataactcagtcacataacttcaagaaatcacaaggcaggttgggatatgtggtttgtatgcattcagacattgacagatattagcattttctcctagtctgtgctagggaaaacaagaccggcccctggggatacacttaactgttccctgttctaccctcatcccaccccgccataccattctaatttttttgctacgtaccaacagatttcttcatgattctaacatttctgtaaataacaagcaggaatactttgagcaagccacttaacctctctttacctc

SEQ ID NO: 469999 - DNA, 570 bp, Homo sapiens
gctggttcctccacgccaaacctattcttgcagttctaagtctctaagtagccattcatctctcctcccaggcacgtgtcatgctatacacacctgctgtctttcttttttctttttgagacagagtctagctgtgtcatcaggctggagtgcagtggtacgatcttgactcactgtggcctctgccatccggattcaagcgattctcctgcctcagccccctgagtagctgggattacaggtgcgcgccaccacaccaggctaatttttgggggggagttttaataragacagagtttcaccatgttggccaggctggtcttgaactcctgacctcgggtgatccacccatccaggcctcccaaagtactggaattacaggcatgagccaccacgtcggcccacacctgccttctgaggcattgaagatgcaccattccctgtatgtattagggttgcaggattaaatataagacttcgatttaacttgggtttgaagataaacaattattttaaaatatatattgtaagtatatcctacatatttaataagtcatactaaaaatgatc

SEQ ID NO: 470000 - DNA, 570 bp, Homo sapiens
gctggttcctccacgccaaacctattcttgcagttctaagtctctaagtagccattcatctctcctcccaggcacgtgtcatgctatacacacctgctgtctttcttttttctttttgagacagagtctagctgtgtcatcaggctggagtgcagtggtacgatcttgactcactgtggcctctgccatccggattcaagcgattctcctgcctcagccccctgagtagctgggattacaggtgcgcgccaccacaccaggctaatttttgggggggagttttaatagagacagagtttcaccatgttggccaggctggtcttgaactcctgacctcgggtgatccacccatccaggcctcccaaagtactggaattacaggcatgagccaccacgtcrgcccacacctgccttctgaggcattgaagatgcaccattccctgtatgtattagggttgcaggattaaatataagacttcgatttaacttgggtttgaagataaacaattattttaaaatatatattgtaagtatatcctacatatttaataagtcatactaaaaatgatc

SEQ ID NO: 470001 - DNA, 641 bp, Homo sapiens
aattatttcattatatgttacaatgtagttattataaaactaaagtgcacaataaatgtaatgcatttgaatcatcccaaaaccacccctccccagtgtcagtggaaaagttttcctccatgaaatcagtccctggtgccaaaaagattggggaccactgctctagtatatatggtatgaagaactttaattgattaaaagcaattaagtgctaacagtgaagaggtatgaatacaagagtaaagggaaactgaattacaaaaaatatttttccattcctcctttggttttggggattttgggttttgttttgttttttgagacaagatsttgctccactgcccaggctggagtgcagtggtgcgatctcggctcactgcaacctctgcctcctgggctgaagcaattctcctgcctcagcctccagagtagctgggactataggcatgcgccaccacacccagctaatttttgtattttttgtagggtttcagcatgttacccaaactggtctggaactcctgaggtcaagcaatctgcccaccttggcctctcgaagtgctgggattataggcatgagccaccacggccggctccctcctttggtttgatgtcactttttaaatggcaagagggtatat

SEQ ID NO: 470002 - DNA, 641 bp, Homo sapiens
aattatttcattatatgttacaatgtagttattataaaactaaagtgcacaataaatgtaatgcatttgaatcatcccaaaaccacccctccccagtgtcagtggaaaagttttcctccatgaaatcagtccctggtgccaaaaagattggggaccactgctctagtatatatggtatgaagaactttaattgattaaaagcaattaagtgctaacagtgaagaggtatgaatacaagagtaaagggaaactgaattacaaaaaatatttttccattcctcctttggttttggggattttgggttttgttttgttttttgagacaagatgttgctccactgcccaggctggagtgcagtggtgcgatctcggctcactgcaacctctgcctcytgggctgaagcaattctcctgcctcagcctccagagtagctgggactataggcatgcgccaccacacccagctaatttttgtattttttgtagggtttcagcatgttacccaaactggtctggaactcctgaggtcaagcaatctgcccaccttggcctctcgaagtgctgggattataggcatgagccaccacggccggctccctcctttggtttgatgtcactttttaaatggcaagagggtatat

SEQ ID NO: 470003 - DNA, 494 bp, Homo sapiens
aaaaaaaaaaaaaaaaaaaaaaaaaggccctatcggtgttaaatgttgcccacaccacaaaagcactttcttaaagagccattgacacgttgcctgaagtcctattgacagaaagcagacaatacagtcagcctgaacaattattccttttgaaggcagctccaaaagacaggctcttctctctgctcagagctttggaaagaaaaaatcccagcccgggctaaagagaaaaatgcttgcaagatcaacctgcattgtcctgtcacaaataagcacagcggggaatatayaggaatgtccaaattgctgcctttctgagatttttatttcttcaaaatgacaaggcattcagcaaaacatgagaaacaggtttgcacagattgtcttgtggggaaatcttacattgaggcatatccttttggcaactttgtggaaaccatcaatgaaacatgtctggagggaagtcatcgattctacattgagaaggtgctgtg

SEQ ID NO: 470004 - DNA, 501 bp, Homo sapiens
tgggtcagtgcaaaagggaggtcagcctgatgccctcgagctgcactggaggagagggagcagcgtggtgaaggacggagaaagggatggcaggttctagcttagctgagcttgtcctaccactcagtgctacggttgatggctgttgtctgttgtcgtggtctgttgctattctctctctggcatctgtattaacaactctggggacacagtaatctatttttcctacttcataggcaaattgccaaaagttcagcctctaaaaaacacctataatttcaaacaccctgaggaaaatttcttttaaatatcatatcataaatcattttctaaagctttacaattacccttttgatcttttcccaaatttacattattagttttgtttacaacaaagtctgcctgctgccttgtcattgaccccactctggggagtttctcttgaaccgatcaagtgttgcaagtcattttgygggggccaaatcctggatagggtcaatt

SEQ ID NO: 470005 - DNA, 694 bp, Homo sapiens
attcagagaacataagatttattttttaagaaacgaaagttcaaatgattatccccagatcaatgagaagaagttgcatccataaacaaacacttagttatgaaacaggaatagaggacaaaagaggtcttgaaaattaaaaatattattgcagaaatgaaagatcgctaggaagtattcagaaaaaaactgagctgagtctcttgcaaagcaattggcaaatgctaaagttcagtgcttcaccttgaccacaaagaagaaaactttccaagtttttgagwaacacctgcttgtacctctgcaagaaagttccaaaatggaagatgcccggaaaccactgtggcaaaatgctttcttgaacctgttcaagacaggcaaggaaagtctcaactgcaaagggaaacaatttgagtcagagtaacttgggtttgttgttgttatctgtataaaagggaaaattgccatttgaataactgaatagcagtaatgtaccaagcggactatttaagttcagggcggtggctctgcacatcaggaatgatgccacaggtgctggccacaggtctgctggtggctgcggagagctacagctatgcagcacactcctgccatctttcctgattcatgaacatcagtatttctctaggcatagacttgaattaaatttagtgtcatttcttagtagtgtttgatg

SEQ ID NO: 470006 - DNA, 694 bp, Homo sapiens
attcagagaacataagatttattttttaagaaacgaaagttcaaatgattatccccagatcaatgagaagaagttgcatccataaacaaacacttagttatgaaacaggaatagaggacaaaagaggtcttgaaaattaaaaatattattgcagaaatgaaagatcgctaggaagtattcagaaaaaaactgagctgagtctcttgcaaagcaattggcaaatgctaaagttcagtgcttcaccttgaccacaaagaagaaaactttccaagtttttgagaaacacctgcttgtacctctgcaagaaagttccaaaatggaagatgcccggaaaccactgtggcaaaatgctttcttgaacctgttcaagacagscaaggaaagtctcaactgcaaagggaaacaatttgagtcagagtaacttgggtttgttgttgttatctgtataaaagggaaaattgccatttgaataactgaatagcagtaatgtaccaagcggactatttaagttcagggcggtggctctgcacatcaggaatgatgccacaggtgctggccacaggtctgctggtggctgcggagagctacagctatgcagcacactcctgccatctttcctgattcatgaacatcagtatttctctaggcatagacttgaattaaatttagtgtcatttcttagtagtgtttgatg

SEQ ID NO: 470007 - DNA, 598 bp, Homo sapiens
tggaggtaactgaatcatgggggcagtttcccccttgttgtttttgtgatagtgagtgagttctcacgagatccgatggttttataaggggctctttcctcctttactcggcacttctccctcctgctgccttgtgaagaaggtgccttgcttcctctttgcctttcaccatgattgtaagtttcctgaggtctccccagtcgtgctgatctgtgagtcaattaaacctctttcctttatcaattacccaatctcgggyagttattattagcagtatgaaaatggactaatacagtttccatttcctccacatgccaccacaattgtaaagcactttaaagtttgatctgttataggaagaagtgagaggggcatagcttggctccataattcccctaatcaatataatcaatatcatgtaccgcccatggcatgatcccacatgcacatgtgcacacacacacacactcagacaccacacttcatgctctgggtgcctggtaacctgagtttaccacttggaggaggtcactacctaaaatgtcgcagtaaatggtctgttgatagagcttggcttctagtgggttaaagtacacgg

SEQ ID NO: 470008 - DNA, 598 bp, Homo sapiens
tggaggtaactgaatcatgggggcagtttcccccttgttgtttttgtgatagtgagtgagttctcacgagatccgatggttttataaggggctctttcctcctttactcggcacttctccctcctgctgccttgtgaagaaggtgccttgcttcctctttgcctttcaccatgattgtaagtttcctgaggtctccccagtcgtgctgatctgtgagtcaattaaacctctttcctttatcaattacccaatctcgggtagttattattagcagtatgaaaatggactaatacagtttccatttcctccacatgccaccayaattgtaaagcactttaaagtttgatctgttataggaagaagtgagaggggcatagcttggctccataattcccctaatcaatataatcaatatcatgtaccgcccatggcatgatcccacatgcacatgtgcacacacacacacactcagacaccacacttcatgctctgggtgcctggtaacctgagtttaccacttggaggaggtcactacctaaaatgtcgcagtaaatggtctgttgatagagcttggcttctagtgggttaaagtacacgg

SEQ ID NO: 470009 - DNA, 598 bp, Homo sapiens
tggaggtaactgaatcatgggggcagtttcccccttgttgtttttgtgatagtgagtgagttctcacgagatccgatggttttataaggggctctttcctcctttactcggcacttctccctcctgctgccttgtgaagaaggtgccttgcttcctctttgcctttcaccatgattgtaagtttcctgaggtctccccagtcgtgctgatctgtgagtcaattaaacctctttcctttatcaattacccaatctcgggtagttattattagcagtatgaaaatggactaatacagtttccatttcctccacatgccaccacaattgtaaagcactttaaagtttgatctgttataggaagaagtgagaggggcatagcttggctccataattcccctaatcaatataatcaatatcatgtaccgcccatggcatgatcccacatgcacatgtgcacacacacacacactcagrcaccacacttcatgctctgggtgcctggtaacctgagtttaccacttggaggaggtcactacctaaaatgtcgcagtaaatggtctgttgatagagcttggcttctagtgggttaaagtacacgg

SEQ ID NO: 470010 - DNA, 612 bp, Homo sapiens
ctgatgactgctcctcctgaggatgggtggccctgggaccacaacatggcagtcaggagggggctgggggtaggccactagtgagtcctgcccatttctatttcagaagcaggaagaacggaattgcctcggatatgtttctttgcttttgtaattttcccaattggaaacattctctgtctccttttccacttaattaaatcttacccttcctccaatcttcagttcagatcgcatttcttctaaaaatcctttcccaactcactcatctgagactactgtagcatttatttacctgaatcagaaaaccaaaatttcaacagtaaaaagcacccttggtttgcatttgtgccaagaagtctgtgaaatagtagaattttcccattaaatacctttaaaagtaatgtataaggtaagattatagtactttcacaaacgagaactgtatttatataaaactttcaggaactatagtttttaagtaaggagatttaacataaataaagaattcattataactgatactgagttctgctgttttgaccagaataactttgggaaaactaggaaagtttcatgcyttcattttcactttgcaaaaattgtcaacca

SEQ ID NO: 470011 - DNA, 597 bp, Homo sapiens
taaaatccctcaggacaaggttgaggaagcaaggagggatgaatgcagcctccatytctgaagagattaatttctctgcaagtctcaggaaaacatcaaaagaaagaaataaaggtgaccttttaaaggtccctatacatctgattatcaagttaaaaaaaaaaaatttaaagtacagaacttcttcccacggggaggaatgtcattgcccaagtgtgtagcatgggaacaaccctctgtccccaaacctggacatgtgtcctaaggtttttagcaatactttgaggtaggtgtggaggaaggccaaacagtaaactgctggaaacgaattggtattcctggggctgaaattcctccactgcaagaagagatatccaagtctttgctcatcaagatacaagaggacaagaaaccttgatggctagaatgggacttgagtgtatctgttgaagctattagcattattgaagcgatcttagagcaactttcagcccctggagatgaatgccacaggacatgctttaagccatgttaaaatgctagaaaaacagtggacaggctcttcagtctgacctgaaagtttaccagaagttaaat

SEQ ID NO: 470012 - DNA, 597 bp, Homo sapiens
taaaatccctcaggacaaggttgaggaagcaaggagggatgaatgcagcctccatttctgaagagattaatttctctgcaagtctcaggaaaacatcaaaagaaagaaataaaggtgaccttttaaaggtccctatacatctgattatcaagttaaaaaaaaaaaatttaaagtacagaacttcttcccacggggaggaaygtcattgcccaagtgtgtagcatgggaacaaccctctgtccccaaacctggacatgtgtcctaaggtttttagcaatactttgaggtaggtgtggaggaaggccaaacagtaaactgctggaaacgaattggtattcctggggctgaaattcctccactgcaagaagagatatccaagtctttgctcatcaagatacaagaggacaagaaaccttgatggctagaatgggacttgagtgtatctgttgaagctattagcattattgaagcgatcttagagcaactttcagcccctggagatgaatgccacaggacatgctttaagccatgttaaaatgctagaaaaacagtggacaggctcttcagtctgacctgaaagtttaccagaagttaaat

SEQ ID NO: 470013 - DNA, 597 bp, Homo sapiens
taaaatccctcaggacaaggttgaggaagcaaggagggatgaatgcagcctccatttctgaagagattaatttctctgcaagtctcaggaaaacatcaaaagaaagaaataaaggtgaccttttaaaggtccctatacatctgattatcaagttaaaaaaaaaaaatttaaagtacagaacttcttcccacggggaggaatgtcattgcccaagtgtgtagcatgggaacaaccctctgtccccaaacctggacatgtgtcctaaggtttttagcaatactttgaggtaggtgtggaggaaggccaaacagtaaactgctggaaacgaattggtattcctggggctgaaattcctccactgcaagaagagatatccaagtctttgctcatcaagatacaagaggacaagaaaccwtgatggctagaatgggacttgagtgtatctgttgaagctattagcattattgaagcgatcttagagcaactttcagcccctggagatgaatgccacaggacatgctttaagccatgttaaaatgctagaaaaacagtggacaggctcttcagtctgacctgaaagtttaccagaagttaaat

SEQ ID NO: 470014 - DNA, 597 bp, Homo sapiens
taaaatccctcaggacaaggttgaggaagcaaggagggatgaatgcagcctccatttctgaagagattaatttctctgcaagtctcaggaaaacatcaaaagaaagaaataaaggtgaccttttaaaggtccctatacatctgattatcaagttaaaaaaaaaaaatttaaagtacagaacttcttcccacggggaggaatgtcattgcccaagtgtgtagcatgggaacaaccctctgtccccaaacctggacatgtgtcctaaggtttttagcaatactttgaggtaggtgtggaggaaggccaaacagtaaactgctggaaacgaattggtattcctggggctgaaattcctccactgcaagaagagatatccaagtctttgctcatcaagatacaagaggacaagaaaccttgatggctagaatgggacttgagtgtatctgttgaagctattagcattattgaagcgatcttagagcaactttcagcccctggagatgaatgccacaggacatgctttaagcyatgttaaaatgctagaaaaacagtggacaggctcttcagtctgacctgaaagtttaccagaagttaaat

SEQ ID NO: 470015 - DNA, 636 bp, Homo sapiens
gtgtccttggaggacctgttcccgcactggtgcctttttggtttccggagttgcatgctgcaatcattgtagataggcttaggaacaatcttttactacatcccaatacagacatattttgtggaaggtctcactatctcttgccaggtttgctaccatcaatcaagtaaaaacaaatatgaacaaaactaattttacaaaaatgaatgtgaaggtaactatatatataatacrcttcatactatggtttcagtactctcagacaacagaggacactaagttaaatttatgggtggagccatagattttccagggaactaacaagttgatggaaagtttttcatcacttggtgacaacagggtcaaattcactacggtagtgcattactgaaccgaacttctttggaagtgctctttgttcaggaaacttaagcaacttgatggctcacctggcatgtcagtggcaatgccaaaaccggtattctcagtctgcacagaaggcagtgtgaaatgcagaaagtgtactggcctcagggggtcccaaagacctgggttcaaattccagctttactgagctgtaaagtcatttaacgtctctgggcttcagtttacttatcactaaaatgaagggagtta

SEQ ID NO: 470016 - DNA, 570 bp, Homo sapiens
ccagctgtgtctactgggagacaaagttctttttgcttcctatttaatgtggggaaaagtcagtatcacctccaaatttggcaacacaagcaggatcttaagcaagcatcatttctcatctacaaggtctgcattttgtcgggagggagagactcttaagtgactttgaaagcctttcctttaggtttttaatggtttccacactctgtgagagaatagggataaagaaacacwcatgatttggatctactgaaacgttttacgtagagtgtatggagatcatgtaaataaaagcagggaatcagagttgctgaagataaatgtggctcttttattaatgcataaaaagaaggtgttttgaaatgtgagttgcagtcaggctggaaagaaaggaacagggatgtcccaatacctgaacaggagaggcagcccagagtgtcgatataaacaccctttttgaatgaatattaaattcatcctgctaagtgttaataggagaatttgctttggctaaaaactgggtgtttttctaccagagacttgctggctggtcactgtggaccctgggca

SEQ ID NO: 470017 - DNA, 570 bp, Homo sapiens
ccagctgtgtctactgggagacaaagttctttttgcttcctatttaatgtggggaaaagtcagtatcacctccaaatttggcaacacaagcaggatcttaagcaagcatcatttctcatctacaaggtctgcattttgtcgggagggagagactcttaagtgactttgaaagcctttcctttaggtttttaatggtttccacactctgtgagagaatagggataaagaaacacacatgatttggatctactgaaaygttttacgtagagtgtatggagatcatgtaaataaaagcagggaatcagagttgctgaagataaatgtggctcttttattaatgcataaaaagaaggtgttttgaaatgtgagttgcagtcaggctggaaagaaaggaacagggatgtcccaatacctgaacaggagaggcagcccagagtgtcgatataaacaccctttttgaatgaatattaaattcatcctgctaagtgttaataggagaatttgctttggctaaaaactgggtgtttttctaccagagacttgctggctggtcactgtggaccctgggca

SEQ ID NO: 470018 - DNA, 570 bp, Homo sapiens
ccagctgtgtctactgggagacaaagttctttttgcttcctatttaatgtggggaaaagtcagtatcacctccaaatttggcaacacaagcaggatcttaagcaagcatcatttctcatctacaaggtctgcattttgtcgggagggagagactcttaagtgactttgaaagcctttcctttaggtttttaatggtttccacactctgtgagagaatagggataaagaaacacacatgatttggatctactgaaacgttttacgtagagtgtatggagatcatgtaaataaaagcagggaatcagagttgctgaagataaatgtggctcttttattaatgcataaaaagaaggtgttttgaaatgtgagttgcagtcaggctggaaagaaaggaacagggatgtcccaatacctgaayaggagaggcagcccagagtgtcgatataaacaccctttttgaatgaatattaaattcatcctgctaagtgttaataggagaatttgctttggctaaaaactgggtgtttttctaccagagacttgctggctggtcactgtggaccctgggca

SEQ ID NO: 470019 - DNA, 613 bp, Homo sapiens
ttaaaaatgcatctctatgcatgtgatttgctaatgctttaaaatcaatgttcataagagagatgggtctatatttttcttttcttgtgttgttttactgtgaatatatttgtctcctaaaacgagttaatagctttctacatttttctrtgatgtgagatacatccatttcttcaccatttggtagaactcacttgtaaagctgtttgacctagtgtcttttcttcaggggtagatatttgacttctttttcagtatattctatgattatttttctattcaggttttctactccttgtggtaattttaataacgtatgttttcccccaactcatccatttctcctattttttaaagaagttgtatatagcattctcttatctgtttttactgccttaaatatctgcaattgtatttctttcctggttcctaataagagttatgagggtttttttgttgtttatttgtttttttagagacagggtcttgctcttttgcctaggctagattgcagtggtgcaatcacagctcactgcagcctccaactcctgggctcaagagatcctcctgcttcagcctcttaggtagctggggcgacaggtacgtaccacta

SEQ ID NO: 470020 - DNA, 646 bp, Homo sapiens
aaccaacacttaaaaaagttaagcatgtttgggttaaagtagcgtttgaccatgttagggaagcccagttcttatccttagagaggttgcattctcacaggtaaatgagatctatacaaaggatacaacataagactataattctgaaataatttaagtgtcctagaaaaatgttctgaaggagttcagagaaggartgcagaaaatctaaaaacaagtaggagaacctcatggagtgagtaggacttgagttgaaacttaaaggatgggaagggcatttaagtagaagggaaggaagagaagagcgtgttcagggtagtcaaaactcataaggacgtatggtgatgattggtacaggaaggtgtttcaggaaagaaagtgggtattcagagccctcctgccatggcttacctcatttatggctttagcctctaaaacttctcccttgttgtcagttggcttctttcttgccttttatttatttatttgcctcttttctagtctagaactcatggtcaagcttgctgaacctgtgctttagcgaccttgctacctccttgtgctgtggctcctgggcagccaaacactagaggagagggcgctgggaagccaggctgtgtggcaattcttttgaccagttgccata

SEQ ID NO: 470021 - DNA, 591 bp, Homo sapiens
agtgaccagcccaaacgtgtttaactcaaactcacattcatttcctcgccatcctcacaccttctacttacctcatctcgggagactggggctattctacatgagctccccaacgtacctcgtctccactttaaattgtttcttgattttcattcattcttcacctgtgtcccaaaccactccctygcatttacacatcacctcctcaggtgaggctcaatcgttaggtcctctgactctcccatttgaagtgtctcacaaaggagagcactgtctttgctttcaggcattctgtgctttaggtgaatgtgaaacatacaatggaaaaatctctgttacacgcattcagccccggagctcccgtgattcccagagagtgggtattagaagtgatcccaaagagaccgcccctgggaagggagaatggatatagatgacagcctcctggagtcaaggtcaaacagtcatcacttaacttgtctgagcttcagttttagcacaagcaaagagcaagaacaaatgaggcagtaagtgcagaagcgaaaaggtgctttgttctctttaaaagaagcacactgaggaatgaagtcc

SEQ ID NO: 470022 - DNA, 671 bp, Homo sapiens
cagctggaaaagggcagcaggaatgggctccaccaagtggggctttctcaagatccatccagtaagtgggtgtgaacagtgttgccagaatactggctgccagggacagtctcggtctcacagtgcccatgctatttctccccctccccactccccatgacaaatgtacagcctgggtaccagggttgcctaaaaagcaatgctacaattatgataatgattgcaagagactgaaatacatcaattatttaatccatacattcataatgatattttttttaaaaaagaatctgccaaatttggagaataacagagaaacaattcattataaatgaaaactggcaaataaagagaaagaagcatttgtcctgattttcctttgtaaactatgtgaacagcaaccaataatagataagaggtagtatcatgtacaaaagtattctaacttttaaatgaaaaggtaataaaattagaataataccatttatagcccccaatggattaatagatctatgcattatatactaattactgttaacatcataaagagacagtcaggaattgcatgcttcctatggtctkgccaaaaggactgaacctgaatcagaacctgaatctcaagtctctggatccaactgccaattttgaggaaatgcagagcatagaggaat

SEQ ID NO: 470023 - DNA, 541 bp, Homo sapiens
tcccagtcttgacagactggccttctttaggagaaggatctcactcatctgtccagccagagatttttaagtgtctctcaaatctttgggtttgtccagactgctgtmtctgtttctggtgactccttatcctccaggtgtgccatgtcctgttcgtactgagactggtaaggtaggaaccaaactattataataaatgtaactggaaatggtaatatgctgcacgtgtgtccccgtttcttatatcttcatggtgaagttaagcacaggtgtttatctttacattctctgtactaggccagggaaaggatctgtggcaaatacctgtactaatgttccactgtgtgctctgaccctggggagatagatgctgacagtgtgcctgttgtgtgtccacctctttgttttctgtggtctatggctaatcagaaatgcaaatcattgttgactcccaggtctgggtcaataaggagatagtgccttgggtgggagttatagaagttgtggcatttgttaatggccaaactcctcccaggagctg

SEQ ID NO: 470024 - DNA, 541 bp, Homo sapiens
tcccagtcttgacagactggccttctttaggagaaggatctcactcatctgtccagccagagatttttaagtgtctctcaaatctttgggtttgtccagactgctgtatctgtttctggtgactccttatcctccaggtgtgccatgtcctgttcrtactgagactggtaaggtaggaaccaaactattataataaatgtaactggaaatggtaatatgctgcacgtgtgtccccgtttcttatatcttcatggtgaagttaagcacaggtgtttatctttacattctctgtactaggccagggaaaggatctgtggcaaatacctgtactaatgttccactgtgtgctctgaccctggggagatagatgctgacagtgtgcctgttgtgtgtccacctctttgttttctgtggtctatggctaatcagaaatgcaaatcattgttgactcccaggtctgggtcaataaggagatagtgccttgggtgggagttatagaagttgtggcatttgttaatggccaaactcctcccaggagctg

SEQ ID NO: 470025 - DNA, 541 bp, Homo sapiens
tcccagtcttgacagactggccttctttaggagaaggatctcactcatctgtccagccagagatttttaagtgtctctcaaatctttgggtttgtccagactgctgtatctgtttctggtgactccttatcctccaggtgtgccatgtcctgttcgtactgagactggtaaggtaggaaccaaactattataataaatgtaactggaaatggtaatatgctgcacgtgtgtccccgtttcttatmtcttcatggtgaagttaagcacaggtgtttatctttacattctctgtactaggccagggaaaggatctgtggcaaatacctgtactaatgttccactgtgtgctctgaccctggggagatagatgctgacagtgtgcctgttgtgtgtccacctctttgttttctgtggtctatggctaatcagaaatgcaaatcattgttgactcccaggtctgggtcaataaggagatagtgccttgggtgggagttatagaagttgtggcatttgttaatggccaaactcctcccaggagctg

SEQ ID NO: 470026 - DNA, 607 bp, Homo sapiens
ctgatgtaagtgaacaatgagtaggaaacttccagttggtctttccttccatgtcttctccaccaaagctgtcctcccaggtcagcaggcaggaccatcacggtggtttccctgtatcctcatcccaacaattacactactgttgtcactctggggcccggccactgggaatgaagatgctgaaccaacagcagagggagagrcttgcagagagcaggggctaaaggccaccatgacattaacaaggaccaggcagaggaatctcagcaagttaattccactgtgggtttcacggttcagttcctgcccctgccgcagggttaaaaagaaaaaaaaaacacacacaaaaaagactttagttttttactcagaagttggaacaaagaaaaggatgagcaatggaatggtcttttttagcacagctgcaagctcggactctagcgaccagaagggctgttccagctgaaagcacagattacgcatctcctctgtgtgtccagtgaaccttcttttctcctagcacagtgcatccctgtggccctgggaaggacacattttaccaagtaaaatacctttacccttttcccaccaccattttactttgata

SEQ ID NO: 470027 - DNA, 577 bp, Homo sapiens
aagggctactataccaatacaagcaaaagatctcattttggttttcacagttttaattacttatattaaggtattgaaaatgtttgtgtttacattattctcttgcctgaaacatatatattttttgaacaggatctcactctgttgcccagggtggagtgcaatggtgtgatctcagctcactgcaacctctgactcctgggatcaagtgatccttccacctcagcctcccaaaaagctggaactataggcgtgcaccaccaggcctggctttttgtgkttttttttgcttgtttgctagtttgtttgtttgtttgtttttgtagagatggggtttcactatgttgtccaggctcgtcttgaattctggggctcaagtgatcctcccacctcagtctcccaaagtgctgggattataggtgtgagccactacacctggcctcagaattttttttttttttaatcctggagcttgggctcagttgtgaataaactctaagaatgaataaacataaaagaaacacaattgtctaggtatctaaaattttcatttgctgtgaatttcaatcaaaacaca

SEQ ID NO: 470028 - DNA, 669 bp, Homo sapiens
ttaaaaccaagtctgagggacttcaaaacctgtcccctctgcaagatgcctctctcctaaaacacagcttctaattcttaacagacacaactattctattaataaatcattagcaccatcccatcaaatgtgagatggtggcactagctaatatcagaggttgacttctaagactaaaatccatgttatcaacaatgacatatgcggctgcagcactagaagctgtcccaatgtttggcaaaacacatcagctcttcttggagccagggtattttaaggaagtgaaactatgtcatttccagagttattgagacctactcaaaatttcttttccattttcccaaaataatccaatcactggaaattttttcattgcttattgtaaatcataggaggtttcagccgaaatatcagggactcagagtatcagactatcagaaagcccagaatcattaatgacaaatcagaagagatttctatctgaaagtctccattttggtttgggtatattcaaagaacatataacctagtattatcagccatgatatattccccaaaaagaaaaccyttattcaaaacacattcagaattgcatttgtgtaatttaggcattttgctttgcatcagataaagatgtaacatgaatctcttttttttttgtgcatgtac

SEQ ID NO: 470029 - DNA, 586 bp, Homo sapiens
aggcagtcccaagggatggaaaactggattgggatagacaagtgactcaggtgggagaaactgagaatgacaactgaaagcaggcatagtcatagatattagaatcagtcccagtcaacaatagaggcacaaatttgttggcatcacaagctggctccccccagccaggctgtccagttgcacaccctcaaggttctcgtagcccaactaatggccactccacattgcacaaatgaatgaagtgctttcatgtgtccttaactatgactgagctgttctccaggacctgtctgcccatttcagcccatctcactcaatattcaatgatctagccgagtgttctgctcctgtaacaccacctccccatcaccacgtcatacaaatggagagtctgtccatcatgttacgcatagttgaatttggctccgaatctgccctctggcttccacagcactaygacaatgcctaggtaagagttagtaaatgtgggttgtatttgatgtcacacaggatctaaacacagagaactcacaaataagaaagggtcattctgtcacataaatgtgctgcatccaaatatcccttt

SEQ ID NO: 470030 - DNA, 503 bp, Homo sapiens
ccagccagccagagctgatgtgcacagccccttctacctctgcactccgtgacgccaggtgagtagctggaagtcagccgaggagcaggtattgcatcatggatattggcaaatgcaacgagcgagggctattgttttagccggggagcctgttgttaaacgcttaccagcacgccactgctcccagccttccatctgtcctgctctccaggccaggagcccctgtcacgaggcccagggagccctggagtctggagataaatcgtgacaagacacaaggccatggatggggcatcactgctgcccaagccaccctgggtccccagccccggaccttcccatctccacaccaaagcccctgtcccagacaagagcayggtccccagctctgcataactgaggaactgagaaccccaggtgtggagccacacggactcgggcatggctctgggcaagtcactctcactgcctgggctacagtgtccttgtctgcggcatgggaa

SEQ ID NO: 470031 - DNA, 614 bp, Homo sapiens
tgctgcctctcttcacgtcggggccccctrtggcacagacagacagaccaggagcactcgggtcaccagagagcttccgtccaccccagcttcaacccaggctgtgggagacaccccctccccggagggcccagggctcagctctgcctcagtttctcagaggaccggggggagagggacagagtatggagaactgagtccgtgatggccctcgttcccaactccatcacctccccttcttggtccagtgtctgggctggctctcagggtcccgggctcttctggcctctcctccagctccattccttcctgctccttcctgcctatgccctcctggcctcttctcactcactccatcccctccgccaagagggctgtaccttctatctctgtggggctgtgggtagacctgggcccagggcccagttccctgaagccacctctaatggccccaacacactcatccaggcatcccgttacctggctggctcctggcctcagcatattcatctccagcctgatatccaggcttcaagccggccccccaggcctggagggtgggccagcgagagttccacagcaccccggcctgccctgtggggaggagagctggc

SEQ ID NO: 470032 - DNA, 614 bp, Homo sapiens
tgctgcctctcttcacgtcggggccccctgtggcacagacagacagaccaggagcactcgggtcaccagagagcttccgtccaccccagcttcaacccaggctgtgggagacaccccctccccggagggcccagggctcagctctgcctcagtttctcagaggaccggggggagagggacagagtrtggagaactgagtccgtgatggccctcgttcccaactccatcacctccccttcttggtccagtgtctgggctggctctcagggtcccgggctcttctggcctctcctccagctccattccttcctgctccttcctgcctatgccctcctggcctcttctcactcactccatcccctccgccaagagggctgtaccttctatctctgtggggctgtgggtagacctgggcccagggcccagttccctgaagccacctctaatggccccaacacactcatccaggcatcccgttacctggctggctcctggcctcagcatattcatctccagcctgatatccaggcttcaagccggccccccaggcctggagggtgggccagcgagagttccacagcaccccggcctgccctgtggggaggagagctggc

SEQ ID NO: 470033 - DNA, 551 bp, Homo sapiens
acatgaagtaacattgagttgatccaccaccatattcccagaaccatgcttttgaggcaaatcaagatgtgtgtgtgtgtgtgtgtgtgtgtggtttttttttaattttaaagttaattttaaataactctaccatttgccattttgcactagaaaagaggctaggatcagtagtgtgcctaaatttgtttgtaccagttcacgaaagctgattgttaaattttcaggaattttgcaaggtggaggtgcttgaacttggtgttgctgggagtatttataccatggaaagtggcagatactacaaatcagtttgctagcatttgttttttgttttgttgttgttttgagacatggtctcactctgtcgctcaggctggagcgcagtgatgtcatcatggctcattgcagcctcaaccttctrggctaaatcctccctcctcagcctcccaagtagcttggactacaggtgcgccacctgactaatttttatgtttttcgtggagacaagatctccctatgtttcccaggctagtctcaaacgcctggtttca

SEQ ID NO: 470034 - DNA, 492 bp, Homo sapiens
tgcacagtcattgcctcaatgatgtaaagcaagccaaagccagcttcactgcacaaagcaaamctaaaatgaggcaaaaggaattcacctcagagaaagcttggattctgttgaccaagccttggatgccctcagttgaccacacagtgcagccacggagatgtctacaccagtgccccctacagtggtgaggctctgctctgaatggtcaggagtgtgcagcactggctgctaaatatttaaagcgataggcctgacaaacatgtccacattttgggaacttgctagatgagccgcaagggagtggatgactccaagaggtggagtagggtacaagaagaaaggctggcttcacgtcttttgtcgcaaggagccactgcaaatctgtttaggaattaggtcaggtatccatgcatgaattaaacaaaacaaagatctaagtgtaagaactataccccttacttcctttgcaattctcccgtggatctaata

SEQ ID NO: 470035 - DNA, 492 bp, Homo sapiens
tgcacagtcattgcctcaatgatgtaaagcaagccaaagccagcttcactgcacaaagcaaacctaaaatgaggcaaaaggaattcacctcagagaaagcttggattctgttgaccaagccttggatgccctcagttgaccacacagtgcagccacggagatgtctacaccagtgccccctacagtggtgaggctctgctctgaatggtcaggagtgtgcagcactggctgctaaatatttaaagcgataggcctgacaaacatgtccacattttgggaacttgctagatgagccgcaagggagtggatgactccaagaggtggagtagggtacaagaagaaaggctggcttcacgtcttttgtcgcaaggagccrctgcaaatctgtttaggaattaggtcaggtatccatgcatgaattaaacaaaacaaagatctaagtgtaagaactataccccttacttcctttgcaattctcccgtggatctaata

SEQ ID NO: 470036 - DNA, 603 bp, Homo sapiens
cctgccttctacttttccgttgttcktgaacctgaaagcattgcactagaggcaatatgcttttctaccattctcttctagattctagaacaggacttggcaagctttttcagtaaaaggacagatagaaaatattttagcttgtaggccctaggtctctgttacaactactcaactctacctgtgctggatgaaagcaccatagataatacatcaacaaatgtgtatggctgtgtattaaactgtatttatgcaagcaggtagctcaggccatagtttatagaaccttctatttcatactgtcttctgcaaccaagttctaacagaataaagaagaaggccacattgtcacctcattactgctaggggttgggttggaggccagactccaggccttttagccacattggtttgctcacacagaatgccagatgccagaattagttagacttatctaccatggcacaggcagccgttggatcagggcagcttcccttctcctctgccagccactagggcacatcttatggagaccaggggaagcagagttcctcatggcctttcatcccaaagtggaagaagctcagagctgggccaagccct

SEQ ID NO: 470037 - DNA, 615 bp, Homo sapiens
tatagtctttaactgtcataacttttaggaaaaaagttccaggaccactttccagagattatacaactcagccttggtgctttggtgacattttttcaaagttcttgcacacccaaggtcattgaggaaggctatagttctaagcaagcctaattttgtattcctaactgttgatctcttggggcctgagaaatatgaaattctatggttcattkataaaatgctgtgatcaaagatgaacccatgacttttacagatggccactaccaaacactgacatacaaattattttcaattataattacttaaaaaaactactgtgtgaagagctttctacttcttgtagtagctgcattgccagttgcagataggcatccagtttgggacaggcatcattttccattaatagagcctgatctgttgtgcctttttggtaaacatctaatagaagaattctaaagaaactaggatatgtatactccattttagaatgaaaagagagatcatagatacatctgagttttgattttcatttttaaaaaaatcagtcaattatagtcttttgtctgtaatattaactgattttaaataaaattaattcaggctctgaaaaca

SEQ ID NO: 470038 - DNA, 603 bp, Homo sapiens
aagagccattctgtgcctgaaataaaaataaactatatttttaaatatctttagtatacgtaaatgtcttcgcaattaaactttcaaaattatatttggaacagcaataattttacactgataaaggaaagctattggatggaaataataaaagaaagatgctaataaaacaaatttgtcacagattataatctggaaggaattagcatattttcatcagggaaatttaaattttctagtgaccatcaaccaaaatattaaaccatttttcatgttatcctcagatataaacaaacagggtaatttgttatgaatgctgaaaattggtgtgaatcccatcagttttatagtttttcctcagattgaaattttagtattacctgggctaatttagaattatcagggagttaatataagaaaattacccaaatgaagcaccagagataagccttttaatacaaagcagattaatatgtttcagtgctataaatttttctctactagctaaaaatggaatttctgtagattcaaagtaaataatcccacttaaataacatttttctattctygtttggatttattatttgtgaaattacatcttgc

SEQ ID NO: 470039 - DNA, 536 bp, Homo sapiens
acactctaggatgtgtgtccacagtattttcatccttcctgccagttccgttaactcaaataaggaagacagttttggagatgagaaaaacttgtggccacccaaaacctctttttgtgtgtctcttgcaggagtcctttggaacctctcctcatgcgatgcactcaaaatgccaatcatccaggatgccctagcagtactgaccaacgcggtgattatcccccactcaggctgggaaaattcgcctcttcaggatgatcggaaaatacagctgcattcatcacaggtgctgcgtaacgccaccgggtgcctaaggtcagtcctgtgtcacgagtgcctcctcccrccatcttcccctggccagacactgtctctttccataactttagtggctcttttactgaggatcagaccattctgaaaacatgaatgttgatgtggcaacggagtataagaagttaattttaaattttctaaccaggtaataaagacatataggtatctttctctacctaattaatgttagacttacttca

SEQ ID NO: 470040 - DNA, 619 bp, Homo sapiens
atattgctcttaaatgtccaaaagcttattagagataaatttaagtcagtaaaatctgcctaaggcttagccagaacctgacaatgtracactattctgtctttagacaatttcatgcaggcttaataggctctgtccagtttctcaagctttcctctaggcagtggatattgtaccaatatcagtggctgtccccacttcatgccctaacgccaccccattccctaccacctccaggtcgtagactactgaaggaggcacatttacagggagcattctaaagagaggagacacttgctttgccttctctagaaaggaatggagaatcttcatgggaagctatatcatgttgacatagcaaaaatttaagcacatatgaaatgtaaaatgaaaagttaatgcccttagtcctttttcgtttgaaattcatttggggacaagaaattgaatttttaaaaagcagatctatctttgtgttcctggagtatctgtctgtcactgaggaaaaaggatagaagtggggaaaaaaaagccttaaattttgttggaggcctgagttgataaggatgatggcagctagattgtgagaggccaagcggcatggggaggtggggttgcg

SEQ ID NO: 470041 - DNA, 543 bp, Homo sapiens
taatgcccttagtcctttttcgtttgaaattcatttggggacaagaaattgaatttttaaaaagcagatctatctttgtgttcctggagtatctgtctgtcactgaggaaaaaggatagaagtggggaaaaaaaagccttaaattttgttggaggcctsagttgataaggatgatggcagctagattgtgagaggccaagcggcatggggaggtggggttgcgggggttagagctgtgggtgatcagaagggaagggcttcatttctacgctctgcctccgctacctcttccccaccacccctaatcccaggcacactaatgctcccttcttcatttcttcccctttgctagttgttccttttgctccaattctgccagattcaagcatccatttttaacaaaaaacattttaaaatatggccccaaacaaatgtggcaaaatgttggagaggcttaggatgtaagaataaatgaggttattttgttagtcttctctgttttgttttatgatgaaggagtcctccagggaaatgaatttcata

SEQ ID NO: 470042 - DNA, 619 bp, Homo sapiens
atattgctcttaaatgtccaaaagcttattagagataaatttaagtcagtaaaatctgcctaaggcttagccagaacctgacaatgtgacactattctgtctttagacaatttcatgcaggcttaataggctctgtccagtttctcaagctttcctctaggcagtggatattgtaccaatatcagtggctgtccccacttcatgccctaacgccaccccattccctaccacctccaggtcgtagactactgaaggaggcacatttacagggagcattctaaagagaggagacacttgctttgccttctctagaaaggaatggagaatcttcatgggaagctatatcatgttgacatagcaaaaatttaagcacatatgaaatgtaaaatgaaaagttaatgcccttagtcctttttcgtttgaaattcatttggggacaagaaattgaatttttaaaaagcagatctatctttgtgttcctggagtatctgtctgtcactgaggaaaaaggatagaagtggggaaaaaaaagccttaaattttgttggaggcctgagttgataagsatgatggcagctagattgtgagaggccaagcggcatggggaggtggggttgcg

SEQ ID NO: 470043 - DNA, 166 bp, Homo sapiens
cgtttcatgttgtcgcctcattctgaaaaagttttttttttttttttcaactgctgaattattatggccatctgtctttgtatcactcttcttgagtccttaggagaaaggctctacacagatttcaccattttattttaagcatctsagaactggtatcagcccg

SEQ ID NO: 470044 - DNA, 619 bp, Homo sapiens
ctgggtgacatgtgacaagttaggtcagcacaaagaaaaagaaggaaggcagtgactttaacaaacagagctataattcctatttcaaaaagatatggaatcttgtcatgtttaaatacagccagggaaggaggaagaagagagcaaggaatgtgctgagggtcagtgtaccaggcctcggtggaggggtttgctctgtggagaagttaaagcttctcagggtctacaasctttgtgaacacaagagagatgtgatatgtgatccacagtgagcactattgcagccagaggccaatatatttttccattttcatgaaggcttggtccttcacacatgaaggatgatggacgaggcacactcaggaattattgggccagtgctttgagtggaaaggaccatgagtcatcctcagtggaggagataataagaaggcaatattgctaacagcctgggacagaattacaactaaagaggacaaataccgctgcgtggaggtatagatcaacttggagggtaaggcagaatcatggactcagaatacagggggaaaagccgagtaagaaggactccagagacaccaaaccatggtgattcagtcgtgtttttacttaccaatag

SEQ ID NO: 470045 - DNA, 341 bp, Homo sapiens
ttctttaaactgataattctgacatttgccctcacattwaaagtgaccacctctcagtcacagcgtgagctcctggtcccagtgtttgctgcttgctttgaacacatccattaaagctccctgctggaaacctgtcagataacaccctggacttaataaagccattggctcaccggtctcttctctcctccctgtctgggctcactgacctctgtgtctgtggtctccaggtttgccgagtgcttcctagtgtctgtaagtagtaaaaatacttacattttcacgttgtggttgtattattgtagcctcacatgccatccagggcctgacattgaggctgc

SEQ ID NO: 470046 - DNA, 638 bp, Homo sapiens
ctttctttaaactgataattctgacatttgccctcacatttaaagtgaccacctctcagtcacagcgtgagctcctggtcccagtgtttgctgcttgctttgaacacatccattaaagctccctgctggaaacctgtcagataacaccctggacttaataaagccattggctcaccggtctcttctctcctccctgtctgggctcactgacctctgtgtctgtggtctccaggtttgccgagtgcttcctagtgtctgtaagtagtaaaaatacttacattttcacgttgtggttgtatyattgtagcctcacatgccatccagggcctgacattgaggctgccttatgggacctgtgctggttgagcccctgctggagctcttgttttggggcgtctggttctcctggggacaggagcttccagctaacttgattgaaaatctgatgcctttcattgaaacactgggtcagatgatgtattcatgggcttcggctgccataacaaacaccttagcctgggtgaattaaataatagaaatctatttttcacagttctgtgaataatgtgctattgtaaccactttaaaatgctgaatcaaatgaaattaaccacatacacagtgttaaattaccatca

SEQ ID NO: 470047 - DNA, 405 bp, Homo sapiens
gggaaatctgccctgattttccagatcctgcgtcctctagagctaatccaaattcccartgccaagccccacttaggatcctgctccaaatggacccatctcctgaaaccacaatgctgcttctccttgctgtgaaaaaaaaaaaaaaaaaaaatcccaaagagtgaaccacagactacacagggaatccctctgggatattatgtttccagtccctaagccacagcaggaagttgcctgtagataccaagggagatcattcagctaagatctgaacagtcaggaaaactcccgaggctagagttttgtccggttcctttctcttccttacaagacataatacggtattgacaaactatggtctgctagtcaaattcagcctactgcttgtttttgtaaataaag

SEQ ID NO: 470048 - DNA, 405 bp, Homo sapiens
gggaaatctgccctgattttccagatcctgcgtcctctagagctaatccaaattcccaatgccaagccccacttaggatcctgctccaaatggacccatctcctgaaaccacaatgctgcttctccttgctgtgaaaaaaaaaaaaaaaaaaaatcccaaagagtgaaccacagactacacagggaatccctctgggatattatgtttccagtccctaagccacagcaggaagttgcctgtagataccaagggagatcattcagctaagatctgaacagtcaggaaaactcccgaggctagagttttgtcyggttcctttctcttccttacaagacataatacggtattgacaaactatggtctgctagtcaaattcagcctactgcttgtttttgtaaataaag

SEQ ID NO: 470049 - DNA, 596 bp, Homo sapiens
ttttttaatggcagccaaagctgactcatactgaacccaggggcatgactccatgagctcagaaccggctcagagcactttcaggctaagtccatgctggacaaaataggaactgacagagataaggcagactcgctctctgggctggggggacacctccaggaagagtgcaggctggccaggaagcaggatcctggctggggaggggcaggatggaggggaggattttccacctgcccrgagggacccttggggccccagtggcaaatcttcctccctctgaggtcacagaaccacactgagaagaaagggttgcaaagctgggactattctctggagctagggaggtggggacagcggtgccatcccctgatcacgcccatcatccactggggaccccacccagtaccctgaggggaggggtcagaggagggggcaaaggtcagagggggggcagtacctttagccgcttggcctctgggcactctgtgtccatccagtctgtggccacctcccccatcaggctctcacccttggccatgttcctggcggacaatgggaagaggggatgtgagggggacactagaggtgtccag

SEQ ID NO: 470050 - DNA, 569 bp, Homo sapiens
ctgggatcagaccattagtggtttcctattgctgggagaaagataggatcacccctaagatccccaagacccattgacacagagcctacctaagacaggttgaaccaaagcagcagaaaacatttactctccccaccctctgccacatcagcaagtgtcaaggaactagaaacagaagcctattgctagagaacaggagcacagagagagaccctatttaaggcacagattcacagagaaaccctaagtcaaaggtggaacaggaacattgaggaaaacactttggtaaccacactaaaacccaactctaaagctggtattttgaaaataaccacagaacaacaaaactcaagtcaagctcaactactaattagattgactcaatgctacctcctcctccaaagaaaactaaamgcatagtagtaaaagaaacatgtccatttccaggcataaacattttcctttacatcatgcaaagattttaataaaaaattatcagacacaggacaaaaaaacaaaaactcattgtgaagagacaaagaaattaacagaatcatactcagatatga

SEQ ID NO: 470051 - DNA, 569 bp, Homo sapiens
ctgggatcagaccattagtggtttcctattgctgggagaaagataggatcacccctaagatccccaagacccattgacacagagcctacctaagacaggttgaaccaaagcagcagaaaacatttactctccccaccctctgccacatcagcaagtgtcaaggaactagaaacagaagcctattgctagagaacaggagcacagagagagaccctatttaaggcacagattcacagagaaaccctaagtcaaaggtggaacaggaacattgaggaaaacactttggtaaccacactaaaacccaactctaaagctggtattttgaaaataaccacagaacaacaaaactcaagtcaagctcaactactaattagattgactcaatgctacctcctcctccaaagaaaactaaaagcrtagtagtaaaagaaacatgtccatttccaggcataaacattttcctttacatcatgcaaagattttaataaaaaattatcagacacaggacaaaaaaacaaaaactcattgtgaagagacaaagaaattaacagaatcatactcagatatga

SEQ ID NO: 470052 - DNA, 569 bp, Homo sapiens
ctgggatcagaccattagtggtttcctattgctgggagaaagataggatcacccctaagatccccaagacccattgacacagagcctacctaagacaggttgaaccaaagcagcagaaaacatttactctccccaccctctgccacatcagcaagtgtcaaggaactagaaacagaagcctattgctagagaacaggagcacagagagagaccctatttaaggcacagattcacagagaaaccctaagtcaaaggtggaacaggaacattgaggaaaacactttggtaaccacactaaaacccaactctaaagctggtattttgaaaataaccacagaacaacaaaactcaagtcaagctcaactactaattagattgactcaatgctacctcctcctccaaagaaaactaaaagcatagtagtaaaagaaacatgtccatttccaggcataaacattttcctttacatcatgcaaagattttaataaaaaattatcagayacaggacaaaaaaacaaaaactcattgtgaagagacaaagaaattaacagaatcatactcagatatga

SEQ ID NO: 470053 - DNA, 522 bp, Homo sapiens
tctcatggaatattcctccaattcttagaattcccctagactaggccgggcatggtggctcacgcctgtaatcccagcactttgggagggtgaggtgggtggatcacctgaggtcgggaatttgagacmagcctgaccaacatggtgaaaccctgcctctactaaaaatacaaaattagctgggcgtggtggtgggcgcctgtaatcccagctacttgggaggctaaggcaggagaattgcttgagcccgggaggcggaggttgcagtgagccgagatcatgccacttcactccagcctgggtgacagaacaggactccatctaaaaaaaaaaaaaaacaaaaacaaaaacaaacaaacaaaaaccaacaaaaaacaagaacaaagaaaaagaaaaaactccccgggattaactgtctcctgcctccccctggatccgctttgcaccacctccaactcttgtcagcctgggagtctgacttggaggagccatagcctaggtgcccatgcctgtgggctgcca

SEQ ID NO: 470054 - DNA, 617 bp, Homo sapiens
cctcactctgctgggtggtcgtttatctgtttacatgcttgtctccattaacctaaatgtgtcttcaggacaaggaccaaatcccatcagctttcaccacccagcacagagtagcgctcaataaaggttggttaaaatgcttgaaggaatgtgaaagaggctgttaaaaacaacaggaagttagaaatatacttacttctaagcaaagggattatcttgtgtttctcaaagtaatctcttcagctaaattagcaggcctcaggtgggtaggctaatgtaccgratgaaagcgatacacggcaaatggagaagtcctttaaattctaagttcccttagggcgagggtcgctccacaaggttaggatcctctctgagatcaccatgcccctctctcctgctctcatgcacgttcatgagcctgtgacttggtggagagaacattctgtttacagtgagaggccaggactgaagtcacagctctgcaaaaatgatcagctttcggcctagaaccagtgactaactttttgggcctcactttcatgaagacgcatttgatatttgcttttacacttttcttatggttaattttgatgcagagagacttcacatacagagtg

SEQ ID NO: 470055 - DNA, 504 bp, Homo sapiens
cggaacctaggacccagtctcagctcagggtgygcacacctggtccctggcaagaccaagcaggaagaagccaggatggcggaagacctcaaagactccagttctcgccagcccctctgccgccctccactgcaatgcggtcccagggaacttaagtgatgtgtttcctgggcctggggcagggggtgccacggctcttctgggctaccctgtacctgtcagcaagcctctctcctcccgaaagctcactggacgctgggcctttgggatccctggctgagttcaggatcagaatgacctgtggagccttagaagtcacagaccagaggcacagccttggaaactggactttaaacattctttcccaggagattccgataaaccagggactcaaccctcactgcactaggaagcccctccaggagctgtctgtgagtgaacaactttgagacaccctctggtcacctggcacaggtgtgcctcccaccctgggcagccacgtgg

SEQ ID NO: 470056 - DNA, 504 bp, Homo sapiens
cggaacctaggacccagtctcagctcagggtgtgcacacctggtccctggcaagaccaagcaggaagaagccaggatggcggaagacctcaaagactccagttctcgccagcccctctgccgccctccactgcaatgcggtcccagggaacttaagtgatgtgtttcctgggcctggggcaggggrtgccacggctcttctgggctaccctgtacctgtcagcaagcctctctcctcccgaaagctcactggacgctgggcctttgggatccctggctgagttcaggatcagaatgacctgtggagccttagaagtcacagaccagaggcacagccttggaaactggactttaaacattctttcccaggagattccgataaaccagggactcaaccctcactgcactaggaagcccctccaggagctgtctgtgagtgaacaactttgagacaccctctggtcacctggcacaggtgtgcctcccaccctgggcagccacgtgg

SEQ ID NO: 470057 - DNA, 504 bp, Homo sapiens
cggaacctaggacccagtctcagctcagggtgtgcacacctggtccctggcaagaccaagcaggaagaagccaggatggcggaagacctcaaagactccagttctcgccagcccctctgccgccctccactgcaatgcggtcccagggaacttaagtgatgtgtttcctgggcctggggcagggggtgccacggctcttctgggctaccctgtacctgtcagcaagcctctctcctcccgaaagctcactggacgctgggcctttgggatccctggctgagttcaggatcagaatgacctgtggagccttagaagtcacagaccagaggcacagccttggaaactggactttaaacattctttcccaggagattccgataaaccagggactcaaccctcactkcactaggaagcccctccaggagctgtctgtgagtgaacaactttgagacaccctctggtcacctggcacaggtgtgcctcccaccctgggcagccacgtgg

SEQ ID NO: 470058 - DNA, 550 bp, Homo sapiens
actactttaattctctgtaaagcttaatatgtaactgttcttgtgagctcctcacatctgtagtttgtctctttgaattatgggtgtccaatattaaaacagaagtgtgggtggggatagccatggaaccaatggaaggacagacaccctctgtttcacttgggctggtttcctcaccagcccctacacatcatattctcattcttaggttggaacctccttgaagttagttcctatctgaaaacttttcttttcctgtttcatcttcccaaactttactcaacctccaagacctcctttttctcccttctatagttccaaattcctcactagattcctggttagtcacatttatcagtgaactcagaaaccacttagtttcttttcagtgagggtctgtcttgggtaacctayagatattccttaccagcaaagaccattttgttatttccccagttaggaattcaattcaattcaacacccttccatggagttgtctactatgtccaaggaactagactggaaaatggaagactcctctttgggtatg

SEQ ID NO: 470059 - DNA, 614 bp, Homo sapiens
aaggttcaacttgtcaacctgagcaacagatacaaccatgaaaagacccacagacaatcctgaatgagtcagtcagcasttcattagattcagcgtaattctcgcacgcaactgggaaaaatgggcagcagggcacatggttaacagaacacactttttacgccatcaaaactaccttcaagccctgtatcagccacttcttagcaaaataagtcacccaaagtttagagtagatttaacaaataacgataaaagaaactcagttgaatctgaatttcagataaacaatgaataatttgccagtatatgtatgcctcatgcaatatttggagcatacttatatttaaaaattatttgttgtgtatctgaaatgcacaaataactaggggtcctatattttatctagcaaccctaccaaatttacatatccccttggtaatagggggcatgttagtaaaaccagaatatagaattgtaagattgaataggccatttaaatacattagcaaccgatccctaaaaattagcttgttatataattgttcttctgccttaaccacctctttaggtgttcaatcatcccctgcaatgtggagccccatcctgagccacag

SEQ ID NO: 470060 - DNA, 576 bp, Homo sapiens
tggctttgatgggatgtcaacaaatcactcaggtcttgctaataaccctaccatgaacaactgacatacaacagctaatcattcaccacagactaagtcctgggcatttcgcaagaggtagttcctatgtagggacttaggarggaagactagggaagggaaagaagaaactatgcttagataacgagcacagttccggaactaaaaccttccccctggactcttttttatgccatctaccatcactactcccactgttccatgctgaggacaattcatgatgacgacaggttaaatcaaacccatgtacacgaggttttagccaccgtaacagccagctctcccacactctggcgtatcaacaatgccaggctatgttcacgtgacctgaagataagggagcagatcattcaaataactttttcatattactttctgattctgaaagcaattcaaaaagaacagtagaaaagaaagaaaacagtgacaacttatcacctaatgacaacctgtgaggaaaaaagttaaataaatgctatgtgtaattttacacagatagcatcatactttactttt

SEQ ID NO: 470061 - DNA, 523 bp, Homo sapiens
cctcagccagttgtaacacagggaaccccaaaatttgtttaaaggacttccagcagcatatatgccccaaaaagctgggaacttaatcatattagaaatatgtagtgacaccactggcctcctccaaatgactaagtttgcagagaatggcagaagattacaaatagcaacacactgacagccagtgaaagtccaccaggggcaaaggaacatgagatcaacagaacaggtggaagaattgttcaagtggagcagttgggcaacgggtggacatcagtgaaagggtcacctgagttctccatatttcaatagttcccaaagacatcactgcaaggcagcacaatagacaaacaacattagaacaagaaagaatagaagtcactggaggtaccctagatcctaccttgttttacagctaacttgatgaaaggagaaaactgttgccactcagaattacaaccctgagtcattaagaagcagtgattttctcaaartattatgtttaaaatggttacacaaaaag

SEQ ID NO: 470062 - DNA, 475 bp, Homo sapiens
taaattaaaatttaagtctgggctgggcacggtggatcaaacctgtaatcccaacactttgggaggccaaggtgggaggatcacttgaggtcaggagttcgagaccagcctgaccaacatggtggaacccccgtctctactaaaaatacaaaaaattagccaggtgtggtgacacacgcctgttaattccagctactcatgaggctgaggcaggagaatcacttgaacccgggaggcagaggttgcagtgggtcragattgcaccactgcactccagcctgggcaacagagcaagactccgtctcaaaaaaaaaaaaaataataataataataataaatagtaataataaaataaaaaataaaatttaagtctggatgagtttactgagagcctgctctagggtagacacttttcattcactgtgttatttggtctccaaaaattctataacgcaatttcatcccatttcataga

SEQ ID NO: 470063 - DNA, 539 bp, Homo sapiens
ttcattaatgcagatgagtggcttgttggcacaagaactttccagctagagctgggggcagagtccctgactctttcatcttaaacactgtgatactgctcactttargctggagcttctcggtgacattcggggctggccattcttagttgtgggggcctgtcctgggcattggagaatgtttagcagcatccttgggccctacccactagatgccagtatcacctccaagtggtgacaaccaaagatgtctctaaacattgccaaatgtcccctgggggacaaaattactcccatttcagaacctttgttacaaacttatcaacttctagccgatagtttcaacagggaactgctgtagggctttaaatgtgtgaaacaatgagatgagggagggggcttgtgatgtgatctgattgctgctttgagacggtcccttggctgctgcttgcagggagaaaggagacaagaaggtattccaagagacttgctcaattcatggtattagtccaggaaagaggggataatggcatagagtg

SEQ ID NO: 470064 - DNA, 511 bp, Homo sapiens
gccatcagccaggaaacaaatccactgcttttctattccttggcaacccttggcctgtcacgtacttttgactgtcttccaaacatcgacctaacaagacactcagatttcagtgctagcgaagacactttgtctastattgagctaggatgatgaggatggaggagacagtaagccccagtgcacatccctttctccctcctcttggtccaaggagcacatgctgcctcatggactttgggatgagtctttgcatagccagctcattgcctcatgcatgccttggcagtagttcatgccacatgccctccctatgccccatttggttgagtccaaaaaagttatgagtttattgcagcaggctcaagggctgctaaagggagaaaagaacaccagtagaagatccttctggcatcttaaaaggctctttggagaacttcacatgaggacaatgactcaatgtggtcctttccagattttcagttctttccatggcagctctaggagaaca

SEQ ID NO: 470065 - DNA, 599 bp, Homo sapiens
ctgtggtgagttggggctatcacactggatgtgcactgacctcagacatgcccatctctttgcagtgcatcataggctttccccaagggaagttctgaaagccccactcagaaagcacaacaccaggatgttatagacaagactttgaactttagaggcaggtagctctggattttaaagaggaaaatgaactgagcccatgctttttctctatatatcgtccctgttttctccttcccttcattggctttgtttactctgtctcaatgcttcctttcttccttctttcttgttttactttcttatagtcacagagcaatttttcatagaaacataaaacatttttaaatactattaacactyggtaattcaagccccatctttaaattttctcagctagaaatgtagaaaagtttctgcctccgttgtgctttttttctaactaatcagaacaatttggtcatttaggaattggactaatttttcactcagaattgtctgaaacttttctcacacccataattcagatctcctttgtcattccattccattctcaggtaaggatatggcactgtatgtcagaatataacatcaagcct

SEQ ID NO: 470066 - DNA, 651 bp, Homo sapiens
ctgcgtagtttctgccttgaagctatttggcgagaagtttcgcctgttcctttactttgtgggtcagggcttgggtgcttgagtgggagaaacagaaagccagctagccctggaaccccttctaagatcgtcatccacccagccatccataaatctgttcmtccatgaaacaaataatcattgagcaccccttatatgccagacacacgtaaggatgcaagggccgcgttctcattctagtgggtggggacagagagtaaacaaattatctacttaatttcagatagtggtaagtgatagaaaataaaacggggtgatattgtcagaggcgtttgaaccagagcgactccattccgagtgagggctaggaaaatgaagctgaggcttgctgggctgcattcccagaaagttaggtattcccagcctctagatgtttacggttaagggaacaaattaataacgtttactaaacagacccagacttgggagtgtccagatattccgatatctggagaagaaaggcattcctaattttgccttaaagataacaacactgattcttgcaaaacatagtaattaagaaaattaatcctctatcacaaacccttgtagcagagcacatctcctcatataacaagcattgtacctagg

SEQ ID NO: 470067 - DNA, 516 bp, Homo sapiens
gctcttgacttgaccttacagcaaacattctttttgaagaaaagtcacagagcttcaccccactggccgaaaccctccactattagctgccactgcacacagagtcgaagcctaaggcattgcacttacacattttcatgttatattgttgcatagatgttrttagtttctgagtagccaggagagcattttttctgcaattaaacatatcgaatgcaccacattctttaggtcccctcaaaggcccttctattcactctatttcaggaagggtgagggaaccggtgaataaacaaaggtccttgctttaaaggctgttatgaccataaagtctgtgtatttcacagctcatgacagcagcatcctgagatattatttattgtcaaacttctcttctcaggccacacatcccattgcaatggggaatgggacagagcaaattgcaagttcttggttctatgttccagttgcaatgttgctttcagttttcctgctgttaaaacagcttttgctggt

SEQ ID NO: 470068 - DNA, 516 bp, Homo sapiens
gctcttgacttgaccttacagcaaacattctttttgaagaaaagtcacagagcttcaccccactggccgaaaccctccactattagctgccactgcacacagagtcgaagcctaaggcattgcacttacacattttcatgttatattgttgcatagatgttgttagtttctgagtagccaggagagcattttttctgcaattaaacatatcgaatgcaccacattctttaggtcccctcaaaggcccttctattcactctatttcrggaagggtgagggaaccggtgaataaacaaaggtccttgctttaaaggctgttatgaccataaagtctgtgtatttcacagctcatgacagcagcatcctgagatattatttattgtcaaacttctcttctcaggccacacatcccattgcaatggggaatgggacagagcaaattgcaagttcttggttctatgttccagttgcaatgttgctttcagttttcctgctgttaaaacagcttttgctggt

SEQ ID NO: 470069 - DNA, 620 bp, Homo sapiens
acacctgggctgtttgtagctcttggctattgtgaatagtgctgctatgcacattcgtgtagaggtttcagtgtgaaaagatgttgtcctttctcttgggtacaagcccaggagtggtactgttggttcatatcataactctatgtttaaccttttgaagaatagccagactgttttccaaagctagccattctctctctcttttttttttgtgaggcagagtttcgctcttgtcacccaggctggagtgcaatgggacgatctcggctcactgcagcctccacctcacgggttcaagtgattctcctgcctcagcctcccgggtagctgggattataggtgtgcgccaccatgcccaactaatttttgtatttttagtagagacagagtttcaacatgttggtcaggctggtcttgagctcctgacctcaaatgatccacccaccttggcctcccaaagggctgggattacaggwgtgagccatcatgcttggcctagccgttctcttttaacccttactccatctccctcacctgcacccatgaaccctcacccctgggtcagcgcaggaacctgcctttgtaccccatacccaagctgctgagcatggagactcaca

SEQ ID NO: 470070 - DNA, 535 bp, Homo sapiens
gccaaaatatttgtctcttcctcttctctgatttccttccactcttttatttttcttttgttttccactgaatttgtatatttaggattaccttccactgctattctggattggtattttaatagccatcaaaaatctaggtcaaggaaacttttcagatctcctaattacctggcggtgactgataaaaaggactaaatgatagtgattacttcttactgtttttattcacattggaatatattctttctctcctggtttataccattgtagaaggaaaagtgttggagctgattcattgtctaatttccggttttctggtttggttacctcttatcaatgtttgtttcttttatttcaagcaatattattgccaccacttctaaaartgattacagtcatattttatttctcaatcctgtttatcatttataaatattatttcaagggacaactcaaaattaatctttcttctcagagcaaaagagtaagaggatcttagtgtagcacaaagaggtcaccaattctctatcac

SEQ ID NO: 470071 - DNA, 567 bp, Homo sapiens
cttacatacacctcctaaactgcttcaaaaggaatctggttctcctggccccagtactgaccttgaccctctccccagtcctgagtggtcctggaaactcagtgtccccagcacctaattcatgctgatcctctgactttcttgcttggcctctggagagacagagagcacattctgaacactcctccttttgtgtcggcatctctrtgaggtgctttggaaggactccagccaggcatggaagggctctttgataatatctgacgggtgggtaagaatttcgggcacctggccaagatacacattgcctgtaatcgttaactcagcctgtaaacagttcaaacgacactgagaggccgtcagttattacattagaagaagcctttcatctctcttgctcagaagccagggcgtccagcgttggcccccactgtggtgactggagccatggtactctgtgcacagccaccaaagcccaagacatgcagggacacacaatggaacctgctccaaatgactgactttcaaactttcagcattggagcaataactaaatcgttaatttcc

SEQ ID NO: 470072 - DNA, 607 bp, Homo sapiens
ttttattgcactaagaatcaggcattctgctggaggaaataggtaagagagtgggtcacaatgcagcattgacccacagtaagaggtaagtgtcatttaagaattttgtatagatggcttcaggggaatatatgagggaaagtatttagtttctggggactgagsgctggtcaaaggattggagaagggcccaatttgaactggcatggggagtcaagggcaaaaagaggtagagagctataggattggagttctcacagtctttggatcacagggggataggagaggtgccattttttttctctatagaaccaaggaaatagggaaacgtccatgggaagagaaaggaaaaataatttggcagagaaccaagctattttcccatcatatgttttctgtaaaagacttcttaggagctaagacagtgtttttctgctttcattctctttaatgcctagaattctgccataaaaggctatttatatatcttactttttagttcctaggagcgcaagagatgctactattgggaatttctaaaatattcagaggatggaaataccagctggcaccaatgctgagatatacaggcaccatccatagagac

SEQ ID NO: 470073 - DNA, 524 bp, Homo sapiens
actgatgaggttctgagaagggaaccccacatgtataggtcattagaggggtccccatatgtataggtcattaagaggaaaagtttagccaagttgaactcctttctagtaggaggatccgttgttttcactcaccctcctctttgcactrggccctagaccccttgtagttgtgttagttgtaactattggaccccttgtcctaaagccgtctcattttctagggaatgttaggctaaggatgtttgtgagctgagtgagataatcttttggggatggaaactgacctgtggctggccggccaaggacataagaatgaagaacttttgtcagtcctagctttgagtcagcctcatcccaacatcagaaggcagttttgccagctttccagtggagactcggtacttggctttttcctagattcctctctcagaattgagctcaggcccagggaggctcaggctgactctccatttcttttccctccctagaatcattgcgatgatgagtccagaggacagctg

SEQ ID NO: 470074 - DNA, 310 bp, Homo sapiens
tgctgtcctgggtgtctgacccggacgtggctgcttggtgagaatggaaacagttgtggggaggggaggcaagaggagcttgcacaaataaccacattcaggctgcctcagccctacactgaactgggccctaactgacagtctcacaggaagcaaaagacatagcayaggcattgatgcttgtgggggaagggtggcctgttttccttcctggactctacagactgtgccaagtgggctctccccgggagctgctgctgaattagctttcttgctttctctggtacttgaacatgcaggtggtgccact

SEQ ID NO: 470075 - DNA, 546 bp, Homo sapiens
tgctgtcctgggtgtctgacccggacgtggctgcttggtgagaatggaaacagttgtggggaggggaggcaagaggagcttgcacaaataaccacattcaggctgcctcagccctacactgaactgggccctaactgacagtctcacaggaagcaaaagacatagcataggcattgatgcttgtgggggaagggtggcctgttttccttcctggactctacagactgtgccaagtgggctctcccygggagctgctgctgaattagctttcttgctttctctggtacttgaacatgcaggtggtgccactcagcaacccagacaggcagaaaggtgctggagtcccatcctctactgggaacccaaagaaactaagacaaggacttggttcacagctccctgggagtgggcggtcctggtactgctgccctgctttccatggctatgagggcagccatgagagctatgtcctgccccattggcccattgtgtctgtcagagtttcagtcccgtcctggctgccgaagttctgagtgcatagcatct

SEQ ID NO: 470076 - DNA, 634 bp, Homo sapiens
ctggtcttaattctccttaccattagagtgttcagtaatcatactgttggggttttttgttgtttgttctggtctttctctctggtcccagagttgaccaactctacctgacttggtcaaatctgaatragaattacaaattatggggaacaaggtctgtctgaattagctgaaattcctcatagctacaaaagaaaggggaaaaaaaaaacaggggcttggtttctgtgtttgctttctgtcttaaaaaacaactgttctttcatttacttttcttcaccctattccttcctcccctttcaccatcttcaataccagggaaaatctaaagaggcttctaatgactcaaaccccctaaagaactcagaacacaggcacctcttgcccctttttggggtgttctgttttctttgtagagtttcaagagtgatgggcagattcttcttaggtctaaaggtctgctctcctgtatttgcataacctgacctctttggctttagagggtaccaaagattaccttgtactgagagaggatttgaccttggcatgtgtaatggtggacaaaaactaacaaagttaaagctggctgaggacagttactggaagtgttcttcacttttttttttcctcctag

SEQ ID NO: 470077 - DNA, 255 bp, Homo sapiens
gtagaagtgtaaacaagaagaaaagatttagtagtagactatttccwactggatttacaggtgtatataaacacaatacatataaatgtataatagtaactttcatgttttagtccaagtttttttttttattactttgcatgggatattaagtgatttatacagctgaacttttacatttttttcacagacaagcatatcttaatttgcttaaaattttcaaacagaaatttgcaagccttttaccttttaaaa

SEQ ID NO: 470078 - DNA, 480 bp, Homo sapiens
tctaaagtgccaaccattgggtcctagtggagagcggctggtccagatgtgtgtggatcattcatgtcagtggagggcctcagtggagggcccagcagtgccaggygcaaagtaggttgtggcacaaaagaatgcatcacctgccgcctggcctctccattgctctctggggtcctaggtgtatttgtgtttcgtaagagactggtgtgtgggtttgtgtgaatttggaggggtgagatgagcaggatggaaaccgaactattcaaagcctccaagacaaaaccttcaggaagtggaggcaagagatgggctctcatctgggaccctgaagcttgatctctctttgtctctctcctcactctacgcttaggtggaagggggcatcagtgaactggaacggctcagaccccatcctgtgaccgttggatgtgggtaaaccctgtggtccaccactcatcacctcatcaccgaggatgacag

SEQ ID NO: 470079 - DNA, 580 bp, Homo sapiens
tgttttgggttctgttgttttttaaccaggaagatgtgccgcaaggtgagtctaggggtgcagcaggtctgagmaaggtgactggcagcagggcccctgccgggaaggcaagtgggctctggcctggatgtgccagaggggtaaggagccagggagctgaggaggagaatccagaggacgaggcagtcaaggaggactgtgggcctggaggaaggggaggttgggcaggcagttagcaggagtaggggcacctgaaggggaggtgctgcttgagtcaggaagaagatgagttgtttctggatatgtccagtggagcttttgtttccacagtcaagagtggggcagaaacgcagatcccagggaatgttgggaggagctggcatgggctgaaagctgaattccttggagggtggacattgccaaggtcagtatcttgcagtggagaccacgtgcttggtgtggggcagggcaagaaaacggagtggtcagagcagagccccacccaaggcgagggaagagccagtctcctggaggcaggaggttgcattttcggacccttaggagaggttgggaggtcact

SEQ ID NO: 470080 - DNA, 580 bp, Homo sapiens
tgttttgggttctgttgttttttaaccaggaagatgtgccgcaaggtgagtctaggggtgcagcaggtctgagaaaggtgactggcagcagggcccctgccgggaaggcaagtgggctctggcctggatgtgccagaggggtaaggagccagggagctgaggaggagaatccagaggacgaggcagtcaaggaggactgtgggcctggaggaaggggaggttgggcaggcagttagcaggagtaggggcacctgaaggggaggtgctgcttgagtcaggaagaagatgagttgtttctggatatgtcsagtggagcttttgtttccacagtcaagagtggggcagaaacgcagatcccagggaatgttgggaggagctggcatgggctgaaagctgaattccttggagggtggacattgccaaggtcagtatcttgcagtggagaccacgtgcttggtgtggggcagggcaagaaaacggagtggtcagagcagagccccacccaaggcgagggaagagccagtctcctggaggcaggaggttgcattttcggacccttaggagaggttgggaggtcact

SEQ ID NO: 470081 - DNA, 583 bp, Homo sapiens
tgcccttctcaggcttcagcttcccggtgaataagaggaggggctggcccagaaccctcccatgactgtcactgtgggttcctgtgtgattcacagtattgtgggttggcttttggagactggactgtagccaagcaggtggtggtgccctggttaygggaagaggcacagtgaccccactcagcacagcacaagccctgctgggctcaggatggagtgaggctgaggtcatcatgggggctcctcacaaatgcccggtacggggccgccccgggaggatgatgtggctggctcacagcagctccacctccctttctctcctgtatggtccgcagggctcctggagctgggcgccttgggcccctggagccgcactgtggttctgggaggtgaacacatatccttttcctctgcaggtatcagtaggtaaagaggaaacttttccactttcaatcaggctagtgccttcctgaggaagaaacagtatttcctaacattgagaagggaaaaatgggtctctttctcacatctgtaagttcccattcattctgtctctgtgtcttacacacacaccacacacacc

SEQ ID NO: 470082 - DNA, 461 bp, Homo sapiens
gggtcaaggggctggcacaatgctgggagaaatgcctcaggactggaggtcctcccactctgctgatgtgggagaccccccacgtggggactgccagtataccgcttcccttcgggctggccagtcctcaagtagagacactgaggtagggcaagcgcatctacgrggaagagcgctgcctcgggcgttaatgggagagagagctgaggcagaagggggatcggaactcccgctccagaagcgtgaaggtgggggtgtatgagagcacccacccagaaccttgcaggaaaaagttgctttgcacatgggtgaccccgcaggccacatcatccacacatccatacgccgccccgtaggtaaggggtccgggcctccaggacaggtaagaatcccaccccagccttgttgcccctatgtccgcgggcagccccccggctcgacgagacccgctccccggacac

SEQ ID NO: 470083 - DNA, 656 bp, Homo sapiens
agcctcctctcactggcttttgtgttcttttgacaagccccatctttttgtcaagcacttccttatattttcgcatcataaaatgttccaagttcattttgaatttttcctaccctggaataaaccacttctccaagaagccctggctccttacattggaaaatggttattgagaaaccaagacytggttgctaagttttgatggaaccaggtctggcatggctacatgttggcagcatgagggaaggagccagaagaggggaagaggttgaagatgcaggagtgaggggcatcactgggggatgggtgagatgtgaggcttaaagcagcaatactcagtagggtccccagtcctcacaggcttttgcatgcttttgcatgcatgcttatttatttatttatttattggttttgagacgggtctccctctgtcacccaggctggagtacagtggcatgatcatggcttactgaagcttcaacctcctgggctcaagcaatcctcccacctcagcctcccaagtagctggaaccacaggcatgtcccaccactcccggctaatttttatatttcttgtagagatgtgttttaccatgttgcccaggctggtctcaaattcctgggctcaagcgatcatcctgccttggcctctcaaa

SEQ ID NO: 470084 - DNA, 651 bp, Homo sapiens
ctggccatgagtggcaactcagcaaacagcaaagacattcctgtaatggcgaaaccttccagactcccttccctctttctctcaagactttgagttgatgaagacgtgcatgtgctcacaaatgtgtatgcacaaacacacgctccgcaccagcggggatcctatgagacccttcggtcttgtgtcctagaccgtgttgtcagagagtagttttaagaagataccccatttcttaggggggtttttggayatggagtaagtctcagttatagtttgagtcacattgctctctgtaaagattaatagctataacagtgatatagaaaagaagtataataataatataatgacataatatcatctgactttatgtacttcatgttcttctaccactatgtcacacagaaaaggaactctctgtcccttgactcagggatgggtgctctaggccaacgctgtaaccatccgttatcccccgtacattatcccatatgaagctatcaatataaggggaccgtgaagaaaaacaaatagcaatggcaaagagctttgtaaataattaaataccaaccagtcatcctggtagtgttctaaaggaaaatagccttaggtgattagcttgcaccataaataagccaccataaaaatctg

SEQ ID NO: 470085 - DNA, 534 bp, Homo sapiens
ctgctgacatatgtgactgtgagctgatgttgaaaatttctgaggcagggcacaaacctttgacccatctcccaggcttctctggataaaatgtggttttttacagatcaaaaaggagacagataagaaaatgaagactgaaaatcttagaattatgaaagagagaatcatatacattttctctttaaatactaatcatttaaaatgtgtaattttaaggatgcattaaacctgcttgactgtcctcacaagagaaacttccttccttttcttaattctgttcctggacttctccccagctatattagctacagccagcagtgaagtcccattgagtattctgtgcactactggaaatcctgtgattcactccgtgggcagtgctgaattaattgttaatctggtagtgggtgttactttttctactagattgtgaatttctaactcttgagatgtcaggtaaaagcrcttctgagagaagaaaaaggatacaaggacaaagaatctgagatttgccttctctctggaagcctt

SEQ ID NO: 470086 - DNA, 656 bp, Homo sapiens
tgcatgaaaagcagcatgctaagggaacgatgacagaaaaccaggtgttagccaggcatgtgggaactgttttaagagcagtttgtgtggtcccagttctaccaaacrcaaaccaatcacagtttaagaacagaagggggctgggcgcagtggctcacacctgtaatcccagcactttgggaggccgaggcaggcggatcacgtgaggttgagagtttaacaccagcctgaccaacatggagaaaccctgcctctactaaaaatacaaaaaaaaaaaattagctgggcatagtagcacatgcctgtaattcccagctactcaggaggctgaggcagaagaatcacctgaacccgggaggcggaggttgtggtgagctgagatagtgccactgcactccagcctgggcataacaagagcgaaactccatctcaaaaaaaaaaaaaaaaaaaatgaaccgaaggggtccagacagaactcaagtcatctgccaacagggcagtgtccagaacatacttctgttcataaaaagataatatgtataccatggggtctccatcccacagaaacatggagggctatagatgcatactatttgggaatttccaagtgtccgctatgttccaggagccatactaggaagtcctttaattaccac

SEQ ID NO: 470087 - DNA, 657 bp, Homo sapiens
tgcatgaaaagcagcatgctaagggaacgatgacagaaaaccaggtgttagccaggcatgtgggaactgttttaagagcagtttgtgtggtcccagttctaccaaacacaaaccaatcacagtttaagaacagaagggggctgggcgcagtggctcacacctgtaatcccagcactttgggaggccgaggcaggcggatcacgtgaggttgagagtttaacaccagcctgaccaacatggagaaaccctgcctctactaaaaatacaaaaaaaaaaaattagctgggcatagtagcacatgcctgtaattcccagctactcaggaggctgaggcagaagaatcacctgaacccgggaggcggaggttgtggtgagctgagatagtgccactgcactccagcctgggcataacaagagcgaaactccatctcaaaaaaaaaaaaaaaaaaaawgaaccgaaggggtccagacagaactcaagtcatctgccaacagggcagtgtccagaacatacttctgttcataaaaagataatatgtataccatggggtctccatcccacagaaacatggagggctatagatgcatactatttgggaatttccaagtgtccgctatgttccaggagccatactaggaagtcctttaattaccact

SEQ ID NO: 470088 - DNA, 352 bp, Homo sapiens
ggtttcctggaaacctctcattgcattccctcaggcatccacgatacccaaaccatgcacatgagtgacacactgtgtttagcttgcacagcatctcatgccacaaccattccyggcagattcagctcattctcccatcgcagccctgctcccctatgcccggttaccagcaggtctcccaggtgagcctgctgctccaggataaaactgtggccacgagccaacactgaaaactgacacctgcggaagttggctcaagtgctgcctgctaacaaccgaataagtaaacctttgctgcagaacctaccatgtaacaggtgtcttctaatatttctctgatttttctgagctt

SEQ ID NO: 470089 - DNA, 655 bp, Homo sapiens
gcaatgcaggtttgttaccttggtagatggtgtgtcacaggggatttggtgtacagataattttgtcacctagataatgagcatagtacccgataggtagtttttcagttctcatccaccctcctctccgttcactctcaagtaggccccggtgtctgtggttcccttctttgtgcccatgtgtgctcagtgtttagctcccacttataattgagaacatgcggtatttggttttctgttcctgtgttaactcgcttaggataatggcctccagcaccatccgtgttgctgcaaagggaataattttattcttttttatggctgtgtaggattccatgctgtatatataccacatttgctttatctattcccaggtgggaggctttatccaggaacaggggaaacagctggaacatggagtgatgttggcatcacttaattatcgcaggagactcactttctaggggtcagattgagactgtattttgcaacctaaagaaaatataggcattttattacataagagttatcaaaaaggtcacgattgtatgatttttcagccatggaaggggaagaacttcacccactgtgtaaatgttaaaaacggtgggargcaaaataagatcacattgcaattttgtctgttggaatatgc

SEQ ID NO: 470090 - DNA, 356 bp, Homo sapiens
atgaggtgccaggaagcaggccctggtgaggtcggcaaggagcggaagaaartgagtcaggtctaggcgctgacctcctgagtcagccaggctgaatgccggcgggacctgtggtcagccagggagccacctccccgagaataaacttttgaaagaagaaaatactcggtgagtgtttgagatgtataaaggaaatgaagggcaagactgctggaaaaggcaaagaaacagattctctgcagactcccctccaagactgatgggggggagagactgatgtgaccacctggtctccatttgggacacggtgaaggcccattccagctcaatcccctgggactgaagaggcagctatc

SEQ ID NO: 470091 - DNA, 630 bp, Homo sapiens
ccacgttgcaactttctaatgtttgaaaaagctgctttattgcatccctgctcagaataccagcaccagccaactggcaccccttatcaaaagtctgagtttcagatctccagggtccytcctccaagtttctgaagttttaataattccaggttctgttctttcctgtctactggtagggtagagcatcctttcatacgcttattacccctgtgggtttctttttctgtgacttctctattcatatctttgctcgttttgcttctttcacgtctttttcttacttgagtcctttaaatattctgaagacaaattctcacttatttgcattgcaaccatattctcaaagtttttggcttgcccccatcctttaattttttttttaatttcagaagacagtttctcagctttcaccatgtgcctttatctttcctggtttccatctctgattttattttataatggcaacaatgtgtttctgtcttaataaagtggtccaccaggattgctatcccagtggtttttaaactgcagtcaaaacattaaagactggcgaaatcaatttagggggtcccagtcagcattttaaaaaatgaaatagagtagaataaaacatatcagtagagcaat

SEQ ID NO: 470092 - DNA, 613 bp, Homo sapiens
cataatgctgtcctcgcctgctatggggcctggagaaaggcccttcctgcctctttccctctcctgttcttccatcccagaatgtactagggaaaagtctctgtagagaggctagagggtctcggcaggtgcccagacacctggagactggctgctccagggtcacctgggggaaggccataaggagcttcggagcctgcgcaaggtgggaacagggctccctcacatgcttcccaagtcttcctccttccacctcagcctggagctgccttcgatggtgttgggatgccaacccccatcaccaaggtggctcagggagaygcagggagtgagtatgaaccctggcagacagggctagtcaggggcagaatgggtccttgtgttccctggagttggaggtgcaggattagggatccaggagaccctggggttagcagcaagcatggctagggcaagaaggaagacagcccaggatggcacccccatcctggatgggcccccttgggaccagtgtccattgtccagggtgtcctgcagggcctcccctaaggtggcgttggcatgaggaggcagggaggagaggaggttcttggaggaggtgtaaaggggagct

SEQ ID NO: 470093 - DNA, 556 bp, Homo sapiens
actctgtcataccctctgctagttttttttttaattattttttgagacagagtctcgctctgttgcccaggctggagtkcggtggcacgatctcggctcactgcaacctccgcctcctggcttcaagccattctcctgcctcagcctcctgagtagctgggactacaggtgcccctctgctagtttctttagggcacagatcactgtcattgttacgttcacctgtttattgtcttctctagaaagtaaatgatataggcactggaatgtggcctgttttctccattgctgcatctcaagcccttaaaataacccctggcacatagtaggtgctctgttgactggctggctgatttctgagcccctcactggaggactcttgtggttcaagaagggatgtgtacagtactgattacaggcagtccctgagagcaccgtgccaagttacagccatcccttattacgcatggccactgtggcaagacatacccgtgtttactctgacccctgttgccttcacctctcagtggcccatgttccctagaggctgggtgga

SEQ ID NO: 470094 - DNA, 634 bp, Homo sapiens
ttttcaagtctttcctaagcagatttccctttggggcacactagcctatggcaaagctctctactttctgtccccacgtcattcaaggtgctccatttcttctctgcccctgctcatcctgcatgatgctctgcttaaaagacagaaggaagcattgtgacctcatccccattcacacttgctgtcctcaagttttgtccttggcttccagagatcacatacttgtgactttccatgtgagcattgaaatgctcacactttacagaatttgtaggaccatggagagctttctggggaaatgttcaattgtggtggggccacagggaggaggggcagagcatggataagagaatccaaggttaaacagaatcagggaaatggcataacacaaccattctgggcattaagaaaaaagtaagaaggagaaaaagagcaggaaggtcacttggccaggacggtgaagatgagcagattcaagcgcaagggagaacttagagagctgctaatgtgggcctagactagcaagggggtgctggtgctggcatttgatttggtttccagtgtgggtcagatgagatgccattgcagggccaaattgtgcaggtgtgcygtggtctcccatcacacaccacca

SEQ ID NO: 470095 - DNA, 493 bp, Homo sapiens
cattggaagatttcaagtatgcatcrctaaacttgaaaaatcagtaaaacaaaacaggaataatttttatttaaaaataacagtattgtatttaaaaacaatagcacacgtcaagagatacttcagtactgccaagggtttaatctagcatcctctttctcactaatcacacaccatgtaaccttgcataaggtacttctctgtgtgtttccacatctataagacgggaataatgtgtctaccccaggttcattcaaggagtcctgtatacatgcaaagcccttggaagagtgcctagaatataatgagtggttgatacttgttcctgttaatatggaaaatattactgttaatagtgcttaaatagttgataggctgcagttaacctgcaggactccttggtacagggtgcagtgttgagttcaatccaaccaagacaccagcacacactggttggggagagacacgggagtagggagagcagctatggcct

SEQ ID NO: 470096 - DNA, 567 bp, Homo sapiens
agcaaaatcctgggacctcagaatccttcggaaatgaattattacagaacagtaatattctggaacatcagaacagaaaagagaacggaaagtctagatccttcttagtgtcatgtatctttaaaacattttaagtaaaactttttatgaaatataaataccacttactttggcaatgaaataaacacttttttcttcattatgcaggatctttaaacaaaaattaactaaagctgcagacaatttaattgctgtggaaagaacacttaaaatgtattctcagagacagtagagcacacgttttggagccactgttggtactcaaatccctactctgccagtgactagctctgtgacctcggaaaagttatttaatatccttgtgtctcagtttcctcatctataaagyggtttacctatctcatgggaaaaccatatggattaaatgagtttctgatagtaaagagtttagagcctcgcacataagcgtcatacatgaactgaacttctgcaatcaaaaacagtcttcagtgaagattggaatctgcagaaggaaagcttcagaat

SEQ ID NO: 470097 - DNA, 552 bp, Homo sapiens
atttatcccaggctcatgacgttgcctactgatgtcctgaggaatcaggctcctggttgaaaacctatatgggatttctcaggcctggccatatgcaaggctttgcctgacaggcctcacagggaaaagaagcccttcacacaccaggcttggtgcagagccagtgtactgtagtctctcaggggagttgcagtcaatgactcagccacttctgggtgataaagctcttcttatatttgccttcctagcccaggcacctttatttcctggtccttttctctgctgtggcctggcggagaggggctccttgaacaggccgctccccactctgactcagactctgcactctttggctcctagcccttctcctttgccccatcacttcaagaaccataaactacaggagccttttgttcccttttgatgggggtgagacatcctgatcgtcacatmtcacgtataccattacagtaaatgattaaaggcttaactctcacttttggcttgtcgctttaaccagccactccaatacctggcagctcagctccctcc

SEQ ID NO: 470098 - DNA, 404 bp, Homo sapiens
gtgtaattcagctcccaaattgagaaacaggccataacaacacacccagaagcctgaaagtgtccccttccaacacttctgactctaccaagggtaagagtyagaaggataatactatcctgacttctagcactacaaattaattgtgtctggtttttttcaaaaaaaatttttatgttttgaaattatcttagacttgcaagaagtcgcaaaagttgtacagagtgttcttgtgtaccctttacccagcttcccccaatgatatattacaaaaatttttttaaatttatttatctttttttgaaatggagtctcactcactgtcacccaggcaggaatgcagtggcgtggtctcagctcactgcaacctctgcttcccgggtacaagcgattctcctgcctca

SEQ ID NO: 470099 - DNA, 404 bp, Homo sapiens
atgttcaccacaccattgcttatgcccgtgaaaacatccagtttggaaataattgctttgccttattgctccatccaaggccagccaggmtggtcctcaggatcccagattcagtacagagaaataaatctaatattgacttggctttaagaaggcagtcacaatacttgatataaaaacatttagtcattcatcaaatatttttcagtcacccattgtgttctatgccctgggctaagaagtggctatacaaagatgactcagacactatttctgcccttaaggagttcacagactaaccaaggaagaagaaatataagggttgaagtaaaagtcaatgtaagtgctgccctagggacatgtgcaaggtgtcctgagagcccggggaaaagagagagttattt

SEQ ID NO: 470100 - DNA, 652 bp, Homo sapiens
agcttcagacagagggagtctcccatgagtgccacatccatccaagctcacggactctcccacactaaccctggatccctaggtggagaccccttatgaaaaggaccttctgccctcagaggtcagaagcagcaactgctcgtagtttccctgagcactgacacccccaccccgcacttcctagggcttcarctgccctgggtgatgagctggtgttatgtctgggagctgggtgggagctgctgcttgctgtgattcctccatcttcacagttggtcctgggggtgggagttccagtttgaacctcaaagccttcctggcccatgcctgctgctagtgccttggtttactcagtaaagcaatcactcctttactccttacttgtttcaggatccgtcccaggcacaaggacacaagagatgaatctgacccagcctctggccttgagaagctcccagccttctggggaggtggccaggtgggcctaggcaggactggggaggtcaggcccgtctccaggggtggctgggctgggaaagaggcttattgatcccagctcaacccaatcgaacacaggatgcctgggcaaagggcgatttaattaagaagatatgaggcttttattactgctggcactttctaactgtgcaga

SEQ ID NO: 470101 - DNA, 629 bp, Homo sapiens
gtccaactatagggcattctggaaaaggccaaactatggagacagtaaaaagatcagtggttaactaggggttgaggggatggagggttgaataagyagagtgcagataatttttagggcagcaaaactattttgtatgatactgtaatggtggatacatgtcattatcgctttgtcaaagcccatagaatgtacatcacaaagagtaaacgctaatgtaaattgtgtactctgggtgatgatgatatgtagtttcatcagtgttggtttgttgattataacaaatgtcctctggtgcaggatgttgacagtgggggaggctgtgcatgtgtaggtgcaggggtatataggaactctctgtgctctgctcaattttactgtgaacctgagactgctctgaaaaataaagtctttttttctaatggcacgtatctgttatctattaccatgataattatgtgtaataagccgctctccaaaatccagtggcttcaaacaataagcctttagtttctgagtctgcagttggctatttagattgggctgttttcctaggctctgctgggctcactcacatgctgtactttactggctcaggctggtcttggctggggaactgggcgactcag

SEQ ID NO: 470102 - DNA, 629 bp, Homo sapiens
gtccaactatagggcattctggaaaaggccaaactatggagacagtaaaaagatcagtggttaactaggggttgaggggatggagggttgaataagtagagtgcagataatttttagggcagcaaaactattttgtatgatactgtaatggtggatacatgtcattatcgctttgtcaaagcccatagaatgtacatcacaaagagtaaacgctaatgtaaattgtgtactctgggtgatgatgatatgtagtttcatcagtgttggtttgttgattataacaaatgtcctctggtgcaggatgttgacagtgggggaggctgtgcatgtgtaggtgcaggggtatataggaactctctgtgctctgctcaattttactgtgaacctgagactgctctgaaaaataaagtctttttttctaatggcacgtatctgttatctattaccrtgataattatgtgtaataagccgctctccaaaatccagtggcttcaaacaataagcctttagtttctgagtctgcagttggctatttagattgggctgttttcctaggctctgctgggctcactcacatgctgtactttactggctcaggctggtcttggctggggaactgggcgactcag

SEQ ID NO: 470103 - DNA, 629 bp, Homo sapiens
gtccaactatagggcattctggaaaaggccaaactatggagacagtaaaaagatcagtggttaactaggggttgaggggatggagggttgaataagtagagtgcagataatttttagggcagcaaaactattttgtatgatactgtaatggtggatacatgtcattatcgctttgtcaaagcccatagaatgtacatcacaaagagtaaacgctaatgtaaattgtgtactctgggtgatgatgatatgtagtttcatcagtgttggtttgttgattataacaaatgtcctctggtgcaggatgttgacagtgggggaggctgtgcatgtgtaggtgcaggggtatataggaactctctgtgctctgctcaattttactgtgaacctgagactgctctgaaaaataaagtctttttttctaatggcacgtatctgttatctattaccatgataattatgtgtaataagccgctctccaaaatccagtggcttcaaacaataagcctttagtttctgagtctgcagttggctatttagattggkctgttttcctaggctctgctgggctcactcacatgctgtactttactggctcaggctggtcttggctggggaactgggcgactcag

SEQ ID NO: 470104 - DNA, 622 bp, Homo sapiens
accttccccttctctggaaggccaaggccttctggtcatttctgggatagcctgagggcttggccaaagccaaggcctggaactggccctcctctcaggtccctgacctctcatggcttgtatgtaggggtcagtgagaagcaggactccaggaaggaagacaaggccccaaacctcaggactcagttggagaaaccagagaaggccccagaacagctgactctgggcgccacgtattggaggcagccaccccctcccccacactggctgtgctgtgagtcacgggttttaagctgagcactctgggagattaaccagctttgtgaccagctgctggaggaggatacttggctgaaagaagcaggataaagttaccctctcagaagtttataggaaggcccataaatgcccccaactgctgtggggcccatgttctrgggtgttccttggtgttccccctgggcagaccctcagtggctgtgctcattccccctgctcctcacctaccaagtaggttctactaatctgtcactcactggggatacctgccacttggggccccatggttccaagagggatcttgggccatgggccttccttgcctggatgacagatattagga

SEQ ID NO: 470105 - DNA, 624 bp, Homo sapiens
agatctgtggcccagggcagcccaggagagaggacctttctctgccaggacagatccccttcaggaggcccctgatggaaaggcagtggtrggcctggggattccaggatgttggactcctgccctggatggagaggctcaatttaggtgagaaaaccagcgatgggctttggggcttccctcacctgtagatttcagatacagcaggtaagggacagatctggaaaactacagaaggagtggggcctggggttcaaatgaggaagactcatggaaacagtggtgatgagaggccagtagacaccaatgacctcagcctccagagaaccctacaaacgctgacccaagatgcggtcagatgcagcccttcctggttgattaatttttgggctgcccaagtgtgggggtgcacacaccagtgcagcccaggattttgttttcacagtgacacctctcatcttctctaggcttctcacctcttagcctgggctgtcatccaggtcttggagaagtcaagcaacttgtcatgggcaggaaaagacagcccagaacccagaacctggaaatactgatatttgggggagagggtcatgtttcccccagacatctctgccccagccctca

SEQ ID NO: 470106 - DNA, 563 bp, Homo sapiens
tgctagtattttaaaagcatctatgtatctatgttgatctgaaatattggtttgtagggttttattttttgttgtgtccttgtctggttttggtatctagatagggggagtggggcagtcctcagacctttggtgaaaatgcttgggtgtgaagtgaccattgctgtgctgagatcttggaatgcggagggtggaacagtccccatagccacagctttggctggagggagtggaacttgcattcctcttatgacctagtcccaacatggattcctctcagrccacggctgtggcagacagtctgccaaccagtcacttccagcagtttgtgcatcttctgaagctaagtcctggattataagatacaccacctggctcaagactaagcctcaggagcaactcttcaactgttcaggtcccagggagcggggtgggtcggggggtggggatacctggtttcattgccagtttctggagcccactccacactcacttctcagaactggctgcaggagtccattccctgctcaagccctggttttgcaagtactacctgagtttct

SEQ ID NO: 470107 - DNA, 604 bp, Homo sapiens
taagcacataaaacaatgctcaaaatatctggtcatcaggaaaatgcaaatcaaatccacaatgagatatcacttcccacacacgaggatgaytataataaagacaggtaataacaggtgttgacataaatggagatattagaaaactcatacactgctgatgggaacatgtaacagtgcagccacactggaaaacattttggcagatcctcagagttaaaccttgagttaccagttcacctagcaaatctgctcttaggtgtagacccaagaaaaatgagaacatatgctcatgcataaacttgtgcacaaatgttcatagtaacattattcatactaaacaagaactgtaaagaatccaaatgttagggttaaaataaaaatcctcccccagttgactctactgcacagcaaaggctaagaagtgtttatgagagcaccactggttcttaatgtatgggcccccagacctgcagctttcagcatcacctggaaacttgttagaaatgcaaattctgagcctttcccaccagcccaactgaagaagaaattctgggactggggcccagcaatttgtgttttactaagccctccaggtgatttt

SEQ ID NO: 470108 - DNA, 604 bp, Homo sapiens
taagcacataaaacaatgctcaaaatatctggtcatcaggaaaatgcaaatcaaatccacaatgagatatcacttcccacacacgaggatgattataataaagacaggtaataacaggtgttgacataaatggagatattagaaaactcatacactgctgatgggaacatgtaacagtgcagccacactggaaaacattttggcagatcctcagagttaaaccttgagttaccagttcacctagcaaatctgctcttaggtgtagacccaagaaaaatgagaacatatgctcatgcataaacttgtgcacaaatgttcatagtaacattattcatactaaacaagaactgtaaagaatccaaatgttagggttaaaataaaaatcctcccccagttgactctactgcacagcaaaggctaagaagtgtttatgagagcaccactggttcttaatgtatgggcccccagacctgcagctttcagcatcacctggaaacttgttagaaatgcaaattctgagcmtttcccaccagcccaactgaagaagaaattctgggactggggcccagcaatttgtgttttactaagccctccaggtgatttt

SEQ ID NO: 470109 - DNA, 572 bp, Homo sapiens
gagattataaaaaaaaaagctagcttttaggtgataagtaacaattagaacatgaacaattttttaaattagtttctaacttgaggctttagaacatttgatttgaataatctttgatctattgtgtttgtgtacatgactacttgaatcaagctaaatgtaatattgtattcacagtaaaaaatctatggtaataaattacatatttgtggctcctttaaatatagacggaatcaaaattgtaagatttcaagagggctctttgtgaaaaacaatttaataagttctttgatgattggaaatataaaaatcccaactgycttttcccattcactttcctggggttccttttttgccttgagtaatttacctaataaccaaatctcagactttgaaggaacctgagtgtcatccagctgtttctattagccattgtttggattctccttacaaggccacagggagagagttactcattctttacccaaaaattcccagtgactaaattcaggccctttgctctggaaaagcagaccctgtcaaaatggaagcaaaatgtgatatttctcttg

SEQ ID NO: 470110 - DNA, 374 bp, Homo sapiens
tataaattacatataaaaataaatctaaaatatattattttataataataaatttaagatacttaaatttataaatatttaaaataaatttaaaacatataaatttaaaattatttaaaataaaattaaaacatactatttaaaatatattatttaaattaaacaagtgttatcaggaaggaattcctcttawgagtttcagatttggctcagatcaaataaaaaggcaaacattactgggaaaattgccatttgtcaactgttccatgtcatatcatgtggtaatacagttctttaaacaccaaatgtcagaatactgacactatactgtacaaactaaaacaagtacaaaattgagcataaataacccaaaa

SEQ ID NO: 470111 - DNA, 590 bp, Homo sapiens
cagaaaatttgagcatggatttgagaatcttctcactccaaagtaaatataatttgcagttygaattttcccatatatgaagcatttggtagtaagtaaacaccttaggttttcatcaaaacctgagaatgaccacacttaaggattagtgaccaaattccctgtgattaaaaccaagaccaaaacagaccttttcttaaagagtataaaagccagatcagtcattaactgaactcactcccagaagaaaaatccgtactcaaagaacccaaacttcttatagtgtattattcacaatatctagtatacaatgaaaaagttaaaccaatatttcatgcaaagacatgggcaagagtggctcaaggtcaagtgaaaaggtagtcaatggaatcataccacaagatgacctcaatattagaaccagaacattggaactaaaagaactgcgaagtagttattgtaactatgctgaaggacttaaatgaaagtcatagtgggtaaaaatatggatcgtatcagaggaatgggaactacaaaaatggaaattcaaaaattaataactacaatttctgaaatgaaaagttcaacgg

SEQ ID NO: 470112 - DNA, 638 bp, Homo sapiens
tgtagcatcagatatataacaaattatatgtctccatttgtgyacgactgttctagactcccgtattcctccaaaccatgcatctatccttgtgtcagcacctcaatactttaattattgtacactattttaagtcttgacatctaactgtgtaacttctctttaagataatgctgactattcttggcagtttgcatttctacataaattttagaattgacatttccccaaaccttgatgtttgatttgggttatttcaaacctatatgtcaacttggggaaacttaacagtatgtaatctcccagttcataaatatgtgtatctccacatttactggtgactaccttagtttctttgattaatgttttgtagatctactatgttgagatcttatcttgcacatttattataagatttattgcctaatggttatttttttcaattcttttattttggtaacatacacacaacatagaatttaccacattacccattttaagtgtacagtttagttgtagtaaatacattcctaacgttaggcaatcatcagcaccatgtatctcttgaactattttagcttataaaactcaaactctatattcattaaactataattccccattctttcttccttaca

SEQ ID NO: 470113 - DNA, 624 bp, Homo sapiens
tataacaaattatatgtctccatttgtgcacgactgttctagactcccgtattcctccaaaccatgcatctatccttgtgtcagcacctcaatactttaattattgtacactattttaagtcttgacatctaactgtgtaacttctctttaagataatgctgactattcttggcagtttgcatttctacataaattttagaattgacatttccccaaaccttgatgtttgatttgggttatttcaaacctatatgtcaacttggggaaacttaacagtatgtaatctcccagttcataaatatgtrtatctccacatttactggtgactaccttagtttctttgattaatgttttgtagatctactatgttgagatcttatcttgcacatttattataagatttattgcctaatggttatttttttcaattcttttattttggtaacatacacacaacatagaatttaccacattacccattttaagtgtacagtttagttgtagtaaatacattcctaacgttaggcaatcatcagcaccatgtatctcttgaactattttagcttataaaactcaaactctatattcattaaactataattccccattctttcttccttaca

SEQ ID NO: 470114 - DNA, 606 bp, Homo sapiens
tataacaaattatatgtctccatttgtgcacgactgttctagactcccgtattcctccaaaccatgcatctatccttgtgtcagcacctcaatactttaattattgtacactattttaagtcttgacatctaactgtgtaacttctctttaagataatgctgactattcttggcagtttgcatttctacataaattttagaattgacatttccccaaaccttgatgtttgatttgggttatttcaaacctatatgtcaacttggggaaacttaacagtatgtaatctcccagttcataaatatgtgtatctccacatttactggtgactaccttagtttctttgattaatgttttgtagatctactatgttgagatcttatcttgcacatttattataagatttattgcctaatrgttatttttttcaattcttttattttggtaacatacacacaacatagaatttaccacattacccattttaagtgtacagtttagttgtagtaaatacattcctaacgttaggcaatcatcagcaccatgtatctcttgaactattttagcttataaaactcaaactctatattcattaaactataattccc

SEQ ID NO: 470115 - DNA, 607 bp, Homo sapiens
gcaaaactttctatgtattttcaaggaagatgttggtgtatttttctcttttgtagaaagatatgacagaatgaaaatcagataacaaccctagattataaatataagtttattttctaagacatttgaaaatctaaactgtgtcaagagattttttttaaaagggtctrttgctctgtagcacaagaatggcatttgtttttcatttgaaaatcttataatagattctttcacatacagacacaagtagaaagagtaagacaatgaagctctgcgtacaccatttttggcaacaattttctgacattataggtgacaaatctcggtaagttaatgattgtgggttcacaagtatctaaaaagttacctgattgtctttatgcccaaaaaagtcaaagttgttttttccaggttgttttcttaatagagcactttataagaaagcctggcaccttatcagacttaagttatatcactatttatattaaaaaaatcacatctttattgaacagcaaattctctatgaaagaattataaaatacatgttaggcttcattcctaccctcaggaatcttatctatttgagaaaaaatgtagagatattaca

SEQ ID NO: 470116 - DNA, 607 bp, Homo sapiens
gcaaaactttctatgtattttcaaggaagatgttggtgtatttttctcttttgtagaaagatatgacagaatgaaaatcagataacaaccctagattataaatataagtttattttctaagacatttgaaaatctaaactgtgtcaagagattttttttaaaagggtctattgctctgtagcacaagaatggcatttgtttttcatttgaaaatcttataatagattctttcacatacagacacaagtagaaagagtaagacaatgaagctctgcgtacaccatttttggcaacaattttctgacattataggtgacaaatctcggtaagttaatgattgtgggttcacaagtatctaaaaagttacctgattgtctttatgcccaaaaaagycaaagttgttttttccaggttgttttcttaatagagcactttataagaaagcctggcaccttatcagacttaagttatatcactatttatattaaaaaaatcacatctttattgaacagcaaattctctatgaaagaattataaaatacatgttaggcttcattcctaccctcaggaatcttatctatttgagaaaaaatgtagagatattaca

SEQ ID NO: 470117 - DNA, 602 bp, Homo sapiens
aaaaaaaaaagaagaaaaaaaattagtctaccaaatgtctcaaacctccgtaactttgcaaagcaccttttgatttaaacataatcstccttgttcaattttattctgctgttggagatcaagccatttcctctgataggccttcctgatgccgtcacatagaattaagtgttttatccactgagctacctctagacattcttctagtgctgcatctatcaggttctgttacaaactgcttgttagatgccagcctccccttctagacctgagttccttgagggcataatacatgtgtcatttacctttatatatctggtacttaaaatagaacttggagacaggataggtaccctgagtactgttcagctgaattgtattattacttggttattttagtggctctgcttaaaatgccaaaaaatgttttatttttactgaatttatgagatatgtttacagtttttcgcacaatgaaagactaaattttccatgtttataaacaaaatgtaaataattaaaagatatattgatattttaattactaaaacaagagaactatgacctgcaaatgtcctgatataaatacaagatatgagatt

SEQ ID NO: 470118 - DNA, 602 bp, Homo sapiens
aaaaaaaaaagaagaaaaaaaattagtctaccaaatgtctcaaacctccgtaactttgcaaagcaccttttgatttaaacataatcctccttgttcaattttattctgctgttggagatcaagccatttcctctgataggccttcctgatgccgtcacatagaattaagtgttttatccactgagctacctctagacattcttctagtgctgcatctatcaggttctgttacaaactgcttgttagatgccagcctccccttctagacctgagttccttgagggcataatacatgtgtcatttaccyttatatatctggtacttaaaatagaacttggagacaggataggtaccctgagtactgttcagctgaattgtattattacttggttattttagtggctctgcttaaaatgccaaaaaatgttttatttttactgaatttatgagatatgtttacagtttttcgcacaatgaaagactaaattttccatgtttataaacaaaatgtaaataattaaaagatatattgatattttaattactaaaacaagagaactatgacctgcaaatgtcctgatataaatacaagatatgagatt

SEQ ID NO: 470119 - DNA, 616 bp, Homo sapiens
gtattattacttggttattttagtggctctgcttaaaatgccaaaaaatgttttatttttactgaatttatgagatatgtttacagtttttcgcacaatgaaagactaaatkttccatgtttataaacaaaatgtaaataattaaaagatatattgatattttaattactaaaacaagagaactatgacctgcaaatgtcctgatataaatacaagatatgagatttagattttgtagatatatatttatcaacagttaagatatgataatcctcagccataccttcaggcattttataaacatgtttggaaaggtaacttataagcaaaggaaacaaagtattacatttttttacgcctagaactactgaggaatctcaaaactcatatgattgcactattcctattcactatttgttttgcttcacgtgatggttgcagtattcctattccctgttttgcttttagctaatggggatgttataactcagtcagtagctgattaaatagtttgagccccctaggcccttcctttgtttgcaatggattatgaaataaaaggcttggttttacttaaaatcgcattttagcttaattgttgttgttgttgtttcca

SEQ ID NO: 470120 - DNA, 534 bp, Homo sapiens
tgtattattacttggttattttagtggctctgcttaaaatgccaaaaaatgttttatttttactgaatttatgagatatgtttacagtttttcgcacaatgaaagactaaattttccatgtttataaacaaaatgtaaataattaaaagatatattgatattttaattactaaaacaagagaactatgacctgcaaatgtcctgatataaatacaagatatgagatttagattttgtagwtatatatttatcaacagttaagatatgataatcctcagccataccttcaggcattttataaacatgtttggaaaggtaacttataagcaaaggaaacaaagtattacatttttttacgcctagaactactgaggaatctcaaaactcatatgattgcactattcctattcactatttgttttgcttcacgtgatggttgcagtattcctattccctgttttgcttttagctaatggggatgttataactcagtcagtagctgattaaatagtttgagccccctaggcccttcct

SEQ ID NO: 470121 - DNA, 534 bp, Homo sapiens
tgtattattacttggttattttagtggctctgcttaaaatgccaaaaaatgttttatttttactgaatttatgagatatgtttacagtttttcgcacaatgaaagactaaattttccatgtttataaacaaaatgtaaataattaaaagatatattgatattttaattactaaaacaagagaactatgacctgcaaatgtcctgatataaatacaagatatgagatttagattttgtagatatatatttatcaacagttawgatatgataatcctcagccataccttcaggcattttataaacatgtttggaaaggtaacttataagcaaaggaaacaaagtattacatttttttacgcctagaactactgaggaatctcaaaactcatatgattgcactattcctattcactatttgttttgcttcacgtgatggttgcagtattcctattccctgttttgcttttagctaatggggatgttataactcagtcagtagctgattaaatagtttgagccccctaggcccttcct

SEQ ID NO: 470122 - DNA, 616 bp, Homo sapiens
caagtttgtaaagcactcttgagatctgtggatgaaaaggaagcagcacattactctctgaatgttacattccatcttcagtgtttcctttttggtgaggtgtttatatttctctgttctctccagcaagagtgttagtcctcaggtacatcttgatgctctgctmcccttttatgtgcaacaaatatcagtgcacgctaacctgattggcctttccacacagtgcttctcttggttccactggtgagtccctttttagggacattgttgtgggttcaactgtcctctaaaaaagtatgttcaagtcctaatccgtggcacctgtgaatgtgaccttatttggaaatagtgtctttgcagatgtaatcaagtgaagacgaggtcctgctggaatagggtaggccctaaagctaatatgactaatatctgtacaagaatagaagagacacagatacagggagaaggccatgtgatgatggaggtggatattggagtgacacatctgcaagccaaggaatggcaggggttgccagccatcaccagaagctaggaagaggctggaaagaattcttcccaaaagctttcagagggtcctacttgtatcttgatttcggat

SEQ ID NO: 470123 - DNA, 616 bp, Homo sapiens
caagtttgtaaagcactcttgagatctgtggatgaaaaggaagcagcacattactctctgaatgttacattccatcttcagtgtttcctttttggtgaggtgtttatatttctctgttctctccagcaagagtgttagtcctcaggtacatcttgatgctctgctccccttttatgtgcaacaaatatcagtgcacgctaacctgattggcctttccacacagtgcttctcttggttccactggtgagtccctttttagggacattgttgtgggttcaactgtcctctaaaaaagtatgttcaagtcctaatccgtggcacctgtgaatgtgaccttatttggaaatagtgtctttgcagatgtaatcaagtkaagacgaggtcctgctggaatagggtaggccctaaagctaatatgactaatatctgtacaagaatagaagagacacagatacagggagaaggccatgtgatgatggaggtggatattggagtgacacatctgcaagccaaggaatggcaggggttgccagccatcaccagaagctaggaagaggctggaaagaattcttcccaaaagctttcagagggtcctacttgtatcttgatttcggat

SEQ ID NO: 470124 - DNA, 611 bp, Homo sapiens
taaggcgaaggaagatcctgaaacatggaacaatacaccttccctttcccctgaaaagtcagggagttcacttcacattggtttaaagactgacttgaaatttctgaggactgcacgtagtactagaatttcagtagtagaatttcagttgccaccagaaatcctaggaggattattttgtattttattttctttaattaattaatttttttgagatggagtcttgctctgtcacccaggctggagtgcagtggcaagatctcagctcactgcaacctctgcctcctgggttcaagtgattctcctgccttagcctcccaaatagctaggactataggtgcctgccaccatgcacggctgatttttgtatttttagtagagacggggtgtcactatgttggccaggctggtctgtattttgtattttataaatacgttttggtaaaagtaaaaggtaaacattctggcttgatgtcaccttcctgtgctagctcttctggggtctggagataatatcagttttttttttctttcaamacaccatgcagggtagaaaatggccacggtaccccactacccccaccagggcgataagcactgaggagtacaga

SEQ ID NO: 470125 - DNA, 611 bp, Homo sapiens
taaggcgaaggaagatcctgaaacatggaacaatacaccttccctttcccctgaaaagtcagggagttcacttcacattggtttaaagactgacttgaaatttctgaggactgcacgtagtactagaatttcagtagtagaatttcagttgccaccagaaatcctaggaggattattttgtattttattttctttaattaattaatttttttgagatggagtcttgctctgtcacccaggctggagtgcagtggcaagatctcagctcactgcaacctctgcctcctgggttcaagtgattctcctgccttagcctcccaaatagctaggactataggtgcctgccaccatgcacggctgatttttgtatttttagtagagacggggtgtcactatgttggccaggctggtctgtattttgtattttataaatacgttttggtaaaagtaaaaggtaaacattctggcttgatgtcaccttcctgtgctagctcttctggggtctggagataatatcagttttttttttctttcaacwcaccatgcagggtagaaaatggccacggtaccccactacccccaccagggcgataagcactgaggagtacaga

SEQ ID NO: 470126 - DNA, 611 bp, Homo sapiens
taaggcgaaggaagatcctgaaacatggaacaatacaccttccctttcccctgaaaagtcagggagttcacttcacattggtttaaagactgacttgaaatttctgaggactgcacgtagtactagaatttcagtagtagaatttcagttgccaccagaaatcctaggaggattattttgtattttattttctttaattaattaatttttttgagatggagtcttgctctgtcacccaggctggagtgcagtggcaagatctcagctcactgcaacctctgcctcctgggttcaagtgattctcctgccttagcctcccaaatagctaggactataggtgcctgccaccatgcacggctgatttttgtatttttagtagagacggggtgtcactatgttggccaggctggtctgtattttgtattttataaatacgttttggtaaaagtaaaaggtaaacattctggcttgatgtcaccttcctgtgctagctcttctggggtctggagataatatcagttttttttttctttcaacacaccatgcagggtagaaaatggccacggtaccccactaccccsaccagggcgataagcactgaggagtacaga

SEQ ID NO: 470127 - DNA, 650 bp, Homo sapiens
tttgggtgggggcacatagccaaaccatatcaacatctttagggagctatttttctgcctatcacagagggcttgttaacttctatcttagtgttttcatctgtaacattggggataataattgtctctacttcatggaatttttatgaagattaaatgacttaatacagataaagctcttaaagcagtgtctggcacatggaaaaccctatgtgaatgttcaccattaccagagaatggacagatccttccagacttcttccatgatttccttggcccttgtctcctttgctcttcaaatctccaagttgtgtgttctctcctcatttccctgcaaatctagtctcccctcaaaactacataggcctagcctgagattggagggcagacatggatgggactttacttctaagagatttctagaagtgaatgcacccagctactagcacagaggcatagtttatgactactatggtgaaaggaaaaaccagcgtctggatgtgtttgtgcrgttaaatggggtgtctggggggaaactgtgggggcaggtgggtgtttggggattgtagactgagtgtgtctgaaagaccaggattgcttgcagttacctctctttctcattctctcatttctcattctctctgccaaga

SEQ ID NO: 470128 - DNA, 626 bp, Homo sapiens
gtcatatattaattttctaattactctgcaatgtattatgatagcctctattttgtctcattcacctaaatrtatttctctggctaatatgctatttcaattgtgtggctctatttaataaatttccccctcacagcttttatttttgataatttgtgactgttcatatagtcttgtattaaaatttaagataattttatccaatattccccccaaaaagcattggaatattaattaaaattgaattatatataaagcttgaaataattgaatttttatcatttgttttcccacttaataatgttaaatgtctcttatttgtctttcaataagtaatttcttcatgttgatcctatacattttttgttaaattcatatctaaatactttacagctttattgctattaataatagattttctatcttatattactagagatgtttgaaattgtatatattttatattcactcacattaataaataacctttgatttttatacttaaagttttgatttttatagtttttaagaagtaagccttctagaactttgtggggataaaatttaatgatcggcaaaagaggtcacttctttttttcaaaagctatgccaatgatttcattttc

SEQ ID NO: 470129 - DNA, 545 bp, Homo sapiens
cattccttgttcagagatcttaggctgtattaacataatctggaatgtccatttccctgctctaatgtcactttctcagatagayctcccttcactactctctctaaataaccctccagttaacacctatctttttgtttgaccccatttaaaaaatagaacacattatttaaaattgctttgaggtttttatttatgtatttattgtctgtcttgattttctgtcacgttcccccaacctccgagcactgtgatattagaattgaggttgtttattttgtacatctttgtatcttcattgtttagataattttagcacagaggcaatgcctaataagtaaatactgaatgaatgttggataatagagcttggttatctgtttgcatgaatgtgattattagataagttccagatcatagaatcttaagattcttctttatactcactcaagacaaagaggacctagtctcccaaaacaaaaaggttgtctaccttccccatagaaaataaggaggattttcattccttcataatataaatatat

SEQ ID NO: 470130 - DNA, 491 bp, Homo sapiens
cctgaatgtgcataaatgacattggaagaaagcagaaagacactggatggaaatgtgcaaatgaaagaagattccatggattgggagagcagagaagtgagaaatcatccttaagtgatgttcaagaagaacagaggagatgatattatctccaaatttacctgatcataagaagtatcttaccaacgtgttaagatgtagattcctgagacccgccacagtctagcaaattataatcccttgagacagcctgcaaatctgattttaagaagcttctcagtgatccytatgatatgaattttgagaaaacctggagaaattgatggtaatgtcacagaaacataaaatgttaagagaactggggatggagtagggataggaggtgggacaatttcttcctcttacaatacgggataattgggccaaaagcaggggtgcagggcagagtcctaatgcacaaagtgctttggcctccttaatgagcctgcatt

SEQ ID NO: 470131 - DNA, 640 bp, Homo sapiens
tgtgcaagcaataagtaagagactttgaagtgctaaaaatatttgggaagtgtcaagtgggagttggcaaataccctggggtgagaaaagccctagatatgatacatctggcacacatttttagaatgttctatttttagtctgtgttttgatttctgaagagatccaggggtgtttcccttaaaaagaagcaaaagtgacagaaatgcctttagagaacaaggtaatttctgaagtattctttctctcttccctctgcccttcaaattaaaattggcatgatgcctggcattattcttaaatcataaatcactctgaaatctttagaagaaaagtgttctgtaatgtgcaattatgaataagaaaacactgcttgtaacagttaagtatcttgctttttggttacagctctgaggttatcactgccattatttttttcctagttattattaytgactaatcattacaaaatcttctagctaattctttttagttggctcatatatgacacttattttggacagtatattcaattgagcccttgtcattgtggctcaataaataaagaatataaccaaaggaaaaataaaatttagtgatgcaagtttgtcttttggttcaagttctaatattaccaatc

SEQ ID NO: 470132 - DNA, 435 bp, Homo sapiens
tcatggatggaggccaggacacctctcaagccattaagagggtggcctttccaagcgcagcatgacttgttggtcttgaagcagtgccttcgaaggaggaggagtcccccgtggacttggggcattaggacagggactgccaaggagagagggcactaggaaacagggttgtttttggctttyttacctggggtgcaagtggagcaccctgtgggcatcatgagggtgtcaggaaagccttctggtaactgaaacgcagtccattctgtgtcccccagattctgagttttcagcacctgacagtggcgggggatggcagacacacctgtgggtgctggagacatcttggcggcccttcctccagtttggcatcatagtcccctgtggggtgagcacatggggctcctggacagttgttaccgatggagggtatcc

SEQ ID NO: 470133 - DNA, 670 bp, Homo sapiens
aacactgggagtctgctcctgaggtcatggatggaggccaggacacctctcaagccattaagagggtggcctttccaagcgcagcatgacttgttggtcttgaagcagtgccttcgaaggaggaggagtcccccgtggacttggggcattaggacagggactgccaaggagagagggcactaggaaacagggttgtttttggctttcttacctggggtgcaagtggagcaccctgtgggcatcatgagggtgtcaggaaasccttctggtaactgaaacgcagtccattctgtgtcccccagattctgagttttcagcacctgacagtggcgggggatggcagacacacctgtgggtgctggagacatcttggcggcccttcctccagtttggcatcatagtcccctgtggggtgagcacatggggctcctggacagttgttaccgatggagggtatccaggttcttgacatcttgaacaaagaattggacaaaacggcacaaacaaagcaagaaaaagatgaagcaacaaaagcagatttattgaaaacgaaagtacactccatagggtgggagcaggccctggttacagaattttctggggtttaaataccctctagaggtttcccattggttatttggtgcatgccctatgtaaatgaaagtgacct

SEQ ID NO: 470134 - DNA, 435 bp, Homo sapiens
tcatggatggaggccaggacacctctcaagccattaagagggtggcctttccaagcgcagcatgacttgttggtcttgaagcagtgccttcgaaggaggaggagtcccccgtggacttggggcattaggacagggactgccaaggagagagggcactaggaaacagggttgtttttggctttcttacctggggtgcaagtggagcaccctgtgggcatcatgagggtgtcaggaaagccttctggtaactgaaacgcagtccattctgtgtcccccagattctgagttttcagcacctgacagtggcgggggatggcagacacacctgtgggtgctggagacatcttggcggcccttcctccagtttggcatcatagtcccctgtgggstgagcacatggggctcctggacagttgttaccgatggagggtatcc

SEQ ID NO: 470135 - DNA, 588 bp, Homo sapiens
cgagcttattacgaatctgtctttggtaccaagccacaatatagagatttgtgaaaatctttaaaaatcaacttgactgggccgggcgcggtgctcacacctgtaatcccagcgctttgggagggcaaggcaggcggatcatgaggtcaggagatcgagaccatcctggctaacaaggtgaaaccccatctctactaaaaataccaaaaaaattagccaggtgtggtagcaggcccctgtggtctcagctactcgggaggctgaggcaggagaatggcgtgaacccgggaggcggagcttgcrgtgaaccgagatcgcgccagtgcactccagccttggggggcagagcaagactccatctcaaaaaataataataataaaaagatctggaacgttttcgtcccctcaggaagtcatccctgccccaggcatccacggaggtcaaggccttgccaaccccacttcctgggtccagctctcaggtggttctccctgtggcctccagacccgggctgtaccggctggtttcgcaggttgcctgtgctcatcctgccctctccggtgagagctgagccggtggtgtttttt

SEQ ID NO: 470136 - DNA, 539 bp, Homo sapiens
ttagataaacctggaacttattggcagtttcatcacctgccattactgagatcaaaatggaaatgatcttctccagaatcagttgagagaatgatggggaaagacaaactttcgcctctttcttccttatccaccaattcaagagtgaaagagcaaagcgtccatcagcaaccaggcttcccagctaactataatgacaagccatcaagctcatcatgggtcagaatgaaaataagggtgacttgctattctcctttaatgtctgagacaagaaaatggcagtaattagggctgggaataatttgatttagactgaaaaaggcaagcttctaaatacatgaaatttggaaccattgaatggatccaagataaaatggaaagcttcttaccccaggtcctttagcagagaaagaaaccatattagtcagcaataagaragaatgaaatcttgtcatttgcagtgtcatggatggaaattaaggacattatcatgagtgaaataagccaggttcagaaagacaaatactacacgttctcac

SEQ ID NO: 470137 - DNA, 539 bp, Homo sapiens
ttagataaacctggaacttattggcagtttcatcacctgccattactgagatcaaaatggaaatgatcttctccagaatcagttgagagaatgatggggaaagacaaactttcgcctctttcttccttatccaccaattcaagagtgaaagagcaaagcgtccatcagcaaccaggcttcccagctaactataatgacaagccatcaagctcatcatgggtcagaatgaaaataagggtgacttgctattctcctttaatgtctgagacaagaaaatggcagtaattagggctgggaataatttgatttagactgaaaaaggcaagcttctaaatacatgaaatttggaaccattgaatggatccaagataaaatggaaagcttcttaccccaggtcctttagcagagaaagaaaccatattagtcagcaataagaaagaatgaaatcttgtcatttgcagtgtcatggatggaaattaaggacattatcatgagtgaaataagccaggtkcagaaagacaaatactacacgttctcac

SEQ ID NO: 470138 - DNA, 438 bp, Homo sapiens
aatgcctcactggttccgtgtctcctaatctatcagaggcacggagaaacattgcctggaaaggctgacggcaaaacttgcgctatcttaatgctttctagttatttctgtggccagaaaatggacaatagatcaggaaccaagaaaattcatcccccacccaattaagaggtggacataarttccacatttgaccaacggtaggaccctactcccctagcaacagagatagtttcagaggataggagtgtgaacagggcacagccaacctgagttcttccctcagactgagccacagatcttgggaattaaagtcttttcctctaggaattaagaagctgggatgataacttaaagttaccagtggctgcttcccttaggcccatagtggaagcccatttacaggaggtgagaaatggccaacacagaaatatgcac

SEQ ID NO: 470139 - DNA, 438 bp, Homo sapiens
aatgcctcactggttccgtgtctcctaatctatcagaggcacggagaaacattgcctggaaaggctgacggcaaaacttgcgctatcttaatgctttctagttatttctgtggccagaaaatggacaatagatcaggaaccaagaaaattcatcccccacccaattaagaggtggacataagttccacatttgaccaacggtaggaccctactcccctagcaacagagatagtttcagaggataggmgtgtgaacagggcacagccaacctgagttcttccctcagactgagccacagatcttgggaattaaagtcttttcctctaggaattaagaagctgggatgataacttaaagttaccagtggctgcttcccttaggcccatagtggaagcccatttacaggaggtgagaaatggccaacacagaaatatgcac

SEQ ID NO: 470140 - DNA, 639 bp, Homo sapiens
atgttctagtgccgtggtttaaattcctggatccagccatgtctgaagatgtttagttgaaaaattctcttttttgcctgaactagttttagctgggttcctgtcacttttgtttaaaagaattccaagtaatcatatatcttctcattcttcaaatgtggaaagtgaggctcatatggarggagtgactgatttaaggttatacagcctgttggaaacaaaatcttgatttgaagtcgggtctactgatttccattccaacgcatttgctactacactgagctttatacaccctctcttgggaattatcccacattttctgaataatagtacagttctcttcccctaccatactacaacacggaaaaatccattcatttaagcaaaagatagaggaccatttcttaaggactctaagatatgacacgagagcttagattagttggttggtgtctaggtaagttcaaataaaagattcaatcatgtcagcatcaaaggtagaaaccatgtgtttcattcttttttttccccctccaatggaagatctactctgttctaggcatagcaacagggtttttcatggttcataagtagttgtctcatgctagacttcctgcataatggaaacacaatagatat

SEQ ID NO: 470141 - DNA, 553 bp, Homo sapiens
tcatattgctttctaactcatttactgataactctagagttgtgaaacaatgtaaataaaatgacaactccttatctttcatctgtcatgaatgatctatgcgctatacctccccctccctgcctcctcccttcctccccaccaccctgttgtctgtctagctgattagagtgactgttggtttgaatgctgccctctgggcaggtagaggatctgaggttgtgagtggaaggagggcttccagagggccactgcccactayggcaggaaggatgggtggcaggaaagttctgattcctaattcaaactcctggttagggtgaggaggaggcacttctccaaggtgcagtgctttattctttctcatgcaaggcctgggagaatctgaagaatctgagcttcttgccctggctagggtaagacatcgcacccatcgcggtccatccattagatgagaagaggatagagtgccttctgggcaggaaccaggcagacagcacagcccctgtcccttggagtacagtccatgtttttagctgctgctgaaatacca

SEQ ID NO: 470142 - DNA, 537 bp, Homo sapiens
tggggagggctgtggactgcagggtcgtccctgacacctggatgccagtgatcagcctgcctgagatatgccagctttagaatcctgatggagggagggaggaggagggcagcaaagagacccagcagttattttatgcctatctgtsacaggcacagtgccaaacaccatatgtaacttttcacattttccccactttacagatgaggaaacaagctcagagaagttctgtggcagtgaatgagtggtggtgctgtgagttaaacccaggctctgcctaactccaaagttcgtgctcttaacctccatgatcttgtctctggccctcatttccccaccacacccggaggtaggctgggctgggtgggctgaggcagggtcttcctaggccttgctggccagagcaggaggctggtgaaagcccaggacttaagggacttcagagggggacgtggttccctctcacccaagggggagctcttgacctgctggaggatctggggcagtgtagcatccctgctgggggcttggaagtgc

SEQ ID NO: 470143 - DNA, 359 bp, Homo sapiens
aataataggtagaaaggctatcccaggactagaaaggctcttctgtaggttctcaaatctcagttgtaatttctgaacaactagtttaactctttccattatggggctaggtctgtattttattttattttatttttttaggtatttccccttaatttttaccctataattactactctcactttgttctttcttccctgagacttcatagggcagaccaaattgtaatttcccttggtgtagtccstaaaatgtttcaagacagtttttctaatgttaggagtccttttttgtcaagacccatcattgtcaatttgtaaaacttgttcctttgaatttcttgagggaaggggcttata

SEQ ID NO: 470144 - DNA, 507 bp, Homo sapiens
atgaaaggactagacaggtttagtcttctggcctacatctttctcctgtgctggctgcttcctgccctcgagcatgggactccaagttcttcagctttaggactcagactggcttccttactcctcagcttgcagacagcctattgtgggacctcaaatttaatcatgtgagtcaatactccttaataaactcccctttatatttgtctatcctattagttttatctcgctagagaaccctgactaataccgscatctttacatgcttatttccaataaatcatgtgagtattattaatcccaaatttctactatgtgttcatacacaaatccatgtcatcatgacctgtgatgctgtttatttatttaatcatttatttatttatattgacacaccgtaattgtacatatttatgtgatacaatttgaggaaacatgtttatgttgatcatatctatgatgagcaaatcagagtagtcagtaaattcatcactgcatacatttatt

SEQ ID NO: 470145 - DNA, 579 bp, Homo sapiens
cctgttctctatgaatagcctatttcctcaagcctcttccacacccactcagtttgcagcctctgtttagacttgcgttgtgctgactatcaataaattcttcctaaggtgttttttacagtgggcttattagggtgataacctatacagaaaattctttgactattccttccgctgacaaaaacctgttgcttgggggtaatgaagcaggcttctgtcacctgtgccaatggatcagctccactcacttggcattttgtgagatgactctggtatcactgctaccttcctcttgatcacaaagagaaaaagagaaattctcctgttttctactcgtggaaacaaaataaatgaagaattttatttctgctgagtttttacaaacccactaactatcatagttttgtgtaaggaggaaatccgccacctacttcggcaataccttgcactaacccsctgcattccttagaatgatagtcactgctctaagcaatcactcaggctaaatttggaaattcattcatttgtgtagcttttctggggttgttttaacaactgtgatgcagtagtgccagtgat

SEQ ID NO: 470146 - DNA, 591 bp, Homo sapiens
atattcaaaactgccttacagttttgaaacaatagtagtcccttcttacagccacactgtatatatgaagctttcagatctataataacatactgttaggtacttactatgtttcaagaacttatcatacataatcctcaaccttcaaaacaagratgcagaggagatgtttttattatttcaattttatcaggtagaaaactgaacttcatagagatgaagaaacttgagcaaattcacacagccagagaagaaaggagagtggtttgaataccacattgcctcattttattcttgtgcattttattccttttcagtattttaaattagcacaaaatacctcaaaaaggaaagatgactgttaaaagggttacatttttaacatactgaaggcaattagtaaagatgttaaacaaaattttaccagtaagtgtggtttgctttcaaatgtcaaagataaaaataatgctaaaatatttttggcatctttattggacatcatcgttgggaacaagctaacgcaatggttttagtcatgctccctcaggaacacagctaagaattaaggactagattaaatttagtgtggag

SEQ ID NO: 470147 - DNA, 524 bp, Homo sapiens
ctttcagatctataataacatactgttaggtacttactatgtttcaagaacttatcatacataatcctcaaccttcaaaacaagaatgcagaggagatgtttttattatttcaattttatcaggtagaaaactgaacttcatagagatgaagaaacttgagcaaattcacacagccagagaagaaaggagmgtggtttgaataccacattgcctcattttattcttgtgcattttattccttttcagtattttaaattagcacaaaatacctcaaaaaggaaagatgactgttaaaagggttacatttttaacatactgaaggcaattagtaaagatgttaaacaaaattttaccagtaagtgtggtttgctttcaaatgtcaaagataaaaataatgctaaaatatttttggcatctttattggacatcatcgttgggaacaagctaacgcaatggttttagtcatgctccctcaggaacacagctaagaattaaggactagattaaatttagtgtggagcta

SEQ ID NO: 470148 - DNA, 409 bp, Homo sapiens
ttgactttcactgtaatcgttttgaataaagtcttccttgcccgtttaactctggtacaatttctctttgacaccacagaacaaattctttcagaaatatattgctggacggtcaattttctaaaagctatacattccactcagtaatcaaattgccaaaatatttgcaatatcaatgctagccattctcactggagttctctctggagatttttgtatgtctccaaccaggaacccataacattaattaataaatatttttcattccattgcactgtgagcttctgggaggcagagatcgttttaatactacttttctgtttccagtrtctaagccagtgccttgaagaatatcactgcatcacactaggggaagcaatcaggcaacctcccacgacattatatatag

SEQ ID NO: 470149 - DNA, 547 bp, Homo sapiens
aaccaagcgcccatcaagttagtcagtgcaccaagattcccaccgtgttctccaaagacccacctgtcttccacttctgagaaccaccccgccgtgggggctaagtataaattatatactcagtacacatcaatgaactgtgagaaactctgaggactgtgggacgttagtgcagaaaaagatcatsattctgaaacttagaatatggaaccagggaggaagggatgacatactcctctagagatttagatgtcagtgttaatggggaaagtaaacccaggaaataaagggagtcagtgaggtaagtgaggagcctttggatgctcagaactctccttcaggaaaagcagaagcggagaggggaagggaggggggcgggcgaggcaagagaagcaactttgcccttatttggtcaaaggttctgcaggagctgttagggcccggacgcctgggtctccaagtaacctagagtttagctccaggtatctctgctctgagatgaggaagcagacccctgggggctttccgggaaagttggaaaactttt

SEQ ID NO: 470150 - DNA, 569 bp, Homo sapiens
ttgctgaggactctggaaacaggaaagcagcttcactctacataaaaaaagagattggcggctgggcacggtggctcacacctgtaatcccagcactttgggaggccgaggcaggcaatcacctgaggtcagaagtttgagaccatcctggccaacatggtgaaaccccatctctactaaaaatacaaaaattagccgggcgtggtggcggtcacctgtaatcccagctactcaggaggctgaggcaggagaatcgtttgaacccgggaggcggaggttgcagtgagccaagattgtgccattgcactccagcctgggcaacaagagcgaaactgtctcaaaaaaaaaaaaaaaaaaaaagagagagattaggtagaggactaagaagcctaagaagccatgaaaactgagggaaactaggtcacagaccacggggtaagagttaatacaatttgttttggggagtcagaagacaaataggagggagragggaggaggtaagcctgagtctcacctctgggtaggaccactctggggagaagtctgtgatggtgctaagagcaggagac

SEQ ID NO: 470151 - DNA, 613 bp, Homo sapiens
cccaactgctcctgtataatcttgtcttctggaccaggaactccttaaggacaaggtctaggcttcaggcatctcacaatagccaccaaggcgcaggacagtgtacacrgaggcagcagcaggggcgccaggatgctgagctccacctcttctgctgatgaggctctgccaaagggacagctcccacctgctgcctgcctgtcccctagcctggcaagcactcctcagtttgaccttcccaaactctcttgtgccccaagaggttttaaggctccttgaaggctggcctgggaaccacacatcttctaaagaaatggacaaggttctcactctccccagccaaggacccagatcaggtctctggccagcattcccctttcctcaagcttccagtgcccacccacttaagccctggccttccacctgcactgcctccagcccacagtggtctgacttcctctctaagtctctttatttcctccctctttaggctgcagaagcagtcatcagaccgaggggcttttcctggggattatgtgagatgatctgggcatcggtggcattcttgggcgagtggctggaggaaacacaccgggcctgggatttgagtttt

SEQ ID NO: 470152 - DNA, 619 bp, Homo sapiens
caaactgagaaagcaacccaaacccaccctttctccacctcatccccagccacacctggtggccagggagatggaaactagaacacctgtattccatctctctccctttcccagacaccaaagtggtctgtggggtgagggccatgtgttagctccctcctctgtgaaatgctgctaattttagaagggcagaaaagagaaaggtagagaagtggcatgaatcaccaccatggctaggcctcttgtctccacccatgctctgaggctggaaagatgagattctctggggctatagaaagggtgggccagctgggaactattacccatcctgccccttctgcacaccaaggctgctccctgcccttcctgaagcaccattctgactgttaccaaccaaccaccttgtattcttctcactatatattcctgccagaattgctgcctayacatgggcctccagcgtccctaagagtgctcataccctgtgacaagaaaaccatttgttcttactgaaataaaacatgtggggattgtcatttgcagttcctctccccttttgtgtaattcacaagtctctgatgtaggattaggcttcaaatgcatttggtcaagtacatac

SEQ ID NO: 470153 - DNA, 623 bp, Homo sapiens
ggggcaggcagaggggtcacccagtgcgatgtcaagagtggggccggctggtccgggaatatgctggggagtggagcacgtttatattcgacgtaggaaaaacaatggagaggaagagaaggtggaagggagggcaagggagagaaacatcacatagatatttttagactttgctgaagatctgttatttttacatccttgggctcgggacggcagggagttaaattcccctgagagaatccccatggggccagggaaagcccgctgcagactggtttaccagaatatttttgtccacggctcccagaccaagctaaaaaataaaaaccgcacgagagaaaaggcctttgcgagtggaagaagtgaggttggcacaagggaaggaatcctgaaaccaagtctgtgtccgcgcggcgttggtctgggccacctcgcaatgaggctttagtgatcttaacgacaagcagcctcaaagcyagggtggaggagtggtcatttagaaagagcttccctctttctctagaagaatccgaaccctcccttccctcagctcggccgcgcccggtgaatagggatgaggaagggatcccccttcttttccaccagtaatggggctggggagt

SEQ ID NO: 470154 - DNA, 630 bp, Homo sapiens
taaattcagaatacttctccagcaatctttgctttttaattgatggtctttaaagggcaagatttgcttagaaccatgtttaagagagaagagtggaactatagtgatctaaaatgatctaattttctagaaaattactactttctccaagctgtataaactttaattaagaagacaaggaggtctattctctcytcttacacacataccacataccaggctcttgggatactgataaaaggaagacagtggactgaaaagattaaaatttttaacaaaactctaaatataattaagatggaatgtttactgccatctttaaggaccaaaaagtaaccaacatttgttgctcctctggaaagaaaatatctttcacttcaaaatatgggtaaagtcagcttataaagtaatctgtagaaagaaattaagtcacaagtaagacaaaacaaaaatcagctcatatgagcacaatacatttttcagctaaatatcaccaaaataagcattcctgggacacttaatgcgatgctttgtgcatctgtatccaataacatgttctcaacatctcctaaagggatattttggtagcttccactacatattctctagaacctgactttaatggtagca

SEQ ID NO: 470155 - DNA, 522 bp, Homo sapiens
tagtctaaggaagcatgtgaagcaatgtggggttgaaaccatgagggagaactttctgatcctagcagagtagacctagtttctgtggagggctagacaaccagcccccaaactaattgtcctgactatgggtgctcaatgctgaaaaataaagcaaaaagggttcttctctttcatagtctctgtcaagaagtcatagtcatgctaaggtttgaggatgtgaagacacaaagggctcctgggggctcttccttatggaagtggacayggagttggcattgaacatttccaacatagtcagtggggagggaaaccgagacaacatagatgagtgaaacaaactcggccacagagctgctacagtccctggacgtttgtaaaacttacagaaattgcttttcatgcctagcagccagcacaggcaatagctatcaccaaagccatctcagcaggacagtaaatcaaaaatcaccaaggctaagaagcagtatgttaagaataacgactccctctgagatgatg

SEQ ID NO: 470156 - DNA, 396 bp, Homo sapiens
catgtatatgtcacacatttatatactgttgacacatagtatcaaattaatgtaaaaataaatragtactcagaaattaagtgaataagcccaaatgcttttctatacatgcgattttagtaaactttggtgaatatagttttaaaattgttggtaaaataaagtaagaatgtcttcataatttaatttatacgtttttgcctatgtctgttggcaggcaggtttatattgtctttactagatgttttaaggtcagcaaacacttgtttccatatatatacattttcttaatttgtctgtgagcttatgtctttatatttgaagctttaaattctgagttctagataagtgaccatagtaagaactggggacaaaacccatcccatcctccagctg

SEQ ID NO: 470157 - DNA, 445 bp, Homo sapiens
ttatttttcctaatgtgcccctaatgccaggcctccattgatctaggcaaagaaggaagaagtgggctttggaagtcctctatcgtgtatgcaacattccctcccccagcccaccacacctccaaccccaatcttaacttgccttcaaggaaaagagggatccttgcccatcatgtttaagaaaggctcatggtcaaaaagttaaacactgagttaccaccatatggtccggcaatttcactcctacatacatasccagcggagatgaaaacatatgtccacacacaaaaaaaagggatacacaaatattcatagcagcattattcataatagccaaaatatgtaacaacccaaatgcccattaacttatgaataggtcaacaaaatatggtatattaatgcaatggaatcacacttagccacgtaaatgaatgaagtactgatt

SEQ ID NO: 470158 - DNA, 602 bp, Homo sapiens
ttctatcatttctatcattgataaaggaaagatgttgcatgcaccactctatttcacatttaagttcaaggttctggggaaatgagtcccacaacactggcagaacgaatgtctactccacgacagggctgccacagtatggtagcagtcaggacttttcatcaatgacagcctctggaaaccatggggagaaagtgtcctgcataaccaagcggaggcaaaaaccagggaagcgtggattagacaatgaaacgattcaagtgaaacaacaaaacaattcaaggggaggaaataaaggcccagtcattcacagtactgcaaagtgattaatctaaaatgcaaatttgatgacatcagatcctatttaaaatctctgccttttctccgttcccacacaccctcttctatcagacataatgaactactgctaggattattgcagtagtcttctgactgtcaccagtstcacctcactgtactcctccacttccccactgctttcacaacaatcagtgtaaatctccaaactcatcagggccctccttacctctagcaatgttcccggacttcctatacccttggggcgaaagtctacacacatt

SEQ ID NO: 470159 - DNA, 595 bp, Homo sapiens
tgtgggtggggtggagggtggtcctccgtccaagtctgtgctctaagatgggtccccacagggggagatctcatcaacccagacttcgggtgcagtcagtgggggttgctgtggaacccactggacatactgggtccctcgtctgggagtggggtggggagccctctatccttgggcagttgtggaaaatgacggaggtccagagggctggccagaaggtaatgatcattcctccttttcgccaggtctggggcttttccccacgtggccctttctctgcctggtcccctagaggcctcgccctttctttgccctgactgttcatgggaggggtccctctggggttctccagaaccaagtccccagagttctctcattctttcttggtgatccggaaacacgaggccccttcctgtattgacagctcagaactgtgggatccaccatccckccacctgagacatctccgtgagcacagaggctgctttggcccaaaccaagcaccctcccatttggctggtattattcttgacgcggcttctctggccagaaggagtggagatgggggtgaaatggaggagtcacaaggtgtctt

SEQ ID NO: 470160 - DNA, 595 bp, Homo sapiens
tgtgggtggggtggagggtggtcctccgtccaagtctgtgctctaagatgggtccccacagggggagatctcatcaacccagacttcgggtgcagtcagtgggggttgctgtggaacccactggacatactgggtccctcgtctgggagtggggtggggagccctctatccttgggcagttgtggaaaatgacggaggtccagagggctggccagaaggtaatgatcattcctccttttcgccaggtctggggcttttccccacgtggccctttctctgcctggtcccctagaggcctcgccctttctttgccctgactgttcatgggaggggtccctctggggttctccagaaccaagtccccagagttctctcattctttcttggtgatccggaaacacgaggccccttcctgtattgacagctcagaactgtgggatccaccatcccgccacctgagacatctccgtgagcacagaggctgctttggcccaaaccaagcaccctcccatttggctggtattattcttgaygcggcttctctggccagaaggagtggagatgggggtgaaatggaggagtcacaaggtgtctt

SEQ ID NO: 470161 - DNA, 502 bp, Homo sapiens
acaggcatgtactactacatccaactaatttttaaattttttayagagacagggtctcaccgtgttgcccaggctggtctcaaactcctggctcaaagcaatcctctcacctgagcctcccaaagcactgggattactggcagaaaccattgtacctggccaacctacagcctttaaatgaggtcttatcctttataactttttaatttttaaagtacgtactttctaattaccttaatattctagatttagaaaacttaacattttagagagaaatgtgttcacaatcaaccacataggataagttacaaaaagattaaatttttaaaaatagagacaaggtctcactctatcactgaagctgaagggcagtgacatcatcatagctcactgtaatctcaaactcctagaggctcaagggatcctcctgcctcagcctcccgagtagctgagattaccagtataaccaggcctggctaatgttttcattttttgtagagac

SEQ ID NO: 470162 - DNA, 502 bp, Homo sapiens
acaggcatgtactactacatccaactaatttttaaattttttacagagacagggtctcaccgtgttgcccaggctggtctcaaactcctggctcaaagcaatcctctcacctgagcctcccaaagcactgggattactggcagaaaccattgtacctggccaacctacagcctttaaatgaggtcttatcctttataactttttaatttttaaagtacrtactttctaattaccttaatattctagatttagaaaacttaacattttagagagaaatgtgttcacaatcaaccacataggataagttacaaaaagattaaatttttaaaaatagagacaaggtctcactctatcactgaagctgaagggcagtgacatcatcatagctcactgtaatctcaaactcctagaggctcaagggatcctcctgcctcagcctcccgagtagctgagattaccagtataaccaggcctggctaatgttttcattttttgtagagac

SEQ ID NO: 470163 - DNA, 583 bp, Homo sapiens
ttcacaagacttcaagtgttgccttagccaccttcytaactgtatgaccttggacttgtcacctcatctccctaagtctcattttccttatcagaaaaatagtgagaatgacaaagggtgttttgtgggctacacaacccattaaaaacataaaggtctccactgggagccgtggctcatgcctataatcccagcattttggaaggctgaggtgggcagatcagttgaggtcaggagttcgagaccagccatggccaacatggtgaaaccctgtctctactaaaaatacaaaaaaaaaaaaaaaatatatatatatatatatatatatatatatatatatatatatagacaggtgtggtgtcacgcacctgtagtcccagctacttaggaggctgaggcaggagaataacttgagcccaggaggcaaaagttgcagtgagcggagatcgtgccactatactccagcctgggcgacagaataagactccatcttaaaaaaaaaaaaatccaaaaaaaaaggtctcttattttggaagaagcttctgaagttaggcagaaggaattgagtgatcagatcaaccag

SEQ ID NO: 470164 - DNA, 546 bp, Homo sapiens
ccggtcccccagcgcgggggtctctgcgggcgggcggaaccgaggcgtctcccccgggccccagcgcgacccccacccacctccacgaagtagaagcagggcagaagcgtcatgctgtccttcgggatcttgttcttctccttggtggagatcatggtgccgcgggcgccgcaggccgtggctggaggggagaaagcggcgctggaggggggcgcgcaggcggagcscgggggagacacggtggccggcgccggcgggggaggggcggtcggggaaactgaggctgcagagagcggcgtccgcgtggcctccccgcgccccggcccagcacgcggcttccgggcgcccctacacccgggatcggggggtcggggccgggatcgccgaggagggcggggggtctccgggcgggagccagtccccgcgtggtggtggggggcatccgggagaactggggttccgggcggcggaggagactgggtccgcgcccccagccccacagcccctcacctggcgcggccggcgcccagcacaaagcgcgtctcc

SEQ ID NO: 470165 - DNA, 546 bp, Homo sapiens
ccggtcccccagcgcgggggtctctgcgggcgggcggaaccgaggcgtctcccccgggccccagcgcgacccccacccacctccacgaagtagaagcagggcagaagcgtcatgctgtccttcgggatcttgttcttctccttggtggagatcatggtgccgcgggcgccgcaggccgtggctggaggggagaaagcggcgctggaggggggcgcgcaggcggagcccgggggagacacggtggccggcgccggcgggggaggggcggtcggggaaactgaggctgcagagagcggcgtccgcgtggcctccccgcgccccggcccagcacgcggcttccgggcgcccctacacccgggatcggggggtcggggccgggatcgccgaggagggcggggggtctccgggcgggagccagtccccgcgtggtggtggggggcatccgggagaactggggttccgggcggcggaggagactgggtccgcrcccccagccccacagcccctcacctggcgcggccggcgcccagcacaaagcgcgtctcc

SEQ ID NO: 470166 - DNA, 328 bp, Homo sapiens
ctgggcttgagtgatgggagagttccgagcaggccggaggggttgagcgtaccagacgctgctcaaaacttttatttaaaaatgattattattattattactattattttgagatggactcttgctctgtcgcccaggctggagtgcaatcgtgcgatttcagctcactgcaacctcccacctcctgggttcaagtgattctccctcctcagcctcccgagtagttgggattataggcgccygccaccacgacgggctaatttttgtatttttagtagaaagaggatctccccatgttggtcaggctggtgttgatctcctgacctca

SEQ ID NO: 470167 - DNA, 572 bp, Homo sapiens
tgggaggctggctgaagccactggctctccagagcttttgctgaggacttgctcaaaagcctctttgttcactgttccagcttccacaagaagctctccacccctgggtcctcagggaccttgggctgccccaccaacatacaggggtctccagcccctcccaccrtcagccagaaaacagccagccctcatcactctacaggatttttaaaaggatgggtggctcagggacaagggacaggactgctagggagatggggtgggcaggagggactgtgttaggaagaatcagtggaagtcctgtaagccggctgctccccaaacaaacattttacttcttttggaggccaggaatgaaagacttattagctgtttatattacttaaaagagttttgcagatgcttattaatttgtagttattaatattaattattattgattattaaaggactcagaatccacttgctaacactgttttctctgtcttcttcctgtaatcccttccattgcccccttccagcctctatgctatcagaaagagtgaggaagactggaaaatatgccagtggga

SEQ ID NO: 470168 - DNA, 568 bp, Homo sapiens
ttatagcagggctcaggcaggattcttcagagaaaataaacaaagtcatacacaccagtccttcacacccttcagccccttccctggagaggggcccagcctagctgtgccgacacagggacgcccaccaccccagaggggctgtgggggctgctgccgggatatcaagaggccaggggtctgggatgggggagggggcgccaaggagggagactgacacaggtcccctgcagccccagtcaggccaggaggagatggctggaaccttggggtccctgcctcaccactggggccagagtcttgggtccggcatctgtaggggagagtcagattcaaatgcaggcrtaacccaaattttctaaatgcttaccaagtgccaggcactgtgcttgcaatttacaaacacattttacttattcctcatcactgaattcactgaattcagtagaagtcatttctacaagttgccacttagtattggcctctatgtgcctggcactctgttaggtgctagggagacaagattaaatgacacatggagagagagagagctcagagagctttccag

SEQ ID NO: 470169 - DNA, 420 bp, Homo sapiens
taggtttcccgactgccagaccagtgttctttccactgcttcatgtccatgaggtttgcaagaatgtgtaagccactcgaatagaaatagaatattacataaatatgtatctctagtacaatatacaaggtaggtgttctttagttcttttctggaaaggatgataataaaattgcttttttcctactttctcacttacactcaccacatcctactacaggatacacattacatactcctttggggaaggctaaaccttcccaccaccccctgcacayatctcagcaataaagcaacatctttgatgagtaactcaccatgagtaaagaaagatgaagcggctgggcatggtggctcacgcctgtaatcccagcactttggaaggccaaggtaggtggatcgcaggagcccagcagtttg

SEQ ID NO: 470170 - DNA, 420 bp, Homo sapiens
taggtttcccgactgccagaccagtgttctttccactgcttcatgtccatgaggtttgcaagaatgtgtaagccactcgaatagaaatagaatattacataaatatgtatctctagtacaatatacaaggtaggtgttctttagttcttttctggaaaggatgataataaaattgcttttttcctactttctcacttacactcaccacatcctactacaggatacacattacatactcctttggggaaggctaaaccttcccaccaccccctgcacatatctcagcaataaagcaacatctttratgagtaactcaccatgagtaaagaaagatgaagcggctgggcatggtggctcacgcctgtaatcccagcactttggaaggccaaggtaggtggatcgcaggagcccagcagtttg

SEQ ID NO: 470171 - DNA, 652 bp, Homo sapiens
ctgaggggccctcatggggaagggcagcatgcactgtcctgctccctctcaaggttgtttttggcaaaggagctcactagaaacttaccacatgtatgttccctggggcttttcagggacttcctagagggcaggcccactgccccccrccccccgcactggagcaggataaacttggtttgcaggggcctggctttctctgaggtggcatctaccctactagtcctagggacatcatagttagctccttgctttccttggtatgtcccacctaggaggagttcatcagtcaggagtccctggggggcagggctaaggggccaccacgggaaggaggctcaggtggctgactccgctcccctgctggctctgccctgacactgtctccatggaatccagggctccagttctaatcatgggtcagtctcttccttgcactgagcccaattcctactggaaaaaagggacataggaaaagtgacccaccacctgctttaaaaaaagaccgcaggaggctttacaaagtcatgcatccatcatctcctttagggtcctccatccattcctctccttaaaactcacttctcctttctgccacctttaactcaggctcctccttgccttgtctgcctccagtgcaggcctgagccca

SEQ ID NO: 470172 - DNA, 474 bp, Homo sapiens
tctttccctttccaaccagagcacttggaactccagcctctaccaggacaagtgtcaaagcatgataggctagggatggggtcccaggacccctggtggaagcctaaggcccagaagtagcttctttcaagtgctctyagcttctagggggaaagctccagagaaacaaaactgcccaggagggcagaagttctggttaagtcagaccccaaattctgagtttcattttgcctatagttctttgggggaccatatcgctcaaaaggaaggtctgtttggggacgtttcctccctggtatgaaaggaggcaccggagaccaagagaagagaccagctaagccctgggaagaaggcagtttggctaaggtgagagagggcgctcaccggggaaggtgaggtgaggcggcaagcggagggctagggggccgactgggaaattctggcgcttctccccggctcacagaactcgccagc

SEQ ID NO: 470173 - DNA, 474 bp, Homo sapiens
tctttccctttccaaccagagcacttggaactccagcctctaccaggacaagtgtcaaagcatgataggctagggatggggtcccaggacccctggtggaagcctaaggcccagaagtagcttctttcaagtgctctcagcttctagggggaaagctccagagaaacaaaactgcccaggagggcagaagttctggttaagtcagaccccaaattctgagtttcattttgcctatagttctttgggggaccatatcgctcaaaaggaaggtctgtttggggacgtttcctccctggtatgaaaggaggcaccggagaccaagagaagagaccagctaagccctgggragaaggcagtttggctaaggtgagagagggcgctcaccggggaaggtgaggtgaggcggcaagcggagggctagggggccgactgggaaattctggcgcttctccccggctcacagaactcgccagc

SEQ ID NO: 470174 - DNA, 628 bp, Homo sapiens
ccgtcccatctcttaaaaaaaaaaatcaaaaagataaacatacatttgtaatggctggctatctggagacagagggccagagcagatgactgactgaggtcctttccaggggtagaatatgccgatgtcataaggctaaaggtagcatagttttggcggctgaagccattcctaggctggaaagggaattaggatttggtacggcatcagcccagcatcccagagttctttgtttttgagctcaggatgtctgattcctggccatttttctacctcaagagatgattagctttgctgaatttggagaatgacaaagctgtgacctctatggattttacacagctcaatctcactttcccatgtggcccacaagccctaagggaaaaaaaacaaaacaaaacatttctatgttttctccccgggagaactagagtccatcaaactcagctctgggcaggcgacttctgaatttgagcttctccttcagctaggacctctcagctctattttgagttttctgttttgcckccttgcctccatagaatttcagtttctatcactctcaatccctagtgacatgtggctgtgatgttatggggatttgcaggtgggctatttccctggctac

SEQ ID NO: 470175 - DNA, 450 bp, Homo sapiens
attaaattctgcaaatctttattgagtgccaactatttgctgggcacaggctaggcactgattctgctggttctgakaaacataaatggtaccatagggaggtgtttcctcctaagtggcaggaggatgtttgctgggagttaagtgaaccaattcctcctctgcttacaccacgtgggggtaggtccagaactcaggccttgggaacatatgctgtgctctcttctacaggcgctgtgtggaagaaccaatagcagttgttaaatagctgtggaatttcctccacaatccacatagtgatgtgtctccaaggagctctgggtcatgaggccaatgtatgaaatcttcactgaagttctagggaaaagaaaaccaagaagaattaattatgtttgggggatgaaataagccagaaaaatgtcccaggaaattttttgcaagttcagagaa

SEQ ID NO: 470176 - DNA, 450 bp, Homo sapiens
attaaattctgcaaatctttattgagtgccaactatttgctgggcacaggctaggcactgattctgctggttctgagaaacataaatggtaccatarggaggtgtttcctcctaagtggcaggaggatgtttgctgggagttaagtgaaccaattcctcctctgcttacaccacgtgggggtaggtccagaactcaggccttgggaacatatgctgtgctctcttctacaggcgctgtgtggaagaaccaatagcagttgttaaatagctgtggaatttcctccacaatccacatagtgatgtgtctccaaggagctctgggtcatgaggccaatgtatgaaatcttcactgaagttctagggaaaagaaaaccaagaagaattaattatgtttgggggatgaaataagccagaaaaatgtcccaggaaattttttgcaagttcagagaa

SEQ ID NO: 470177 - DNA, 600 bp, Homo sapiens
gccctgagtgtggtcccaacacctgtacgatttctatcgggaccctcattttgtagtagtgctacccactctcctcttacccgccacacacagccggcgggggtggggagggggaacggggcctgcctttcacgcacctgcctcgatcctcaccgccctgggacttggggyacccccgctcccacctggtccagcctcgccccttcctcttcactatttgtaagctctatgcccctcctcgagcaacaaacaggcaccaaattgataaccggccttaacgattcccattcctctccaccccccagccccaggaggcgggctcaggtcacgccccttggcaaaaagcgatgctctgagcccaccaaagtggcccaggcaggagcgaacgccagcgtcgcagacctgcagggcacgaactcccggcagctcctctccggccgctcccccgaccacctgccagcttgaggacttaccagcctcttcggtcggcggagcggcacgcactcagcgcgcaggcgccaaataccaagcccgccaggagaacgcgggcgcgcgctcgcgcgtgcgctcttcgcggctccggaggccttcccaatatcg

SEQ ID NO: 470178 - DNA, 362 bp, Homo sapiens
gagatggaagcccttagagatttttaagcacagaagtggtctggccagttctgtactttaaataaataacagtaccagtgttggcagtgtcagcatgcaaggatctgatctttcaatgaaaacttaagaggactcgcatatagacatggaaaaccattagagtttgtatcagttcaggtaagatgatggggactcaacatactatgagataacactgtggaaatagcatgttatcactcaagtacagcaagcggcatgttatcactcaagtacaaggagactcaagtacaataaaaattattattcaagtataatwaaaaaatcaagcaaactatgaggaaattctaaggagctatccttaa

SEQ ID NO: 470179 - DNA, 640 bp, Homo sapiens
ttctttttttttgaagtggagtttgctcttgttgcccaggctggagtgcagtggcatcatctcgactcattgcaacctccacctcccaggttcaagcgattttcctgcctcagcctcccaagtatctgggattacaggcatgcaccaccacacctggataattttgtatttttagtagagacagggtttctccctgttggtcaggctggtcgcaaactcctgacctcaggtgatctgcccgcctcggcctcccagagtgctgggattacaggcgtgagccaccgcgcctggctgaaagatggaatatttttataagtggtttagaacaacttgaaagccatctggaaaaaagcaaaggtggatcactagcctagacataagtaaagtccaagtggaccaaagatgaaatattatatcataaaatagtactatatgaaatcataaggggattttttttctttttttttttttttttagttttttaatttattagtaataacaacttgagaattgcatagtattaaggcatcagttcttggartgtgggctgaggacccttttggggtgcctatgagggcaacactattttacagtaaaactaagacattattttcctttttcactatagacaaaaatttag

SEQ ID NO: 470180 - DNA, 626 bp, Homo sapiens
ttcttcctaatctatcttgcaatgctgacataaggcttagaatcaatatatgtgaaggctccagctcccggtaaatcctcaacacagggcaattatattaatcgccatagcgaatatttgttttaatttatgactgttcataaaacttttaaaaaataatgtattgaggtgtagttcatataacataaaattaaccattttaaagtgaacaattcagtaacatttagtacgttcacagtgttccgcaatgactgcctctacctagttccataatatttccatcactccaaagttaaaactccttacccagcagtttcttcccattcctcattcttcccagcctctggcaaccaccaattagcattctacatctgtagatttatctacaaaatatattacatatacacggaaccatacaataagtgatcttttgtatctggctcctttcagtcaggataaagttttggaggtatatccacactgcagcatgtatcagaacttcattccttttcatggctgaatactactctattgtacggccaaagcacgttatccagccaatactgtagatatacctgcaggaaaaagtatttcygcacaaaagctgctccataaaattggaagga

SEQ ID NO: 470181 - DNA, 524 bp, Homo sapiens
acacattgtcaaaaacgtttatcatgcaaccttttgaagtttcttccactccctcctagttattaaagcttggattgcagttagttatcaacaacaaagcatacacgtgatggtgtttttagagtcagcctttcagtttgatttctgaactactaagcaaaattcagttctcctgatcagaaaaatgattagtgacctacttttcatgctgaatgcacaaaaccgttgatttctgaaatcacttctatatggacctagggataatgcaagggacatggaaatttcatttgtatcataatgctccaaactgcaagaattttcagatataagaatctgccacttcaagtgaggctgtgattctttcagtgcaaatgaggaaatagtgacctacattattgagaagattcctctggcaacttaattcctaatgtaaatttcttcagattgagaataagcttcagttcgtgttttggcaagrggaataaaactctttctgaataattcaagcgaatactattttttga

SEQ ID NO: 470182 - DNA, 455 bp, Homo sapiens
aaaccatcatctggttccaggtggaagcatgtgctttaggtgtgtgccatcagtccacattgagcggcattatacaaaatagctctgagaaacttgatactgcttttcctttaagaatattcttaagaacatcagctacatcttacagtttttcttccactgatctttctttgctctgcaatgtcttctacattgctaccaatgatctttccaaaacaaacctgactgagatcctctgctgaaaaatcatcagtagttctgctctatctacagaataatttcagacccctaagcatggcatatatacttgctactcaacgcctgctctgagagccagcagcrttgtaggatcttgagccctaccccagactgacagcatcagagcctacatcttaacaaaattcccaggtgacctgcaggcacattcaggtgtgagaagcacttatacagtgcac

SEQ ID NO: 470183 - DNA, 455 bp, Homo sapiens
ttcagataaggaagactggagcaagacatcccaccagcttcaacgggtcaagcggagtcaggttaggtgacaaggcaccacccccactgaaacgagtctttctttttgcaaactgccttgttttcaagacgctcaatttgttaaatgcattcatctgtctacctttgtataacttttcacaggaatccattggttcacaaagcagaaaatgatcaagacctggcrgcctgacttgggggtcaaaaaatacggtcacaaagagcagagtgcagtgagtaaggggctccatccccaccttctcttctactccaaggtcagagaagagccagagcaatttgtaagagcacagaggtgtgaaaggcaggtgccagacgtggcctgtccagggaaggagggggaggtagggtcgctgtctgcagagtggatactcggagaatgcccttggggacaccctc

SEQ ID NO: 470184 - DNA, 455 bp, Homo sapiens
ttcagataaggaagactggagcaagacatcccaccagcttcaacgggtcaagcggagtcaggttaggtgacaaggcaccacccccactgaaacgagtctttctttttgcaaactgccttgttttcaagacgctcaatttgttaaatgcattcatctgtctacctttgtataacttttcacaggaatccattggttcacaaagcagaaaatgatcaagacctggcagcctgacttgggggtcaaaaaatacggtcacaaagagcagagtgcagtgagtaaggggctccatccccaccttctcttctactccaaggtcagagaagagccagagcaatttgtaagagcacagaggtgtgaaaggcaggtgccagacgyggcctgtccagggaaggagggggaggtagggtcgctgtctgcagagtggatactcggagaatgcccttggggacaccctc

SEQ ID NO: 470185 - DNA, 585 bp, Homo sapiens
taaagacaaaggccagacaaggaggctcacaggtgacacaacacaaactaatcaggagacaagacacctgcttatgggctgtaccttctgccttgatatgtagtcagttcttcctgaaggatggaagctctcttttgcagaaaattaacctagaaaagacaccttgtgtgagaagaggtggacgtggcttacatgtcaatattgtgcaaatagtatggtaagattttatttaaattcagacaattccctagataaaactcagaggatttgttgaatgtcaatgttgtgttttttacatttggtcacatcccatccttattgaaaatccatcagwtacgacagaataaagttcaaactcctcattgcagagccattttgatctggcccacccccatcattgtggctttacctgtcctcacgccctgcccaccactgctgcttccacaccgtgtctttctcgctccgttgctctttggcccaggccattttctctctttggaacacttgtctttctgtctcccattcatcctccaccatttggtttaaatgtcacctctcctgtggaatcgttcacctcctccccag

SEQ ID NO: 470186 - DNA, 533 bp, Homo sapiens
cctgtcatctagcccagtcctcaaagctcagccacagcccagcctccccgggagccttccctggcctgcctgcctacgcaggtctgtctccttcactcacctgcagctcaggggctctgctgcactcggcacatgctcctctgagacccgctcaaactgtgtttaacactcttcattcattcattcattcaacagatgtctaatgagcatctcctatgtcccagacagccttctaagtgtgggggatacattcgtgagcaaaacaggcacttacatacttgtatgtgcgtgtgcgtgtgcctgtgtgcgtgtgtgcgtgtgagagacagcgagagcgtgygtgtgcgagagagtatcaacattatcaataaataacagtatgttagaagataaaagccatggaaaagctagagccggataagggggttggaattgtggagatgagaacagaattttaactggggtggtcagaggaggctttactgagctggcagccttcaaacaaagacttgaaggatgctcttttttgttta

SEQ ID NO: 470187 - DNA, 353 bp, Homo sapiens
ctctcacatgcctccttccccactgcaggaaaaattgcctaatgaatgtctcatggctgaaacaccgatcctgattcctgaaaggcggttgtaattattaaactgagagaatcatgaaacacttcttgatatttgaaaggcttatcaagactagatcaggagcaggtcaaattaccagttatgaactcatttttgtagaaatggactcattagcaagcatgcccattgcctaaaagtataagacctctttcctctggattgagagaaatgactttaaaaaaaacctgtacataaaagmagctctgccttaattgttattccattcattgctggacttgggcaggttcctgcag

SEQ ID NO: 470188 - DNA, 639 bp, Homo sapiens
caaagttatgtgtaatagaatcataagtttgcatcagttatgatttattataaaaattaaagtcacctttcttgaaactcagtttgggaaatatattgtaatgtcttctttgaaggctgtgagcttctacaaggtggagattgatgtttaaccttttctctttccctagtgtctarcctgttacttgtcctcatgtgttaagaattttagttgcaactgacaacccaactcaaactaactttagtaaaacagttaattttgtatacctacatttccaaagataacagacttcaggtatagttggattcaggaacctggaaatctttcccaggaatatttctagctcctactcttgtctgattttctttgtttgggcttcacttgaatctgtctttgtgggccaagggctggaatacctggattgactgtattttggtcatgtgcttttctgcgaagtctgactgggtgttctgggatcagcgccacccagtccacattcactgatggcaggaatcgggtgatacagagagaaaaaaaatgaaacattgtcactaaagaggaaggaagagggatgctcattagacaaaatcaatgcctgcccaccacacacaaaaaatacctgtactgattttttttttt

SEQ ID NO: 470189 - DNA, 615 bp, Homo sapiens
tgaattaggctccgacaacactgccgtgtgagttgttgaacttggcagtcattcttttrgttgacaaataagaatgtggcaatttattacattcttgacattttgctgagtctgaggttttaaatggaaccttaatatgtgtttgttttccagggtaaatggatccttctatgagatcttgcaagtggactttggaattgataatagcagtgacctggctggggcccagcagattacctggcaggtggagtacccgattgaggactccatgagtgagctggtcgtctccgagatcttcgtcagccagacaaccttcgtgggcatcgtccctcttgccatggtgaggaatctgggggtttcagaggaagtgtcacaaagaagttttctttaaacatgatgcactgtataatctgttattttccacatacctgatacactgtttaaacaaggaaaatatacttaaattgcatttgatctacctgcttttcataatggctccttgggaactatttaaggtctaccatgtaaatcccttttcatttgtggatattgcggaactgtttcctggggagcccttattctttattttctcaatctgcgtgcatatcaggactg

SEQ ID NO: 470190 - DNA, 615 bp, Homo sapiens
tgaattaggctccgacaacactgccgtgtgagttgttgaacttggcagtcattcttttggttgacaaataagaatgtggcaatttattacattcttgacattytgctgagtctgaggttttaaatggaaccttaatatgtgtttgttttccagggtaaatggatccttctatgagatcttgcaagtggactttggaattgataatagcagtgacctggctggggcccagcagattacctggcaggtggagtacccgattgaggactccatgagtgagctggtcgtctccgagatcttcgtcagccagacaaccttcgtgggcatcgtccctcttgccatggtgaggaatctgggggtttcagaggaagtgtcacaaagaagttttctttaaacatgatgcactgtataatctgttattttccacatacctgatacactgtttaaacaaggaaaatatacttaaattgcatttgatctacctgcttttcataatggctccttgggaactatttaaggtctaccatgtaaatcccttttcatttgtggatattgcggaactgtttcctggggagcccttattctttattttctcaatctgcgtgcatatcaggactg

SEQ ID NO: 470191 - DNA, 615 bp, Homo sapiens
tgaattaggctccgacaacactgccgtgtgagttgttgaacttggcagtcattcttttggttgacaaataagaatgtggcaatttattacattcttgacattttgctgagtctgaggttttaaatggaaccttaatatgtgtttgttttccagggtaaatggatccttctatgagatcttgcaagtggactttggaattgataatagcagtgacctggctggggcccagcagattacctggcaggtggagtacccgattgaggactccatgagtgagctggtcgtctccgagatcttcgtcagccagacaaccttcgtgggcatcgtccctcttgccatggtgaggaatctgggggtttcagaggaagtgtcacaaagaagttttctttaaacatgatgcactgtrtaatctgttattttccacatacctgatacactgtttaaacaaggaaaatatacttaaattgcatttgatctacctgcttttcataatggctccttgggaactatttaaggtctaccatgtaaatcccttttcatttgtggatattgcggaactgtttcctggggagcccttattctttattttctcaatctgcgtgcatatcaggactg

SEQ ID NO: 470192 - DNA, 559 bp, Homo sapiens
gtattgagcaagtgctattgagaggcagttttgatgtcatggcagatgtattataatgtgctggtttattgccctgttgagctttctttgcccttagctggcagctccatgaagggggagggacctattgctcttcctcattagttcttcccgtcactagcactgcacctggcatgagttaggtgctctatgaatagacttgaatgtaggctaatggtggagcttattggtgccagcaattaatgtcgctgctcatggaaagggggcttcagagtccagtggatgtggcatttaaacctacctcagccatcactttccgggggatttggggaaatttgcttttcaaaatgaacctcagagacaggctttgtatgtgataataactagcrtttattgagcacttgctatgtgctcagcacctaagctcttcacatgtatcagttcatatattaggttggtgcaaaagtaactgtggtttctgctatcaaaaaaaggcaaaaatcgcaattacgtttgcaccaaccaatgatactcaaaataatcctgtgaggcctgactg

SEQ ID NO: 470193 - DNA, 664 bp, Homo sapiens
aaacaatgggatgagccttctcagggggtagacgaagtggattacacagcctcctattaaacaaatgtgtgcttctcttttccattccattgtcaagaggggtgggcttccagaagcaaaagatcatttctactcatatacccaatttattccttctgttctgactacattttctaaactgctctttatttgccatccagacattcaacatttaacttgaaatgctgagagaaaaatcttagctcttaaatcactttgtctgattttctgttcctccttgcaatgttggattagccttaaagggcccctcctcaaaatgtttcctgtgtttgttaccacttctaaagtccagtttaacaagcctttttttaaagagtaaaggcctcagccccaagtgattgccgtgataaaataatcttttgatgccctgaactactgaacactttctgtcctcaagaatgtcaaccatgtcactcccaagagtatatgtttccgagaacagagagatgaataagtatttcacacaatttcttgacatcctttgtgtctaacaaatgacaaayatttgagttacagtctgacttcttttcatagaagcacagttgtaggcagagccctagatggctatgtgctgagacatctatgtctgaaggccacatgtagg

SEQ ID NO: 470194 - DNA, 557 bp, Homo sapiens
tgttcctattatattttgctttattctgattaactttgaacagcagtcattaacaagggaaaggctccactttggtctgaactgcttatgttgggaattttttcatccagcggcacctctatttaccttggccctgactctgtggctcagttgataaatcaagtgtatgttcgtgttgtactctttgaatgctaatgaaggaagcctgcatttcaaggcagggagctaatctgtawaatttattcctgtgcagttttacaaccatgatgcatacttccttttctcttaacctttgtggatttcatttgaatagcaataaccagggtgaaggagggcactgcttttgatgcatcttctgattctcttctcagtatggcattgagatgtgtatcaggggaggggaactcacgcttcccactgagtttacaatcaacaaattcttatcctgaggactggagtggagttgaagtatctatctcctgagcttgtctttcaaggacttaactatgaaagcaactcctccttcaaagcccttatcattttccgactcctcttgc

SEQ ID NO: 470195 - DNA, 417 bp, Homo sapiens
ccacagtcggtttttctttcagaattaagcaattctataaaaagagactgttcttaccctcatcctcccattccttattgctggtccatcttctgccagtctcaacacatacaaatccattttgtattcccttcctccacgaatgctgaatccaaatcctttggctcctttctccatgtccacagtgaaataatcaaaatcctttggggttggggagaaaatggaataaataattatttagttatcagagaagcttctgtggctagtctctgtgttctccttctgtctcttagttaatgtattccaaatgacatgatgttgggagaagtcgtaatctggcttcataaactacccaaatgaaagacaaaattccaaaggtttgagcaggccasagcacagtttacttggtcatcaaag

SEQ ID NO: 470196 - DNA, 156 bp, Homo sapiens
ccgggtgggctggtggagtggagggtctgccttatacccatcagggcagcagcccacatgtgctcagaccatgcaccagccacagcagctcctggctgcttagagcacaaacakgtacacatctggcctcccccactttttttgtaaagaaatggg

SEQ ID NO: 470197 - DNA, 605 bp, Homo sapiens
tggaactacaggcacgcaccaccttacctggctwatttttgtatttttagtagagacggggtttcaccatgttggccaggctggtctcgaactcctgacctcaggtgatccacccgccttggcctcccaaagtgccgggattataggcgtgagccaccgcgcctggccaggtatttcttcatagcaatgcaagaacagcctgacacagaaggcactaaaaattacccatgctccaccacttagctcagaaatagctgttaagatttttatattatccacccaacacatttgtaattatattttataaggatttttactactctttcatttatcattatactgtacacatttccacatcattaaaatttttcataattatcaacaataacatgtttttttataacctgtttaaaattgacaaaaagtgtatatatttatagtatacaacatgatgttttgacatatgtatgcactgtggcgtggttaaatcaagctaattaccatatgcttttcacatacttatttttttgtgtggtgagaacacttaaaatctactaccttagcaattttaaagtataaaatatattgttaactatattgaccat

SEQ ID NO: 470198 - DNA, 605 bp, Homo sapiens
tggaactacaggcacgcaccaccttacctggctaatttttgtatttttagtagagacggggtttcaccatgttggccaggctggtctcgaactcctgacctcaggtgatccacccgccttggcctcccaaagtgccgggattataggcgtgagccaccgcgcctggccaggtatttcttcatagcaatgcaagaacagcctgacacagaaggcactaaaaattacccatgctccaccacttagctcagaaatagctgttaagatttttatattatccacccaacacatttgtaattatattttataaggatttttactactctttcatttatcattatactgtacacatttccayatcattaaaatttttcataattatcaacaataacatgtttttttataacctgtttaaaattgacaaaaagtgtatatatttatagtatacaacatgatgttttgacatatgtatgcactgtggcgtggttaaatcaagctaattaccatatgcttttcacatacttatttttttgtgtggtgagaacacttaaaatctactaccttagcaattttaaagtataaaatatattgttaactatattgaccat

SEQ ID NO: 470199 - DNA, 605 bp, Homo sapiens
tggaactacaggcacgcaccaccttacctggctaatttttgtatttttagtagagacggggtttcaccatgttggccaggctggtctcgaactcctgacctcaggtgatccacccgccttggcctcccaaagtgccgggattataggcgtgagccaccgcgcctggccaggtatttcttcatagcaatgcaagaacagcctgacacagaaggcactaaaaattacccatgctccaccacttagctcagaaatagctgttaagatttttatattatccacccaacacatttgtaattatattttataaggatttttactactctttcatttatcattatactgtacacatttccacatcattaaaatttttcataattatcaacaataacatgtttttttataacctgtttaaaattgacaaaaagtgtatatatttatagtatacaacatgaygttttgacatatgtatgcactgtggcgtggttaaatcaagctaattaccatatgcttttcacatacttatttttttgtgtggtgagaacacttaaaatctactaccttagcaattttaaagtataaaatatattgttaactatattgaccat

SEQ ID NO: 470200 - DNA, 605 bp, Homo sapiens
tggaactacaggcacgcaccaccttacctggctaatttttgtatttttagtagagacggggtttcaccatgttggccaggctggtctcgaactcctgacctcaggtgatccacccgccttggcctcccaaagtgccgggattataggcgtgagccaccgcgcctggccaggtatttcttcatagcaatgcaagaacagcctgacacagaaggcactaaaaattacccatgctccaccacttagctcagaaatagctgttaagatttttatattatccacccaacacatttgtaattatattttataaggatttttactactctttcatttatcattatactgtacacatttccacatcattaaaatttttcataattatcaacaataacatgtttttttataacctgtttaaaattgacaaaaagtgtatatatttatagtatacaacatgatgttttgacatatgtatgcactgtggcgtggttaaatcaagctaattaccatatgcttttcacatacttatttttttgtgtggtgagaacacttaaaatctactaycttagcaattttaaagtataaaatatattgttaactatattgaccat

SEQ ID NO: 470201 - DNA, 621 bp, Homo sapiens
tcctttctcagaagcaaagctaggagacaccagaagagccggtgcgaaagtttggcttgttttaacataaaacccacactccctaaggaagtggattctgagtgggaaaagctttggagtcagaagcaggaacccctgattgggtcttgggcttctgttccttagtactgttccttagtacttagccacactgaataaactccctgggcttccgtttccttattagtaaaattggctaaaaagtcccaaccaggtagtaygatcccttctgcctttattgagggctcactatgttctaggcactgctcttagggctgcctccgtattatctcagttaatctctaagctagtttaggaggtagttaggattatttaaaatctccattttgcacttgaagaaaccaagacttaacagagaggctaagtaaattgtcctagaccacacagtgagtcatggcagaactggacagaactgagattcaactcaggcaacctggttccagagtctgtattttttttttaatagacaaggtcttactccctctcccaggctgaagtgcagtggcgcagtggtgccatagctcactgtaaccttgaattcctggtagctgggaccacagg

SEQ ID NO: 470202 - DNA, 593 bp, Homo sapiens
aataaatacatgattatattttctattcaaacctatatatatatatatatatatatataaatatatataaatcacaggcaattttaatgaagaaggaaggagcgactagaaactcttagcccccatttctagggcttgacctatggctttatcttctctgactgtcccgtcagtatggctgttctgagccttcctttccccaccattcaaggtggtctaatgttcatttaccagctatcgagtcctctctcttcactgagcatcataggagagctctccaggtcaccataagccctctgggagctctcaggcctcaccccagagcccctctgcactgagcaccccagtcttttctctgatggttctgcccatcctgcaggaacttcgcacctgggaggaggagctgacscgggctgcactgcagcagaagaaccaggaggaactgctgcggcgtcgggagcaggagctggccgagcgggagattgacatcctggaacgggagctcaacatcatcatccaccagctgtgccaggagaagccccgggtgaagaaacgcaagggcaagttcaggaagagccggctgaagctcaagg

SEQ ID NO: 470203 - DNA, 600 bp, Homo sapiens
tgtagggcaaactacctcagctatgtaagaatccagcgatggaatccttgggggatggcagattcttctactaagttttgtaggagcaagagctctccagtttgtcccttgagctctgggctagagtagggttgagctgggtctgagaaactcagtcaccctgagtctcttgatttaaatattttttttcttttggtcttggtagtaaattaactttatttcacattgcaaaatattaacttcggaattttcttcttcctcacaaacttttgaaggaattaaaaaatatatgacttaattttttcatgagtcttagttcctrttgaagaaataaaagtatattctatccagacttgagtgaagacccctttaatgtcagaaattttgagaacttctatgtgatattatttctggttttagtaccttttgactaaagaaaacacgtgatgaacaaaagccattttgaattcagtaatgttaagtgagttttgcatcctcatccttttaaaaaataatacatatttgtccaaaacatgcatacctgtctatagactgcttgggtatctatggattcacagtccccctgcaaccgtgctgcag

SEQ ID NO: 470204 - DNA, 539 bp, Homo sapiens
caacatcacaccctttcccagagcagcctgcattccgtgacatcagtgtgggagtgtaaattcttgagccctgtgccctaactcaggaaatctctgaggagttgcaactccaaagctcctcagaggtcagctgaggccttggtggagactgcatcaacagttgcagcccaacttctcctgcccaatcctgcccccttcccttctcttcccctctcctttgctccccttccccagatgttaccccggggagcactcaacagactccctgcacattcatctccatcacagtccacttctcaaggacacagcccaggacactactacccacatcaccctacttgcctcacttgaggaattcccctgctgcattctttccttccttgatttcttggttcacaccgtcccctctaattatcctgtcctttcctcctgtctctacctgtcaaaatgctccttgttcttcaaggctctgctcaaatggcaccttccgcatgaygtttttatttgatgttctctggtttacctctctccacctctaa

SEQ ID NO: 470205 - DNA, 494 bp, Homo sapiens
aggtgggaggtggtcagggtaagtgcatcagagcgtggtcttccctggtagccgttattggtctaggggtaagcacgtgacctaaatggaggcggcaggggaagtccgcgatgcacgtgtgaccatgcgggggactagcctgaggatgaaactaaggcacagtgagggggtgaacgaacccgggacctcagaggtctcgctgagctgccgtcttacaacacttaggggccaccgtcctgtggactttcagttgggctaggaacgtcacttttctcattaacatagtttgtattttaaacttcttagctgataccagtggggaagccaggaggaatgacaaacttgaagtcatggaattggattgcagccctgatytaccaccaactacacatgaccttgagaaatctcttaacatctctgagcctctggtgagtcttctgtgaaacgggagtgttgggctagatgctctcctaggttcctttcagtgcaaaggt

SEQ ID NO: 470206 - DNA, 423 bp, Homo sapiens
attgacatttttttaaccaatgaattttctgaatagtgttctgtggatattaagaattataggatgaagccagacgtgttggcttacacttgtaatcccagcactttgggaggctgaggcaggaggatggtttgagcccaggagttcaagaccagcctgggcaacacagcaagaccctgtctcaaaaaaaaaaaaaaaaaaaaaaaaaaagaatgataaggatgaaagttgtcaccaaaggtttgtgtaggagatgagaaaactagacccaaaggtgagaggggttgatataacttacaattacttacctgagaaatcakctcttcttccaaattgagttgttttcctactctcagcaaaacatgtttcaatttattctctgacttcagaaaacttctataagtcaaatacctaccaaatcat

SEQ ID NO: 470207 - DNA, 624 bp, Homo sapiens
acctttgcacttctatgtatgcattactggtactgtttgaagaggcctctggaactgtgtgttttccttccagggtgctcttccttccatgcatcctgtcatctctatggaaggagcctgtagaacacctgcagttaggcagagatcaggctaggtgggcaactgtggtctcctacccacctaccaacactcattcccgctcctcttggtagatgttcctgtttacttttaggttcacatatattcttctttctttttttttttttttttaagaaagttagtgtatggattgaaagctgtccctaccaaaagatgttgacataccaacccccagtacctatgaaggtggctttatttgaaaatggggtctttkcagatgatcaagttaagatgaggtcactagggcaggctgtaactcagtgtgactgatgtccttttaaaaagaggaaatttggccgggtgcggtggctcacgcctgtaatcccaacacgttgggaggccgaggtgggcggatcacgaggtcaggagatcgagaccatcctggttaacatggtaaaaccccatctctactaaaaaaaatacaaaaaaattagccgggtgtggtggtgggctactcaggaggct

SEQ ID NO: 470208 - DNA, 625 bp, Homo sapiens
attgacagaaggaatttattcaagggaacatggtaatgcagctgttgcagctaggaggctgcctaaacagtccccaaattagtcttcgagtagtatggattktgttaggagtcatttttcatgtatgcttgagcctgacaacttgaaatgacacataatagtgtgtagcagtggtgttgcatgtgcttggagtttgagttctaaagtcaacatgtgtgacaaaactcatgtatggaaaaaaattaccattaaaagtccctttcatcacccacatacaacagattacagagttttatgtattctgtgccatctctcagtaaactcaacatagccagttttccctccagagttggaacagatggccatggctgtttctttggttgagtaccagatgaagtagttggcttgaatttaagagccatattgtaggggggaaaattacatatatatgtatatattcatctgtattatttccttttgctgagcatatagttgaattccagcaacttaaatgtttgtgtactggaacgccattgtaccatttgatcttcagcattgtcagatccttttcattgcttattatggatccaaggcctggtaagcggaagggggtcgaaaataaccc

SEQ ID NO: 470209 - DNA, 567 bp, Homo sapiens
gtggaagggagagaccaaggggcctggtgatggctctgagctgcggaatgatgatgaggccctgccttgctccactctcttccatcaccctgttacctcccccagagggacagggcccgggtctgaggatctcctccagtccagacctgctaggtgggggaggggacgcgcctgcctccccttttaaatcaagccgtgctgctcagcctctaggatgggcgcaggagcaaggacggtagaaataaaagaggttattaataaagaatgtgggtgaggtccctgggaagccaggcctgccacgctcccctaatattcccccctccagtcctggrtgccacatctccatgtctctgggggccccaaataaggacgcagcgcctttaggtgactctgctgcacgaagcttcggagaagtccacccgggctttaacacccccgccctccatcacagcccgcatcaccccccgccgccgccgcactcacaccaccaggcgagagatgatccaggacaccatggcggggccgggcgcggcgcggggcggggacccggcccggccgaggatgcag

SEQ ID NO: 470210 - DNA, 521 bp, Homo sapiens
gatggtgaagcactggcacttctggggggcacacctggtttgcccggtaagagacacgcgtcagggcacaaacaccttctcagcctaggagatgactggcatgggggaggggacggctcccraatcctcattctccttagggtgttgaggcagagtggtctggggtccttattcctacccaccccctcccaaaggacccctgtgtttgctctccgacgggctccagcccaaaccccatcccgctaccgacactgcagaagttaccacagctacatcttagtaataagcacccaattcccaagaaggggggagccacaaaggatccccataaagaaaaagatcagggcaagcgactcaggaagttgtactgtgaccctgctgagtcacctccacctgcaggctccagcatctagcagtctccctggcctgctcctcacagccccccgaggccagcgtccccatggtttcacagataggggaacagagaggccaaggcccttgcctcactaagagtccatggc

SEQ ID NO: 470211 - DNA, 521 bp, Homo sapiens
gatggtgaagcactggcacttctggggggcacacctggtttgcccggtaagagacacgcgtcagggcacaaacaccttctcagcctaggagatgactggcatgggggaggggacggctcccgaatcctcattctccttagggtgttgaggcagagtggtctggggtccttattcctacccaccccctcccaaaggacccctgtgtttgctctccgacgggctccagcccaaaccccatcccgctaccgacactgcagaagttaccacagctacatcttagtaataagcacccaattcccaagaaggggggagccacaaaggatccccataaagaaaaagatcagggcaagsgactcaggaagttgtactgtgaccctgctgagtcacctccacctgcaggctccagcatctagcagtctccctggcctgctcctcacagccccccgaggccagcgtccccatggtttcacagataggggaacagagaggccaaggcccttgcctcactaagagtccatggc

SEQ ID NO: 470212 - DNA, 655 bp, Homo sapiens
tggtatctgctgaagcacctgctgcagaaattggttgactgcttggtgtgtggggacacccccacacatctgctgtcagaagtgttctgtgctgtgatagcatagtaggagaagagtttgttttttctatagcctctcaacttgcaaacatttgtcagataatttaaatccttaaaaatgaatactaaatttacaagtgcaatttgataaggtctttatttaaaaaaaacctttttaattattgttaaaatatgttagacctgtaaagagttgagtttaaaattcttagttgtaagatggccgaataggaaaagctccagtctacagctcccagcgtgagcgatgcagaagacaggtgacttctgcatttccaaatgaggtacagggttcacctcactggggcctgtcggacggtgggtacagcccacagagtgtaagccaaagcaggactgggcatcacctcacccgggaagtgcaaggggttggagaattccctttcctagccaagggaagctgtgacagatggcacctggaaaatcgggacactcccaccctaatactgtgcttttccaatggtcttagcaaacaacacaccaggagattatatcccacgccttgttcggagggtcccasgcccacagagcctcgctcactc

SEQ ID NO: 470213 - DNA, 611 bp, Homo sapiens
aaaggcaacaaccccaacattattactcagtgttagacaaattcatcgaaaatattaatggctctgccaaataggaaaagataaaacagastacttaacactgaatggtctacaggatctgcctctacaaaaagagtcaaagatcatgaatgcttaaaacacacctaaataaactctctccccctactattatattgctaagagcagtggccaactgggtgccaaaaacacactgaaatgtgcaagatgtacatattaagtgtagaacttccttttaaaagtagggacagtgtctcgctatgttgcccaggctgttctcaaactcttggcctcaagtgattctcccacctcaaccttgcaaagtgctcggattacaggcatgagacactgtgcccagctcagaatttcttttttaagagcactgaacagagaaaagactttgaacaaaataaaaatttaggtgaccattacatactggaaaccagtacctgatgaacgatacttgtattttctattcaaattacaaaagttacacatttattttccactatctgatctaaatgcataagccctgccagtgattactcttgaggtttctgggtgacaaagga

SEQ ID NO: 470214 - DNA, 628 bp, Homo sapiens
gatgtcagtcaggggctggtagttaggaatattgatcaagttatttaaacttacctagaatgtttataaaatacaaatcaataggccacactccagatctaccgaataagaaagggcttgcacatcattaacattgtcaagtgattctgatgtcaactggaggagtctgggaaccacttacgtaataaattttaacgttcttttttttcttttttctttttttttttgagacagagtctygctctgtcgcccaggctggagtgcagtggcacaatcttggctcactgcaagctctgcctcccaggttcacaacagtctcctgcctcagcctcccgagtagctgggactacaggcgcccgccaccatgcccggctaattttttgtttttttagtagagacggggtttcaccgtgttagccaggatggtctggatctcctgacctcgtgatgatctgcctgcctcggcctcccaaagtgcgtgagccaccgcgcccagccataaattttaatgttctatttcatcacctagggatatattgctttacagaggaaaacaatatattgagcaatatgttatgaaaatgatttgacttaataatccagagctatttagtctcctacagtcata

SEQ ID NO: 470215 - DNA, 500 bp, Homo sapiens
ttcctttggacttgtattttgaaaacctgacaacttattgagagtttgcttgggccagcctctccaccattttacatccaattggtcttttgtatttagtttttcatcctaaaagtaacacattcatggtatttttatctgagaaaatataggaaagagagagaaagctttgttaataggcccactrcccaatcacaaccagtgtaaatgtgtgataacttttgtcctggtctctccagcccttcctccctctgcttctgtactatattctaattggagttcagagcctgatttggaaagtttttatatcaacacatgccatgtgctttggcagtttgctaagtctgagaaacttcagagacattttttccttctgacttacccatgtgtttcacttagattcttggaaacattctctgtgctacatggctactagcctgcagtttcaagtaacagaaaattctatacaaactcacatcgacaataaggaaaatgatcac

SEQ ID NO: 470216 - DNA, 569 bp, Homo sapiens
accatagtaaagtcaaaaaactgtaacttgaaccatggtaagttggggactgtattggcaagaccatccttttctcactgaattgtctaggcacctttgttgaaagtgaattgaccataagtgtaaaagtttacttctagatcctcaattctgttccaataatctatatgtgtatctttatatcactgtcataccgtcttataattgtggctttgcagtaagtttcaaaatcagatagtggaagycttccaactttgttcttcttttctaaaattgaattatttgcaattttgctaaattttaaactcagcttgtcaatgtctacgtaaaagtatgcatggacttttaaaaggattacattaaaattttctttaaattttttttttcttgtagagatgaggtctcactttgttgcccaggctggtctcctactcctagactgaagcaatccttctgcctcagcctcccaaagtgttgagattacaggaatgagccactgcacccaacccaaaactgttaattaatttagaaagaattgccatcttaacaatattgagtcttccaatcca

SEQ ID NO: 470217 - DNA, 576 bp, Homo sapiens
ttgaggctgggaggcagaggtaacagtaagccaagatcgtgccactgcacttcagcctggatgacagagcaagactctgtctccaaaaaaaaaaaaaaaaaagcagcagcagcaccaaagtgaggctgaaaagagaagcctatgtaggacccatgagattctctggggcttygctgaatagttaccttgtcctcaatgatggcaatgatgtctccaacagtctcaaaatccagctcttcacctgtgtaagacacagcaatatccatcttctcagccagatctaattcttccttcccatctatgctgggagcctttgatccaacaggagcctctgctacccctgatcgaaaacactcttctttgatagaattgatgatcatggatatttcactgctgtccatggaaacagtcacagtatgtggatcccccacagcctccatgggaacacagttgtcgggttgactcactgagtaacagaaagagaaaagcatctcagaagcttattgggtacaaagcgaccaccttgagatcacataagcgctacagacagatgtcaaatatccaaacacttaaggt

SEQ ID NO: 470218 - DNA, 487 bp, Homo sapiens
tgaatagtattccattctgcatatatatatatatatatatatatatayacacacacacacacacacacacaccccacattttctttatccattcatccattgatgaacacttagattgattccatatctttgctactgtgaacagtgctacagtgaacatgagaatgttgctatctcttcagcatgctgatttcatttcctttggatatgtacccagtagcggaattgctagatctttgtagctccttctgaaagcacatactttgagaagcactggccaaggatttcctggcatttatatacttctcttcatctcttcagtccccttgctacataacagactcccaactgcatgttgtcaaatgggcaagtctggtgtggatattagctatcacacaccctggtacttcagtggacagtcactttattttcttaattcacccatagtacctatggtgaaatggctgcctattcagctccccagata

SEQ ID NO: 470219 - DNA, 527 bp, Homo sapiens
ctgaagtttgcagcaattttaagcgcccccagcagcaggtgagaacctcactttccactccaactgctagctctggatatctttattttattttttttaaacactgatttaatgggtggaaatggcagttggttttaaactgtatttcttaaattattagtgtagttagacatccttccaagtgttcagcagtcatttattttccctcttctatgaatggtttattcatgtcttttgttctcaaatggatttctgaggcaagcttcccaactmttcgaaggagctgcagcaggtagaagtgtttggtgttggaacagagttgggggggcatgctggcagccaatcagagagaggggttgctggcttgacggggcacctgggacacccaggggccctgcacacgaccatccatctctcctgcacactcctttcttcacccaggccaacgagtttgtggaagttcccatttctttctgtaaatcacaagggggtaacaaagagggagtaccccgaaagaaagaacagaa

SEQ ID NO: 470220 - DNA, 527 bp, Homo sapiens
ctgaagtttgcagcaattttaagcgcccccagcagcaggtgagaacctcactttccactccaactgctagctctggatatctttattttattttttttaaacactgatttaatgggtggaaatggcagttggttttaaactgtatttcttaaattattagtgtagttagacatccttccaagtgttcagcagtcatttattttccctcttctatgaatggtttattcatgtcttttgttctcaaatggatttctgaggcaagcttcccaactcttcgaaggagctgcagcaggtagaagtgtttggtgttggaacagagttgggggggcrtgctggcagccaatcagagagaggggttgctggcttgacggggcacctgggacacccaggggccctgcacacgaccatccatctctcctgcacactcctttcttcacccaggccaacgagtttgtggaagttcccatttctttctgtaaatcacaagggggtaacaaagagggagtaccccgaaagaaagaacagaa

SEQ ID NO: 470221 - DNA, 607 bp, Homo sapiens
agtttgcagcaattttaagcgcccccagcagcaggtgagaacctcactttccactccaactgctagctctggatatctttattttattttttttaaacactgatttaatgggtggaaatggcagttggttttaaactgtatttcttaaattattagtgtagttagacatccttccaagtgttcagcagtcatttattttccctcttctatgaatggtttattcatgtcttttgttctcaaatggatttctgaggcaagcttcccaactcttcgaaggagctgcagcaggtagaagtgtttggtgttggaacagagttgggggggcatgctggcagccaatcagagagaggggttgctggcttgacggggyacctgggacacccaggggccctgcacacgaccatccatctctcctgcacactcctttcttcacccaggccaacgagtttgtggaagttcccatttctttctgtaaatcacaagggggtaacaaagagggagtaccccgaaagaaagaacagaaacttgccttctgaaagttcaactgtaactttgttacctaagggagcataacagtgacatgcgtggtcaccagacagggtcaaaa

SEQ ID NO: 470222 - DNA, 527 bp, Homo sapiens
ctgaagtttgcagcaattttaagcgcccccagcagcaggtgagaacctcactttccactccaactgctagctctggatatctttattttattttttttaaacactgatttaatgggtggaaatggcagttggttttaaactgtatttcttaaattattagtgtagttagacatccttccaagtgttcagcagtcatttattttccctcttctatgaatggtttattcatgtcttttgttctcaaatggatttctgaggcaagcttcccaactcttcgaaggagctgcagcaggtagaagtgtttggtgttggaacagagttgggggggcatgctggcagccaatcagagagaggggttgctggcttgacggggcacctgggacacccaggggccctgcacacgaccatccatctctcctgcacactcctttcttcacccaggmcaacgagtttgtggaagttcccatttctttctgtaaatcacaagggggtaacaaagagggagtaccccgaaagaaagaacagaa

SEQ ID NO: 470223 - DNA, 668 bp, Homo sapiens
aaactcttttattggttaattatgcagccctgtgtattctgttatagcaacacaaaacagactaagacagacccttatcccaagtttggaggaaagaggaatcagagaaggtttctagagagagaaggctcttggggtcaagtactggaggaagaataggatttggtcttgtaggtggagaagggaaagtattctaggcaaaggtggcagcatgtgcataggctgctagtgagagcagaagaatyactgggacaccaggggtagtttcagtatgacagcagctaggttcacgcatgtgcaagggatcagagaggcatttggacacacatcctaagggcaacgagagctactgaaggatttatcagaggcattacaggatcagacctgaaatttctgatgattctggctgcagtgtggaaaatagattgaagagggctggattgcatgcagaaggccctgctgagctgtcgtggtgggagctggaatcaacttgagtggcagtggggaagaaggaatgtagttggcctgaaagatataaaaatagaatttgcaaatgattggatatggaggcagatgagggaaaaaatgagccctggaggtatggatagatggggtgccatgaagtaagacaaggaaccccaagcagcagcaggtagaaacatactttc

SEQ ID NO: 470224 - DNA, 655 bp, Homo sapiens
tgcattcctcccagggcctgagttacttggaggaaaggcagatggctgtgggctaatttctaaagtgcacttctggggaccatcagcctcagttcccactcagggctacaggtcagagcaagaacaattctccatgaatatggatgccaaggatgggagctgattgcttctctcctgcagggcaaagctgtggccctggggtcggggygggggggacatttttgctgagatacagggtctagggaagtggtgtcctctgagtcacaaggcaggacattttaagatttaggatgctggcaacttggagaaaggtgtcactaccaggagaagcagcacagagaggaatttgcgtctgtcatacagtccctccattaattagtgcctcttactcttacagcactgaattaagaggttggatggtcaaggtgctgaaaggatttttgcagtagctaagaatttggatggatgaacatcaaggtgtcttccaatttaagaggctaggtgtcctcatttgtgccttagctgataagctgatattattccccctgggttgcactttgtccctctttcctattgtccagatctcacccaatctctatgattcaattcgtgccccatccacctattctttgaaccctttcctgatggccccagt

SEQ ID NO: 470225 - DNA, 592 bp, Homo sapiens
tcctttcaatacgcagttgaacaaaagggaagctgagtggataggcatgaccaggtatcctcttctcaagagacaatgaatcattgtcttctatgttcttgtgtgtttggtgcagaatgatgtctcgcctcccacaggaggggtacagtattattcttccagtgactcagggccattggctaccgacttctgtgtactctgggagctggccatgagaccaggtgacagaccaattcatgcacacatggaccagctctcctctggtagggaaataaaccaggggcagtgaatgatatccggtgctcccagggcatcactgtrccacccactaacatccctgccatccctctctaaagtcactcatcccacagattgtaggggttccaacaacgggttagacctggtctccaacctgaaggagtagacctatttaatatggagagatgataatgtgaaacggggagaggaggcacacagactcaatataaacaagggtcataatggtgatatcaacagtaccctccccagggcatgactgatatgttttagctgaagtttgggagagctccatgggagaacccttgctctgaaa

SEQ ID NO: 470226 - DNA, 598 bp, Homo sapiens
ttttttatttttagtggatacggggtttccccatgttggccaggctggtctcgaactcctggcctcaagtgatccacctgtttcagcctcccaaagtgctgggattacaggcgtgagccaccgcgcccagcctccaatagtggcctggttctgagactacttggatagtccagacgtattctgatttaacaaacttagtgtgaacacacttcactaagtgtttttctgaaaatttcagacaaaaatccagctcactcttgtttaagtgccttgaggaacagtatgtgtttatttttacagatgcatactgtctagcacaggstcagatattagtcgaatatacatgttcactgaaatgccggttggaatttaatgttcagcaagtttactggctccatacttgcttgggtttatgactgcatcaagttcctgctctctgcacagaaggagaatgaggattacactcagctcagaggagcatgaaaatcttggctcagccatccctaatggtctcagagcccaggctgaggggtatcattggtctttggtttcatttgttgtctctttaaattgttctaacattttctttttgagatgg

SEQ ID NO: 470227 - DNA, 472 bp, Homo sapiens
accttgggatgcagtggagaggcacctcctccaaagaagatgagggtggttctctatatgatgataaaccaatgctctagggctctaaatcacaccagtgtcttagccagagtcctcagcagtgggaggcatcatatccctggagtggttgatggctgtagtggagggatgttaccccgatgagccactccaccttcattttctcttcttgggctaggagagctctgctttcctggaatgctaaggcaggatcaaaacsaactagaatcaatagagtccgaggcacagtgagagctggagagagcatgcagtacaaactgtctcaaaaccacacctgctgaaaatcaatattttgctcagagagtcctcatttggaaatctcctttctttttagacaaaacacagtgactctctcaagaggtggggaagctaatcagacaaatgactggggccctgggccacaagcatgcag

SEQ ID NO: 470228 - DNA, 548 bp, Homo sapiens
gggagaaagtgaggttcctgaaattggcaccatgagggatgtatcattcctttatacaagagcagtcctggggctcatttagaatgcaaaaaagtttaaacctgagttttacaratttcaggatgctctgatttattagggcttttctactcctatttctcacctttgtagtgccctgaatgagatttgacaactgaactttctggagtaaccgatacctgggcatggctggtggctgggtgtgtgtgtgtgtgtgtgtgtgtctgtgtgtgtgtgtgtgtgtgtgtgtgtgtggtgtgcacacgtgcacatgtatgtggatgcagatcacagaaatttcctcctgtggttaaaggaaacaaactattttatcacctaccacttatcagactttccaacttccttttgctttcagtgcaaatgaacgacatggcgtaaggggagaattgaaagggttctgaaagaatgggattagaagcgggtaaaataaaaatgaaatagatggaggcttaaccaccttgaatgggttatctgacagtaataccttt

SEQ ID NO: 470229 - DNA, 641 bp, Homo sapiens
tttttaaaaaatttacttctgaaataatttacacttacaaaaaacttacaaagattttaccaagaattcccatatgtccttcacccagattcttcaaataaccacagtacaatgatcacaatcaggaaattcacatcgatgcaatgctataacctacagaccttatgcaaattctgccagttgtctcactagtgtcctttttctggtccaggatccagtctgggctcacaggttgccatgtcctcttacaagtcctttaatctggaatagttagtactacaatcttgtttttcwcaacctcgatactggttagtcatttcatagcaaaagccattcagttcaggcttggatgctgtttttctaatgactaaactgaagttgtgcattttggttagaataccttagaaatgatgttgtatccttctcagtgcattacatcaggaggtatgtgattgatttaccccattactggtgactcagacatttggcctttcagctgagatttcaggctattctgtttacagaccttggatgataacattttcattcagatatacctcggttcatttggcaactagggactgagtaataacagtatgcgtgtgactgctcagcactgtcaaggataggataaaattaaa

SEQ ID NO: 470230 - DNA, 615 bp, Homo sapiens
ttcatccatgttgtggaaaatggcagaatttcattcttttttatggctgaatagaatttcattgtgtatatataccatattttttaatccattcatctgttaatggacacttatgttgattccatatcttggctattgtgaatagtgatataataaacacagaagtgcagatatcttttgacattattgatttcatgtcttttggatatatgcccagtgttgggattgttggatcatatggtagctctatttttaattttttcaggaacctccatattattttccataatggctgatacagggcttttcaactgccttcttagactgggtttgcaacaactgaactttgagctctgtttacttcatctcaagaggatagyatattctgttcataataagggctttcattcattattatttgtttatttataaaattctaccacacatctctggaaaacccataacatgggtctctgaaattgggatgtatagccaatgtttagtcacttaacacaactctatccaacttgaggccacatagtttattccttctacacttatctctctttgtcttaaagtcaggtgacatgacatgaagatgaacagaatgtgaaa

SEQ ID NO: 470231 - DNA, 396 bp, Homo sapiens
tcagagcatttatatacctaacaactgaggctcataaagcaccacaaaacaattttattctttccccccattgcccctgcatatccagcctatagggcttgtccatctctattcccttggatgtaactgaaaatcagtgactcgactttcagattgttcccagataaaacattccttctttcatttcagtagaaaaaaagaaaatgctacagactcaagtaaaatcaggtctaaggcagagtaataattaaaactccagtatccacctgagctaatgcttctcccctcacccagccttggaaggcagccrgatggcagcctgcagtaggacctggcaggctcttctttctgcccagccggcttcctcatcctcatcctccctccaccttaatcagc

SEQ ID NO: 470232 - DNA, 450 bp, Homo sapiens
ctgtgctcactctacccaaatagagtacacaggaaacccatcccttttgcctgacataagggcaagtgcagtcacttgccctattttattttagtcctctgaaagacagattcagacacagtgttttatatttctctgctgtgaagcagttcactacatcaccctaactccaacggaacatagcaatggttttcctatagcagcagcacacttcattagagttgaagcaaggagaaagtatataaaccctcaccctgggcttgcatatttaaaagaacaccaaaaastctctatgcttgtattccctacctttcttttaactctcttatattccacatggattagggatactccactcgaatccagcacagggggtgtgacaactcttactttggaatatggagtaattggctcctctttgcatggaggcttcagtcaaaagcaagacta

SEQ ID NO: 470233 - DNA, 637 bp, Homo sapiens
tatgaatgtcagaattgcagaagaactcaggattatgaataatgctaagaaagatgaaaataatttttaaagttatatttaaaacaagaagaaaagaataggctaacccccattcctgcaaggagaaaaagttacgttaacgccgcctctctttttctgtcaaagcaaatcacattggaagtagaacacatgtcttaagggtgattccacggtgtctaagaatactgtaaaggagcacataattaaatgattttatgtctctaagcccaagggatttatatgctagtgtttggaaggaatttacagatataattatgatatttcaaacatgatatctgagaaatcatagcaattaggaaaggtgagaaaaatctgcacatggacaagtacgtatccagttttccaacaaggacatcgagatgtgttartgaaactgtaatctactgatcctaacattatttccagaatggacctttaaggaaattttgatcccttagaaggtaatacagagctcttgagtcaacatatttgcagtgtaaggcatttctgctttcatgataaggttagtagttagtagatcaatattttttccagggtgagaaggctatggtacatggtttttaggcttctaattctg

SEQ ID NO: 470234 - DNA, 620 bp, Homo sapiens
gctgagagtctggagcagaggaaataacaagttcagtttgagacatgctgacattagagtacctgtgcaccacaaagatggaggtatgttgtacacatcaattcagagctcagaagaatctattcattgaggagacatcagcacgtggaccataactgaagttatgagatttcatgaagtccttcaacaggtcctatgtgagaggcagatgtcaggagattgaatacactgaggactccactttcttgcctaagagagcctaaagagtatccagagagattgaaagtagccaggatagcattgatatcaccgacaccaagggaaatgagatcttgaaaagcccctgctatgtcacaggcaccatgccagacatggtggggacccattaaggaatatgtctctgccttgaaggaggtcttaagacaaagcatatgcaaatttaatcrcaatatgaactggaaagtgccaggtgcctttaatagaaggtttaaataagagtagggaacagccatttctatatctagtacaaaagtgatactatagagactattatgtgacacatgatcatggtgtacagtttatatggtatcctacaagtcataaatgaccactttcccagg

SEQ ID NO: 470235 - DNA, 527 bp, Homo sapiens
gccaaacatctctggccaggccccatctctgacactcggtgttacatttygatatgagatttggtggggacatatattcaaactacatcagcaggctaaagagagttttttcccagaagggtccctttgtatggcaactgcccttccggtggggcctcgctgccaggcaccaggtctgaccttgcagaagtgccatcttggtgagattcctggttgcaggatgtagtggcaaacctcagggcagaaaaggagtgggtgtgaggacactcatgggagagccagtctcagagagaaggtgggaatggaaattgtcctggggtctgagagcaggagcagccatctatcttgtactacaagacaggacgcagagggaggggaagggtgtactgctgggggctacaggggtgctgggggtggagcagcaggcagaacagaggtaggaggctgctcccattgctgcgagatgcccctcctcccgctgttctggcttcggagccctgtggggtggcaggtcgggaggtgtccat

SEQ ID NO: 470236 - DNA, 343 bp, Homo sapiens
tggtggaaacaactctaatgttatcaacagatgaatggataaacaaaatgtggtatatgcatataatgaaatattattgagccataaaaatgaagtactagcacgygctgcaacacagatgaacctctagattcttcgtttcgatcactattcccattcgagaattatgaagttttccagggcctgccatttgcagaaagtttgtgaggaagagagagaaggcaatgttctagatgggcaggaattctctctggtctgtagcacagatacctgtgtccctgtaagttatttagcctgtatttctccccaggccaaagcatcaagggcagtccacaggacagag

SEQ ID NO: 470237 - DNA, 343 bp, Homo sapiens
tggtggaaacaactctaatgttatcaacagatgaatggataaacaaaatgtggtatatgcatataatgaaatattattgagccataaaaatgaagtactagcacgcgctgcaacacagatgaacctctagattcttcgtttcgatcactattcccattcgagaattatgaagttttccagggcctgccatttgcagaaagtttgtgaggaagagagagaaggcaatgttctagatgggcaggaattctctctggtctgtagcacagatacctgtgtccmtgtaagttatttagcctgtatttctccccaggccaaagcatcaagggcagtccacaggacagag

SEQ ID NO: 470238 - DNA, 653 bp, Homo sapiens
aaatgggtgactttctagaaacatacaacctaacaagacagttgaaaaacaccaaagtacccaacaaaaataaaatggaaaaaccaattgtgttatattattacaatagactactattgagaatgaatgagttacaactacaacgacatgcttatctacaacaaatatgataatgagcaagaggagccagacacaaaagaatgaattttgtatggtaagtacaaaacaagggaaattcatatgtgccgttaaaagctgggccagtgtttattttgtggagggtcgtgggactgggaggcacatgatgtgtagattctgatgatattctggattctgatgatattctgacagttattataaatatgacttttcagtttggaaactgcttatgatatacatgtacaattaaacaagtttcagaaattttaattaaagtcaaaataattaattaatactatctatgctgacagcactctatctctagagcatatgtgatttttcctgaccccagattcacatatctacctaattactcaatactttcatttmcattgggtatcaaatagacatatcaaaaatagtatttctaaaaattctaaagatttaatgtaaagattaaatcctgaaatttaatcctaaacatactttacttg

SEQ ID NO: 470239 - DNA, 541 bp, Homo sapiens
gaagtcattcccagtactagcttctcttgtttgtgtaatttagtgtgggaagaattaaacttccaaggccttgacagattcagaaaaagtgtcatcattattrtaataattagggaaataatctaaacctgctggtatttaatttccctaatatataataaaaacttaatagcaaattgaaaggttttttgtgaggattagatcattcacttcaaaaaatatgaagcatacaagcgcagtgtgtctgaagtgcatatcatgagatgaggaaagcagagatgaagatataaagataaaaaatgacaagattttaaggtattcagaggtttaaaaagtcactgaactttgtaaagcagacatggaatatgatcacatttgtgctaaaaattatttgcagtgtagaaagcaaaagtatctttttgtcaaaagatattctaatggagaatattaaaattaaaaatttgggttaagaattggcacagaagactatctttagacaaaagaggttctagaaattcagatgaaagcaggagtagataca

SEQ ID NO: 470240 - DNA, 555 bp, Homo sapiens
gtctctaaaaaataaaaataaaaaaaggaagagtccatggaaagtcatataagttcacaagctaacagcagtggaagccaataggtatggaaccagyggctacacaaaggtcacagagaacagacacatgccctgaatctggacaagaggtctctgcagggtgagatgaggagccagccttacatggcctggaaagagcaggcaggcacccttggaactatcaggtgaattaagagaagtccagaaacagggcaggtgggacggttgaattctggggcaggcataagggagtctctgaggtcgacatgcaagagaccaggggcagggctggcccacactgcaggtggagctggcagccagatgggaggagatgcagggagggcattaggcccagagtgcacctggagatcagaactgggggcacctaacaggggcctgtagggcagccaggacaagcacaggaagatgggaccaagatgcatggagaaagcttgtgggacagtgcagcgtggctccctggtgggctccaacactagttatcagctcccaatagca

SEQ ID NO: 470241 - DNA, 554 bp, Homo sapiens
tggatgggatctttcaggtccattgrgcagtccttgatttctggatgagggagggaactgaggggtcaggtaactccagtgagaacccaggtctcctgacccacctcccttctactctgttctggcaagttctgccactggcttcctaccccttgcttttctgagtgacagcatccctgtccccaccatacacccccacctgccccagtcattcagctcccctggtgtctgcctgccaactcaggagtcaggagtcaccacctgaagtcttagcaaaaggcattcttcattctactccaggttcttgttcaaaggctcataaaaggaaaaagcaaaggtactggacaattcccactccaaatatgtggtcactgctggctgtttgcatgtggggtgggacactctcaaatagatggggatcattgttattaagattagcaaagcctgaatcttgcagcacagaacccaggccaattatggaaaaagaatgacagaatgtgagggcataggatctgcagctttatcggtgaaggattacattaataatagcattt

SEQ ID NO: 470242 - DNA, 632 bp, Homo sapiens
ggatctttcaggtccattgggcagtccttgatttctggatgagggagggaactgaggggtcaggtaactccagtgagaacccaggtctcctgacccacctcccttctactctgttctggcaagttctgccactggcttcctaccccttgcttttctgagtgacagcatccctgtccccaccatacacccccacctgccccagtcattcagctcccctggtgtctgcctgccaactcaggagtcagkagtcaccacctgaagtcttagcaaaaggcattcttcattctactccaggttcttgttcaaaggctcataaaaggaaaaagcaaaggtactggacaattcccactccaaatatgtggtcactgctggctgtttgcatgtggggtgggacactctcaaatagatggggatcattgttattaagattagcaaagcctgaatcttgcagcacagaacccaggccaattatggaaaaagaatgacagaatgtgagggcataggatctgcagctttatcggtgaaggattacattaataatagcattttgcatttgtcatcgtgtctcttcttaaaaacattcaagtacttgcctgtaacccacttagctcatcctcagaacaatgaaccac

SEQ ID NO: 470243 - DNA, 632 bp, Homo sapiens
ggatctttcaggtccattgggcagtccttgatttctggatgagggagggaactgaggggtcaggtaactccagtgagaacccaggtctcctgacccacctcccttctactctgttctggcaagttctgccactggcttcctaccccttgcttttctgagtgacagcatccctgtccccaccatacacccccacctgccccagtcattcagctcccctggtgtctgcctgccaactcaggagtcaggagtcaccacctgaagtcttagcaaaaggcattcttcattctactccaggttcttgttmaaaggctcataaaaggaaaaagcaaaggtactggacaattcccactccaaatatgtggtcactgctggctgtttgcatgtggggtgggacactctcaaatagatggggatcattgttattaagattagcaaagcctgaatcttgcagcacagaacccaggccaattatggaaaaagaatgacagaatgtgagggcataggatctgcagctttatcggtgaaggattacattaataatagcattttgcatttgtcatcgtgtctcttcttaaaaacattcaagtacttgcctgtaacccacttagctcatcctcagaacaatgaaccac

SEQ ID NO: 470244 - DNA, 594 bp, Homo sapiens
tttttgtatttttagtagagatggggtttctccacgttggtcaagctggtctcaactcccgatctcaggtgatccacccacctcagcctcccaaagtgctgggattacaggcatgagtcactgcgcccagccttatgttgttttactgacttcatagctgtaatttttaatggctatgtaatatatcatcctgtagacacaaagcaattaacttaccataaaccataatataagacattagagctgttttgaattcttcaaaattataatggatgaccacctatttctacatttaaagtactttccatgagatagactctaagaaatggaaaattaataaattgactgtttaaggtttatcatgcacattgtccaaatgctttcttaaagtgctgtactttagcacagtaactrtgctagtattgctagtatccctactggcattgtgtattcttttaaaaaacctgctacttgtatactgtgaaaaatatctcattgttatttctaattatatctctgatttcttaaagagggtggatactttttctatgtagtatttattttgtgaattgctagttcttatcctttactcat

SEQ ID NO: 470245 - DNA, 654 bp, Homo sapiens
ttcaactccccagcccttcccaggcggaaaattcaattagtctcgagcaactgctttgctgaagagccagagaaaggggacccgcctggcggctgttgtgtgtgtkgggggaggggggatgagggggatgcagaggcagcaggagggagggttaggaggtaaacaggctgctggtgcatgcagtccaccgggtccctgtctctgtgcgtctctagaggtgggtctttgtatgtgactgtgtgtcctgggcccctgtgtgcccacctctgctcctgcacaaacacagcccctggaatattccgtgtgtgcccctctgtccccttagccaaagcgtcaaaccggctcatcttaagtcaagctcggctctaggttctcatggctgggtgcctgaggtggggagcacccccctgcaaactgcatcatgccacgctctactcacaggggtgtggtgtggccccaggtctcccagactaggtgtccccgcccccaccttggctccacactggcctcttgtcccatcctctgtcagcatcctggccacagggcctttgcacatcctgcctcccccacgcctggtaagcttccacttacgaaccttgcctccagcaagcccaggcctcttctgtctcccatcaccactgggccgcacagcca

SEQ ID NO: 470246 - DNA, 530 bp, Homo sapiens
ccgtgtgcctatggctttatacggagactgtgaggacccagatcgcctctgcacccaacagcccagctcctcaactccactgtcaggcctctcatttgtccctgtcttttatgggtcagttaagagcttcccaaacaatcctaaaaaccctcaggccaaccccatcgagaaaccatgtgacttgcccgcaccttcccttggtgatgcccccactcctctgcttccccttcctacttcttaactggacatggatgcacttttctttaaatacgcacacactttaccatgattttcctccggttaagccagaaattttaccctttgtacaataaaacatattcaacaagttttttaaatgagagtgctgtgtggggcygttttaaaagcccacctttccctaacccccgacagtgaagtgttctataaacagaagcccagatcccctcggcagcgggcactgcccagggtgtaaccgccctctctgcctgcacaggagagcgattcataccagcagaaccggaaaaatcaca

SEQ ID NO: 470247 - DNA, 516 bp, Homo sapiens
ttattttattttttattgtactttaagttttagggtacatgtgcacaaagtgcaggtttgttacatatgtatacatgtgccatgttggtgtgctgcacccagaagactggttaatttcaataacctaaaaatccacaaggtgggagtgtttcactgaagccagttgttagagaaacgttagaaccaacttcctttttttctgtcccttcttctctgctttcttcttttctcctcctcctcctcctccctttactctccttcttctctctctttctaatcatgaaaacaaaygaaaaaaactatgagcaagagcacagaaaaaagactagcaaagactgcagttattgaaagtatcagatacagaaaataaaataaaataactatatttagtatgtttaaagtaaaacaaaaaattaaaaatatcataatggaacaggaaactctagagaatggccaagaagattaaaagaaaacaaatagaatgtccatagagaataacataattgaaatttaaac

SEQ ID NO: 470248 - DNA, 616 bp, Homo sapiens
atctcaatatctaatactcttatttgcttaaaatacamgtgattattttctccaccctgacatattttatgttcaactttctaatttctaaaaatggacctaccattgtcctatttattcttgcttaaatcttgatattttctttgagttcatgctccttcgtattcactccagctgtgataagtcaccaatcctttgggtttttacttaccagtatttctatttctgtttctatagccttaaagctggaactgtgtagtcccagttcctctgtgtagccccccaagtctgctctatttcaatcttctcttaagggaactccttccctccgtttttcttttcctccatttgatacatcacacttatagatggggcatcttccctaattactggcttcatcctcaattcccaggacccataccttcactggcttcctaaatttatttaataattctcatatacctttgagaagtttctaatgataggcaacaaatgaatattgactacctttcttattttcctttattcaccaaaatgatttttaggatgtagacaatctgtatgcttcaacatacaccaaacttaccatttttgaaatattttacaatctacttga

SEQ ID NO: 470249 - DNA, 609 bp, Homo sapiens
agctgcatcttattgcttaaaaatacacatattcacaataactgacaaatggtgatgtgcctcacacaggaatgtgttcacatttgcaatgctgtgtacagacttcacttcgttcaacatagattttggtttaatggaattcaaatgcggatgcttgttcacagccttggatttgtctgtttttggagagatacaacctccatgagtatatctgcatgaaaaccacagacaatgaaggtatttcttcattgatttatttattcttttgactgtagcaacaaaccctggatgacayccttccttttaattcacctggaaaccagactcaatcaaatctccctggtcccctcactattccttcaaattccctatttctatctcttcctgaggagggtaacctcctgtagcaggggtcagactgtgacttgggaatcaagcctaggtctgcaggttgccttttcatcttcttgtaaaatattgtaggacactgcagtgaatccaacagttaacactcagagcagttccctgctctaactcaggaaagagacttcagagggtcaggattcatccatttgatcagttaactgagaaggattcatttcggtaaaa

SEQ ID NO: 470250 - DNA, 610 bp, Homo sapiens
tttgtatacatacatgatttttaatattgaatgtttctattgagaacgtgagaataacatttgactaggggtattcgtgaaatgtataatttaaccaagcaagaaatgctggtgtgctctagcttattggatagagactaaagaaagtgagcaggggtgacaagctgtgctcctagactagcagttttatctggtttcatctactctgataacattctggccaaataaacagatatagtcaaacccaattaagtatattcaatatttggatttgaatatttggattaaaaaattaatgtataaaaaacctatcagcctatgaggcactgttgacataaaaaatacctttttgacaaacatggctgttctgccaaagcactgtagtatattttaaaacatgagcctaaaactgtcttatatacagtgaagttgtccttagaaagctttcattacaatcctttgctgaaaaacaatttwaaaatgttttttaaatctcatctcatgtgtgtatatacttattctatctcctttatcaaaaatagaaagatttcaatctcataaaactaagtctaagaagcatattatcgcaatgtgtgtgcctgtgtatatg

SEQ ID NO: 470251 - DNA, 580 bp, Homo sapiens
tggtattaatcagcacaaataccaggatggtttgtgaggctctggcttttgaaataaagcttttaaattgcactggttaataactacagagtgagtctgagagcaataacatgtcctcttaataaaactttatgtatgagtattttaatgaattgtttcagtatactttcaaagagagccaagttagtggttgaaaacagaataggattaagtccttactaagaaactcaatcctaacaactggtacaagaattaaaatgaagaaaggagcctgtcttacacactagcatttttggaagcyattctttttagacactatgttttagaatttccaggcatctgtctgttgctagaatacctacacactttgcggaagctttatttgaaaatgctgtgtaccttgtctaaagggccagctgggataccagaaatagtatcggctctatttatgtctttggagtaattacagtggaatttaaagacttagtttatagatccaagaagaagatcttctgtgtacactaaaaggatgaatcctttccagacgacttctcatttggctgaagaagagcttgaggaa

SEQ ID NO: 470252 - DNA, 569 bp, Homo sapiens
taactggaagagatggtgtaacttgatttgcagaattggaattcttccaggctattggatgagtgaaaagtgggggaaaggtccagaagtctgagctagttaaaaaaaattgtacttccagttttgtgaattaataaatatagataaaatttgttatttatttattattagagaggaagcccactcctcatgccacagcccatgtctccccaaaagtaataacaataaaaagtgatagaaaatttcccagtgtaatcctggcctaaatacataaggccctgcctaaagaattaggtgctcattatatgctctcagtagattcagttattgtcacgacatrcccatgttgttcaggcagtgtaggcaaagaaagtgtctaaataactaaggagagtataagtgagtgcagttagtattggacatcattaagttactgaggttctggattcataagcagaaatgctaagactgtgcttctattatctttctagtaatcatttatcactaagtaaagatcaaaactttaaaccaacatattggaaacaatgacatctaactctccagttaga

SEQ ID NO: 470253 - DNA, 543 bp, Homo sapiens
tggtccccacaggcacctcaaggcatgtgtccttccttccacaaaagcaatattagagaggccacatttttcacccaaaatcccagtttgttagcggcagcctggacaatagcccagggtcctgacacctgggcaccacccacagcttctgatggacaccgcttgcagctatagtgtggattttgtaaaaggcttatacaagcctcactatatccttgtagagaagataagcggacacacttccatgtccagtcatatggcagacgtctggacaaactttctactgaaaacaactgaaagcctggataaaatataaaccatacattcataaaatcatcaaggagctgacaagatggcaagaaattatcaagctaaagactagatggagtgraacccagagggccatggatttgttgccctggaggcatcttcccagcctggaaaactgggggtggataaaggccaagatgagaagtctaatgaaaggccccataaactgacattcagaggtaggtgaaccagaaataactcttcaccctcggc

SEQ ID NO: 470254 - DNA, 637 bp, Homo sapiens
atttccacttgacaataaattacgaacatttctcgcgtcattaggagtctataagcattatttttagtcattgtgtagtgtccatcaaatgaacttaatgcttgaactcggtggtctccaccctttttggcaccggggtctggtgtcatggaagaccatyttttccatggatagttgtgggtggatggtttcaggatgaaactgttccacctcagatcatcaagcattagattctcataaagagtgcccaacctagatccctagcttgtgtagttcgcaatagggtacccgctcctatgagaatccaatgctgctgctgatctgataggagatggagctcaggcagtaatgttcactcgcccgctgctcacctcctgctctgcagcccggttcctaacaggctacagaccgaaattggtccgtagcctgggggttggggacccctactttaacttttctgatgggctacattgtcttggagagagccgtcttgcatgctaataccctcatttgattagccggggacatacaatattgtcagaaatggagttaacacactccagtagcatataagtgcagattcagcatatgttgatataattttttctgggcccccacctggtagactggctgtgca

SEQ ID NO: 470255 - DNA, 637 bp, Homo sapiens
atttccacttgacaataaattacgaacatttctcgcgtcattaggagtctataagcattatttttagtcattgtgtagtgtccatcaaatgaacttaatgcttgaactcggtggtctccaccctttttggcaccggggtctggtgtcatggaagaccatcttttccatggatagttgtgggtggatggtttcaggatgaaactgttccacctcagatcatcargcattagattctcataaagagtgcccaacctagatccctagcttgtgtagttcgcaatagggtacccgctcctatgagaatccaatgctgctgctgatctgataggagatggagctcaggcagtaatgttcactcgcccgctgctcacctcctgctctgcagcccggttcctaacaggctacagaccgaaattggtccgtagcctgggggttggggacccctactttaacttttctgatgggctacattgtcttggagagagccgtcttgcatgctaataccctcatttgattagccggggacatacaatattgtcagaaatggagttaacacactccagtagcatataagtgcagattcagcatatgttgatataattttttctgggcccccacctggtagactggctgtgca

SEQ ID NO: 470256 - DNA, 637 bp, Homo sapiens
atttccacttgacaataaattacgaacatttctcgcgtcattaggagtctataagcattatttttagtcattgtgtagtgtccatcaaatgaacttaatgcttgaactcggtggtctccaccctttttggcaccggggtctggtgtcatggaagaccatcttttccatggatagttgtgggtggatggtttcaggatgaaactgttccacctcagatcatcaagcattagattctcataaagagtgcccaacctagatccctagcttgtgtagttcgcaatagggtacccgctcctatgagaatccaatgctgctgctgatctgataggagatggagctcaggcagtaatgttcactcgcccgctgctcacctcctgctctgcagcccggttcctaacaggctacagaccgaaattggtccgtagcctgggggttggggacccctactttaacttttctgatgggctacattgtcttggagagagccgtcttgcatgctaataccctcatttgattagccggggacatacaatattgtcagaaatggagttaacacactccagtagcatrtaagtgcagattcagcatatgttgatataattttttctgggcccccacctggtagactggctgtgca

SEQ ID NO: 470257 - DNA, 617 bp, Homo sapiens
tgctcatgcactcttgctccgaggcaaagttattggcattgccatggcagccgccataccagaagcggttacattggcccacagaggcaacgaagtaccagcgggcagcccagtctgcgcaagagccatgggcactgggcagcaggcaccgcacggggtaggctgcagggcatgggtgtgatataagtcactgaggtgcccagtactaaagctgcaccctccatcctctcagcctccgactcaggaagcaggcccttccccayttataaagcatgtctacacccctgtctgggggcctgacctggccctgggatccaggatgcttccaccagagtctgtccactgtgcagacctgcccccggctggtgccacagcagccttcacccacagagctagagcctctgggaggtcagggccagggctccctgggccggctcccttggacctttggccttccctgccaccagaccacctgaagtcacatgcaaagtgagcccagagggtgaccctgcctgcttagcttgtgatagggacacagacctgagccacccagggcgtgtgaagatgcccagcaagggcatgcccttgtccccaggatgctgcactgactggccact

SEQ ID NO: 470258 - DNA, 648 bp, Homo sapiens
tcccatttatcaggatacatctgatgctgatctgagtcttactgcttttacaggtacttttttttgcattttcttattggaaacctaagattctcttgaaattctgcagttttgtgaagatgagtctaaatgttgagggtttgtctcttacattcagcctacttgttactgtgctttttctgtccataaaattgagttcatcgttgttgtcttctgatatttgtgtccctctttgattctgcctgctcttattctcctcttaggaaactgttagactcgatggacccagcttctgtggcctttaatttttctcatgttaaactttttaccttttcactttatgttctaagacagggttggcaaacttcatgwaaaggaccagacagtaaatatttcaggctgtgtgggccagggggcaaaattgaggccattaagtaggtacttatataagagagaaagcaaattttcgtaaatttttttattgatgaaattcaaggtataataattgagtacaattttttgtaatatggttctactactgagaatggaattctttttgggggctaacattttgcttaatcagggttcaaagttggtgattccctttatcgaattggtggcaaatgttcatctgtaaaacatttgcag

SEQ ID NO: 470259 - DNA, 437 bp, Homo sapiens
cttctgatatttgtgtccctctttgattctgcctgctcttattctcctcttaggaaactgttagactcgatggacccagcttctgtggcctttaatttttctcatgttaaactttttaccttttcactttatgttctaagacagggttggcaaacttcatgtaaaggaccagacagtaaatatttcaggctgtgtgggccagggggcaaaattgaggccattaagtaggtacttatataagagagaaagcaaattttcgtaaatttttttattgatgaaattcaaggtataataattgagtacaattttttgtaatatggttctactactgagaatggaattctttttgggggctaacattttgcttaatcagggttcaaagttggtgattccytttatcgaattggtggcaaatgttcatctgtaaaacatttgca

SEQ ID NO: 470260 - DNA, 632 bp, Homo sapiens
aacatatcagacgtgctcagaactttatgtagattattgtattgattgcctgtggcacttctctaaggattgttagcctgttgtgcagatggtgagagctcatccaaccagtttgcttagtaagtggtgcagcccaatgcatgccggagcrgagatcatgcctaggacctgaggaacatctatctttactggtagaagaaagagagctggcaaagggtgcgtgagatgcaggaaacacaggggacagagtgacagaggcgtggtggcagcgttagtgcacttctctggaagcaagactttctgttgtgttttttgttttcgtttttattgaaagagcttcctgattccatgtctgttttagtgggtgaatggaataaaaacccagctatgaaagggtgaaataaataaaggtaagaaggaagctgaggagcagaaagctcagccttggctgtcaggaggcagcagggtcaggaaaaatgttgggttttgctctttgaggatttgttttatttggggtggcttttgtttgcttatttacttttcccgctaatgctggagagctgagcatgatggtggtggtggggaggggctcatacagggcagggtccaaccccagcctcattagggaggca

SEQ ID NO: 470261 - DNA, 482 bp, Homo sapiens
aggctatctgggagcatcgagtttgattgctttttgtagtctaatttttttttttgagatgaggactcgctcttgtyccccaggctggagtgcaatggtgcaatctcagctcactgcaaactctgcctcctgggttcaagtgattcttctgcctcagcctcctgagtagctgggattacaggcgtaagacactgtgcctggccctaatgttttattatattttagtattcagtgattttactgaaatctatcatagtttaaaagttttgtgagcgtcatctcttaacagacaactgtcttgcaaatagaaaaataaataaatgtaaaaaaaaattactgaattgattctttgaatagccaaggaaactttgtggttgtgttataaaattacatgtgacaaaataagttgaaattctgaaggctgttttctctgggctggtgcttggcagtctccccagcacattcatgaatgccatgtcaat

SEQ ID NO: 470262 - DNA, 657 bp, Homo sapiens
ctccactcctcactaggtgtattaacacaggcaggcctcatctgtaaaaatgagatgagaaacacttcagagacctgttgtgaaaattaagtgacataattgacacaactagggattattacaaacccctgttgccatcggtggcaacaacagaactgaaccctacttaccaactcctgaacccactcccaccatgagctgagaggcctgtgaccaacctcagtggcagcccatgccctttccaggggctgaaacactggccactgacctaaggtaactccggagaaaagactatatatgttgaaaccaaatcacaaaagcagtaaaataccaccctcaagaatcagggttcatgagtccaaacactagacaactgtttgtcccaaaatagtattgtgagcttgaagacaatgaacctttctgggattcaatcacctgacttaccatacgggaaggtcaaaatacttttcmttagccaggtgactctaaataaaacaggagtgaagtgacttgccaggtcagaccttcctgcacacttacccctgcacaggttccaaggaacagcctggcagccactgaaggtatcttctctcaggtcaggtcccctctagctccagcatcttgggattgctgctgtagaaacactgacggatggca

SEQ ID NO: 470263 - DNA, 637 bp, Homo sapiens
ttacagtatacaaatcccatacttcactaagtgtcaaaaccctaacagacagataaggcagaactgttacttccagattactaacrtggaaactaagccccacccaaacaagttaagtggtttgttcaagacctcctacaacaggctgggcgcggtggcttatgcctgtcatcccagcactttgggaggccgaggcggggaggcgggtggatcacctgaggtcaggaatttggggctagcctgactgacatggagaaacccggtctctactaaaaatacaaaatgagccgggcgtggtggtgcctgcctgtaatcccagctacttgggaggctgaggcaggagaattgcttgaacccagggggcggaggttgcggtgagccgagatcgcgccattgcactctagcctggacaacaagagtgaaactccatctcaaaaaaaaaaaaaaaaaaaaggacctcctacaacagccagggcctggtgcaggttgtcctagcacagggttcactggtctgtccattctgccactgctatgagattgtaatggcccaacaggttcaccttgcctgctgcctaggcagaaccaatttatcaagacaggtgaattgcaatagagaaagaataattcatgcagagcc

SEQ ID NO: 470264 - DNA, 637 bp, Homo sapiens
ttacagtatacaaatcccatacttcactaagtgtcaaaaccctaacagacagataaggcagaactgttacttccagattactaacgtggaaactaagccccacccaaacaagttaagtggtttgttcaagacctcctacaacaggctgggcgcggtggcttatgcctgtcatcccagcactttgggaggccgaggcggggaggcgggtggatcacctgaggtcaggaatttggggctagcctgactgacatggagaaacccggtctctactaaaaatacaaaatgagccgggcgtggtggtgcctgcctgtaatcccagctacttgggaggctgaggcaggagaattgcttgaacccagggggcggaggttgcggtgagccgagatcgcgccattgcactctagcctggacaacaagagtgaaactccatctcaaaaaaaaaaaaaaaaaaaaggacctcctacaacagccagggcctggtgcaggttgtcctagcacagggttcactggtctgtccattytgccactgctatgagattgtaatggcccaacaggttcaccttgcctgctgcctaggcagaaccaatttatcaagacaggtgaattgcaatagagaaagaataattcatgcagagcc

SEQ ID NO: 470265 - DNA, 626 bp, Homo sapiens
cactgtttttaggggaaaaaaagctgtcaagtattatcagtaaaaaactktacaattgaacatacaagaggtacaggataaatgaatgttaatctcataactattgtgtttatatatcaaatattcagggaaatcaagtcaaaatataaaatgctcaattgaaatgttttaattaagggtgtgaaggatgttcatttggattttggtatctatttttttagcattttgaaatttttttattgtttcaaagtatgacttaggtcactttactccctcacttaagcactacctctattaattttgagaaatagtcttactgataatatttagaatttagaactttaacagtccaagcaaaaatacactagtgagttgttatctcagaatttattaactgcaaagcttctcctcaagtacaaagagcagatcattttaaaatttaagtttgaatataaatgatggtactttattaagcatagtaacttgtacaagtctatcttccaacatgattcaagtattgaaagattaggaaagaaaaacctagaaaccactatggactttaatcacatttggctcaggtccatagtgcaaatgagggatatgctgcatctgatggagacaatgaa

SEQ ID NO: 470266 - DNA, 626 bp, Homo sapiens
cactgtttttaggggaaaaaaagctgtcaagtattatcagtaaaaaactgtacaattgaacatacaagaggtacaggataaatgaatgttaatctcataactattgtgtttatatatcaaatattcagggaaatcaagtcaaaatataaaatgctcaattgaaatgttttaattaagggtgtgaaggatgttcatttggattttggtatctatttttttagcattttgaaatttttttattgtttcaaagtatgacttaggtcactttactccctcacttaagcactacctctattaattttgagaaatagtcttactgataatatttagaatttagaactttaacagtccaagcaaaaatacactagtgagttgttatctcagaatttattaactgcaaagcttctcctcaagtacaaagagcagatcattttaaaatttaaktttgaatataaatgatggtactttattaagcatagtaacttgtacaagtctatcttccaacatgattcaagtattgaaagattaggaaagaaaaacctagaaaccactatggactttaatcacatttggctcaggtccatagtgcaaatgagggatatgctgcatctgatggagacaatgaa

SEQ ID NO: 470267 - DNA, 565 bp, Homo sapiens
aatattcagtacagtaacatgctgtacaggtttatagccttaggagcaataggctccaccaygtagcctaggtatatagtaggctatcccatctagattggtgtaagtacactctatgatttttgcacaacagtaaaatagcctaaggacatatttctcagattctatctctgctgttaaacaacgcatgactgtattgctattaaaatgcctgaagagtaaaagaggtctattttcataactagaagacgaaactgaaggttattttgcaaacggttgtattattactttaaaggaaccattaatttcttcctataagatccaaagctattaaataagaaagtaagccctgttttccttcaaagtgatgggttttacttctgggacattctgccatatatgatgataagtctataatgtcatttcctgacaatggagtttcaacattcttgaaaacagaatgtaagatgattagttgttttaaaggaagaacactgcaaagaaaaaactgcatgtttaaatgtccatgaaagtcttaataaaaacaacaaatgatgtctttttt

SEQ ID NO: 470268 - DNA, 565 bp, Homo sapiens
aatattcagtacagtaacatgctgtacaggtttatagccttaggagcaataggctccaccatgtagcctaggtatatagtaggctatcccatctagattggtgtaagtacactctatgatttttgcacaacagtaaaatagcctaaggacatatttctcagattctatctctgctgttaaacracgcatgactgtattgctattaaaatgcctgaagagtaaaagaggtctattttcataactagaagacgaaactgaaggttattttgcaaacggttgtattattactttaaaggaaccattaatttcttcctataagatccaaagctattaaataagaaagtaagccctgttttccttcaaagtgatgggttttacttctgggacattctgccatatatgatgataagtctataatgtcatttcctgacaatggagtttcaacattcttgaaaacagaatgtaagatgattagttgttttaaaggaagaacactgcaaagaaaaaactgcatgtttaaatgtccatgaaagtcttaataaaaacaacaaatgatgtctttttt

SEQ ID NO: 470269 - DNA, 565 bp, Homo sapiens
aatattcagtacagtaacatgctgtacaggtttatagccttaggagcaataggctccaccatgtagcctaggtatatagtaggctatcccatctagattggtgtaagtacactctatgatttttgcacaacagtaaaatagcctaaggacatatttctcagattctatctctgctgttaaacaacgcatgactgtattgctattaaaatgcctgaagagtaaaagaggtctattttcrtaactagaagacgaaactgaaggttattttgcaaacggttgtattattactttaaaggaaccattaatttcttcctataagatccaaagctattaaataagaaagtaagccctgttttccttcaaagtgatgggttttacttctgggacattctgccatatatgatgataagtctataatgtcatttcctgacaatggagtttcaacattcttgaaaacagaatgtaagatgattagttgttttaaaggaagaacactgcaaagaaaaaactgcatgtttaaatgtccatgaaagtcttaataaaaacaacaaatgatgtctttttt

SEQ ID NO: 470270 - DNA, 555 bp, Homo sapiens
gtttgaagtaggtcccactgaatagtgaaccacaagcaaaataaactgaagaaattagtaatgaagcattttgaatagaaaggggtcatggacaaatayaatttttaaaaagccagcgttacctcaggatgatgtccaatttcaatgtaggtgcaaattggatgaaaagcccccgttccacaggcgtacaagtgagtctgattatatgccttaagtaccttgatgaaattagcacattctttctgtaagacaaaaggaaaaccaaagagtttcagcaatcagcatgactgaggtatcctctagggtgctaggcatgctggaacagatttgtcttttgttttctttctttttttttttttggcatccctttcacaacattttaaggacttatttattattctattgttttgcttatattataatatgcattaaaatatagagtttcttactctggtgagaacaattattttatgcccttccgtcagtcttccattaaaactatttttaatttatttatacaaaagtggaaaagaaatttagacaatcaataatcac

SEQ ID NO: 470271 - DNA, 555 bp, Homo sapiens
gtttgaagtaggtcccactgaatagtgaaccacaagcaaaataaactgaagaaattagtaatgaagcattttgaatagaaaggggtcatggacaaatataatttttaaaaagccagcgttacctcaggatgatgtccaatttcaatgtaggtgcaaattggatgaaaagcccccgttccacaggcgtacaagtgagtctgattatatgccttaagtaccttgatgaaattagcacattctttctgtaagacaaaaggaaaaccaaagagtttcagcaatcagcatgactgaggtatcctctagggtgctaggcatgctggaacagatttgtcttttgttttctttctttttytttttttggcatccctttcacaacattttaaggacttatttattattctattgttttgcttatattataatatgcattaaaatatagagtttcttactctggtgagaacaattattttatgcccttccgtcagtcttccattaaaactatttttaatttatttatacaaaagtggaaaagaaatttagacaatcaataatcac

SEQ ID NO: 470272 - DNA, 304 bp, Homo sapiens
ctgtgcccatttctgctaccaagggcaattgcattttgtttaatagaatttctatgaaagcctagtcctctggcagtgaagacttataaattataatcactcttgttatcaaagcagtaaaaatgccaggattcattttctcaacacaacagcaaatacagcrtgtgttagtcaatagctgtggcagaattgtattgtgccaaatgaaataagctggaaaaatatttcctcaaattcccttttctataggttggtttaggctggctatcaacaaaatctgcatgagatttgggaggtataaatt

SEQ ID NO: 470273 - DNA, 600 bp, Homo sapiens
gcgtaaggaggatcattaaaggtcagcagagacaaggaacactaagtaatctgcaagggaaagaaagagggggacaaaggaaaattcagtatttcatctgtattatgaattttatttctactgtcattcctttctcttatagttgggaaatgttaaaatgacttgttcaagttcaatttagtggaagttataacccaaatttccttactcagcattcagtattggttccagtatgatacattgaggtcccctcattgggaaaagagtgtggaagttaactaaatctgcagctaataccacagaaccrtggagatgatctgaatgaagaaacttagaaaatgtggtgggtcagaacaagagtttactcccaaatgaatctgtgaagtgtagagtatgatttctggaaggatctctgtaataccactactgtatcagttagcttctgctctgaaacaagccactcccaatctcagtctcttaaaacaatgatcttttatattttatagcagctaataattagaatcatataataataatatgtgtacttctgagctttctgtcagatctttggggtccagtgcaattaaagtcacatacttc

SEQ ID NO: 470274 - DNA, 642 bp, Homo sapiens
caaaaataatggaaatctcatttttttccagtaacaaatagtgaggttcctgaatggaaaagacatattggccttaagagacttgagctaagatttttcctaaaactgcatttacagtccatctgaggcacagttcacaagaaaaagagccccttttccartggtcccagaaaattttctctattaactgtgattggcccagcttggtttgcatgtggacacttgaagccactaaatgggagtcagtcctatccaaactatatagattgagaggggagaggaggttgggaataggaaaagttacggtgaatatattttttaatacacttaaccggtatagacctgtttaccaacccctatattctgcagagatcattcgggctgctactgcggaaaatattttaggagggactagaccactgaccatgaagtcagtggtaatccaggcatgagacaggcccttgggacctggaccttcctggtgttgatcacagtgccctgtggaagaggccgcccatcttccataggagtttggctccacgtgtagaactatagtccaactcaaactgatactgcagatattttgaaaaagtcacacgtaaaaatatttataaatggagaattcaatatatttagcaagaa

SEQ ID NO: 470275 - DNA, 642 bp, Homo sapiens
caaaaataatggaaatctcatttttttccagtaacaaatagtgaggttcctgaatggaaaagacatattggccttaagagacttgagctaagatttttcctaaaactgcatttacagtccatctgaggcacagttcacaagaaaaagagccccttttccaatggtcccagaaaattttctctattaactgtgattggcccagcttggtttgcatgtggacacttgaagccactaaatgggagtcagtcctatccaaactatatagattgagaggggagaggaggttgggaataggaaaagttacggtgaatatattttttaatacacttaaccggtatagacctgtttaccaacccctatattctgcagagatcattcgggctgctactgcggaaaatattttaggagggactwgaccactgaccatgaagtcagtggtaatccaggcatgagacaggcccttgggacctggaccttcctggtgttgatcacagtgccctgtggaagaggccgcccatcttccataggagtttggctccacgtgtagaactatagtccaactcaaactgatactgcagatattttgaaaaagtcacacgtaaaaatatttataaatggagaattcaatatatttagcaagaa

SEQ ID NO: 470276 - DNA, 475 bp, Homo sapiens
ggtagattgtactccatctgcagtgctacaaggttaatttaacaaagataccatatactgaataaaatgttatgaagaattttccatcaaatgaataaaataacctgcgaacttattttccaggtrtgctcagtgaaggaacggcatgccagtgaaatgagggatttgccaagtcgatatgttgaaataggtatggctccaacacttgccttctgtggatgtaaaacttcattcaaaattttcgtcttcattaatctcacccagactgccatagtcttttgcctggatccctgcagcagcctcctaactggtttatcttcttccactgtgaattactgtcatctgctgtccccactgctgtcaaaatacagatcagatcttgtcatcatccttcagttcctccacatcgttctcagagtgcagatggaactcctcagtggatcacggggatctgtgttggcccctacccacctct

SEQ ID NO: 470277 - DNA, 475 bp, Homo sapiens
ggtagattgtactccatctgcagtgctacaaggttaatttaacaaagataccatatactgaataaaatgttatgaagaattttccatcaaatgaataaaataacctgcgaacttattttccaggtgtgctcagtgaaggaacggcatgccagtgaaatgagggatttgccaagtcgatatgttgaaataggtatggctccaacacttgccttctgtggatgtaaaacttcattcaaaattttcrtcttcattaatctcacccagactgccatagtcttttgcctggatccctgcagcagcctcctaactggtttatcttcttccactgtgaattactgtcatctgctgtccccactgctgtcaaaatacagatcagatcttgtcatcatccttcagttcctccacatcgttctcagagtgcagatggaactcctcagtggatcacggggatctgtgttggcccctacccacctct

SEQ ID NO: 470278 - DNA, 602 bp, Homo sapiens
tggctccctactgcccatattagctctcaactcctcagcctggtattctagttacctggtctcctgtccctcactccagttccccctcacactccatgctccaggccctctaagctgtgccactcccagatgtaccgatgttcatgcttccctagtctgtgcaggttcagttcccgctgcctgaagcacccttcctggtcctgccatcatctgctggttgtccttgaagcttttttaaattttaaatttaattttatttcgagacagagtctcactctgttgcccaggctatagtgcagtggygcaatcttggctcactgcaacctccccttcctgggttcgagtgattctcctgcctcagcctcccgggtagctgggattacaggtgccaccacacgtctggctaatttttgtatttttagtagagatggggtttcaccatgttggccaggctggtcttgaactcctggcctcaggtgatctgcccacctcagcctcccaaagtgttggaaatacaggcataagccactcacccagcctcatcgaagcttttaattgtccaacctgcttgcccacctcctgtacccccaacctgaagccca

SEQ ID NO: 470279 - DNA, 602 bp, Homo sapiens
tggctccctactgcccatattagctctcaactcctcagcctggtattctagttacctggtctcctgtccctcactccagttccccctcacactccatgctccaggccctctaagctgtgccactcccagatgtaccgatgttcatgcttccctagtctgtgcaggttcagttcccgctgcctgaagcacccttcctggtcctgccatcatctgctggttgtccttgaagcttttttaaattttaaatttaattttatttcgagacagagtctcactctgttgcccaggctatagtgcagtggtgcaatcttggctcactgcaacctccccttcctgggttygagtgattctcctgcctcagcctcccgggtagctgggattacaggtgccaccacacgtctggctaatttttgtatttttagtagagatggggtttcaccatgttggccaggctggtcttgaactcctggcctcaggtgatctgcccacctcagcctcccaaagtgttggaaatacaggcataagccactcacccagcctcatcgaagcttttaattgtccaacctgcttgcccacctcctgtacccccaacctgaagccca

SEQ ID NO: 470280 - DNA, 617 bp, Homo sapiens
atttctgtgtggcccattttgtattttctttgtctttcttcaaaaactcacatttttcatatattgttctcctgatctcagtgagcactttttttttttgagagtctcattgtcacccaggctataatgcagtagcacaatcatgactcactgcagcctcaagctcctaggatcaagcaatcctcccacctcatcctcctgagtacttagcatcttaatgactatcattttgaattttcagccaggtaaatcattgagtgttcatttctggaaatttaccttattttcttkgtaacatatctttctttttctttatttttattggctgtgtagtttgccatacattagataaagtggtcacttctcccagtcttgtcagactggcctcatatagaagatgaactcaccaatcagcctggccagagattctgggtgcctctcaaatccttgtgcttgtttaaaccactgtcttagttctctgtggtcccaggatgttccaaatctcgttggtgtccccaagacaggagagatagaaactagtctctaagtagcatctggaaaagttggggtgctaaatgtgtggtctaattcccttctctcctcagggataagctgga

SEQ ID NO: 470281 - DNA, 552 bp, Homo sapiens
ccagctgtttgaacctggacaatttacataagtgacttctagttccagcaaaacaattaaagcaacgttaagtaacttctggggtgcttaatcaaaaaatgaattaaaktactacatataagaggtgtcaaataagtagcttttactaaataagtagctatcattatcatttttatgatcttagttatctttgtcatcatcattgcttttggtttttcctagatctggaatgcctagttccatagttgcatgaaattttctatttttcaaaaagaagcacacagctaccctttcttgacatatacacaaatatctccaggatttgtttgttttttagagacaggatctcactctgctgcctaggttggagtgcagtggtacaatcacatctcattgcatcctcaaactcttggcctcaagtaattctcctacctcagcctcccagtgctgggattacaggattgggccactgcacccgacggccaggaatttttttgttttaagattttttttttctttcccacctgtataacagaaatagaattctaagag

SEQ ID NO: 470282 - DNA, 552 bp, Homo sapiens
ccagctgtttgaacctggacaatttacataagtgacttctagttccagcaaaacaattaaagcaacgttaagtaacttctggggtgcttaatcaaaaaatgaattaaattactacatataagaggtgtcaaataagtagcttttactaaataagtagctatcattatcattttyatgatcttagttatctttgtcatcatcattgcttttggtttttcctagatctggaatgcctagttccatagttgcatgaaattttctatttttcaaaaagaagcacacagctaccctttcttgacatatacacaaatatctccaggatttgtttgttttttagagacaggatctcactctgctgcctaggttggagtgcagtggtacaatcacatctcattgcatcctcaaactcttggcctcaagtaattctcctacctcagcctcccagtgctgggattacaggattgggccactgcacccgacggccaggaatttttttgttttaagattttttttttctttcccacctgtataacagaaatagaattctaagag

SEQ ID NO: 470283 - DNA, 552 bp, Homo sapiens
ccagctgtttgaacctggacaatttacataagtgacttctagttccagcaaaacaattaaagcaacgttaagtaacttctggggtgcttaatcaaaaaatgaattaaattactacatataagaggtgtcaaataagtagcttttactaaataagtagctatcattatcatttttatgatcttagttatctttgtcatcatcattgcttttggtttttcctagatctggaatgcctagttccatagttgcatgaaattttctatttttcaaaaagaagcacacagctaccctttsttgacatatacacaaatatctccaggatttgtttgttttttagagacaggatctcactctgctgcctaggttggagtgcagtggtacaatcacatctcattgcatcctcaaactcttggcctcaagtaattctcctacctcagcctcccagtgctgggattacaggattgggccactgcacccgacggccaggaatttttttgttttaagattttttttttctttcccacctgtataacagaaatagaattctaagag

SEQ ID NO: 470284 - DNA, 552 bp, Homo sapiens
ccagctgtttgaacctggacaatttacataagtgacttctagttccagcaaaacaattaaagcaacgttaagtaacttctggggtgcttaatcaaaaaatgaattaaattactacatataagaggtgtcaaataagtagcttttactaaataagtagctatcattatcatttttatgatcttagttatctttgtcatcatcattgcttttggtttttcctagatctggaatgcctagttccatagttgcatgaaattttctatttttcaaaaagaagcacacagctaccctttcttgacatatacacaaatatctccaggatttgtttgttttttagagacaggatctcactctgctgcctaggttggagtgcagtggtacaatcacakctcattgcatcctcaaactcttggcctcaagtaattctcctacctcagcctcccagtgctgggattacaggattgggccactgcacccgacggccaggaatttttttgttttaagattttttttttctttcccacctgtataacagaaatagaattctaagag

SEQ ID NO: 470285 - DNA, 444 bp, Homo sapiens
ttttctgtctctgaaaattctctctctcttccaatggaaggactgccccttcatccatctgtactcagactatgtgatggacccaagtttggaagttgccatagctctcagctcacttttaaagtactagtttctcaatggaatttaccttgtatcctctgctctttgatagtatcacaaaatatatggttttaattttatctagtatttttaggggtgaaggtattttgtaccttttcatatgttcatcgacagcagagtctgaacaaatgtaattctaatgtcatttaaaatgagaatgtcaccctttaattttacgttttttgtttgtttgtttgtttgttttttcctaaaggaaagcagaggagaaagggagccagaagacaagcgcttaggctttctgaactstcacatgagggctcaggacacatgtcataaagttag

SEQ ID NO: 470286 - DNA, 584 bp, Homo sapiens
tagtggacactggccttttcwgtcttctgtgcacctgcgatctgtctcaactggatcttccttgccttgccaccatggtggaagaatggaagggaaagagagtaggaatgtgggctcagggagaactggacagagcagccagaagatacagagagaagcctcagtaggacttgagtattccccagaggcactcagccacagggatgatctagcatgtgtttgtatccttgcaattatgtgacttaaggtgactcagagacatctatatgtgtgtatgtactccactgactaacaatgaagtaaatatatgaatttgtgggaaataacgtatatacacacaaaagtctgcacagataattataacatctttattcataattgtcaaaacatagaagtaaccaagataagatgcgtttccatagatgaatattttaagttaaaataactcaggtacatccacacaatggaattttattcagcactaaaaagagataccaagccatgaaaaaaacatggagaaaccttaaatatgtattatcatgtgaaataatccaatcataaaaagatacatactatgtaagtcc

SEQ ID NO: 470287 - DNA, 584 bp, Homo sapiens
tagtggacactggccttttcagtcttctgtgcacctgcgatctgtctcaactggatcttccttgccttgccaccatggtggaagaatggaagggaaagagagtaggaatgtgggctcagggagaactggacagagcagccagaagatacagagagaagcctcagtaggacttgagtattccccagaggcactcagccacagggatgatctagcatgtgtttgtatccttgcaattatgkgacttaaggtgactcagagacatctatatgtgtgtatgtactccactgactaacaatgaagtaaatatatgaatttgtgggaaataacgtatatacacacaaaagtctgcacagataattataacatctttattcataattgtcaaaacatagaagtaaccaagataagatgcgtttccatagatgaatattttaagttaaaataactcaggtacatccacacaatggaattttattcagcactaaaaagagataccaagccatgaaaaaaacatggagaaaccttaaatatgtattatcatgtgaaataatccaatcataaaaagatacatactatgtaagtcc

SEQ ID NO: 470288 - DNA, 584 bp, Homo sapiens
tagtggacactggccttttcagtcttctgtgcacctgcgatctgtctcaactggatcttccttgccttgccaccatggtggaagaatggaagggaaagagagtaggaatgtgggctcagggagaactggacagagcagccagaagatacagagagaagcctcagtaggacttgagtattccccagaggcactcagccacagggatgatctagcatgtgtttgtatccttgcaattatgtgacttaaggtgactcagagacatctayatgtgtgtatgtactccactgactaacaatgaagtaaatatatgaatttgtgggaaataacgtatatacacacaaaagtctgcacagataattataacatctttattcataattgtcaaaacatagaagtaaccaagataagatgcgtttccatagatgaatattttaagttaaaataactcaggtacatccacacaatggaattttattcagcactaaaaagagataccaagccatgaaaaaaacatggagaaaccttaaatatgtattatcatgtgaaataatccaatcataaaaagatacatactatgtaagtcc

SEQ ID NO: 470289 - DNA, 582 bp, Homo sapiens
gtcctatcccaaagactgtttacttctttattgtgagcaaagtagctttccagtagagtcttatttttttaatggaggcctattattagtagccaaattctaaattattgaagcacattttacattaaggaaactattcttttcattggaaagaatttcatacttatatcaagaaatcttacttcagactttctggccaagatggataactagaagcagctagtgtgtgcagctctcatggagagaagggagagtagtgactaaacactagctcttcaactggaacatccagatggacacattgggattcatcaaggaaacaacttgattcacagagaatagagacgagtgagacaggacaactgcccatctgtgagtggcatggagccaggtttccccactgtggaaaaacagagtccccagggaccgacacttttgcaacctggggctcaggaggtcccccataagccctcacaacagaggcctscagacctacatggagagctatgtgggcagagacgttgcttaatcacagacagagtccttggagccttggatcccccagagctccagcatcagcag

SEQ ID NO: 470290 - DNA, 560 bp, Homo sapiens
tgtgtgtgtgtgtgtgtgtgtatatatttatttcatgagtccttacatgcattatcatactcctattgctgccattgctaccagcttcccccaacatggttgccctcctcacactgctcagaagtctgttgctctttcaccactgccttcctcaccacactctggcaatgataccatgcacctgaacttcacccctcctatcttttcccttctcagccacttcgtgtactcacacctcgctccaggatacccttctctaaggatgccctccttaccctgatcaagatctgatactcttgctagattgcttcccgtgctgatgctttcctcaccttgctgaatctctggcatgtctcactagayggtgcctctagttaacaccctgtttttcctcccatcaggctctgacaccttgaactggactgcctttctctatgcatttttttcttactgtgcctgagctctgacaaaacacacttggctactccttcacctgcacattctctactcaagctctgacattccattttggactatccctctccttaccttaatttggc

SEQ ID NO: 470291 - DNA, 564 bp, Homo sapiens
gcaaggtaaataatttttcaatctgataaaattatactcaattcaaaagtatacatttatatgaaaataaatagggtttgtgtttctttaaggtaaaatgttcatgattataatcaagatatttttgctttacagaatgttgtctaaactctagatttttttttcttaatgcaaataggctattttccttcatgagctatgtagatatttttgctaacccatctggtttagaagccacagcttgaattttaatgaggcaatattatttactgtacttgttcatgcaaatttttcagtgtttgcactgtgttggtaatcctctctgtgaatgggtcaaattacctctgsctttcttgggaacttggaaataagttttggtgctggatcagacagtgaagttcagggttgtgagagcttagtatttacaaatccaaagtgatccaccctagattttaaaccaggagtcagatttgtttgctcactgtgttacttcctgtaggtatagtcagatgaccttccactgaagctctgttattttttttcaggctcttgggacatcgttac

SEQ ID NO: 470292 - DNA, 357 bp, Homo sapiens
ttagttatcttgtccaaagccacatagagaatcatcagttaaaattatattgrttgatagattgcctagattatcatggtaagtggcaaacagcatcagaaattttatgtataatgtgaggtctattaagctaaaaatatatgaaaattgggaaaaagaaaccaccaaatgtcaacaaatctacctttgaggtgtggcctgatgggtgaatttcattttcttccatgatgagcacaggtggtattttaaaataaaagaaagacaaaagcattttaaaagttgttctgcatgagaagcactaaggcccgtgaaactcaatcagacagcaagaccatctttccatgtgacactaatgtg

SEQ ID NO: 470293 - DNA, 383 bp, Homo sapiens
ccacatagagaatcatcagttaaaattatattgattgatagattgcctagattatcatggtaagtggcaaacagcatcagaaattttatgtataatgtgaggtctattaagctaaaaatatatgaaaattgggraaaagaaaccaccaaatgtcaacaaatctacctttgaggtgtggcctgatgggtgaatttcattttcttccatgatgagcacaggtggtattttaaaataaaagaaagacaaaagcattttaaaagttgttctgcatgagaagcactaaggcccgtgaaactcaatcagacagcaagaccatctttccatgtgacactaatgtgcctcctaacgcttcccaaaggcaacataatagacatggaataggg

SEQ ID NO: 470294 - DNA, 357 bp, Homo sapiens
ttagttatcttgtccaaagccacatagagaatcatcagttaaaattatattgattgatagattgcctagattatcatggtaagtggcaaacagcatcagaaattttatgtataatgtgaggtctattaagctaaaaatatatgaaaattgggaaaaagaaaccaccaaatgtcaacaaatctacctttgaggtgtggcctgatgggtgaatttcattttcttccatgatgagcacaggtggtattttaaaataaaagaaagacaaaagcattttaaaagttgttctgcatragaagcactaaggcccgtgaaactcaatcagacagcaagaccatctttccatgtgacactaatgtg

SEQ ID NO: 470295 - DNA, 383 bp, Homo sapiens
ccacatagagaatcatcagttaaaattatattgattgatagattgcctagattatcatggtaagtggcaaacagcatcagaaattttatgtataatgtgaggtctattaagctaaaaatatatgaaaattgggaaaaagaaaccaccaaatgtcaacaaatctacctttgaggtgtggcctgatgggtgaatttcattttcttccatgatgagcacaggtggtattttaaaataaaagaaagacaaaagcattttaaaagttgttctgcatgagaagcactaaggcccgtgaaactcaatcagacagcaagaccatctttccatgtgacactaatgtgcctcctaacgcttcccaaaggcaacrtaatagacatggaataggg

SEQ ID NO: 470296 - DNA, 571 bp, Homo sapiens
tctgagtgggtgcctgtatgtcttcctccatcctttctcctttaacgactcagttaggacactgcccatgttaatatgacatcaccatgtctacttcratctcaggcgcttgggtatctgcatctgtgcatatggtcagtgctctaaggccatacaccttctagagagctagagaaaacagttctcaatggttgtgaccccaaatggggtttctaagactgtgagtaaatttataactgagttaagtaggaagagagatggtgatgggtgagttagctgtttttggatctgccatacactaatagctctggggccaacaaaataggtggtagcttcctgatttcccatctttctaagacagaggtagcaactccctcaacagtctcattcttgatgttctgggagtgaattttggtggcagagactgcttcctgagtttttgcaacactttttgcaagcacttactaacctgtattaaatccctttctgcttaaactagttagagtgctttcttttatctgtaagtgaattgtaccttacacaattgtgttttgtcttctgatataactca

SEQ ID NO: 470297 - DNA, 472 bp, Homo sapiens
ctaccccagagtctggagccaccgtatgtgatcaggttcacattttggaaagatcactgtgggaacaatatagaaagaagatgatttaggatgaggttagatttgggatccagaratcagttaactgtccccacagttagccatattaaagtggttaaggaaattgactgccaatctttagtttctttatcaataaaatgaataattcctatgaggtctttttgttgtaagcattgaggtgtaacaagaggcagaattggaatagtgttaaaaagtgtaggctctgcaactgcactgggtttgaatctgtgaccttgaccagttacttgattttccaaagccaaaatgtcctcatccttaaatttttttttttttttttttgagtcttgctctgtcacccaggctggagtgcagtggcgtgattttagctcattacaccctccacctcccgggttcaagcaattctcctacc

SEQ ID NO: 470298 - DNA, 472 bp, Homo sapiens
ctaccccagagtctggagccaccgtatgtgatcaggttcacattttggaaagatcactgtgggaacaatatagaaagaagatgatttaggatgaggttagatttgggatccagagatcagttaactgtccccacagttagccatattaaagtggttaaggaaattgactgccaatctttagtttctttatcaataaaatgaataattcctatgaggtctttttgttgtaagcattgaggtgtaacaagaggcagaattggaatagtgttaaaaagtgtaggctctgcaactgcactgggtttgaatctgtgaccttgaccagttacttgattttccaaagccaaaatgtcctcatccttaaatttttttttttttttttttgagtcttsctctgtcacccaggctggagtgcagtggcgtgattttagctcattacaccctccacctcccgggttcaagcaattctcctacc

SEQ ID NO: 470299 - DNA, 670 bp, Homo sapiens
caaaagagatatatgtatgtaaataactgtaactttattcataataatccaacttgtttctcaactgcagaatggataaaaaattgtggtatatatctacacaatggaatacaattcaacaatttaaaaggaaatggactaccgatatatgcaacaacatggaagaatcttaattatgctgatgatcaaataatgcatactatatgattctagttgttgccaggacccagggagtgaaggtagcagataaactgcaaaagtacataaagaaaatttggggatgatggaartgttctatatcttaattgtaatgatggttatatgaatgtaaacatttgtcaaacatcatagaattttatgtttaaaattggtgacttttactgcatataaattatatctcaataaagctgagcaaaaacaaaaaccaaggaaatatacgatatttattccctcccaaaatgagcagtgtgattcacaagtaaacggaacaggccgggcgcagtggctcatgcctgtaatcccagcactttgggaagccaaggcgggccgatcatttgaggtcaggagttcgagaccagcctgaccaacatggtgaaaccccgtctttactaaaaatacaaaaaaattagccaggagtggtggtacattcctgtagtcccagctactaggg

SEQ ID NO: 470300 - DNA, 670 bp, Homo sapiens
caaaagagatatatgtatgtaaataactgtaactttattcataataatccaacttgtttctcaactgcagaatggataaaaaattgtggtatatatctacacaatggaatacaattcaacaatttaaaaggaaatggactaccgatatatgcaacaacatggaagaatcttaattatgctgatgatcaaataatgcatactatatgattctagttgttgccaggacccagggagtgaaggtagcagataaactgcaaaagtacataaagaaaatttggggatgatggaaatgttctatatcttaattgtaatgatggttatatgaatgtaaacatttgtcaaacatcatagaattttatgtttaaaattggtgacttttactgcatataaattatatctcaataaagctgagcaaaaacaaaaaccaaggaaatatacgatatttattccctcccaaaatgagcagtgtgattcacaagtaaacggaacaggcygggcgcagtggctcatgcctgtaatcccagcactttgggaagccaaggcgggccgatcatttgaggtcaggagttcgagaccagcctgaccaacatggtgaaaccccgtctttactaaaaatacaaaaaaattagccaggagtggtggtacattcctgtagtcccagctactaggg

SEQ ID NO: 470301 - DNA, 646 bp, Homo sapiens
actcttaagctcttacataaatccaattaaagaaacatttaatgggtaccaaacatgtggaggggtagactaaactcttgagacacaaggatactataagatgatccttgacttcctctagtgattcaccatttggggagggaaacagaaacagaaatggcaaaaaaggtgtgactgagaaatgctttcataaaaatagaattagatgctatgggaactttaatgaagaagaaacaatggattctgctgagacgagaggggacaaagagggggtgttgaagagatttcctaggatcatagatacttgaactgagtctcaaaggatcagagaattttaactgcggaagcagcttgggaaaggtacagattcatgaaatgcatacagcrttcaaggcagtctggatgatatggagtgattagcatctggggttgaagtgaaacaatacagttgatggggttgatggacaggttgaggcatcagactgaattgccttgaagaccatgctctatagtttagattgtattttgtaactaataagaagatatggaaaggttttgacagaagaataccatgattgtttacagatgtaaactataatgatctatttgtttatgaaaacaaattaatttttcttttcctaattac

SEQ ID NO: 470302 - DNA, 646 bp, Homo sapiens
actcttaagctcttacataaatccaattaaagaaacatttaatgggtaccaaacatgtggaggggtagactaaactcttgagacacaaggatactataagatgatccttgacttcctctagtgattcaccatttggggagggaaacagaaacagaaatggcaaaaaaggtgtgactgagaaatgctttcataaaaatagaattagatgctatgggaactttaatgaagaagaaacaatggattctgctgagacgagaggggacaaagagggggtgttgaagagatttcctaggatcatagatacttgaactgagtctcaaaggatcagagaattttaactgcggaagcagcttgggaaaggtacagattcatgaaatgcatacagcgttcaaggcagtctggatgatatggagtgattagcatctggggttgaagtgaaacaatacagttgatggggttgayggacaggttgaggcatcagactgaattgccttgaagaccatgctctatagtttagattgtattttgtaactaataagaagatatggaaaggttttgacagaagaataccatgattgtttacagatgtaaactataatgatctatttgtttatgaaaacaaattaatttttcttttcctaattac

SEQ ID NO: 470303 - DNA, 516 bp, Homo sapiens
cattttaagagctagatgttaattttatttacactagagtataaatagtaacagcaattggcaaaaacacagtcgtattccatatatttctaaattgccatccattgcttttttgagttcacaagttgggcctttggaagtgtaatggagattctggcattaaccttattatatgttattaatttattatgaattttaaatcagtatatcttaaatatyatagattagaatttattaagaatgttataaagtaaatatagcaataaacaaatcagccatttgaatagagatggtattagtgaaattatccatcagatctcaaatttgatgtcaaatatctagttttccagggttatgctaattttgtcatatgttaaaacacttttataaggtgttctttgacattaaatagtgaatttctcagaaatgtttgcacttcctttctccctccttttctcccactctgggaaggaaagactgcatttagtcacacttatatgtaatagagtttagcct

SEQ ID NO: 470304 - DNA, 576 bp, Homo sapiens
ttctggatgacccttcaaattctcattttattgcctggactggtcgaggcatggaatttaaactgattgagcctgaagaggttagtttaatagattttaattaggacactcagacatgttataacataaagaaactgacacatttgattaatataccaaaaatgtattcttaatcatttcaagactttagggaaactttctgaattaaaaagcatgcaaagataaaacatgtctacctttaaaatcaccaatgtattgcgtgttccttccggttgtatacaatcctacaaaattgatgttggagaaaattaaccagagcatgctttgcacctttatttaagaatgtctggcttcagggtttctaaaggagcatctgaattagagaaaagaggcaggagggaggttttatggtccttaggagagaggaacgatgtctgcaaaagtcaactggttgggggaygggtgaattattctttcaaattagcaatcattatttggacaacttggattttgtcatgagggttggagaggagcatttagaggccaaagttatgttcaaaagaagattggggaaaa

SEQ ID NO: 470305 - DNA, 548 bp, Homo sapiens
actaaaatgaccatgaagaatgtggtggttcgaaatattttctatgaatacgatcattggttaaaactcaactctgtgcattatagatttctgtaaatccacaagattattaatactaattaaaaccccagactgcacattacctcaagytgagggtttcaaagggcaagtggtatagaagaatacctataatgcaactaaataatctctgccctctgatttgcccaccctccaaaagaaacacaagctgaattcagccaagaactgccttatcatctatggaaacatttactcccaccattacaagatggacagcccaccaaatacaaaaagtttgaaaatcactcacttcaagcaaaatatatgtaactgtaatagtttaatttaaaatatttaaaagcaacatacttatgcccattatgcctgtaagacaatgaaaatatatttacaatgataaatccatccttggaaggaacgattgtgcattaacttacagatgctgtgctaggacatggatcgccaacactggattaaccttgcctacaagc

SEQ ID NO: 470306 - DNA, 584 bp, Homo sapiens
agaataataacaggaaaaaaaagtgtwcatgttcagtacaggcagttttttaccaactattttcaatccacgtttggttgaatccatggatgcagaacccacagatacggagggctgactgtatacataaactgcatggtctacgtaaatggggtttcagcgatgagctttgaagttaccccttgatgattttttgtttttgaagattcaggaggtacatgtgtgggtttgtaacatgggtacgttaagtaatggtgggaattgggtttctagtgtacccatcacccagataatgaacattgtacccaataggcaatttttcaaccctcactctcctaccaccctcccccaccgccacttgataatctttaacttcacatgttaagagcaatctcagcacttgtggctttttgtgttaaatcagctaaactgactgagtgcgccttctccaactttagcacagtatttcactcttaagcagtttgcatttatggtttatttagggtgataaaattataacctctttgaaacaacaggaaacatgaagcaacaccctcacttgtgtggtagtttgcagctcatga

SEQ ID NO: 470307 - DNA, 517 bp, Homo sapiens
caggaagaaatgtaggcaccatcagcttgcacccctgtgcatccccaatcaatttttaattgtcatctatgatttccatgacatttctccacactcctttataattttggcacctgattcatcrcaagcattctcagtagcatttataatgagaaggaacccaatccagcacaagcctggcacttccttcactaccctgtcttgaaacctttcattttcatgaaacctagaccgttagatgttcccgttgtttcttgtcttctcatcacccaccttaattttggttcttatcatcatccaaaagcaatgtgcctttactactatttcactgcatggattttctatcctccctcacacacacacacacacacacacacacacacacacacacacacacagcatatatagtgcttatagtcctttgccttcttcagaacctctgttttttcacccaccatttctcttcctgatctaactcccactgcttggcttcaccctcctccctcctgagacatga

SEQ ID NO: 470308 - DNA, 519 bp, Homo sapiens
tttacttctgagcccacataactgaggccaggaagaaatgtaggcaccatcagcttgcacccctgtgcatccccaatcaatttttaattgtcatctatgatttccatgacatttctccacactcctttataattttggcacctgattcatcgcaagcattctcagtagcatttataatgagaaggaacccaatccagcacaagcctggcacttccttcactaccctgtcttgaaacctttcattttcatgaaacctagaccgttagatgttcccgttgtttcttgtcttctcatcacccaccttaattttggttcttatcatcatccaaargcaatgtgcctttactactatttcactgcatggattttctatcctccctcacacacacacacacacacacacacacacacacacacacacacacagcatatatagtgcttatagtcctttgccttcttcagaacctctgttttttcacccaccatttctcttcctgatctaactcccactgcttggct

SEQ ID NO: 470309 - DNA, 467 bp, Homo sapiens
tataggcattgagatgagagggagagagagagagagagaggacagtgttaggatcagcaatgaaagatgtcctttacagagaagtgcagctgagagcttttattttctccagcctcctttccctcctcccacaagtctctagggctccctgctcaaaggctcggagttaccacctgccatcttcgatcaacctcattgcctctcgagcggtgctgcaaagccacttgactgtttgggctcccaaactctccacagcagctcctgtgcttatcctcttcaagtttagttccaaatcatatttkgacaactagttattgctttttctacagtcaagtctcaaaactacagaaaaacacaggaagaatttgtctgtgtccatcaccagagaatattctcattttgtcaaacgttttagcacacttgggttctaatgtcaaagcttatgttgctcatagagcaacaaagag

SEQ ID NO: 470310 - DNA, 467 bp, Homo sapiens
tataggcattgagatgagagggagagagagagagagagaggacagtgttaggatcagcaatgaaagatgtcctttacagagaagtgcagctgagagcttttattttctccagcctcctttccctcctcccacaagtctctagggctccctgctcaaaggctcggagttaccacctgccatcttcgatcaacctcattgcctctcgagcggtgctgcaaagccacttgactgtttgggctcccaaactctccacagcagctcctgtgcttatcctcttcaagtttagttccaaatcatattttgacaactrgttattgctttttctacagtcaagtctcaaaactacagaaaaacacaggaagaatttgtctgtgtccatcaccagagaatattctcattttgtcaaacgttttagcacacttgggttctaatgtcaaagcttatgttgctcatagagcaacaaagag

SEQ ID NO: 470311 - DNA, 539 bp, Homo sapiens
cacaggcatgggagtggggaatgggcctatggcagcaggatagacatggctgccayggtatttgtttgcattcttggaatttagtggggcaggcaaagcatgtattgtgtttctggtgaatcacaggagagagaactattgtgggcttgtcatgggtctttctaatagggcctcctgaaggcacagagggttcctgtggaaagaacttaagtatgagcactggatttataggggcttaagagggactaggtggtagctagtttgaatgaagttatatcaaatgagtggcagcattaggattctccaaacagcacactaaaagcccactggagagtcagcttcaaaatctgccagacctggagagtgcaaagattattacaatagtaccatttcatgtcgggcctttctttaccccttacctctcttcacacacacaagaccccttcaccaatctcagaggagctggtgtgtgaagggtgagcacaaggtagacaaatccagaagccaggcatgttcctctttccttcctcattgttttc

SEQ ID NO: 470312 - DNA, 641 bp, Homo sapiens
atagtgcctaaatctttacttgtaagtgtttctgtgtccagccattggtttaggataatttctggtttcctgacgctgatcataatataacaaaattttgtttcaaggatttgttacacctgcctctagtgaatctctcatgcaaggtagttatttgagcactgttagatatgagttctaaatttctcttcaaagattcaatatgtccgtatgttcaattctttgccttctacttttaaacttaacttcctcataaaacaacctttttgatcacctgctccaccctgactcattccgattacctgctccaccctgactcattgcgatttcctactctgccataatcatttttccctccaaaccattaccccatctctctctktaaattagccagtcggaattagtttagcctgtgctgcctaaccctagccaataggggaactacacagcagcaggggccacctgcgtcaggaataagaaccccttccccttccttgtccaggtgtgcgctcaccattgctccgtcggtgagagtgcacctttctatagaagtaaattgcccttctgagaagaaaaaaagaatattttatatttgagtgctatttcttttgtggcaccgaagctttatttataacaggact

SEQ ID NO: 470313 - DNA, 622 bp, Homo sapiens
ttctttcataatctaagttggaataacctcaaacagacccatgagtcatttcagtttttcttatcagtgagtttcctgtagcttttattcagtgttttgaaaatgtgcagtctactgagctttcttggacatactgagtgcacccatgttcctcaattcttcacagccctgctccgaagaattggctatagtttttttttaatcccaaggattatcacaatcgtggcactcagtaagattaaataacacccaggggcagtgataagtccttaaacaggactcctaagacctgcatgtgtcagggtgtgtgcaytgggcagccgctggcttgtcattgctaacttggagaatatcgcaccctgcttctctgcagcagctcctcaggggccagtcttcactttcacaggctcacggctcctgctggccatgaacagatgtttctcagggtggataacttttaccttcttgtgctctgtcaatcatgcatttctgcccagtgaccttttcttcatgtctctttactaggtgcccatttgtggatgcaaacagtgtctcattattggtttccttgctgtgtcccttgccagccttgtgtcaggctacagcctgtcagcaacttgtc

SEQ ID NO: 470314 - DNA, 637 bp, Homo sapiens
cctcatgaatggcttgggacatccctttggtgataagtgagatcttgctctgagttcacatgagatctggttgtttaaaagtgtgtggcatcccccaccccccaccttctctctttcttgttcctgcttttgccatgtgatatgtctgctccctcctgctttgccttccaccatgattgtaagtttcctgaggtctccctagaagctgagcagatgccagcaccatgctgcttccttaaagcttgcagaaccatgagccaattaaacctcttttctttataaattacctagtctcaggtacttctttatagcaatgcaggaaccacttaagatattttcagttatctgagagttacccttgaaaaygtataacaggctcaaggtgatagttccgagaatttagcagcactagttgcaggactttggagcattaacagatacaaagactagttcaggtgatactgaggcgattgctagttttcagatattacaagaagggtaggtatttcatgaagcatgagagaaaaaaataaataaaagaagtgtcttctaaaagaaggaacacaaaacaagagagggaggaggaagtggagaaaaaagaaagagaaagagacagagagggagaaaaggtagcata

SEQ ID NO: 470315 - DNA, 637 bp, Homo sapiens
cctcatgaatggcttgggacatccctttggtgataagtgagatcttgctctgagttcacatgagatctggttgtttaaaagtgtgtggcatcccccaccccccaccttctctctttcttgttcctgcttttgccatgtgatatgtctgctccctcctgctttgccttccaccatgattgtaagtttcctgaggtctccctagaagctgagcagatgccagcaccatgctgcttccttaaagcttgcagaaccatgagccaattaaacctcttttctttataaattacctagtctcaggtacttctttatagcaatgcaggaaccacttaagatattttcagttatctgagagttacccttgaaaatgtataacaggctcaaggtgatagttccgagaatttagcagcactagttgcaggactttggagcattaacagatacaaagactagttcaggtgatactgaggcgattgctagttttcagatattacaagaagggtaggtatttcatgaagcatragagaaaaaaataaataaaagaagtgtcttctaaaagaaggaacacaaaacaagagagggaggaggaagtggagaaaaaagaaagagaaagagacagagagggagaaaaggtagcata

SEQ ID NO: 470316 - DNA, 294 bp, Homo sapiens
atggtagacaatttataaaaagaaaaaaatcacctgtaatcttcatagataacttgatttagtttgtaaagcaccaacttggttttttaaaaaggaagactttgaccattagaataaaatatgatagtcagaatggaccatrcagaaccaagggaggagctcaacatttaccttctaaaaatctgcttgttcttccttcccacttcttattcacaaaacaaaaaacatatgagtgctaaaacattaaattatttttctctcttgaagtccagagttgtcatcccaaagcccatg

SEQ ID NO: 470317 - DNA, 294 bp, Homo sapiens
atggtagacaatttataaaaagaaaaaaatcacctgtaatcttcatagataacttgatttagtttgtaaagcaccaacttggttttttaaaaaggaagactttgaccattagaataaaatatgatagtcagaatggaccatgcagwaccaagggaggagctcaacatttaccttctaaaaatctgcttgttcttccttcccacttcttattcacaaaacaaaaaacatatgagtgctaaaacattaaattatttttctctcttgaagtccagagttgtcatcccaaagcccatg

SEQ ID NO: 470318 - DNA, 632 bp, Homo sapiens
ctctgggccacactcaatcagctcaccctcccacagcccacgtacagggagctggcccagttygggtggccagacctgtctcatctctggatccaccctggccccggtcaattatgttctagagtgtgggggcattcatggatttatagatgtgtagaaatgatcagttctgaccccgagcctccgttcacacaaacccccaagcgcaaagctcccggcagaagtgcgacaggggctctccaggcccacagccgcctttgtgtccacacatgacatcacttcactgtgggtgtcctgaggaacacagcgtccttggagggttccctgaggttggcgtgaccacaaaggacagcttactagcaaggagctgccctcacccccagaaacggtcacaataactcacaaattataaacacctgaaaatccaccagatcagccgttccagagcccagcattaggaggatttggctgggagaaagcatggaggctgtcatggctggcatgggagggggcgccggggacacaggccagggagaagtcccgtccccaaggctgcctcccacacgggcgaagccagcacctgcccatgccctctggcctctacagccttgcagggccacagaagggcccag

SEQ ID NO: 470319 - DNA, 616 bp, Homo sapiens
cttatgcctgcgcttcactgaggtccgcagggctatggaggctgagctgaaagcacttccaagtgattccccaaggaacgtcctcacaggagcgttcagaggggcccagccagtgctcttgctgctgaaggagcatcccagggaggtgacgagcccagggcccctggcacagggtggccctggaagaaagcactgtgctcccagcacttgaacaggacccttctgcaaacacagcgctcgaacggaacccttctgcaaacacagggctcgaacggaacccttctgcaaacacagggctcraacggaacccttctgcaaacacagggctccaacggaacccttctgcaaacacagcgctccaacggaacccttctgcaaacacagcgctcgaatggaacccttctgcaaacacagggctcgaacggaacccttctgcaaacacagggctcgaacggaacccttctgcaaacacagcgctcgaacggaacccttctgcaaacacagcgctcgaacggaacccttctgcaaacagcatttgcataaattgcaccgtcatttttgtacttattttacatcagagaggtaggctgggctttttgaaagaggcacactggct

SEQ ID NO: 470320 - DNA, 616 bp, Homo sapiens
cttatgcctgcgcttcactgaggtccgcagggctatggaggctgagctgaaagcacttccaagtgattccccaaggaacgtcctcacaggagcgttcagaggggcccagccagtgctcttgctgctgaaggagcatcccagggaggtgacgagcccagggcccctggcacagggtggccctggaagaaagcactgtgctcccagcacttgaacaggacccttctgcaaacacagcgctcgaacggaacccttctgcaaacacagggctcgaacggaacccttctgcaaacacagggctcgaacggaacccttctgcaaacacagggctccaacggaacccttctgcaaacacagcgctccaacggaacccttctgcaaacacagcgctcgaayggaacccttctgcaaacacagggctcgaacggaacccttctgcaaacacagggctcgaacggaacccttctgcaaacacagcgctcgaacggaacccttctgcaaacacagcgctcgaacggaacccttctgcaaacagcatttgcataaattgcaccgtcatttttgtacttattttacatcagagaggtaggctgggctttttgaaagaggcacactggct

SEQ ID NO: 470321 - DNA, 592 bp, Homo sapiens
tagtatatgcaaatacttatgaatatataagattaayttaaagtagttataaataattttataaatatattgttcttaagtaaaaagtaatgtctttcaagtaaataggagaaaacagatactaaaattatgtcaaaatgtatcttttattttatcttttcaagtcaccaactaattcaaaataaaagtgttcaaaagtaactgtgcacagtggcacgtgctacaagtcccagatactttagaggaagattgctgaggccaggagtttgaggccagcttgggcaacatagcaaaacctcatctcaaaaaaatatatatgcttgaaggaaaattatacagatgatgtaatatctaatttattagaaggtggcaaatcaccagcctaagtaacaatggatttcttaaaaagtagtagatatttgtctttaacatagattgttatctttatctttattattttcttattttaaggtgtgcttcccttaaaaaatcataacaatattttaaatatgttcagatttcatattataaacttcattttataataatgtcatgtaacttttagattgacataagcacgattgtttattgt

SEQ ID NO: 470322 - DNA, 548 bp, Homo sapiens
ggctgtcacttttgcaaagtttaataaacatcttatgaaaccacataacagcaaccaacttcctgacaaaaattaggatggaggcttttctttcatgttaaagagaaagaatccaagagtgagaaaggtgatcgtggagagttctggtgaatacgtataatacatctcactaatgataatatacaccaagagtgtgtgattcgctcaagtccacttatttagtgtcagaaaagtatctacaaacagatttactaattctcattctaatgttttcgtttttttttaacttcgtcactgaagaatgactaagatttatctgaattatataataggttgttccctaaagcatttttgttgatttttttttgaattatgacccactattacttataaggtcatgccgaatatagtgggatgtaaattgaaagcatcgaagttsggcacagtggctggggactaatcccagagactagagaggcttagccaggaggattgcttgagcccaggaggttgaggctgccgtgagctatgatcatgtctctgtactg

SEQ ID NO: 470323 - DNA, 667 bp, Homo sapiens
tatttcataactttatgatttctcataataggttggacatgcgaaaagtgctcagtaaatattgtttttcctgcatgccatttaaactgaactagaggcagtttactgtacatttaaaaggactggctttggcgtcagaagcctctgggttcagatcctggctttgccattttctagctaygtgatctagggcatgtaacttaacttataggtgccactgtttccttatttgtataaaatagttcctactctgacaatactagtatttctcttttccacatttattttgcctcctactatccaagcattctcttatctcctaacactgctggctgtcccttctgcccctggagtaactatacgggctacaaaactgcctccattattccagttgtgttagaagccacagtttactaaacactaagatttatctatgcaagagctatggaggaggttcagactcctccagcacgttcagactcagatgaagagtgctttcgcgtatgtggttcatctcgaagagcagaggctttaatgccctgtggggagaaattagtctagtgacagagaagaggcagaaagagcccacagataaattcctttcccttaatctatccaacgacagttttgaagtattctgtcatgaatggtggaggatatcccccat

SEQ ID NO: 470324 - DNA, 667 bp, Homo sapiens
tatttcataactttatgatttctcataataggttggacatgcgaaaagtgctcagtaaatattgtttttcctgcatgccatttaaactgaactagaggcagtttactgtacatttaaaaggactggctttggcgtcagaagcctctgggttcagatcctggctttgccattttctagctatgtgatctagggcatgtaacttaacttataggtgccactgtttccttatttgtataaaatagttcctactctgacaatactagtatttctcttttccacatttattttgcctcctactatccaagcattctcttatctcctaacactgctggctgtcccttctgccmctggagtaactatacgggctacaaaactgcctccattattccagttgtgttagaagccacagtttactaaacactaagatttatctatgcaagagctatggaggaggttcagactcctccagcacgttcagactcagatgaagagtgctttcgcgtatgtggttcatctcgaagagcagaggctttaatgccctgtggggagaaattagtctagtgacagagaagaggcagaaagagcccacagataaattcctttcccttaatctatccaacgacagttttgaagtattctgtcatgaatggtggaggatatcccccat

SEQ ID NO: 470325 - DNA, 525 bp, Homo sapiens
caacaagtgaatgtgactgtgttctgacaaagcttaatttacaaaactaggctgcggtctggatttgacctgtaggctggagattgttctaggtatttgcttttcgttagtaaaatattacactagaaggacagaaacgcctccagcattgctgggaagacaaaatgagatttggaagtttttggagtttacatctacagttttaaaagagcaaaaagggccaggcacggtggctcatgcctgtaatcccagcactttgggaggctgagcggggcggatcaccttaggtcaggagttcragaccagcctggccaacatggtgaaacccagtctctactaaaaatacaaaaattagccagatgtggtggcacgcacctgtaatttcaactactcgggaggcagagtttgcagtgagctgagattgcaccactgcgctccagcctgagccacagagcaagactccatctcaaaataaaagagtaaaaagttaagtactatgtaaaaatctgtgatctcagtaaatgg

SEQ ID NO: 470326 - DNA, 639 bp, Homo sapiens
tgggattacaggcatgcgccaccaccctggccaattttgtatttttagtagagacggggttttctccatgttggtcaggctggtcttgaactcccgacctcaggtgatccacccacctcagcctcccaaagtgatgggattataggcgtgagccaccgcgcctggcccaatttcctttttctgtccgaagatcccatccgtgacaccatgtgacagttagtagtaatgtcttcttgggctcttcttggctgtgrtagtgtacaaaaaaaaattaattttctttgagacagtctcactctgtcactcaggctggagagtagtggtgtgatcatagctcactgcagcctcaatctcctgggctcaagtgatcctccctcctcagcctcccatatttttaatacagacagggtttcaccatgttggctaggctggtcttgaactcctgaccgcaggtgatctgacctcaggtgatctgcccgcctcggactcccaaagtgctgggattactggtaggagccatcacacttggccagtttacttgatgttttaaaaataaattcctctgctatgtaaactgaccagaatggattctgttgattgcaactaagacccataactgatgcagttggcattcaagcc

SEQ ID NO: 470327 - DNA, 639 bp, Homo sapiens
tgggattacaggcatgcgccaccaccctggccaattttgtatttttagtagagacggggttttctccatgttggtcaggctggtcttgaactcccgacctcaggtgatccacccacctcagcctcccaaagtgatgggattataggcgtgagccaccgcgcctggcccaatttcctttttctgtccgaagatcccatccgtgacaccatgtgacagttagtagtaatgtcttcttgggctcttcttggctgtggtagtgtacaaaaaaaaattaattttctttgagacagtctcactctgtcactcaggctggagagtagtggtgtgatcatagctcactgcagcctcaatctcctgggctcaagtgatcctccctcctcagcctcccatatttttaatacagacagggtttcaccatgttggctaggctggtcttgaactcctgaccgcaggtgatctgacctcaggtgatctgcccgcctcrgactcccaaagtgctgggattactggtaggagccatcacacttggccagtttacttgatgttttaaaaataaattcctctgctatgtaaactgaccagaatggattctgttgattgcaactaagacccataactgatgcagttggcattcaagcc

SEQ ID NO: 470328 - DNA, 446 bp, Homo sapiens
ggaggacagaggccttccaggctgcaggaacagcgtgtcctagggcacagaagcgtgaaagcccccacggtgctgtgtttggctttgttgcagcggaaaatgtgagggaggagagaaaagagataaggcaggcatagtcaccaggagtcaggtcgggagggtcatgtgtgcagagctaatgaggtggccatttatcccactggagagggggtgatggggactgcgaagggtgaattcggggaaaatgtaaagtgcgtctgaggcacttccaaccccagggcccacgcgccsggaccacagaggttcctccttcatggctgtctggttttgaaatgttctgggttaaagtgattggtgcttccacctttggcagagtaatctggggacgcgatgggtgagatctatctgccagggcaggctgagaactctctttcaggggaaaattg

SEQ ID NO: 470329 - DNA, 446 bp, Homo sapiens
gaggtcattcctgagttgcagtatgttgagagggtaatatttctgtcttctctaactccccatactcccttgtcttccactctccacttaggagttttttgtgagttatgtccttgttgcttttgcctctttttctttctagccttgattgtgccagaagacaatgtccctattcacacactctttctgcttttctgtgggcaggaacatggaaggggtgctgatggacgtggactgtgagagcgtctaccccattgtgtaggcctctaattgaggcctggcctctgctgtgggtgaatttctgtactggaagtgagtggggctccttttacgtttctttaacaccaccctctcggtttctctcccacatgtgctgctgccctacttaaggcctccccatctccgtggaagtctctctgstgtctcttttcctctctcagctcctt

SEQ ID NO: 470330 - DNA, 577 bp, Homo sapiens
taaatttactggaggacttttttgttctcttcttttttctttttttaatagcatcccgctcttatttcagaataaaaaaawttttaaggtatgttgagtaagaatctatagagcaatgaaaatgcaagagcaatagctatgggcaccaaatggtcaatcttcttatcataatgttgagtggaagaagccaggtccaccagacacatgctgctcatttatccaaagtttggacacaggcaaaacaaaactagtttgatcgtgatgggaaacattagagaaatgcaaagacatgaccatcataattgtcaggagaaggcattggttaggattgggaagcggcaagcagaagcatttagggattggctggcaatgttttacttctcagctgagtgagggttgcatcggtgtttatttgataacacgttctaggggctgggcaagatggctcatgtttgtagtctcagtactttgggaggccaaagatgggaggattgcttgagcccgtgagtttgagaccagcgtgggtgacatagcgagaccctgtctctacaaaaaattaaaaaaaaaaaaaaaaacc

SEQ ID NO: 470331 - DNA, 577 bp, Homo sapiens
taaatttactggaggacttttttgttctcttcttttttctttttttaatagcatcccgctcttatttcagaataaaaaaatttttaaggtatgttgagtaagaatctatagagcaatgaaaatgcaagagcaatagctatgggcaccaaatggtcaatcttcttatcataatgttgagtggaagaagccaggtccaccagacacatgctgctcatttatscaaagtttggacacaggcaaaacaaaactagtttgatcgtgatgggaaacattagagaaatgcaaagacatgaccatcataattgtcaggagaaggcattggttaggattgggaagcggcaagcagaagcatttagggattggctggcaatgttttacttctcagctgagtgagggttgcatcggtgtttatttgataacacgttctaggggctgggcaagatggctcatgtttgtagtctcagtactttgggaggccaaagatgggaggattgcttgagcccgtgagtttgagaccagcgtgggtgacatagcgagaccctgtctctacaaaaaattaaaaaaaaaaaaaaaaacc

SEQ ID NO: 470332 - DNA, 577 bp, Homo sapiens
taaatttactggaggacttttttgttctcttcttttttctttttttaatagcatcccgctcttatttcagaataaaaaaatttttaaggtatgttgagtaagaatctatagagcaatgaaaatgcaagagcaatagctatgggcaccaaatggtcaatcttcttatcataatgttgagtggaagaagccaggtccaccagacacatgctgctcatttatccaaagtttggacacaggcaaaacaaaactagtttgatcgtgatgggaaacattagagaaatgcaaagacatgaccatcataattgtcaggagaaggcattggttaggattgggaagcggcaagcagaagcatttagggattggctggcaatgttttacttctcrgctgagtgagggttgcatcggtgtttatttgataacacgttctaggggctgggcaagatggctcatgtttgtagtctcagtactttgggaggccaaagatgggaggattgcttgagcccgtgagtttgagaccagcgtgggtgacatagcgagaccctgtctctacaaaaaattaaaaaaaaaaaaaaaaacc

SEQ ID NO: 470333 - DNA, 508 bp, Homo sapiens
gccaggagcagcaatcatgagcagtttttgctttgcccaacagcatgaacaggtaagcyttggcatgctgccgcatccaaatgctccttctgttggatactgggcaggctagatagcctgaggcatgtagccccatgctgggcacctggctattgtaagcaaactcaggattggctgctcactgcttgaaaagccacatacaggacaaccaaagctgggtggaagcaaagcagctttattcaagtgctagccacttagaagacggccagaatcaagtctcaaaaagctatcttgaattctcaggtgggctaaaggagccttaaagggaaaggtagcacggaaacaatgtgcaggaatggtgtgaagtgtaggtttgcttgtcattttttgatgatagacttgagtaatggaccatccagagacctggttggttttatctcactagggatccagttatggatgaattgtgcattgatttcttttgcaaagggagaaaattgctatcaac

SEQ ID NO: 470334 - DNA, 508 bp, Homo sapiens
gccaggagcagcaatcatgagcagtttttgctttgcccaacagcatgaacaggtaagccttggcatgctgccgcatccaaatgctccttctgttggatactgggcaggctagatagcctgaggcatgtagccccatgctgggcacctggctattgtaagcaaactcaggattggctgctcactgcttgaaaagccacatacaggacaaccaaagctgggtggaagcaaagcagctttattcaagtgctagccacttagaagacggccagaatcaagtctcaaaaagctatcttgaattctcaggtgggctaaaggagccttaaagggaaaggtagcacggaaacaatgtgcaggaatggtgtgargtgtaggtttgcttgtcattttttgatgatagacttgagtaatggaccatccagagacctggttggttttatctcactagggatccagttatggatgaattgtgcattgatttcttttgcaaagggagaaaattgctatcaac

SEQ ID NO: 470335 - DNA, 561 bp, Homo sapiens
tccagatggcagaaaagtaagttacaaatgagcagtggttaagggtttgaactgagaaagaggagcacatgtacttcccaattcttcccacaaaaacttttgggcgttacacataatgcctctctgcctgccagtgtctcttatgaaccaacataaaaagacactggcaggsagagagaaggcagcccaggaagggaccttcagacccaaggcctgatgtggtggtgagtgccctggttttttctttttgcatcacatgttacagacttggatctcaacaagtgagcaatgaggaaaggccaacaggcacagacaaaatgaataaataaatgcaatcccccaagaaaaagctcgctgtgtctagccaaagcaccaggaaaggggcagcctagcaacacaggaaacttttagacaataatgtccccactccagccaaataccagggaaaaactgtggccccacctccacccaggccaggaaaagccaggcagggaccccagacttccaccctcactggccagaacaataggctgcagggaagtgtcccaaccccaacctgca

SEQ ID NO: 470336 - DNA, 579 bp, Homo sapiens
gatgttaacgtcttgcaggaagagtctttgtttggggcagcaccttcagtggcagatgctaggtgctgatcatgagtgacagcaggacagtgtcttaacatggccgtctcaagctggtgaagtcctgctcttttgatggccacagagccctctggtgaagaatggcagtcctctggctatgtccacctctggttgggtgcaatctctatggattaggtaaacatctggtcctgttggcatgatgccttgtgaaatgtaaggtggagtctttttctaagatggagtcagttatgtyaagagttctctatacaacatacataacttatcacagtctaatggtttcaaatttttatgaccttgagtgaagaaatcttccttccctttaggtccttcatctcctttataacataattgtcttaaatatttcctctacctacattaagcatcacatcaggtggtattataatttttgcttcaatcatcaagtacgatttgagaaacttatgagaattaggagagtctattatattcaccctattttacacattctaacctatacgtgtgttttttcctctctga

SEQ ID NO: 470337 - DNA, 575 bp, Homo sapiens
tggatatcacattttctgaagcatggtgagacagtgagatgtatccatgggcctcatcagtgagaaatggcagaatataaaatttgtacccagttgctcaccccttgctcctgccttataccagcttctgaaattgyttttttttttcataatgacattcagtatgacccaaaattcatcttttacatatattttgtgcttgcttattggctggcttctccactaaagtattagctccaaagggcacactgtctgtcttgttcatagctgcacacacagattcctagacctgttattggcacacattgggtactcagaaaataattgctgaagaaaatggggcaaatagatcccactgtctgaacatgttattggttatttcattaaattatagccaagtttctcgtttttgtcctgcatggtaaaacattataaagtcaaaagtgtgttctggaggctttcaatggataagttgctagacctgtttctccctgctccctccaccccaactaagtacaacgataaacactgaaaatcatagcaaagataaccaaaagagggctctgaaaggtagt

SEQ ID NO: 470338 - DNA, 570 bp, Homo sapiens
ctgccacgcccatatctcagagccctagtgagttgtagagaagtttcaagagttagagtatttcctctgtacagtaactaaaataataaaagaccacaatttttattcataaaaattgaatataataaatgcrtttttatttgggagctcattagtgccttagtcacagattggatatacttgtgtctgtatctgtgcctgtgtttgccctgaggcttataaatcaagagataattattggtccaaaggaaaacagtatgtgcactggggaaatctgtgctattctcaactgctgctattctccagcctttcctcagttccagttcagatggatgcttgagcccagaactcacttttctagctctagtctgaaagggaattttggtttgcaaatggaaagggcaattggattcataagccatagccacttatcagacacttactgtttgccaaaaaacaacctcatttgctttccatctttatccttactataattcaaggggataaatattatccttcctcttttaaagatgcctactaactcttagggactgctcttaactgattcaa

SEQ ID NO: 470339 - DNA, 570 bp, Homo sapiens
ctgccacgcccatatctcagagccctagtgagttgtagagaagtttcaagagttagagtatttcctctgtacagtaactaaaataataaaagaccacaatttttattcataaaaattgaatataataaatgcatttttatttgggagctcattagtgycttagtcacagattggatatacttgtgtctgtatctgtgcctgtgtttgccctgaggcttataaatcaagagataattattggtccaaaggaaaacagtatgtgcactggggaaatctgtgctattctcaactgctgctattctccagcctttcctcagttccagttcagatggatgcttgagcccagaactcacttttctagctctagtctgaaagggaattttggtttgcaaatggaaagggcaattggattcataagccatagccacttatcagacacttactgtttgccaaaaaacaacctcatttgctttccatctttatccttactataattcaaggggataaatattatccttcctcttttaaagatgcctactaactcttagggactgctcttaactgattcaa

SEQ ID NO: 470340 - DNA, 528 bp, Homo sapiens
tgagagatttagggggtggagtaatcgcttaggcatcagcaaagaaggtttcaggcaaggaaatggaggggctggagtcagaagttgtgcggtgtgccctgaagctcagggcacaggtaggcagcacaggtagatgcgggtagatggcacaggtagatgcaggtagacatatgcctgggactgatgcctgggactcccctagtgatgctctcttcacctccaaaataaactacttgcactcaaacctttgtttcaggctctgtttctgggggaacccaaatgaaggcatctactgaacccactaagtgctccatattatattatagtagaggttcctgctatcacagagctaacattctaactcaccacctgtagggtggtgaatctgggrgaagtggggctgcatctgttaatgctgtcctccttagggtttattctcagttcttagccaaggagaagcctaagggaaccagtgattcacgccttgggacgactggatgaggattcggctgaaatcttacactatgt

SEQ ID NO: 470341 - DNA, 646 bp, Homo sapiens
tgcactttaaaaagactcaagaaagtagagtcatgatcatgagtcattaatgtgacatgcatctctgttgtacaaaatagaatcaaatgccaatgatgtctttttaatgtgtcttaacttacggaatgcttaatttgttaatagttgatggggatatttaattgcagggatgaatttttatggtccttctgaaattattaagcggatacaatatgctttcttaaacatgaggacatggcagtttctctttcttgctgtgaagccaacattttaatagtacgattttgctccagtaaaagatgggccaaagaaaacatttcatcatccaaatggtgttagattagatgagtctttagatactgagacttcccggtaagcaacataatataggagatttgcattaagggaattgataattccttctgtttcagttcttttcctgtttctttctatatattaatattttttttgtcctgcctgctaaatagctgttttctcaggttttctctttgtcctccactyttatttttccacaccagagtttccagtatagcaagtgggcaagtgccattaaagagggcaaaggccgattgtaagggtaagaggtgggggaactgaagaacacaggtcctgcccaaggaggcag

SEQ ID NO: 470342 - DNA, 646 bp, Homo sapiens
tgcactttaaaaagactcaagaaagtagagtcatgatcatgagtcattaatgtgacatgcatctctgttgtacaaaatagaatcaaatgccaatgatgtctttttaatgtgtcttaacttacggaatgcttaatttgttaatagttgatggggatatttaattgcagggatgaatttttatggtccttctgaaattattaagcggatacaatatgctttcttaaacatgaggacatggcagtttctctttcttgctgtgaagccaacattttaatagtacgattttgctccagtaaaagatgggccaaagaaaacatttcatcatccaaatggtgttagattagatgagtctttagatactgagacttcccggtaagcaacataatataggagatttgcattaagggaattgataattccttctgtttcagttcttttcctgtttctttctatatattaatattttttttgtcctgcctgctaaatagctgttttctcaggttttctctttgtcctccacttttatttttccacaccagagtttccagtatagcaagtgggcaagtgccattaaasagggcaaaggccgattgtaagggtaagaggtgggggaactgaagaacacaggtcctgcccaaggaggcag

SEQ ID NO: 470343 - DNA, 604 bp, Homo sapiens
accaagtctgatggttaatactgggtgtcaacttgattggattgaaggatacaaagtattgtttctgcatgtatttatgagggtattgtcaaaggagattaacatttgagtcactggactgggagaggcagacccaccctcaatctgtttgggcaycatctaatcagctgccagcgtggctaggataaaagcaggcaggaatgtggaaggactagattggctgagtcttctggcctccatctttttcctgtgccaaatgcttcctgcccttgaacatcagactccaatttcttcagcttttggactcttgggcttacaccagtgaattgccaggggctcttggaccttctgccacagattgaaggctgcactgtcaacttccctactttagaggttttgggattcagacaggtttctttactcctcagcttgcagacggcttattgcgggacttcaccttgtgatcatgtgagtcaattctccttaataaactcccctttatatatacatctatcttatgagtcctgtccctctagagaaccctcactaatacaccaaggaacatccttggtgaaggtttagcatcacacaggaccagaccagc

SEQ ID NO: 470344 - DNA, 579 bp, Homo sapiens
gacaaaaaacataattggaagtgagaaacctagttcctggccttgattgctgatggctgatcttcttccagagtcaattccaccccactctcaagttcagtatccctgtgaccctcccgatcaatcccctccctccagctctgatcccctttgtccccagaatgccccaaacaaaagcacacagtgttaataaataaaataattttgttgcttaactaaatatgtttacacagaaaacgagaaagtgataccctaaagtgcagcattggcaattggagaccagaaatcaagaacagtagaaaggatacttaggaggtagaacaagaggggctaagcagaatgaataacagattttttaattmgaaaagtttccccaataaagggcctacaggaaggaaatgtgcttagaatagggattggatgggaaatgaataggtcagtttgcacatctggagcctcaaatgcacgtacaaggcccattcaaagggaaatgtctagctggtggctcatgtttgcctagagtagaggagaaaagtctaggcatcattatcataaatgacttttcccagttcttgaatg

SEQ ID NO: 470345 - DNA, 585 bp, Homo sapiens
tcattagccccattgccacagggcttagagatcctctctgatacaggctgctggggaaaggggaagataatgtgtctcatttctccccattgggaagtgaaacagacacagagggtggccaaaaggtccattttattgtcatacaatcgtggtcaccgtgacaaggagggtggcagcgtggccaggcacaggatgcacccaaggagagcagcacagtagcaaaaccagagctgcggaaagtggcgaagcggcggctgcccctaccccccaccttgtccacattcttccacctgctggtgtccacctctgcccacatctcggatcccatcccagcgaaccccaaactcactgtcaacattctcctagcacctaygcattgcccaacaagaagttcaagctaacatcatcccacagagtgaagttctaggtcatgctctaggcttgggacacccgggttctattcgctgggaggctcctagctactttgaatgacttagaagtcactttgatctttcccagccttctgttttctccctctgcctttgatgtggggaaccagtattggagacagcgctgtgcagatgc

SEQ ID NO: 470346 - DNA, 585 bp, Homo sapiens
tcattagccccattgccacagggcttagagatcctctctgatacaggctgctggggaaaggggaagataatgtgtctcatttctccccattgggaagtgaaacagacacagagggtggccaaaaggtccattttattgtcatacaatcgtggtcaccgtgacaaggagggtggcagcgtggccaggcacaggatgcacccaaggagagcagcacagtagcaaaaccagagctgcggaaagtggcgaagcggcggctgcccctaccccccaccttgtccacattcttccacctgctggtgtccacctctgcccacatctcggatcccatcccagcgaaccccaaactcactgtcaacattctcctagcacctacgcattgcccaacaagaagttcaagctaacatcatcccacagagygaagttctaggtcatgctctaggcttgggacacccgggttctattcgctgggaggctcctagctactttgaatgacttagaagtcactttgatctttcccagccttctgttttctccctctgcctttgatgtggggaaccagtattggagacagcgctgtgcagatgc

SEQ ID NO: 470347 - DNA, 599 bp, Homo sapiens
ctggctgcaagagcccccagaggcattgttctgggacttcctaccctggctcccacagcagaagcagtgaggccgtggtctcgtgcggaactctacctcttcccagggcttcctttagggcgaaacaatcacaagccctttgcacagagcacccaagaaagttctcttcctgcagctccagatggtggagctgggctcttctggcagggggtctggtgcttcccggagagccgagccgcgtttaacccgtggcatgcccggcccggtttacccaggagaggatgggacgaagttggagttgggaggcttgggatgcagccccagctctgctgcaggcagtggtctgattaatcccttcctctttgtgcctcagtttccctctccatgaagtggcagcagagatccaagtgcctgctgactccccatctgccctaggattagtgaatgagagcctcgagctccctsaaagacctctggctgcagtgtggacttagctgccatctgccccatcctcgtccttagtgggacaggtaggaatttgtctccaaagtccttgttgtaggagttgctctctgaatgcaccatctgcacgacaggct

SEQ ID NO: 470348 - DNA, 408 bp, Homo sapiens
tatgtttagtaaagactgggtttcgccatgtttgccaggctggtgtcgaactcctgacctcaagtgatccacccacctcggcctcccaaaatgctgggattacaggcgagagccaccgcgacctgcttagacattctacttcgttagagccttagagcctatctcagatactttcttccrggcaccttgcgtatttctcaacttttgccgataacaacatgttattggcttgtctttttctcttacctagattatcaaccttcaagttttttgtgcatgatttgatccaccccttcccaccacatcaccacagtacctaccagtggtgatgagagctaccgttgactttgccatattttgcagagcggtgaagacactagctttggagaagtacaatggcaaggtcgc

SEQ ID NO: 470349 - DNA, 569 bp, Homo sapiens
ctggaaagaaacagaattgggatttgaacyaggtcccgtctccgctgcgtgtagcaccctgctttgtaggcacttagtaaacgtctgtttgatggatttctgaccatcagagtgacccagatttcaacccaagtatttgccagagtctcataggagtgccctggggctggaagatatgtcgttgtagaaggcaggatcacacctgctagaagcagagcccagcgaccctgtcccgggtctgctgaaccaggcctctgcccaggacctttggaggagcatctgggtgtggctggactaggcgaggaatgtgcttacttattctcagcataaagccagaaggcaagaccctgggtaggtctgtccgatgagcttcccttgtcctctgtggtaaccctgaggctctgtgacctagctgagggccctctgtggcccacctcaccttgtctctccagcctcacctcgaagcttccagccacaccctagcgtgcctccagccttcaggcctttgttctttctgcccagagtattacttcttgccttacccctttcttccccgtgcatccttctag

SEQ ID NO: 470350 - DNA, 569 bp, Homo sapiens
ctggaaagaaacagaattgggatttgaactaggtcccgtctccgctgcgtgtagcaccctgctttgtaggcacttagtaaacgtctgtttgatggatttctgaccatcagagtgacccagatttcaacccaagtatttgccagagtctcataggagtgccctggggctggaagatatgtcgttgtagaaggcaggatcacacctgstagaagcagagcccagcgaccctgtcccgggtctgctgaaccaggcctctgcccaggacctttggaggagcatctgggtgtggctggactaggcgaggaatgtgcttacttattctcagcataaagccagaaggcaagaccctgggtaggtctgtccgatgagcttcccttgtcctctgtggtaaccctgaggctctgtgacctagctgagggccctctgtggcccacctcaccttgtctctccagcctcacctcgaagcttccagccacaccctagcgtgcctccagccttcaggcctttgttctttctgcccagagtattacttcttgccttacccctttcttccccgtgcatccttctag

SEQ ID NO: 470351 - DNA, 569 bp, Homo sapiens
ctggaaagaaacagaattgggatttgaactaggtcccgtctccgctgcgtgtagcaccctgctttgtaggcacttagtaaacgtctgtttgatggatttctgaccatcagagtgacccagatttcaacccaagtatttgccagagtctcataggagtgccctggggctggaagatatgtcgttgtagaaggcaggatcacacctgctagaagcagagcccagcgaccctgtcccgggtctgctgaaccaggcctctgcccaggacctttggaggagcatctgggtgtggctggactaggcgaggaatgtgcttayttattctcagcataaagccagaaggcaagaccctgggtaggtctgtccgatgagcttcccttgtcctctgtggtaaccctgaggctctgtgacctagctgagggccctctgtggcccacctcaccttgtctctccagcctcacctcgaagcttccagccacaccctagcgtgcctccagccttcaggcctttgttctttctgcccagagtattacttcttgccttacccctttcttccccgtgcatccttctag

SEQ ID NO: 470352 - DNA, 437 bp, Homo sapiens
tccatggtccggcctcagaaggtgcggaacattcgtcaaatgcctgaggacctgccaccccatgcactctgagcccagatcatggcttcaggtcatgtgtgaccacagccccctgcctgcctggctgaggcgaagtctgtctcctctggctcacacttcgtccgtctgtaaaatagagatartactatttggccccctcatggacacagaactgctgtgtggatggtgtgggacgattgtgggaaatggctttttagcaagtgttaatgggttgcagcctgccgacatagcatttaaactgttttcaataatcagccatccaggtagaaccccttagattgttcctgcaatacctgcccctaggtggtgacccatagctctgtcacctccctctccaaaacctaagtttagcccagactagcacagcatgccctgag

SEQ ID NO: 470353 - DNA, 437 bp, Homo sapiens
tccatggtccggcctcagaaggtgcggaacattcgtcaaatgcctgaggacctgccaccccatgcactctgagcccagatcatggcttcaggtcatgtgtgaccacagccccctgcctgcctggctgaggcgaagtctgtctcctctggctcacacttcgtccgtctgtaaaatagagataayactatttggccccctcatggacacagaactgctgtgtggatggtgtgggacgattgtgggaaatggctttttagcaagtgttaatgggttgcagcctgccgacatagcatttaaactgttttcaataatcagccatccaggtagaaccccttagattgttcctgcaatacctgcccctaggtggtgacccatagctctgtcacctccctctccaaaacctaagtttagcccagactagcacagcatgccctgag

SEQ ID NO: 470354 - DNA, 602 bp, Homo sapiens
ttgaagtgctaattatctaccagtgtattcaaaacctagtgatttccaaacctgctggagcttcttatggaaataaayatgtgcatcccaatgtagggttaaaaggattcccagaaacctacaccaaaaatataagtaattatcctctgagcagggatttctctccaatttcactgcttcccacaaggggaacaatttcttgagaacataatagtaaaggaaacaatacaccaccaaagaggaaaataacatctttataattacagattagttcccaaattgcacacctacatactcactctgctttgaatttgagtaacttcgatgaagcttgtctatccccttcagctatcaacatttacagctcaacagctcaatcacaagattttccatacagaaaccccaggctgcaaaagcactctcaaatgacccactcgtttcactcttgaagaatgtggaaaacacagcgacagagagcacaaatcggggttaataccccggcaggagagagggagctctggtatctctaaaacagtttcagtgtgccagttttagagattacccaatcatttctaagccgttcagatttttatcagacagga

SEQ ID NO: 470355 - DNA, 602 bp, Homo sapiens
ttgaagtgctaattatctaccagtgtattcaaaacctagtgatttccaaacctgctggagcttcttatggaaataaatatgtgcatcccaatgtagggttaaaaggattcccagaaacctacaccaaaaatataagtaattatcctctgagcagggatttctctccaatttcactgcttcccacaaggggaacaatttcttgagaacataatagtaaaggaaacaatacaccaccaaagaggaaaataacatctttataattacagattagttcccaaattgcacacctacatactcactctgctttgaatttgagtaacttcgatgaagcttgtctatccccttcagctatcaacatttacagctcaacagctcaatcacaagattttccatacagaaaccccaggctgcaaaagcactctcaaatgacccactcgtttcactcttgaagaatgtggaaaacacagcgacagagagcacaaatcggggttaataccccggcaggagagagggagctctggtatctctaaaacagtttcagtgtgccagtttyagagattacccaatcatttctaagccgttcagatttttatcagacagga

SEQ ID NO: 470356 - DNA, 650 bp, Homo sapiens
attgtttcgagtgttttaaaactttatttcggctgggcgcgatcgctcatgcctgtaatcccagcactttgggaggctgaggcaggaggatcacttgaggtcagaagttcgagaccagcctggccaacaaggtgaaactctgtctgtactaaaaatacaaaaatcagccagacatggtggcgcatgcttgtaatcccagctacttagggggctgaggcaggagaatagcttgaacccgggaggtagaggttgcagtgagccgagatcgcgccgttgcactccagtctgggcgacagagcaagacactgtctcaaaacatacatatatacatamataaataaataaataaataaataaatctttatttcattggttttgtcccacatgtagccttccacaacttttaaacaagagattctaattcactggtcccattaggggttattcgccttgaaccaactggctagattgtgggtaatagcgagggtgatcatcccgtagaattcaaactcggatacttttaagagtgaagatatccactgttaacaagtacagcaggcataaattggggctgtttgaggcaaaccaggacctatggtcaccttggtgatggcagatcagttcctatgttaatatacgcgatctgtatg

SEQ ID NO: 470357 - DNA, 617 bp, Homo sapiens
ctagggaagcctcagaagagctgagaccgataggtgataaagatgagccacttacgttgggcgttagaggcaaagcaggggaagtagcaggttttagggcccatatggggaaagcacttgctgtgttgcaggagctcacaggccaggtagatgaggttgaaggtggagaatacacgagaccagatcattcaggacctggtaagtcatagtgaagaatctgggccgggcacagtggttcatgcctgcaatcccagcactttgggaggccgaggtgggtggatcacttgaggtcaggagttcaagaccagcctggccaacatggtgaaacccctgtctctactraaaatacaaaaattagcgggggcgtggtggcgtgcacctataaccccagctacttgggagggtgaggcaggagaatcgtttgaacctgggaggcagaggttgtagtgagctgaggtctcaccactgcactctagcctgggcgatagagtgagactccatctcaaaaaaaaaaaaaaaaaaaaaaaagaatctggattttaccaaaattagaatgagtagctactactgaaaatgtcttaagcaagggagcaacaagctctgtcatataaaaacct

SEQ ID NO: 470358 - DNA, 617 bp, Homo sapiens
ctagggaagcctcagaagagctgagaccgataggtgataaagatgagccacttacgttgggcgttagaggcaaagcaggggaagtagcaggttttagggcccatatggggaaagcacttgctgtgttgcaggagctcacaggccaggtagatgaggttgaaggtggagaatacacgagaccagatcattcaggacctggtaagtcatagtgaagaatctgggccgggcacagtggttcatgcctgcaatcccagcactttgggaggccgaggtgggtggatcacttgaggtcaggagttcaagaccagcctggccaacatggtgaaacccctgtctctactaaaaatacaaaaattagcgggggcgtggtggcgtgcacctataaccccagctacttgggagggtgaggcaggagaatcgtttgaacctgggaggcagaggttgtagtgagctgaggtctcaccactgcactcyagcctgggcgatagagtgagactccatctcaaaaaaaaaaaaaaaaaaaaaaaagaatctggattttaccaaaattagaatgagtagctactactgaaaatgtcttaagcaagggagcaacaagctctgtcatataaaaacct

SEQ ID NO: 470359 - DNA, 657 bp, Homo sapiens
gcctgggtgacagagcgagactccgtctcaaaaaaaagaaatcacaggtccctaggggcctagtggcccatcggtgacaaagggcaggtggacctggtgtggctgcaccagaggggccttctcatcctgggaactgggctaaaaaccaagcccagactgaggcccatgcttttgtccccccagccgcctcgaggtccctccttacctgccccctgcacccctaccccatcttaactctttttttttttttccaagatggagtctcgctctgtkgcccaggctggagtgcagtggtgcaatctctgtcccctgcaacctctgcctaccaggttcaagctattctcctgcctcagcctcccgagtagctgggattacaggtgtccaccaccacacccagctaatttttgtatttttagtagagacgggtttccccatgttggccaggttggtctcgaactcctgacctcaagtgatccgcctgccttggcctcccagagttctgggattacaggcgtgcgtgagccactgcgcctggcaccgcaccttaattttgaggaagtgttgggaaagctggctctgacatctcttgtgaggcaagcccagctggggaaggtgtttcctgcctgacttcctccccagaagcaatagcagggcttg

SEQ ID NO: 470360 - DNA, 657 bp, Homo sapiens
gcctgggtgacagagcgagactccgtctcaaaaaaaagaaatcacaggtccctaggggcctagtggcccatcggtgacaaagggcaggtggacctggtgtggctgcaccagaggggccttctcatcctgggaactgggctaaaaaccaagcccagactgaggcccatgcttttgtccccccagccgcctcgaggtccctccttacctgccccctgcacccctaccccatcttaactctttttttttttttccaagatggagtctcgctctgtggcccaggctggagtgcagtggtgcaatctctgycccctgcaacctctgcctaccaggttcaagctattctcctgcctcagcctcccgagtagctgggattacaggtgtccaccaccacacccagctaatttttgtatttttagtagagacgggtttccccatgttggccaggttggtctcgaactcctgacctcaagtgatccgcctgccttggcctcccagagttctgggattacaggcgtgcgtgagccactgcgcctggcaccgcaccttaattttgaggaagtgttgggaaagctggctctgacatctcttgtgaggcaagcccagctggggaaggtgtttcctgcctgacttcctccccagaagcaatagcagggcttg

SEQ ID NO: 470361 - DNA, 657 bp, Homo sapiens
gcctgggtgacagagcgagactccgtctcaaaaaaaagaaatcacaggtccctaggggcctagtggcccatcggtgacaaagggcaggtggacctggtgtggctgcaccagaggggccttctcatcctgggaactgggctaaaaaccaagcccagactgaggcccatgcttttgtccccccagccgcctcgaggtccctccttacctgccccctgcacccctaccccatcttaactctttttttttttttccaagatggagtctcgctctgtggcccaggctggagtgcagtggtgcaatctctgtcccctgcaacctctgcctaccaggttcaagctattctcctgcctcagcctcccgagtagctgggattacaggtgtccaccaccacacccagctaatttttgtatttttagtagagacgggtttccccatgttggccaggttggtctcgaactcctgacctcaagtgatccrcctgccttggcctcccagagttctgggattacaggcgtgcgtgagccactgcgcctggcaccgcaccttaattttgaggaagtgttgggaaagctggctctgacatctcttgtgaggcaagcccagctggggaaggtgtttcctgcctgacttcctccccagaagcaatagcagggcttg

SEQ ID NO: 470362 - DNA, 469 bp, Homo sapiens
ctggaaaccacggtcctatggtatgtcagtggaatggcaggtaaaaagattcaagacgtacgggtacagaaagagaaacagccaaaaccctacatattcctgcgatggataagaagtaatgccaattatctgaaggatactgaatgtatgttagagtgaaaaaataatttcttgcataaacagaaaaaycttcatgactaattcacattccatgttacataactgaatacattagcaggtatgtctaatgaaaaaaaaatcaaggctgtgctgaagagctttgttcactctaacacacatacaaacacacacacacacacacacacacaaaggaagtaagaaagaaaaccttggtgacttaatcagatacttattcctgactttcaaacttagcggctgagaacaaaaccatttgtatttcccatgaccctgtaggttagctggggtttctcatgaagctatactcagc

SEQ ID NO: 470363 - DNA, 604 bp, Homo sapiens
gtagtgtgtgtggtatgaagttgttcatattggcctgcaagcaagcattctggcaagataaaattatataaacaaatttaaaaatattctttttggatatgttatggtctgaatggtctgaatgtatgtgttcctccaaaaattgtatgccaaaatctracccacaaaatgtgttggggttaagaggtaaggccttttgtgtagtactgaagtgatgagggaggagccctcatgaatgggattagtgcccatatgaaagaggcctgaaggagcttgttggtctcctcccccatgaaaggacacatagaaggtgctgtctatgaggaatggatgcacacctgacaccaagtctgctggtgtcttgatcttagacttcccagccttcaaactgaaagcaatacatttttgttgtttataaattacccagtctaaggtattttattagagcagcctgaatgaactaaaacagtatataaaataattatttgtaaattgtatttgcaaaatttagttcaaaagtaaagtgacttaagcaaaggtagctggaaaatgatggcaatattttaaaggatcaaaaaataccaggacccgattcttcaggaca

SEQ ID NO: 470364 - DNA, 625 bp, Homo sapiens
tatttatcctttgagcacaattccacatttttgagttatatttagctagcattccttgttgacctgttttcttgactatgagcacatcagaaagagccttaccattttctgccataaataaatccttcattagtttcttaatcagattcaagagcaaggtgagagaaagtggctgagcaggaggtactgtaaagacactcttcatctctcatcttcacrctgggctaagcttcaagtcagtgttagggatgacacagaaattgaaagcacagttgatgagtaagtaaccagtggtgaaaagggacctgtgcggtgaagggttaactcagcaggtcttagttgtccaaaccctgcacattaaaactctggtccttaactggctcctgggaggtaacctctaagcccttatgtggcagaataggcaagcccccaaaatgggggttagaacaggagggttcttggcttcacccaagacagaattcaagggcaagccaatggtgttagacagcaatcttttttgaatggtacttctccttgtggagcaaggcacaacctatgggccattgacaactgtatttatactcatgttaacccacttttaattacctgcaaattaaggggtagg

SEQ ID NO: 470365 - DNA, 578 bp, Homo sapiens
caggctcaacctcctgggctcaagtgatcctcccaaatagctgagactacaggcatgtactaccacacctagctaattttttattttttatttttgtagagatgaggtctcactatgttgcccaggctggtctggaactcctcggctcaagggatcctccctcctcagcytcccaaagttctgggattgcaggcatgagctactgcaccctgcctatagtaggattttcaaaaggaccttggaagcaccacctgccactcaatcccagatggccttctcccattctgtgtcaatgccgtcgtaaaaagaaatacaaatgttcgcccagatgcctgtcaagagcgtccaaccccctctctccggccaaggagttttataatctccattcatacactgtgctcggaatttaattaactctatggaggaacgtgccatcaggaccagcttatagcggctgtaacattgaggggtttatggccagatattacaagcaaagccatagggagatgggctcagagccaggcaaatcagtggcaagaaggataaagatgtgttgaaaataaaatttaattttccag

SEQ ID NO: 470366 - DNA, 578 bp, Homo sapiens
caggctcaacctcctgggctcaagtgatcctcccaaatagctgagactacaggcatgtactaccacacctagctaattttttattttttatttttgtagagatgaggtctcactatgttgcccaggctggtctggaactcctcggctcaagggatcctccctcctcagcctcccaaagttctgggattgcaggcatgagctactgcaccctgcctatagtaggattttcaaaaggaccttggaagcaccacctgccactcaatcccagatggccttctcccattstgtgtcaatgccgtcgtaaaaagaaatacaaatgttcgcccagatgcctgtcaagagcgtccaaccccctctctccggccaaggagttttataatctccattcatacactgtgctcggaatttaattaactctatggaggaacgtgccatcaggaccagcttatagcggctgtaacattgaggggtttatggccagatattacaagcaaagccatagggagatgggctcagagccaggcaaatcagtggcaagaaggataaagatgtgttgaaaataaaatttaattttccag

SEQ ID NO: 470367 - DNA, 157 bp, Homo sapiens
tgtggtagcagcctgaacaggactaagacagtaggagacagacaggagagcatgtttaggtgcaaaaatcttgactttaccctcacagacccttggtgatgccaaaggaaayctctaaagggagagaaggaacccagaaagcaagagggagaataag

SEQ ID NO: 470368 - DNA, 643 bp, Homo sapiens
tcctaaaacaaacactatcattttcctacaataataattgtgattatgtacatctatatttctagtcaatctaatcaaataggtcaaaattaaagaagaaaagccgtgccttgattgcatacactcaatctacaagctttcctgagttttcgtttaaaattatatttagttcattcttttatacaagtatccatttgtttaaaattatatttagttcattcttttatacaagtattttaataaagtaggagaacttttagtattctatcaactctttattgacatatgcattatctatattatgtatttaatactgaaagaagttttatactagcccatatcccttttcatggctggcctggcgttcctggccatcagttgtgatatacttataaatacagttttttttaacatcctaagccaagcaaaattcagaaggtggaacataccgaaaatacttaaggatatactctaaaggcaaatgtgtgtttgtgctttttagattawgcatagcactgcttccttatattactgtggactggacttgactcataggtattttacccaatgaaacatggaagactatttccttttataattcgtcactgtaaagcaaatgtctaaattggaaatggtaaaaacg

SEQ ID NO: 470369 - DNA, 555 bp, Homo sapiens
gtattaattttcctgagctgtaacatctctccataatatactgtgctatactttcctttggctgygaaaattatttcatacattttatcaaaatctataaaacagaaatttctggctttttttgtgagtgtcatctttcccaaagaaatctctatcacatagatatttctccaccaaagaaacatatatagccaagtcctaaacacttttacataatttgcacatcaaatgtgcatctatttttcccctggaaccattgatatataatatgaataatgagcatatatgtttagccataaaataaatgatttacttcccttcccattacttaataaaaagtgttagtaacagagtgagagtgaaccaaagcctaggtgccaccacgagtctaggaggaattcatggtaagtaaagaaaggcaacctggttagctcccacattcggactcaaggatctcagaagggtgaagcaccgcaaggtttctgggagtttctgtgggagctgcagaatctttgcttctgtttctgattgaaaaggtatcagaatcctcagaaa

SEQ ID NO: 470370 - DNA, 597 bp, Homo sapiens
ctgcagtgagtttttgtgtttttaaatgaatgcttcaagacaatttggtaacgctaaaataaatgtttaaaaaatatatgcaggccgggtgcggtagctcacgcctgtaatcccagcactttgggaggccgaggcgggcggattgcctgagctcaggagttcgagaccagcattgacaacacggtgaaaccccatttctactaaaaatacaaaaaattagcccggcgtggcggcgtgtacctgtagtcccagctactcgggaggctgaggcaggagaattgcttgatcccaggaggcggagcttgcagtgagccgagatcrcaacactgcattccagcctgggtgacagagccagactctgtctccagaaaaaaaaaaaaaaaaaaagaaaaggaaaaaaaacgcatgcacacgtatacataggtttcttttttattacgttaattttttaataaaggctaaaatttaaaaataaacgtgtcacatattaatatatccttttggtctttttttaaaaaaaatttggctcaggcctttcagggatgaatgtcacatgtcaatgtagtacacagtttttgtttgattcagtgagctatc

SEQ ID NO: 470371 - DNA, 597 bp, Homo sapiens
ctgcagtgagtttttgtgtttttaaatgaatgcttcaagacaatttggtaacgctaaaataaatgtttaaaaaatatatgcaggccgggtgcggtagctcacgcctgtaatcccagcactttgggaggccgaggcgggcggattgcctgagctcaggagttcgagaccagcattgacaacacggtgaaaccccatttctactaaaaatacaaaaaattagcccggcgtggcggcgtgtacctgtagtcccagctactcgggaggctgaggcaggagaattgcttgatcccaggaggcggagcttgcagtgagccgagatcacaacactgcaytccagcctgggtgacagagccagactctgtctccagaaaaaaaaaaaaaaaaaaagaaaaggaaaaaaaacgcatgcacacgtatacataggtttcttttttattacgttaattttttaataaaggctaaaatttaaaaataaacgtgtcacatattaatatatccttttggtctttttttaaaaaaaatttggctcaggcctttcagggatgaatgtcacatgtcaatgtagtacacagtttttgtttgattcagtgagctatc

SEQ ID NO: 470372 - DNA, 597 bp, Homo sapiens
ctgcagtgagtttttgtgtttttaaatgaatgcttcaagacaatttggtaacgctaaaataaatgtttaaaaaatatatgcaggccgggtgcggtagctcacgcctgtaatcccagcactttgggaggccgaggcgggcggattgcctgagctcaggagttcgagaccagcattgacaacacggtgaaaccccatttctactaaaaatacaaaaaattagcccggcgtggcggcgtgtacctgtagtcccagctactcgggaggctgaggcaggagaattgcttgatcccaggaggcggagcttgcagtgagccgagatcacaacactgcattccagcctgggtgacagagccagactctgtctccagaaaaaaaaaaaaaaaaaaagaaaaggaaaaaaaacgcrtgcacacgtatacataggtttcttttttattacgttaattttttaataaaggctaaaatttaaaaataaacgtgtcacatattaatatatccttttggtctttttttaaaaaaaatttggctcaggcctttcagggatgaatgtcacatgtcaatgtagtacacagtttttgtttgattcagtgagctatc

SEQ ID NO: 470373 - DNA, 597 bp, Homo sapiens
ctgcagtgagtttttgtgtttttaaatgaatgcttcaagacaatttggtaacgctaaaataaatgtttaaaaaatatatgcaggccgggtgcggtagctcacgcctgtaatcccagcactttgggaggccgaggcgggcggattgcctgagctcaggagttcgagaccagcattgacaacacggtgaaaccccatttctactaaaaatacaaaaaattagcccggcgtggcggcgtgtacctgtagtcccagctactcgggaggctgaggcaggagaattgcttgatcccaggaggcggagcttgcagtgagccgagatcacaacactgcattccagcctgggtgacagagccagactctgtctccagaaaaaaaaaaaaaaaaaaagaaaaggaaaaaaaacgcatgcacacgtatacataggtttcttttttattacgttaattttttaataaaggctaaaatttaaaaataaacrtgtcacatattaatatatccttttggtctttttttaaaaaaaatttggctcaggcctttcagggatgaatgtcacatgtcaatgtagtacacagtttttgtttgattcagtgagctatc

SEQ ID NO: 470374 - DNA, 583 bp, Homo sapiens
ctgcacgctccttatgagaatctaatgcctgatgatctgtcactgtctcccatcaccctgagatggcaccatcttgttgtgggaaaacaagctcagggctcccactgattctacattatggtgagttgtataattatttcattatatatcacaatgtaataataacagaaataaagtgcacaataaatgtaagcacctgaatcatccccaaaccatttcccctgacccccattcatgkaaaaattgtcttccacaaaaccacaccctggtgccacaaaggatggggaccactgctctaagtgaccatacagcctgtgattcccagaaggaacaaaaattatcaggtccattaaaacataaatttgggcatgcaaagaagcactccgttatcaaatggaagttatacagatgatattaatatatttattttgttttttaatgatagtctattaaaatatttgtttagatagaccttttataaaacaattactttttaaatattttatagatctctggtcatcttggtctatgaatttataatgcagtgtggtcaatggttacctgactgtgcagtgtgttaggg

SEQ ID NO: 470375 - DNA, 564 bp, Homo sapiens
atggcaggataaggataggaatatgtgtttctggataacttctccagtaaaatttttaccgtaacacttgctactaatcttgatattactgagcaagcatcaatagccctcaaaacaagcaaaaagttgtagtgacagtgtctctcagtgatcttgtattgacttttctgaaacagtcaggttgatgttgacttatagttatttctgtttgatagtctcccattttatctatcagtgttggcagatattataccttgctagatctgtcttttaggaaaaataaatctggtcctagagttggtaggttgaatgacaatgctgctggctgttttctgaaaataccattgagatgaagaaatacagtatcttctttarctaaagaaacaggccaggtgcagtggctcatgcctggaatcccagcactttgggaagccgaggcaggaggatctcctgagaccaagaatttgaaaccatcctgggcaacatagtgagatcccatttccacaaaaatattaaaaattagctgagcttgatgtttcatgcctgtggttccagctactcagg

SEQ ID NO: 470376 - DNA, 534 bp, Homo sapiens
tcattggagcaaagacatggaaccaccctaaatgtccaccaacgatagactggataaagaaaatgtggtacatatacaccatggaatactatgcagccataaaaaaagaatgagatcttrtcctttgatggacatggatggagctggagaccattatccttagcaaactaatgcaggaacagaaaaccaaataccgaatgttctcacatataagcaggagctaaatgatgagaacacatggacacatagaggggaacaacacagtactggggcctatcacagggtaaagggtgggaggaggaagaggatcacaaaaaataactaatgggtactaggcttaatatctgggtgatgagataatttgtacaaaaaaccctcaagacacaagtttgtttacctatgtaacaaacctgcatttgtacccctgaacttaaaagttagaaaagaaaaagttaaaaaactaatctaattggagccctaaagaacgttcccactggatccttttccagtggtaacaaatgattgtatacttat

SEQ ID NO: 470377 - DNA, 633 bp, Homo sapiens
actaatgggtactaggcttaatatctgggtgatgagataatttgtacaaaaaaccctcaagacacaagtttgtttacctatgtaacaaacctgcatttgtacccctgaacttaaaagttagaaaagaaaaagttaaaaaactaatctaattggagccctaaagaacgttcccactggatccttttccagtggtaacaaatgattgtatacttataagcattatcaataaattgttgattattatcagcaagacacaaataaattctagtgaatattgtaacttcataacacatggccaagggttatattttttttttcaggattctattwaaaaaatactctcctaggccaaccttctacatttaattggaaaacacgcaaagcatatgaaatatttggttgtgaaatgcatttgaatttacaccttataaacatctttatttatttatttatttttttgagacggtttccctgtgaaacctgccctggaatgcggtggtgtgattacggctcactgtagttttgacatatcagattcaagtgatcctccccctcagcctcccaagtagctgggattacaggtgcatgccaccatacctagctaatttttttaaataaatattttttgtacag

SEQ ID NO: 470378 - DNA, 521 bp, Homo sapiens
tagtcttgattatggcagtggaagtcaacatgttaattttatggatgatgtattctttatttatttaaatctggcattgatgtttatagttttgttgctttcatgcagttacttctccatcatataaaaaattagcttaattctctacatacatacattatttgtgataatatgttcaaagaagttagcatgaactttccctcaaactatccccattgcagaaagataatcagcacataattagagaggagtgaatttccttaccaatgtttgtagtggatgtgaaagttaaccaagaccaggagctacaacatgtctaggaggaattcatggtaaagtaaaaagaggcarcctggttagctcccacatttggactcaaggatctcagaagagtgaagcacctgaaggtttctgggagtttctgtgggagctgcagaatctttgcttctgtttctgattgaaaatgtatcagaatcctcagaaaaggaggtgttattctctgatgtgctcagcctggttga

SEQ ID NO: 470379 - DNA, 671 bp, Homo sapiens
tgctagtgttaccttaactaagacaaattccttaaaagatgtggggtcttcttcccttgcacaattgtctctggacttaactgccagtgtgggattgcatttcccagccctcttatatttaggtggggtcatgttcttacaaaaggtatacaagcagaagagayttgtgcagcttccagggctgcagtggaaggagggcatgcatggaggaggagggcatgcctcctccatgtttggccttcccatcactggctggaagtgaaggcctacagggctctaggatggcgggaccatgcgatggaaggtgcctgggtccctgcatcaccagtggaaggctgtctgtcatccctgcctaggactttacatgagcaagatgtaaagttttattttgttaaatcactgtgatttgggagtttacctgttgctgtttatcctacctaatacattatttaacattactatggcgatgagaggaatgaggaagggctagtaactctaaagctaaggtattaggagctctcgagatcaattcatattctaaaaagcatcaacatatggcatgaaatactgactttttgcttatgtcatgcagttatcttagagtctgaggagtcatggtttattttgtgtgctatttggtttctcatgcaaactattttaattaataatat

SEQ ID NO: 470380 - DNA, 564 bp, Homo sapiens
ttagggcatgcagtcggtgtccattgcagattgctaggtgtgtggggaaaaacctcaacgtatctgttgttagaagtaaattgttgagtgactgtgtgagtataagcaaaggagtaggaaaagcacctttggttttttcaatattttagagaatccagatgtcttggctctgagccagtcatctgaggaccaaaccaggccgtgcctagtagtgaacctcttctcttgacccaacaagattacaaaaattaaaaacaaacraataaacagagacaggtcaaaaaaagtaaacaaaaaccaaaacagcaagtcaaatgaaagcagggctcttaatcaaagttcatcaagaaggtaagaaaaattgatatggtctgggaaaacatcagagctgtgagacagcattccaactcttgtttttctcccactttttcttttttcttttcttttcttcccccccccaccccccccattgagacagggtctttctctgtcacctagggtggaatacagtggtgcaaccatggctcactgcgaactcaacctcctaggctcaagcaagtttcc

SEQ ID NO: 470381 - DNA, 626 bp, Homo sapiens
ctaaaattacttcagcactgattttttgttytttgagacggagtcttgctctgttgttcaggctggagtgcagtggtgtgatctcagctcaccgcaacctccgtttcccgggtttaagcgattctcctgcctcagcctcctgagtagctgagattacaggcatgtgccaccacacctggctcattttttgtatttttagtagagatggggtttcaccatgttggtcaggctgcttctgaactcctggcctcaaatgatctgcccgcctcagcctcccaaagtgctgggattacgggcatgagccaccgcgtccggccattcagcactgatttttgaacaataaaaacaaccaaaaagcatctaaaagctgcatatatttctgtgtcagaaaattatttacattttctggaatttctcttgagtgaatactagttagaagtttcccaagaaacttgtagggagggtctaggcattcagggaggcataaaagaacaatggaagccccacctgcccacgacctatgtgtgtgtccatgtgattgcagagctgagaagtccagtgtcattgcctggtagttaggacacaagtctcatcctacccaccataccagggagagaggatgagaa

SEQ ID NO: 470382 - DNA, 602 bp, Homo sapiens
cgggaggcactccttgccctctgggactttccattcggtttgggtatacagagagccatcattctttcactagtcagtgtgcttccagttgcaatcaacagaagctgactggccaaccaggaagaaaagggaacattctggaaggaacctggaatcattcacagactcaaaggtaactgatgaagaaccactcttggatactgacaaaaatgtgtctctcatttctgctcctttcactgtattgggatcattctttcaaaccaacttattctaaaaaaaatggaggatggtcgggcatggtggctcatgcctgtaatcctagcactttgggaggccgaggtaggtggatcactcgaggtcaggaatttgagacccgcgtagctaacatggtgaagccccatctctactaaaaatacaaaaattagccgggcgtgctggcgcatgcctgtagtcccagctactcgggaggctgagtcacgagaatcacttgaacccgcgagacagaggttgcagtgagccgagattgcactactgcattccaacctggtgacagagtgaggctcccgtcccagaaaamtttataaagaaaaaaaatggaggac

SEQ ID NO: 470383 - DNA, 577 bp, Homo sapiens
cctcagaattaggtgcaacccaccactatctgccatgctgtccttggacaagactttgaatcaggcagccctcccagtagaaccttcagcgtgggtatccatgggggtctctcactcggccttctggcttgtttccctgcatgctgcagttggttctatcccctccattgcattcccagcctagtcttattcatcctgtccttccttgctggcaatccactgcttcccccacagcaggctctctgtacatgttcccrtatttcactaaacttgtgctcagtgtataggaaggaataaaattattattaatgatcaaactgcttgaaattacttcgttcacacagaatgtagaatgttaaattgtactgccaataatttaatttaattgagagtctttgccttatagaacttgaatactgtaaaagccaccttatatttagtaaacatatcccttggaagagtagctagaaagtattgttagtcaagttaaacatttcactatatcctgtgcccagtcctcttgagaaaatgaaggtaatacatttaaaatgccaagaaaaggatggctcagagagag

SEQ ID NO: 470384 - DNA, 598 bp, Homo sapiens
gtgtgttttaaaagcttctaagttcagtttgtggctgattgctcttggtcttctgggtgagagcaactgacattttaaaagagataattatagagagagtgagcgaataaaagggagacagcataaaagacacttgagccaatgacactgtcctcgcttaatgtgtgtctccagttggagactgaagtgttgccctgtttctgcctgtgaaaaaggaatttcttatataccgaacaaattctcatttccagaaataagtatttgagaattggatgcatatagcctggctcattggaaagaacactgtgccaaacatgaatggttgcctttccatgagtatcaagaactgggaagggtctgagactttaccccacttgcaggctaacaagttagccatggtttgatgatgctggcagaaccatagtttaacatggccacagtctgatgaygctggcagaagacatgaaactcctgggtcagagacaaaggacttctttactcacaacacagcaggcagcctgagcttcccgttcacattgctttcccttgcaggggaatgcagggcatcccaggtggatgctgcacatgcaataagttt

SEQ ID NO: 470385 - DNA, 480 bp, Homo sapiens
gcctctccccactcattgcctgacagagcagccagtgtttccaggagaaaagcagctcgcaggatgcaataaaaacaccaaactgcgttactcagaytccattaggacagatggactaagaatttaatatgggatcaagagttggctctcaacttcatcttcaggggagaaattcctttttaatgtgcacatttctgagtacacttactgtcacagctaaagactaaaatatatgggtgtgatttaaagcagttactaaagccttgagctctgatactaaactccaaatgtatgctttttaaaaaacacggtatttgctatatcttttctccaaaaggcacaatgaatcaactaagtgcactccattagtttctattcatacacaaatgatatttttccttccttttatgcaaattatacacatatgcaatattaaattgagctactattttcaaataaaagttactttgtgttggttct

SEQ ID NO: 470386 - DNA, 480 bp, Homo sapiens
gcctctccccactcattgcctgacagagcagccagtgtttccaggagaaaagcagctcgcaggatgcaataaaaacaccaaactgcgttactcagactccattaggacagatggactaagaatttaatatgggatcaagagttggctctcaacttcatcttcaggggagaaattcctttttaatgtgcacatttctgagtacayttactgtcacagctaaagactaaaatatatgggtgtgatttaaagcagttactaaagccttgagctctgatactaaactccaaatgtatgctttttaaaaaacacggtatttgctatatcttttctccaaaaggcacaatgaatcaactaagtgcactccattagtttctattcatacacaaatgatatttttccttccttttatgcaaattatacacatatgcaatattaaattgagctactattttcaaataaaagttactttgtgttggttct

SEQ ID NO: 470387 - DNA, 604 bp, Homo sapiens
ctttaggagtgtgggaaggtggggtttggtttcgatgctctcctgtctcttgcagccctgaccttgccaatgtgtctcctgctttacctctattcacccctactctcactattcatcaaccaaacctttatgacgtggtggcttcatgaatattcacccctgttttttcaaaaattattttaataagggattcctgaaaattgaaatgtttttatggtctaaattaatctctatgtgattaatctctatgatacatgaaatttctatgatttcatgtatcaacacaaaatgggggtactttaatatccatggcctatatctatacttataataattagctggttgttacttctcagccttaatctatgtttcactgtgaccacacacacacacacacacacacacacacacacacatgcatgcatgcacgcagaaaaacgttcagcttaagaatcttgacaaacgaggagatgaggttggaataacatagtggaacaaaaactcttctaattcctccactaacagaaatcaagtaataatttccaaagtttacatttgrccatgaagttggacattggtgtttttaagtaggaagatccatttt

SEQ ID NO: 470388 - DNA, 663 bp, Homo sapiens
gggctgggttatcaattatcataagcaacctccagttggtagtcaagctatggctcaagagctccggtgaytgtctcaaccccacccttgaagataacaaacctcattttgctttgtgccaaaaatgacaaactcctgcatgttcatgcagggatagcaaaatatgtccttatttcttatgctggaatggcaaaaaacaaaacaaaaaagtttcttctcttaatgatttgtgtgtatgctggagtatgcatatgtaaataccaagcaagagttgaagtagttacatagtggatctcacatccacttttctttatatcttcactttttttaatgaataatagctattaaactaaagtccaagctgaaacattctaagttttaatgagaagagagggcaaacaatactctatcatgttttcatttgacatttatatatattacgatatattttaatgaaaaattaattttgaaaacatcttcagatttggggaaagggcagcagtaacaacaatgtctggcaaaggtcagatcagggagaagagataacagtaaaattatctgtgaggaagaactggaaaacctacgataagaaataactctcaagtgcattctagaatgaagtaagagtctgtgaaaatacttgataatgaaaggtaagcagta

SEQ ID NO: 470389 - DNA, 663 bp, Homo sapiens
gggctgggttatcaattatcataagcaacctccagttggtagtcaagctatggctcaagagctccggtgactgtctcaaccccacccttgaagataacaaacctcattttgctttgtgccaaaaatgacaaactcctgcatgttcatgcagggatagcaaaatatgtccttatttcttatgctggaatggcaaaaaacaaaacaaaaaagtttcttctcttaatgatttgtgtgtatgctggagtatgcatatgtaaataccaagcaagagttgaagtagttacatagtggatctcacatccacttttctttatatcttcactttttttaatgaataatagctattaaactaaagtccaagctgaaacwttctaagttttaatgagaagagagggcaaacaatactctatcatgttttcatttgacatttatatatattacgatatattttaatgaaaaattaattttgaaaacatcttcagatttggggaaagggcagcagtaacaacaatgtctggcaaaggtcagatcagggagaagagataacagtaaaattatctgtgaggaagaactggaaaacctacgataagaaataactctcaagtgcattctagaatgaagtaagagtctgtgaaaatacttgataatgaaaggtaagcagta

SEQ ID NO: 470390 - DNA, 337 bp, Homo sapiens
ttacactttgcagtgggtgggtgtagagaaattctagtgctgactgtctcctggaaagcttttgcagttctgcagaaattcccactttggggttatctaaatgtagtcactgagcaattgtgattccttccccagctactcagtgarcctgtccataaaatctggattctactaatttacaaccacctcttttggttggagacatcttgatccccctacccacagccaaccaactatcctctttgctttttattacatagcttcaaagtagaagattagctaaggttagaactagattttggaaccattttgcaagtccatatacatggtctaataa

SEQ ID NO: 470391 - DNA, 337 bp, Homo sapiens
ttacactttgcagtgggtgggtgtagagaaattctagtgctgactgtctcctggaaagcttttgcagttctgcagaaattcccactttggggttatctaaatgtagtcactgagcaattgtgattccttccccagctactcagtgagcctgtccataaaatctggattctactaatttacaaccacctcttttggttggagacatcttgatccccctacccacagccaaccaactatcctctttgctttttattacatagcttcaaagtagaagattagctaaggttagaactagattttggaaccattttscaagtccatatacatggtctaataa

SEQ ID NO: 470392 - DNA, 592 bp, Homo sapiens
attgattattcaagtatatctactgttaggtgactctattcatttctagtacctcttgttcatttgctcaacaaataatagatgtgataccactagataccaggtagggtattggaagaggtgtttgtgacagcagtagctcgacagatcttatttgcactaaggaaaagacatagcaagcaagcctgtgtgctaagcacaaccaaggagaagttgagggtgttagaaaaggaaggttaatgatttaaggaaagagaagtgctcactagtgacactgaaatctcagaatttcagtaaggatgtatcacatataatctgcttttggttctcatgcatctagtcacatttttttaatcactttagaatgtgtacctagtatcacttacaaaaatacttcaaacaatacattaggtgtctggataatttggccagcatcatgggctcacaaagaccacttagcaaatacactggattatcaaaaacgacactragtgttggacaatgttggtgactgcacaatgttgattattcaggtcccctttacatgcccaggtgcactcttcccccaggtgcagtgttagctgcaaacagt

SEQ ID NO: 470393 - DNA, 600 bp, Homo sapiens
ttgccctttagactttgtctgaactggcacaattcagtttatgttacaatacattttttattgaaacataacttttatttatgtcacatgggactgaaatatgctggtataatatgccattattatcctcataaatgatgaaacaagtattgccttgatagatttaaggtttcagagcaagtatgtggtggatttgggaagacaagaagtctaggtacaatatcctagttctttttttttttttctgagatggagtctcactctgtcacccaggctggagtgcaatggtgcgatctcagctcactgcaatctctgcctcccaggttcacacaattctcctgtgtcagcctcctgggtagctgggattactggtgcccacaccacgccctgctaattttttgtatttttagtagagayggggtttcaccatgttgaccaggctggtctccaattcctgatctcaggtgatccacccaccttggcctcccaaaatgctgggattacaggcatgagccactgcacctggcccaatatcctggttcttaagtaatattctagagtgtttttcaaaaagacaactatataatatgataaactgca

SEQ ID NO: 470394 - DNA, 564 bp, Homo sapiens
acagaacgtcctagatagcaaagaaacatccataaatttttttttaaaaaaagtaaatatatctgtcaaaaaaatagctatacattctaaacttgatcttcaaattgctgttaagcctaaatccaaaaaaaaaaaaaaaaagaaagctggttaatcctccaataattatattttctacagatacagkgttgaagatgtttttaattacattatatgtcattctttttatgtcaaaccagtggagaattaatgtatagttgccaaatttataaggtgctgtttcctttattttcataatgtctttgaccaactccattaacgacagaagctcaggatctttttattagtatcatctttctgactgaccaagcttgtgagtaaatttttaatttgtttctctcaagcacctttttcctggacccttaaaacaatatactttgaattaattgcaagtcatacacacaaggtgacagtatcctgaagctgtaagatttaaaagaggacaatcaactaataaagataaacagaaaataagatgttttacttcgtgttacattgatgtct

SEQ ID NO: 470395 - DNA, 530 bp, Homo sapiens
attgcagaatgaacaaaagcataatctgggggtatatatgacacaaaagaaagcaggtaattaaaaaggaatttgtaacatccacatagaaatatattgtcgtggatatttaatcattastctactgtgttttaaactaagcagaagcaatactgtagagtattaaccattcaatttgcacagcagtacgtctgcatgaatttatttagcaaagccactttcattattttgacacattagaaaaaaatggttctgtctaattggccttcaaactcccacttctaccaggttggtgtgttagtctattattatttcacatgatatgtgctatgtggcactcagcgaacacagcctagtttcagatctgctaacgaagttcattgtgccatccatgtattccctttaatcgcattcctctccttctttggcgtgattataaaagcatacatcttcaaaggaagtaaagaaagacattaaatctcaagtagtgttctctatataaacccaggtggaattgcactgtttgaaca

SEQ ID NO: 470396 - DNA, 530 bp, Homo sapiens
attgcagaatgaacaaaagcataatctgggggtatatatgacacaaaagaaagcaggtaattaaaaaggaatttgtaacatccacatagaaatatattgtcgtggatatttaatcattagtctactgtgttttaaactaagcagaagcaatactgtagagtattaaccattcaatttgcacagcagtacgtctgcatgaatttatttagcaaagccactttcattattttgacacattagaaaaaaatggttctgtctaattggccttcaaactcccacttctaccaggttggtgtgttagtctattattatttcacatgatatgtgctatgtggcactcagcgaacacagcctagtttcagatctgctaacgaagttcattgtgccatccatgtattccctttaatcgcattcctctccttctttggcgtgattataaaagcatacaycttcaaaggaagtaaagaaagacattaaatctcaagtagtgttctctatataaacccaggtggaattgcactgtttgaaca

SEQ ID NO: 470397 - DNA, 578 bp, Homo sapiens
gctcccgaaggctggggaagctcttccttgaggagatcactctgccttctctgccttcctgagtggaaatgagggaactggcggtgcgggcagctcagccagggaggcgccatctgctgggcccggccaccacccgccccagatgcctcctccacctccatcctcacagcccctcactcaggaagtttagctccttaattagggttgggcctctcccttgaggacacattgataaagcctgttaattaacggccaattaatccacagactcttcacttggcaattcattttaaattcctcttgctgactacatgtgacagacacatttggacaaagtttcctttcaagggaaaaatggttcactgtcccctctagctccacaagggtcaggtataaaaccagtgactctcccaggaccgctgtgtgaagtgatccaacaaagccccacagctccgaggtcctgatctgccgcccggccctgggccaccttcctatggttttgtacggtggctgctgggggggtgctggctccagctcagtgccacctcggggcrcagacagcagcacaggggacggga

SEQ ID NO: 470398 - DNA, 555 bp, Homo sapiens
ggtagacgtgggttgtgagtgtagagaggcagccaggatgggttttggcctcagcaatgggtaggatggcccattctcttctctatactcactgtggataagttcttagtgaattttatgatcttctcatttccaacagcaaaacaccttattattttttttttttagttcaaatctcactttctaagaatcttaacctaattaacctcatgcttttctaaacagtccattaaacttcattcccttgggcatgtgsctaggtttattctgttactttgtcctcattagaatagttttcaggctcttatgttaaaaagcttgaaaaacaagaaacaaatatataatagacttttaaagtagatggtaatatttaaatattgaaacctatttaaaatgcatacacatttaaatatataaaatacatgattttacttatttataaacagaaaaaaaattaaaatagatgtaaaaatctatctacatctattgatttataatatccatatctatatatattttataccttcatctatccaaaaaactgtgatctaatta

SEQ ID NO: 470399 - DNA, 555 bp, Homo sapiens
ggtagacgtgggttgtgagtgtagagaggcagccaggatgggttttggcctcagcaatgggtaggatggcccattctcttctctatactcactgtggataagttcttagtgaattttatgatcttctcatttccaacagcaaaacaccttattattttttttttttagttcaaatctcactttctaagaatcttaacctaattaacctcatgcttttctaaacagtccattaaacttcattcccttgggcatgtgcctaggtttattctgttactttgtcctcattagaatagttttcaggctyttatgttaaaaagcttgaaaaacaagaaacaaatatataatagacttttaaagtagatggtaatatttaaatattgaaacctatttaaaatgcatacacatttaaatatataaaatacatgattttacttatttataaacagaaaaaaaattaaaatagatgtaaaaatctatctacatctattgatttataatatccatatctatatatattttataccttcatctatccaaaaaactgtgatctaatta

SEQ ID NO: 470400 - DNA, 555 bp, Homo sapiens
ggtagacgtgggttgtgagtgtagagaggcagccaggatgggttttggcctcagcaatgggtaggatggcccattctcttctctatactcactgtggataagttcttagtgaattttatgatcttctcatttccaacagcaaaacaccttattattttttttttttagttcaaatctcactttctaagaatcttaacctaattaacctcatgcttttctaaacagtccattaaacttcattcccttgggcatgtgcctaggtttattctgttactttgtcctcattagaatagttttcaggctcttatgttaaaaagcttgaaaaacaagaaacaaatatataatagacttttaaagtagatggtaatatttaaatattgaaacctatttaaaatgcatayacatttaaatatataaaatacatgattttacttatttataaacagaaaaaaaattaaaatagatgtaaaaatctatctacatctattgatttataatatccatatctatatatattttataccttcatctatccaaaaaactgtgatctaatta

SEQ ID NO: 470401 - DNA, 555 bp, Homo sapiens
ggtagacgtgggttgtgagtgtagagaggcagccaggatgggttttggcctcagcaatgggtaggatggcccattctcttctctatactcactgtggataagttcttagtgaattttatgatcttctcatttccaacagcaaaacaccttattattttttttttttagttcaaatctcactttctaagaatcttaacctaattaacctcatgcttttctaaacagtccattaaacttcattcccttgggcatgtgcctaggtttattctgttactttgtcctcattagaatagttttcaggctcttatgttaaaaagcttgaaaaacaagaaacaaatatataatagacttttaaagtagatggtaatatttaaatattgaaacctatttaaaatgcatacacatttaaatatataaaatacatgattttacttatttataaacagaaaaaaaattaaaatagatgtaaaaatctatctacatctattgatttataatatccawatctatatatattttataccttcatctatccaaaaaactgtgatctaatta

SEQ ID NO: 470402 - DNA, 505 bp, Homo sapiens
gctctcaggctgatgcactggggactcatgtcaggagctacaggacagggcttctctactagagctgccaatagaaaaccaacttctcagaaccacttcccagtctccaggctgtttggaattggtgctctgagagttggaaatgccatggcagaagggagggagtatggacaagcacagatttcacaaaatcaacaggaaatggtttgaaaytgtggctctgccatgaactttgaacctcagctttttcatctgaaaaataaaatatcttccttacatgcaattttgaagaatgaaaattcaatacctaacatactctcctctcccttctcctcagggttctttaaacccacagagtgtgttcaaaatgaaaaatttaatcaacaaagactattaggttttgcaaaaagagagacagaatagttaacttaggcctacacaatttattttctgggagaaaaaactgtgggtaaaacacttggaaaaaaaattaactgagtgtata

SEQ ID NO: 470403 - DNA, 627 bp, Homo sapiens
cacagcagctgctctcaggctgatgcactggggactcatgtcaggagctacaggacagggcttctctactagagctgccaatagaaaaccaacttctcagaaccacttcccagtctccaggctgtttggaattggtgctctgagagttggaaatgccatggcagaagggagggagtatggacaagcacagatttcacaaaatcaacaggaaatggtttgaaattgtggctctgccatgaactttgaacctcagctttttcatctgaaaaataaaatatcttccttacatgcaattttgaagaatgaaaattcaatacctaacatactctcctctcccttctcctcagggttctttaaacccacagagtgtgttcaaaatgaaaaatttaatcaacaaagactattaggttttgcaaaaagagagacagaatagttaacttaggcctacacaatttattttctgggagaaaaaactgtgggtaaaacacttggaaaaaaaattaactgagtgtataaataccagagacattayacagaactaattgctgtcaaaaatatttttttttttttacaaaagagaaatccgtttaagttttagtgagcaaacaagatttcacaaaataaaaa

SEQ ID NO: 470404 - DNA, 384 bp, Homo sapiens
agatattgatgaagataagacatatgtttctgagcaaagggttcaatgcacaggagaagctctcctgagagtagactagtcctgtgtgttgtgtgtgtccytgatatgagaattatgtatattatagttttgttttcttttctaatttcctttgagatgaatttaagaaaataactaaaataaattcttaattgtccagtccaagccacgatgccctgatttcccttgaggttaagaatagactttaattgtattatatattttcatatattaggagaaaccagaatcgagattcttataaattaagtcaagttatcataggttaatattttagtgctaaaaagataaaaatgaaggtatataaaaaagaattcaagtgcattg

SEQ ID NO: 470405 - DNA, 384 bp, Homo sapiens
agatattgatgaagataagacatatgtttctgagcaaagggttcaatgcacaggagaagctctcctgagagtagactagtcctgtgtgttgtgtgtgtccttgatatgagaattatgtatattatagttttgttttcttttctaatttcctttgagatkaatttaagaaaataactaaaataaattcttaattgtccagtccaagccacgatgccctgatttcccttgaggttaagaatagactttaattgtattatatattttcatatattaggagaaaccagaatcgagattcttataaattaagtcaagttatcataggttaatattttagtgctaaaaagataaaaatgaaggtatataaaaaagaattcaagtgcattg

SEQ ID NO: 470406 - DNA, 545 bp, Homo sapiens
cgttttacatggaacattattcttcttgcctactacagtgcaacccccgccccgccaccactccacccctgtgttaaaagattcagatccatcacaaataaatttacgtcactcataggtgctcaaaagtcacaacccattattacagcatcaactctaaatccaaaatcttatctgagtctcaccaactcaaaagtctcaaatctcacactaaagccatctamatttgggagaggatctgggtgtgatttctggggcataattctcctccatctgtgcacttgcgaacctagaaaacaagttatctgctcccatgtatgatggtgtgacaggcatacagtaacagctatacacattcctgttcaaaaagcagaaattgggatgaaaaaaggagccatcagcaccatcaatttacaaaaccagccaggcaccctcctttcagtttcaaggcctgggagtaatcttcagctcactgctcagttctctgggcttgtgactgtctcaatcatctttactttttcacaaaaggtagcacatgtttgcag

SEQ ID NO: 470407 - DNA, 569 bp, Homo sapiens
gacaatgtctgttttctcaatgacacctactagttcttactcattacttgtcactggcatgaagggcaagcaacttagttaaactgttcataggccttacaaagcttgtcttttatttttatatggaggggaaaaacaatcctggagtgaaaatatgccttaatttaaagacgaattaagtgtcataaacggctcataagcacaaacctcctgaattgttctaacgcaagaggagcaaatgaaagaaccacatgaaatccccaccttaatcattttattttatgacaaatatcttgcttgaattcttgcattttcttatatgccaaataatttccagcttgaaaaataactagaagccataaaatcatttactgttgtattatttaattagtcattttacaactcttgtatttcccaaatccaatakccctaatttttttgtattttaagttatttaaacttcacagccatacaagcagatgtatcaggtaagcatgtgagatggtatgttgaatatattaccatacagtatttctttatgcagaattacacacggcaaattctcaggt

SEQ ID NO: 470408 - DNA, 523 bp, Homo sapiens
tggcgcgagcctcggcgggcgcgcgcggggccgtggtcgttgctccctgaccggctgcggccgcctccaggaagcggaaaagcaagcggcggtcgagctgggccgccgcgcccctctgctsgcagcgctgctctttgaccttgcagggtgtgaagaagatgcgcagctccacgctgcaggacccgcgccgctgggacccccaggacgacgtgtacctggacatcaccgatcgccttcgttttgccattctctacagcagaccaaagagtgcatcaaatgtacattatttcagcatagataatgaactcgaatatgagaacttctccgaagactttggaccactcaatctggcaaatggtttacagatattgttgcaagataaataagaaattaaagtccattacaatgttaaggaagaaaattgttcattttactggctctgatcagagaaaacaagcaaatgctgccttccttgttggatgctacatggttatatacttggggagaaccccagaagcagcat

SEQ ID NO: 470409 - DNA, 685 bp, Homo sapiens
gaaaactgccttggagggggtgggggtgggtgtcacaaaataatggggaaaaaagatctagaaaacatgtatgcttccaaaagctgccagaattcaattggctaaattacttatgcagtttcctagtatggcagagcagaagataattgaacccaagtgacattaacatagcaattaattccaatttcttacactagtcctcccagagtatatgaccatagtaacactggtacattttttgtatgcttctttgttttccaattttattattcacactctggaatgaatattcagattttgctattyagtatttataattctggttggtagtagtatcactatataaaaacctccatgaaaaaatgtctaaaactgcagttgttgaatttaactagaattactgaatgtatataatatcacagtagaagtgtgctccacatgggcacctcatgtatctgtttttaaagttatgggtccttcacactgccaactggctgtcaaggcagaaaccatagctttgtggtcaggacagacatgttttttaccctctacctcctctactctagtaggcaacacggcaaccacagggatatgagtaagtgacgctgtgctgacagttgtgactaggtttaagctaacccttagtaacgatggtattttatttcagaagcaaatgctggcacaa

SEQ ID NO: 470410 - DNA, 337 bp, Homo sapiens
cttcagagttatgcctgggtccttatttctatttttttctacactgcatacctttgtgtccttcctgttaacmttacatagggcgggctccctgcacagaaggaggagacgatatactcaacggcatctgtgcgtgatagaggggaaaaaaatgcgatgtagaatccattctatccatctatcaagttccgtttaggaaaacaaaatatcctaatcacaataattgactagtgaagactgaagaagcggttgcctagcaatgccctgatcgtttttgatgttgactggttgacataaggcgggatcaacaaacacacagcacgtgtgtggccctggc

SEQ ID NO: 470411 - DNA, 337 bp, Homo sapiens
cttcagagttatgcctgggtccttatttctatttttttctacactgcatacctttgtgtccttcctgttaaccttacatagggcggrctccctgcacagaaggaggagacgatatactcaacggcatctgtgcgtgatagaggggaaaaaaatgcgatgtagaatccattctatccatctatcaagttccgtttaggaaaacaaaatatcctaatcacaataattgactagtgaagactgaagaagcggttgcctagcaatgccctgatcgtttttgatgttgactggttgacataaggcgggatcaacaaacacacagcacgtgtgtggccctggc

SEQ ID NO: 470412 - DNA, 337 bp, Homo sapiens
cttcagagttatgcctgggtccttatttctatttttttctacactgcatacctttgtgtccttcctgttaaccttacatagggcgggctccctgcacagaaggaggagacgatatactcaacggcatctgtgcgtgatagaggggaaaaaaatgcgatgtagaatccattctatccatctatcaagttccgtttaggaaaacaaaatatcctaatcacaataattgactagtgaagactgaagaagcggttgcctagcaatgccctgatcgtttttgatgttgactggttgacataaggcgggatcaacaaacacmcagcacgtgtgtggccctggc

SEQ ID NO: 470413 - DNA, 290 bp, Homo sapiens
tgtttctcttaaaagttctccgataagtcattgccaccactacttccaaatagcgtatgttaactttgagttaattttagataatctcgggttaatttaaacaattttggcaccaacaacatggttaggctagkcagcttggatgggtataggaatccgtcaatctgggttgctgtgtaccagctctgggactgggggcaagttgtagcagccctcagcctcctgcttcacctgtatcaggggaggctgagacccaccttgcaggggtcttgtgaagattaaatgcaatg

SEQ ID NO: 470414 - DNA, 515 bp, Homo sapiens
ctgtttctcttaaaagttctccgataagtcattgccaccactacttccaaatagcgtatgttaactttgagttaattttagataatctcgggttaatttaaacaattttggcaccaacaacatggttaggctagtcagcttggatgggtataggaatccgtcaatctggkttgctgtgtaccagctctgggactgggggcaagttgtagcagccctcagcctcctgcttcacctgtatcaggggaggctgagacccaccttgcaggggtcttgtgaagattaaatgcaatgctgtgtgaatggtgcctaccttcgtgcctggtctgtcaagaccaggcagtttacacaaaaacacttgatattgactatgaaacaagatccggaagagaacaaatataaatacagatggatcagctaaatgaaggactgtcgagtagaaacacaaagaggatgtttgtgagtggagggggatggatctccttctccacccagcagtgaatatcatgggaatctct

SEQ ID NO: 470415 - DNA, 579 bp, Homo sapiens
taggattcaccaaacatatatccaagctgatcaatttaggacagttccactgaggagatgtgaagtgtacattcagctgaagagtcatcgtaattgtgtaccttctcagttattgggcaagttaaagagcatgatgaatggttgtagtataatagtgtatttacttctcatctcttgcactaaagacatgtgagagcacgtaccacctgctttgacattgattcccaggtgcatgagttgctcctctgtttttagaccacatttgtttttatccctccgcatatccacattgatactgacactgtttcattttagttttagacatatgacaaatcatatcgcgtttgaaattgtaagtgtatatttcatgaagcctgtattggtgttttcttcagtgtgtttctgtcatattccagtcccaagacacaaagtataaaacataaaaacctaaactaataggggcaggaggatacagcttgatggtaacagtgcatkaatgtatggataattttatcatatttacatatgactgattatgtatcccttttgcttttcagtgtcttctcagaaacaagcagc

SEQ ID NO: 470416 - DNA, 605 bp, Homo sapiens
tgacggcagggccagtcacacaagacgtctcttgtgaggtcaggctggcactggtggtatccgtactgcgactccctgtatgtctactttcrgcatccctggagaagaccaacgcacatacgctgctgcgatgaaggtcatgggcatttcctgatgcaaaagatttgaaacactctgagactttagcttttgacaaggggaccccagagaacgttaagccagtgtttctctgacagctctaagaagccctggtcttctgggaaaccctggagggagcaaggcaaaaggaaggctctgaacttcacacctgattttccaccagaacatttctgcccttttctgtgtgacaatcctttgaatagaaagttctacagccaaacatttgatttaggaagagcaggtaagtgagctgctcttcatgggtaaagctggcaccaaagtcaggcctgctgtgggttagagctttcccaactttctaaaagcaggagtgcttgggctctcatttctacctctacgctcaaactctcctgctggccctgtcactaggagctaaaatcactccagagccatcacaagcagcttctcacaatggccctcagcactgt

SEQ ID NO: 470417 - DNA, 487 bp, Homo sapiens
gcagtgggttaaacaagtgaaagaaggaaaaagtgcttctggccctaggaaggaaaaaatgggaggtctttctgccaggaatgagactgtctgcagagtgaattagcagtggtagatggattcattaaaaggcatccctctaggccaggygcggtgtttcaatcccagcagtttgggaggccgaggcgggcggatcacctgaggtcaggagttcgagaccaggctggccaacatggtgaaaccctgtctctactaaaaataccaaattagctaggcgtggttggcgcatgcctgtaattccagctattctggaggctgaggaaggagaatcgcttgaacccgggaggagaagttgcggtgagcggagatcgcacccttgcactccgcctgggcaacaagagcgaaactccgtctcaaaaaacagaaacaaaaaacaaaaaacatccctcctcctgtactgccagggcactgcttttcattttccatc

SEQ ID NO: 470418 - DNA, 487 bp, Homo sapiens
gcagtgggttaaacaagtgaaagaaggaaaaagtgcttctggccctaggaaggaaaaaatgggaggtctttctgccaggaatgagactgtctgcagagtgaattagcagtggtagatggattcattaaaaggcatccctctaggccaggtgcggtgtttcaatcccagcagtttgggaggccgaggcgggcggatcacctgaggtcaggagttcgagaccaggctggccaacatggtgaaaccctgtctctactaaaaataccaaattagctaggcgtggttggcgcatgcctgtaattccagctattctggaggctgaggaaggagaatcgcttgaacccgggaggagaagttgcggtgagcggagatcgcacccttgcactccrcctgggcaacaagagcgaaactccgtctcaaaaaacagaaacaaaaaacaaaaaacatccctcctcctgtactgccagggcactgcttttcattttccatc

SEQ ID NO: 470419 - DNA, 515 bp, Homo sapiens
gaatgtgtcttacttgttcaatttcacctggttcctgtatcttgataaaacaagctaagtctgaaaaacaatgtcagrtaagaatttcatatggaacatctatactgacgaattccattcatctttccaatttggcaaacactctgccagaaagcaagaactgaggaggaggcctaggcagggtttccttcatgcctgtgtttcgtttaggtgtggtctgtgtgtttcaataactcacccacctccacttctagaggctggctctaaggccaacagctcctggcagcttggctttgttcacggcccaagccctggtctctcctcttctactttgccctctgctgtttggccttattgcaagggtcctgacttcctgctttatgattttctgcctctagccctttccccctagccctgaaccctaatgcagaggttcatcagcatggctggggaacttgttagaaatagatacactcaggccccgtccagagactctggggtggcatccagcaccc

SEQ ID NO: 470420 - DNA, 514 bp, Homo sapiens
ccaggggagccgctgtgtcttgtcgtcccggccgcgggagatgagcatcggtccgtgtgcgttccgggctgaacctggtggccgtatgacgagggacacgatggctggcctctctctatttttttctaagccccagtgacatgtgtctaggtccctgtttgatttgtgtcttgtgtcttgtttcttcccctcccctcccttttagctgcagagagccaaatcccccatcagcctgaagcgaacatcagattttcaaggttagtgagacgcccaaatctctcttggcctgtctcatctgtcactctgtctctctcggtccatctgtttctcccactgtaacgaacaatcctgcgyggtaaacgtggcgggttctcgggggtctcggagtggtgggggtccatccaaatagcaattaatgttcatcgtcattcaaagcaggcaggagcccaactgctgaaaggtcccctctgtggttccctccacgcttccccgcctctcccggtgggtctgtccg

SEQ ID NO: 470421 - DNA, 437 bp, Homo sapiens
aatgccatccagggacccagcttatccccaccaccctctctccctccagagtgccatccggggcaccagctcatcccccaacaccctctcctgctgcagagcaccgtcccggggccccagcctcatccaccccaccagccctgacccacctcgccttcctccccaagacccagcctctgagcagcgctgctgcctgctctgggctgcagccccagcctcccttatgtttatttagagaggtttccacagcctcgcaatgtatttacaccttcttgccgcctcctttcccaatttaacacttggtgggaggaggagctgggcctcccaggggctgtcgcgcatggcacaggccgtgaaaattctgccgcaacttctcagcccctggcaactcccgcagcctggggarcgggcggcaggcagggcagggagctgtgagc

SEQ ID NO: 470422 - DNA, 630 bp, Homo sapiens
agctgcagtgggatgggaagacccccgtgtttctactgatgaacgtgtcccaggcgctgcatcatgcctctgcagttttgtttttttttttcttccattcattcataaggcaaggaaatgctcactttccattagggggtagggaaaataaagatgtcattttttttttccattcaacattcacagactccctgaattctctatccatggattcgaatgaagagcgccctgatggagggatctttctggaacacaaattggagtgtcactgtgatgattgagaccttcccattggaagctaccagaattgctaattttttttttttwtttttttttttgagatggagtcttgctctgtcacccaggttggagcgcattggcgtcatctcggctcactacacctccacctcccaagttcaagcgattcccgtgcctcagcctcccgagtagctgggattacaggcttgcaccaccacgcccggctaatttttgtatattttttttttagtagagacagggtttcattcaccatgttggccaggcaggtctcgaactcctgacctcaagtgatctatgcacctcagcctcccacagtgctgggattacaggcgtgagccaccacgcccagcc

SEQ ID NO: 470423 - DNA, 626 bp, Homo sapiens
cacctcccaagttcaagcgattcccgtgcctcagcctcccgagtagctgggattacaggcttgcaccaccacgcccggctaatttttgtatattttttttttagtagagacagggtttcattcaccatgttggccaggcaggtctcgaactcctgacctcaagtgatctatgcacctcagcctcccacagtgctgggattacaggcgtgagccaccacgcccagcctggaattactattatttatttttttatattttattttttagtagagaggaggtctcgctatgttgcccaggctggtcttgaactcctaagccagggcaaccctcccacctgagcgtcccaaagtgctgggataacaggtgagagccatagcacctgatcccctgctgctggaattaaatgagaacaatctgccgtgcttacatggcctggccccttccagaaccttcttcctcctactggctatattcagccacactggccccctgttggtccccaaaactctttctgtgcaaggccttagtggcggygttccctctgctgccccctcccgcttccctccccccctcccctggtatggggctcaggcccgcctcggcctccgcattttctcccttctcag

SEQ ID NO: 470424 - DNA, 296 bp, Homo sapiens
gctaattttttgatttttagtcgagacggggtttctcyatttaggccaggctggtctggaactcctgaccccaggtgatccacctgcctcagcctcccaaagtgcaatgattacaggcatgagccactgcacctggcctaaaataattgttaaaagttaaaattaaaaagcccatctttccctgtccttggagaccccgacagcataaaattaccaactacacagacacgcacatttgccattggcggtgaatgagaatgagggaagctacactgcaaacaggagccatctgaagg

SEQ ID NO: 470425 - DNA, 298 bp, Homo sapiens
ctaattttttgatttttagtcgagacggggtttctctatttaggccaggctggtctggaactcctgaccccaggtgatccacctgcctcagcctcccaaagtgcaatgattacaggcatgagccactgcacctggcctaaaataattgttaaaagttaaaattaaaaagcccatctttccctgtccttggagaccccgacagcataaaattaccaactacacagacacgcacatttgccattggcsgtgaatgagaatgagggaagctacactgcaaacaggagccatctgaaggcag

SEQ ID NO: 470426 - DNA, 223 bp, Homo sapiens
gagctaaagatgtctcctgggttccaaaggcgcccccagcacagtcagtgtggaagtctctctttcccccagtctctctcctacacacacacaccctgygtctaaaccgatggcttcacttgacagctccaccagcagaaaataatttccaccagcagccaatggatttatgcctcactcatcagccgcagcctgatcaacctgtcctaagtcactgagggag

SEQ ID NO: 470427 - DNA, 502 bp, Homo sapiens
cccaggcttccccctgcaacctggcagagctcccagttctcacaaggaagagacggggactccccttcgctgagccctctaggggcttgcacctaagcaaggcaggaattgccaaacgggggccrcaccctgcccagagcccgcactggcaggacctcgaaactttgggctggagaagctccccgggcgcccatctttttctcctgtaggacttggctgcaagctcctcttgcagaaggagcccccatcctggggctgagcccacctctgcccgggcacacccttgtcccccaccttgggttgggatataaattaaaattcaatttcattaaaggcagtgagcaatcagtccctggctggggctaacaatgccaggcagggggccttcgcttcctctgggctgtaattcactcagcctcccccgctcttgttcgcaaactgctagagctgcactttccccccaaatttatggcactggcagcgtctggggcctgagttacag

SEQ ID NO: 470428 - DNA, 392 bp, Homo sapiens
ctgcactgcagcctggggctcctcccacttaaccctccttccttcctcttctcctctggcaaacacmagccctgcgtcacggttggaagttggtccccgcccaccctgcatcctctccctgtatcctgcttgggcattgcgtttcatcaatctcttgctcatttcttctgtcttgacgtctgcctcccagatgaccaaagtgacacaggtaacgaaatgagtctctctaatgagttccctaaagtcctgggcctccgagggctgcaggccctgcctcctcttactcatcgctgactccaggcacctggcctagagcttcacaggggctcaatagcttcctgtcctgctcaggcagagaggggcaggcagggagggtctcacactccagggaa

SEQ ID NO: 470429 - DNA, 183 bp, Homo sapiens
agctgccatgtaaggatgtgtgtggacttcactagggaagaacggtgttatgaaagaaggggcagaaaaactcacctgttggtctscatgtagaggtttattgtcctgaattcctggaggttcagtgaaaagcagaagattgtcttttacacatgttgagttatgcccccatatatgtggttg

SEQ ID NO: 470430 - DNA, 183 bp, Homo sapiens
agctgccatgtaaggatgtgtgtggacttcactagggaagaacggtgttatgaaagaaggggcagaaaaactcacctgttggtctgcatgtagasgtttattgtcctgaattcctggaggttcagtgaaaagcagaagattgtcttttacacatgttgagttatgcccccatatatgtggttg

SEQ ID NO: 470431 - DNA, 183 bp, Homo sapiens
agctgccatgtaaggatgtgtgtggacttcactagggaagaacggtgttatgaaagaaggggcagaaaaactcacctgttggtctgcatgtagagrtttattgtcctgaattcctggaggttcagtgaaaagcagaagattgtcttttacacatgttgagttatgcccccatatatgtggttg

SEQ ID NO: 470432 - DNA, 519 bp, Homo sapiens
gtttaaatttcaattatgttattctctatggacattctatttgttttcttttaatcttcttggccattctctagagtttcctgttccattatgatatttttaattttttgttttactttaaacatactaaatatagttattttattttattttctgtatctgatactttcaataactgcagtctttgctagtcttttttctgtgctcttgctcatagtttttttcatttgttttcatgattagaaaaacagagagagaagaaggagagtaaagggaggaggmggaggaggagaaaagaagaaagcagagaagaagggacagagaaaaaaaggaagttggttctaacgtttctctaacaactggcttcagtgaaacactcccaccttgtggatttttaggttattgaaattaaccagtcttctgggtgcagcacaccaacatggcacatgtatacatatgtaacaaacctgcactttgtgcacatgtaccctaaaacttaaagtataataaaaaataaaa

SEQ ID NO: 470433 - DNA, 625 bp, Homo sapiens
aaaaacgtattttttttgtttaggagcacatttaggattgtacttaggagtacatttaaccaaggaggtgaaagatctgtattctgaacactataaaacattgatgaaaaattgtagatgacacaaatacatggaaagataktttatgttcatgggtaggaagaattaatattcttaaaatgtccttactgcccaaagcgatttataggtttaatgcaatatttatcaaaatttcaatgtcattcttcacagaaatagaaaaaacaatttgaaaatttatatggaaccacaaaggatcctgaataactaaaggactcttgagcaataagaacaaagctgaaggcctcacaatctgacttcaaaacatattacaggaaaagaacaaaagaaggaagaagagggtagaggagaagtgcagcaagggtggagggaggtgcccacgctgggtcggaggagcaggaggagtatggagggaagactcctgggtggcatggagctcttgcacctctaggcactgcccagccctgtgtcagccagggctgaacccccacaggataaggaagcctgtgtgtgtaccaacaatcaaagctacatctgtgacacaacaggacactgctatgggcag

SEQ ID NO: 470434 - DNA, 346 bp, Homo sapiens
aaacaagaactcttttcattgccggtggaacacagtgtataagaccaaamtatgccaccccaaaatataatggtaggaaaccagaatatgcaaccccaaaatatgtccctttggcttaagaattattccaagctaattattttgaaaaaaaaaaatgctaacaaaggaagttgtgaaaacagagaagttacacttgtgtaaggaaaatttacatctataaaggaaatcaccatttaaaagctacctctctcgacaccaagaagagaaggataactaaatcactaaagagtcttatcaatggagaatgcatggacttaagtctgtataatgaaccttacccttgtct

SEQ ID NO: 470435 - DNA, 539 bp, Homo sapiens
caccttacactgtaagaagattgacctgtgtgatcaataacctatggtagaagtgatggttaagtcacttccaagataagattgcaaaagaccatgggctccatctcgggctctctcagcttattcacacaaggaaggtcatgttgtcagcagccttatgaagaaactcacagrgcaaaaagtgaaagtatatggccaaaagtcaacaaggaactgagacctgccaactaccatgagtgagcttagaagcagatttcctagccacagatgactgcagccctactcaacagcttgactactacctcaagagaaaccatgagccagaatctaccagctaattgctcctagattcttgagtcaaggaaactgtaagattataaatgtggattatttaagctcctaaattttgggatagtttgtaactcagtgattgataactaatacagatccttcactgcagatagtttgggaagcaataatttagagtgttcttggccaataaaaagatattcaaggcttaaagatgaattgacaaattc

SEQ ID NO: 470436 - DNA, 326 bp, Homo sapiens
gcatggagtgtgccagagaacaaaatgaggcaacagaggtgtagaagttgcaggtaccgaggggaaaagaatgcagtaatattggccaaagggytcctgaaattaatccagaggcggaacaattggaacgatctctgttgaagttatgattgggtagaaaagagctgaaccagcatctctccaaactgactgccttgcacctgggttaggtttgccacacctcttgaccttaacaccaaggtgctcatgttaccagcggagggtgtccaggttcttggcgctttgaacaaagaactggataaaacacacaaacaaagccaggaaag

SEQ ID NO: 470437 - DNA, 555 bp, Homo sapiens
tgactgcatggagtgtgccagagaacaaaatgaggcaacagaggtgtagaagttgcaggtaccgaggggaaaagaatgcagtaatattggccaaagggctcctgaaattmatccagaggcggaacaattggaacgatctctgttgaagttatgattgggtagaaaagagctgaaccagcatctctccaaactgactgccttgcacctgggttaggtttgccacacctcttgaccttaacaccaaggtgctcatgttaccagcggagggtgtccaggttcttggcgctttgaacaaagaactggataaaacacacaaacaaagccaggaaagaatgatgcaacaaaagcagagatttattgaaaatgaaagcacactccacagcgcagaaacaggcacagcaagccgctcaagggcccagttacagaatttcccagggtttaaatcccctctagaggtttcccattggttacttggtacacaccctgtgtaaatgaagtagtggctgcccatcagtctgattggttgcagaaagcaaccaatcagaggctgaagtg

SEQ ID NO: 470438 - DNA, 465 bp, Homo sapiens
gtcgtttccagaacattggcatgggagaatggggctatgaaataaggtaggtttactacagtccttctctatgttaccttcctttgtttttctggttctcagttttagaggacaattcatagtgtgcctaacatatcctgcacttttccacgtgcactttcccatctttgtggatctgctttctgccataaaatgcccattctcaagcttctcccagtgcccaaggctcaacttgataccctcattggtatatcacckgtttattcattggtctatcctgatccccaagtcaagctaacatgatggcccctcctctggagcctccgaacatcttgtatgaatccttctttatataaaataaaatgctccaccattattgtggtcatagtgtcagaggcgtttgaaccagagaaactccatcttgaataggggctaggtaaaatgaggctgaaacctactgggctg

SEQ ID NO: 470439 - DNA, 598 bp, Homo sapiens
gaagaggtcccattccacatatatgctaaaggtggagccactggaatctatggatggatcaaacgtggagtatgaaagagacgagtgaaagttgatcatgagggcacagtcctacttgctactgtgaagcaaaatgaacacagatggaaacagaaggacatgaagctggagacacagacaaagtttacatcatgaggaaatctgtacgcaagaaatctcttcttcatgccaagggcaatgtggagacattgaaaggctgcaagcagagggatgctgagttgaagatgagacagcgtgcagtggaaccagtagaaattcttacctaatataacagttagggtgaaatgagtcctgaacyaagacaagcccagcaggaatgaatagggtcagagatgtgtgagtgaaagaaatgttgatgtgttgctatgaattgttggtttcttgaatgagaagggtgagggaatggagaaatctagatggagccccaagtctctgccttgaaagccatggcagagatgcccagttaccaagccttccccattttcatccaaaatacagctaccaagggaccacccttaaaaaaaaaaaggcttcccag

SEQ ID NO: 470440 - DNA, 640 bp, Homo sapiens
ccttgaatatattaaaaaatgtaaacaatttatctttgttcttaatttgagtttctggaagaactgactcaatgagacagcataagaaaaaaaattgttaaaattaattaattagttaaagcctagttcaaagtaattacttggaaatgctaygccatctctatttctactagagtcatgacaaaaattttctggttactaagacttcatgggatctagtgactttttctcgggtaagggaaaatttaaaaggagatcaatcttagacttaataagaaatctccttaaacatatttgcaaggtttctaaataaacttttggagagtaaattaagtaaattttccctttttttgagacggagtcttgctctgttgccgaggctggagtgcagtggcacgatctcggctcactgtaacctccgcctcccgggttcaagcgattctcttgccttagtctcccaagtagctgggactacaggtgtgcaccaccacatattgctaattttatgtatgtttagtagagatggggtttcgctatgttggccaggctgctcttgaactcctgaccttgtgatccacccgccttagcctcccaaagtgctgggattataagcatgagacaccacgcctggccagaaagt

SEQ ID NO: 470441 - DNA, 622 bp, Homo sapiens
gccatggcaatgtcaggaagttacccttatatagtctaaaaaagggaggcatgaataatccactccttctttagcatataatcaagaaataaccataaaaatgggcaaccagcagcccccagggttgctctgcctatggaggagccagtctttattcctttactttcttaataaacttgcttccactttatggattcgcctggaatgtcttcttgtgtgagatccaagaaccctgtcttggagtctgaattaggacctttttttggtaacagtttggcttatgtcttggagagttatcaaattcataattcttgaagaaaaaatttwaaaaattataattacatggttgttcacgatagatgtgtcctataattcacaattttcctctgtttaccattaagaatgcttctgatggttactcattcttagtttcacagaaaataatgataactaaatgctgtcatgaatttacctctccaaaagaattggtatttatttgtagaatgtgagaccagtgattgaaaacctgtgtgatagattgttggcaacaccttatattcaggaacttattagttagttgaaagaaaataaacaattatgataaagattctgatctgtcccc

SEQ ID NO: 470442 - DNA, 512 bp, Homo sapiens
gacaggatttctataggaacatcagggctctgctatgcaagaaatgggatgcaaagactgggaatgggatatctgtgtcaacaacctcagtttcttgaatctcagattctcctgaatactctgcacctggtaagtagctcactcattctttttgaagacaagtactccattctggcttgaagccaygtcagagttttctgcttttcgagacaacatatgtcccactcaagatcctcttccctaccctggatactagaccaacaactagaataaagtcatgataaaatctggccacggaatgtctgggtctgctaagaaaggaaagggactacatcctcaacggagtcgcaagacctagccaacatgtcccagcaggaatggggagagtacataagggactggatcttttagctggtggaataagagagatcaaatataccattaggatttgttgaaatgagaggtctctcccatgctatggaattaaacatcctggcaaacaaatatcatga

SEQ ID NO: 470443 - DNA, 512 bp, Homo sapiens
gacaggatttctataggaacatcagggctctgctatgcaagaaatgggatgcaaagactgggaatgggatatctgtgtcaacaacctcagtttcttgaatctcagattctcctgaatactctgcacctggtaagtagctcactcattctttttgaagacaagtactccattctggcttgaagccatgtcagagttttctgcttttcgagacaacatatgtcccactcaagatcctcttcyctaccctggatactagaccaacaactagaataaagtcatgataaaatctggccacggaatgtctgggtctgctaagaaaggaaagggactacatcctcaacggagtcgcaagacctagccaacatgtcccagcaggaatggggagagtacataagggactggatcttttagctggtggaataagagagatcaaatataccattaggatttgttgaaatgagaggtctctcccatgctatggaattaaacatcctggcaaacaaatatcatga

SEQ ID NO: 470444 - DNA, 474 bp, Homo sapiens
gctcctcctctaggattaggaatgctagtgtggatggcaatgtattaaggaaatggtatctgagagagccaaagtgggccctctctgtgtgtatacattatgcttccaactttgcatcataaatcaaaagcaaaaygcaaaataaaaacacaggttgttgaccatatttttaaaagtcctatcttcaggctgaactataattatgagcatctgtcatcagtaataatgcttaaaatgttgctgggagaggaagacgttagatttccaggcaatctaccaagtttgaaataggatcctaggccctggctaggatggaatatcagagttctcctgggatagaatatcagagctctgctctgggaaaaggaagttttcaagaatgaggataattctcaaggtcccagccaagtactgtagaacccatttccctggaactagaaatctctagaaaactatgcagcacctcccaactgg

SEQ ID NO: 470445 - DNA, 474 bp, Homo sapiens
gctcctcctctaggattaggaatgctagtgtggatggcaatgtattaaggaaatggtatctgagagagccaaagtgggccctctctgtgtgtatacattatgcttccaactttgcatcataaatcaaaagcaaaatgcaaaataaaaacacaggttgttgaccatatttttaaaagtcctatcttcaggctgaactataattatgagcatctgtcatcagtaataatgcttaaaatgttgctgggagaggaagacgttakatttccaggcaatctaccaagtttgaaataggatcctaggccctggctaggatggaatatcagagttctcctgggatagaatatcagagctctgctctgggaaaaggaagttttcaagaatgaggataattctcaaggtcccagccaagtactgtagaacccatttccctggaactagaaatctctagaaaactatgcagcacctcccaactgg

SEQ ID NO: 470446 - DNA, 474 bp, Homo sapiens
gctcctcctctaggattaggaatgctagtgtggatggcaatgtattaaggaaatggtatctgagagagccaaagtgggccctctctgtgtgtatacattatgcttccaactttgcatcataaatcaaaagcaaaatgcaaaataaaaacacaggttgttgaccatatttttaaaagtcctatcttcaggctgaactataattatgagcatctgtcatcagtaataatgcttaaaatgttgctgggagaggaagacgttagatttccaggcaatctaccaagtttgaaayaggatcctaggccctggctaggatggaatatcagagttctcctgggatagaatatcagagctctgctctgggaaaaggaagttttcaagaatgaggataattctcaaggtcccagccaagtactgtagaacccatttccctggaactagaaatctctagaaaactatgcagcacctcccaactgg

SEQ ID NO: 470447 - DNA, 472 bp, Homo sapiens
agaaggaaaaaaaccttaagtgctatttagggagactataagatgtgctatgcatttatctagaatctgtacagtttttcttgtctgcgacaccggtcattaatctttgcaagcggccaagtggaaatctaaggtgtcatccaggcatagcatcatattcatagackactagaagcacatttcaaagatcagcttactgaatcattgagcaacttacttcctctaaaagaagtttattttgatttatatcggtcaaactggccatgattagagatctttactgaattacttttagcagagtcatcgtttttcaaagcaagaaaacacacatacatattttgattgcagttgaaaataccttgagagatatccgatgtgcacagaaatggcatcttaagtgtagtcggagttttagtaaatcaagattcaacttcttttttggtggctcaattcctcttcttaatttgggtgt

SEQ ID NO: 470448 - DNA, 500 bp, Homo sapiens
aaatctgcccactgggaaactaatatctgtagagttgcttacaagagtattttttwaaataacttagtaggaatgatgtcaaaatcacttgtttaggccaaaactggtttttatttttaattgtttataattgtacttttatggtcctctctgaaaagataaatgacaaaggaccaatgcctaccagccaggaatgcttatttcagaagtgtaaatcagtgaagcaaaacatactgaaagaacttagtccagcactgatcctgcctctaggaactggttttcaggcaatgatggctttcctgtagcttgtagtttatgttctttatgtcacttcattctccaagaatccctggaagcagcaaataggaatggcccttttaagctagcactgataacttcctagtgtttgtgccctagacagcatcttgaagctggaaggctgagttgtcctgtgtgcatttgcagctcaggcttcgaagaagacatagcaagccagccag

SEQ ID NO: 470449 - DNA, 478 bp, Homo sapiens
tgcctgttgatgaagggggtcccttggctctgctctccttgccatgtggaaagtcccgtgaggcacactctgtgactgyagggggccaggctcagtttcctcatgtgtgagtcctgctgcctgagggagtaaaggagcctaattctggggcagtattaggaggcctgctgttggggaacctaagctgtgtcctccaataagaacacaaacacttaggtttttatcgagctgattcctgtgcatatttcacaagatggggaaaggggtgttatatatggacacacactcccaaccttgcacctccggcagtctgtatggtcttatctagccaggcaccttgggctctgatgtaccacgtgggacagatggttcctacatgcacccagcacaatcacactctctcctgggtctgtcctgtcctcagcctggatgccttcccacccacgtggaactgtgaccctctctctctggctttcag

SEQ ID NO: 470450 - DNA, 570 bp, Homo sapiens
agtggtaagaacaggaagggctgtctgtagaagaggcccagagggaggcttgaagagggagcggycaggggcttgttctgcccctgtgtccctgctcacactggttctccagcactgcaaatgcttgtttctctttccggtccacctaaatcttacgtgccctccagggcctaacttgaatccaacctacttcctccagccttctctgatcatgcctgagaggctcactatctcctttgccaatactttcctgtatggttcatctggcaacccaaaatctgctatcctggcacatcagtgcaggggttccactgctgcttatttcttcagtggcactgcaaacatcactttgcttcttgaaatgatgacaattacattattactatctgtgctaagatgttcacaactactacctctctcttttccccccatgttgggctaaagtagaaattgcccttattttgaacatggacaaaccaagtttcaaatccaaagatgcaaacaagaagggcagatatgaatccccatcctggccttgggctcactactctggagcagatgaaggggccc

SEQ ID NO: 470451 - DNA, 522 bp, Homo sapiens
ggaggcttgaagagggagcggccaggggcttgttctgcccctgtgtccctgctcacactggttctccagcactgcaaatgcttgtttctctttccggtccacctaaatcttacgtgccctccagggcctaacttgaatccaacctacttcctccagccttctctgatcatgcctgagaggctcactatctcctttgccaatactttcctgtatggttcatctggcaacccaaaatctgctatcctggcacatcagtgcaggggttccactgctgcttatttcttcagtggcactgcaaacatcactttgcttcttgaaatgatgacaattacattattactatctgtgctaagatgttcacaactactacctctctcttttccccccatgttgggctaaagtagaaattgcccttattttgaacatggacaaaccaagtttcaaatccaaagatgcaaacaagaaggscagatatgaatccccatcctggccttgggctcactactctggagcagatgaagg

SEQ ID NO: 470452 - DNA, 570 bp, Homo sapiens
agtggtaagaacaggaagggctgtctgtagaagaggcccagagggaggcttgaagagggagcggccaggggcttgttctgcccctgtgtccctgctcacactggttctccagcactgcaaatgcttgtttctctttccggtccacctaaatcttacgtgccctccagggcctaacttgaatccaacctacttcctccagccttctctgatcatgcctgagaggctcactatctcctttgccaatactttcctgtatggttcatctggcaacccaaaatctgctatcctggcacatcagtgcaggggttccactgctgcttatttcttcagtggcactgcaaacatcactttgcttcttgaaatgatgacaattacattattactatctgtgctaagatgttcacaactactacctctctcttttccccccatgttgggctaaagtagaaattgcccttattttgaacatggacaaaccaagtttcaaatccaaagatgcaaacaagaagggcagatatgaatccccatcctggcctkgggctcactactctggagcagatgaaggggccc

SEQ ID NO: 470453 - DNA, 624 bp, Homo sapiens
ccaatttaagtctaagtacttgtcttttcttggacaaatcagcaatagtttccaccctaccctatcctcagccacatgttcaagcccagtgtattcagatgtctcatatcttctaagtcaaagaacaaacatgtccaacaggtgagtctttcagagcccttcaattcccgttgttcttgatccatgatggtaggccaggaagtctcacatagccatctgccagtattaaagtaaaccatctctatgctgttcttcaaccccatctaaatagtacataaacatgatggttaagagcaattacacraaaagtgttcacaccttagtcacttccagaacacagactctcctaatggatggcaccatggaagctgagctttaaaaagtgttgaaacgaccttgttattttgattgctgatgccacatgcttttccttatgtatcccaaagttctcaacttcctcactgcctggtgacaaggtgctattagttcatgcatgctagctaattaaattttaaaaatggtgctaaaaacctccaacttggaggcatatgagacacctccccctcctgtggtgtgaactttgaagctaagtgtcaggccctttataccaaaggcttatttatt

SEQ ID NO: 470454 - DNA, 524 bp, Homo sapiens
tctgatagttgcattccaataggaaacttctgaatatcaatgtgctataagatgtacacatgcaaacctcaggagaacagatatgttggagttacaagaccttcctattgttttttcaattctgtcccaccctatatacaagatttagtgaatgacagccattataatttgttgcctaaggaaccgcttataatctttacccctctggaaaaaaaatagaagactactcaataaatacataaatatctggctggtgttcagttctttcaccaataatgtaggtaccacaaagacatagtcattgcagtcattagcctgacaataactttgtcactgcacaagaaaaatatattawacatgtatattgacatacaagagttacacaatcattactattattataatttacaatagtttttagtttcctgtgtctcaggcactatgcttagtactttttatatactgtcttgtacaagccctccaacaatcacataaggatagaaataaataccattcttatatta

SEQ ID NO: 470455 - DNA, 594 bp, Homo sapiens
gtaatcttggagcatgaggtagagtgaatcactgctcctgatgcttcatgccccatctgtatcaaaattctacatcaatgccccttgctccatgactgtgcagtgcctcccrctacagtggacagagtcttcttccctgccccattaatgttaaccttgggcatgtggattgcttagccaatagaatgtgggcagaaattatcttagcagcttccaggttgaggcctcaagagatattactgtttcattttacatttcttgcatccctgtgacctgtcaggagcagcacttccctaatattctcttcagcctgggtcccattacaaacatgtggagcagatctaaaccccactgtcagactggaacagagctactccagtgaacatacagaccatgagaaaaataaacattgtcatttgccaatgagcttggggtggtttgttacacagcattattgcaacagtagctgactaatacacatcagatcacataacttctctggacctccatattcacatctgtaaaatggggccctggcattataatcaatgatgcacaactttttttctacccctacgtaactgacagctttga

SEQ ID NO: 470456 - DNA, 636 bp, Homo sapiens
tcccactaagtggtcaaaactggagcccccaccattggtcagagtgtccccagcctgcaggttgcggggtgtggggagacaggcggttgggggaccaagcagtctcagaaccacatgtgatgcatggtgatgctatttcatttcactgttttaattatagctgaaacatgaagccagtcatcagaattcaaaagccttgtaaaaactcctatttagaggaaaattataattttctgataaaatatgaacactcaaaataagccataaaacgtaactgcaaagtatctagagaggagttaattatatattagaaccaagatgctgggatatttttttctgcagaggaatacctctctatatttagaaagaaattctttgggagcgccatggccactcaacagaattatggctttatggaatttggggaacataatccatttgtttaggttccagagttgaaggaggaaatcatatattatgtgtatttatgtagtggcaagatgcagtcctgtggcacactacatggaataaagcacttacctccaaggaaagtgcrgtgatgttttctggttctgatgagacagaataaattagagataagagtgaaggctgattggatctcgtacctatccttaa

SEQ ID NO: 470457 - DNA, 531 bp, Homo sapiens
ttgcacatatctggatgcagttatatttcctaagtgccagtgcttcacatatgtaactgatgcatcagttctcacaacaaccctaggaagtagctacaggttgagcatccctaatctgaaaaggcgaaatctgaaatgctccaaaatccgaaagtttttgagtgccaccatgatccttaaaggaagtgcccagtggaacattttggattttggatttataatgcaaagattctaaaatcctaaaacatctgaaatctgaaaatacttctaagtcccaagcatttcgaataagggatactcagcctgtaataatatatggttacatagcacagaaaataggaacctgactttgaatccaggccatttgatttacagagccaccgatagcaatgtactctataccggttctaaatacatactgtaactccccaagaggttaaaaatgaaataaaagtttagaatatacacatataccaaatatataycaagtacataaagttttaaactgaactttgataagagagtttgtaa

SEQ ID NO: 470458 - DNA, 585 bp, Homo sapiens
aaagcagagttaaggctggttctgaaagcagccaagagcagttttcaacacaacacaaagggtaacacaaggctttcttttctcacagtccgggctgaccacatatggcctggctactgcaagaaacattgaaggtgttagcgcttttgactctaactgcgcacccctcagagaagatgtcacatagtgaacatcgcaaggcacagaatgggaaatggaagcacagaatcaaaccctgagattcggggagaaaccaaagtgtggagaaattatgtaacttatccaaagtccagagcaggttactgactgggagaacttggckttccttccagactccagatatgagacttttctgcggtctgacacagtggcttcttccacctctgcagtcaaccccacaaaggtggctcgagtgttcctctgcctccctgcccagcagctcccagcctggatggtgaactcctttgcctgaacatcccacgcaccctgccatctcctgggctagaacaacaggttgtgcaggacagagggcttccctgccacactcccctctattacaaaatgccagaggtcccagttcgaagc

SEQ ID NO: 470459 - DNA, 550 bp, Homo sapiens
tctggggacagaaccatcatctcacttccagccagatgagaacaactgtctttggttgctcacagggcacactgtagctttagacagtgacaaactatttgaccggccaacaccaaaaaagtattttgagcttatggaaagttagtatgagatcatgcactgctaaaatataaaaggggagctcagataatgcctgcagtgacaggcacacaaatggccggtgtcatatatcgcctttatttgcagacaggcttttccttcagcctgatcaggctggtgtctgatgttagcacttgggatcagctttagaaaaagctgaactggggaggagattcattggtcataactattgaaaagaagacaaaaagattcagagtctgtaattttcccacccacattaagttatttggataaaagtccgccgtcataaccagwctgaattcactaaaaataacgtacatctgagaatatttccacaggtttgaccactggttccctaagaaaaagagcagagaatacagtccagtaccagaaagtttaggatttagtt

SEQ ID NO: 470460 - DNA, 527 bp, Homo sapiens
gcttgcacaatacctgggcaggcccttgtgccctgtgtgctgcttttttcctctcctgatctcttgatttaactcgattgagtatgacagaataactccagttcttgtaatcagttatcacagtacatgcaacagttttattcatttatttgttgatggacacctgtttctaatatttgcctattatgaacactattgtatacataggtattttttaattcttttgtgtgtgtatctaggagtgggaataccaactttattttctaaaaaattatatttctttgctttccttctcttctcccttaacgatctcttggtcctgttatcctaaacaaaaaatgcaaggactattggaccacaaagtgaggtgaggtctcttagacctttgagatttaagtaaaattggctcaaacaaattattcaatatcctctaagaaagtaggaggtccaatgtccttcttgagatttgtgtactcccargtcatcctataatgacctctgactctttctgcttctgcttaaccttc

SEQ ID NO: 470461 - DNA, 511 bp, Homo sapiens
ttagtaataattgcaaggtgacaagctagataagggaggacaatgcatgcttactaggagaatcycatgaagctttggaaactgtctagaaccccattatttcatatgcaggagtatatctgtgttcattttcctatccttcaatagcctgccacaatatgttgctatatagtgtgcactaaaaaattactgctttgaaatttcttagcaacttgttaatagaccacttctaggacttgggaataatctatgaggtaagatgagacaggacatctaaaggaatagaagtaagtttaagtggtttaggaaactttatttatgacatagattctgttaaactctactaaatatcctttttcttctaggaagtttgtgtgtatgttacagcccgaagtgtgcctcttggggacaaatcacatattcagtgttttacattcataaaggtacttttcatgtcttctttgttacttttacataataactttttccaaatagtagcaaattagatagc

SEQ ID NO: 470462 - DNA, 511 bp, Homo sapiens
ttagtaataattgcaaggtgacaagctagataagggaggacaatgcatgcttactaggagaatctcatgaagctttggaaactgtctagaaccccattatttcatatgcaggagtatatctgtgttcattttcctatccttcaatagcctgccacaatatgttgctatatagtgtgcactaaaaaattactgctttgaaatttcttagcaacttgttaatagaccacttctaggacttgggaataatctatgaggtaagatgagacaggacatctaaaggaatagaagtaagtttaagtggtttaggaaactttatttatgacatagattctgttaaactctactaaatatcctttttcttctaggaagtttgtgtgtatgttacagcccgaagtgtgcctcttgggracaaatcacatattcagtgttttacattcataaaggtacttttcatgtcttctttgttacttttacataataactttttccaaatagtagcaaattagatagc

SEQ ID NO: 470463 - DNA, 653 bp, Homo sapiens
ggctgggcgcggtggctcacgcctgtaatcacagcactttgggaggcagaggtgggtggatcacctgaggtcaggagttcgagaccagcctggcccacatggtgtagccccgtctctactaaaaatacaaaaarttagctgggcatggtggtgggtgcctgtaatcccagctactcgggaggctgaggcaggagaatcgcttgaacctgggaggcagaggttgcagtgagccgagttcgcgccattgcactccagcctgggcaacaagagcaaaactctgtctcaaaaaaaaaaaaaaaaatgtggcctatgtagtgccagagacgtttcctggtgtatgtggggtaaacaaaaacaagacatggtcattctaattgaccctaggctggctgttctgtggccttgtaagggggtgggggcccagagattcttcctctttttctaaatgtagaacacacttgactggctctggtaaactggacatgacctaatgttccgtcttacatgatcccattgcatgggaaagccagcccaaacgcttagccagacagcagtgaagctactgatgataaagccagatactgctgggagctcagctgtcttgtctctgtggctgtttactttctgacagccttttttagtcaacaaggtta

SEQ ID NO: 470464 - DNA, 542 bp, Homo sapiens
tgaagccagtttgaatccgggtttcacggtgagtgggcagatgctccacaatgagtggccatgccctgccttgcaccacccccccaacccaccacctcctttcaggacggtggtcccagccaccctgacatacctgtcacctgcccgttgtgctccttgagctcgtgcaccttggtccatttggcaccgctsttttcatagatatgcacctcatggttgttggggcagatggcaatctctgaaggggagatggagggagattgaggggccctctccatgactgccctctgccaggacacactacacagtgcacctaggcaacaacacctcacctttcatgactcagtctctcctcttctgccttgcaggggccccctgaagtccttcaggccctgctaggccaccctgtcttctcctggaactggctgtcctttactcgcagcaatgaaccctgggacctctccccaccctattgctctggccaaccaggaacccttcgctgctcctgctgacacctcagggcccctgcacctgccagcccc

SEQ ID NO: 470465 - DNA, 219 bp, Homo sapiens
aaggcacagggagggaaatctcaaaaaccaacaacctgcgtattcycagcctattaatcaatagaaaatcactcaactggattagggtcttgtacctggcagaaaggctcttatggacattggaattggatttttacacttgatatgacacctccttgagtcagatcagattcgtgtttgatagactcttgccgaaaaattgctccagggtctgtgcag

SEQ ID NO: 470466 - DNA, 219 bp, Homo sapiens
aaggcacagggagggaaatctcaaaaaccaacaacctgcgtattcccagcctattaatcaatagaaaatcactcaactggattagggtcttgtacctggcagaaaggctcttatggacattggaattggatttttacacttgrtatgacacctccttgagtcagatcagattcgtgtttgatagactcttgccgaaaaattgctccagggtctgtgcag

SEQ ID NO: 470467 - DNA, 437 bp, Homo sapiens
agctaaggcagggcgatcacttgagcccaggagtttgaggccagcctgggtgacatagtgagatctcacttctaaaaaaaaaaaaaatttarttagctgggcatgttggtacccacctacagtcccagctactcaggaggctgaagcaggagggtcgcttgagtccagaagatcaaggctgtggcgagctgtgattgcaccactgcactccagcctgggcaacagagcaagccctgtctcaaaaaaaaaaaaaaaaaatcatctcccttgtcttctgattccctgagctgtcatagaaaggaagtgaagcagtgaaagcatccccccaaaagggacttttcaaaaccagcctaagcaacatagcaagaccttgcctttagaaagtatttaaatttgaaggaaaaaaaaaaaaaagcagtattatggcacagagttga

SEQ ID NO: 470468 - DNA, 437 bp, Homo sapiens
agctaaggcagggcgatcacttgagcccaggagtttgaggccagcctgggtgacatagtgagatctcacttctaaaaaaaaaaaaaatttaattagctgggcatgttggtacccacytacagtcccagctactcaggaggctgaagcaggagggtcgcttgagtccagaagatcaaggctgtggcgagctgtgattgcaccactgcactccagcctgggcaacagagcaagccctgtctcaaaaaaaaaaaaaaaaaatcatctcccttgtcttctgattccctgagctgtcatagaaaggaagtgaagcagtgaaagcatccccccaaaagggacttttcaaaaccagcctaagcaacatagcaagaccttgcctttagaaagtatttaaatttgaaggaaaaaaaaaaaaaagcagtattatggcacagagttga

SEQ ID NO: 470469 - DNA, 437 bp, Homo sapiens
agctaaggcagggcgatcacttgagcccaggagtttgaggccagcctgggtgacatagtgagatctcacttctaaaaaaaaaaaaaatttaattagctgggcatgttggtacccacctacagtcccagctactcaggaggctgaagcaggagggtcgcttgagtccagaagatcaaggctgtggcgagctgtgattgcaccactgcactccagcctgggcaacagagcaagccctgtctcaaaaaaaaaaaaaaaaaatcatctcscttgtcttctgattccctgagctgtcatagaaaggaagtgaagcagtgaaagcatccccccaaaagggacttttcaaaaccagcctaagcaacatagcaagaccttgcctttagaaagtatttaaatttgaaggaaaaaaaaaaaaaagcagtattatggcacagagttga

SEQ ID NO: 470470 - DNA, 373 bp, Homo sapiens
cctaaatgttctgcactccatgaccctcaaaccactacagtgtgttttctttttttatgcttacaatgattcagctgacgtcctgagcccagttacccatgcctcattctggaaaactgttctctctctctctctcatttttatttatccatatttttttttacagttttgccaatctgcatttatttcctagtgctttgatctttcgggggacaccgggaataaatgtcttctatgttcccccacaggtcgcttctctgggagtcaccacyttcaccttatgtgctctgtgcatagaccgcttccgtgctgccaccaacgtacagatgtactacgaaatgatcgaaaactgttcctcaacaactgccaaact

SEQ ID NO: 470471 - DNA, 603 bp, Homo sapiens
gaaaatatttactgtctggcctgtttaatctcctgaccccagatatatagcatataagtgtttagaaataagtcctataaaatgaatacaggaagaagatgaaaatgcaatcctattttacatctaaattaaaaggtggggaagaaatcttctaagagatttaggctaaattgtcattcctttaaagggcttgtaattcaaagaaattctagaaaagtagaggtgagtgagtatgaaatgagagtcagtagactagcttttcataactaacttcattagatatgtagttttaagtaaatagtttcattaagtgttatactttaataaaaaccagtaaaaggtggtcttgtaaactatgatggtaaagttgcaattgagctggctaatgtaaaacrtccattattgtccaccatttctgacatcaaagaactaaaatatttcacttgtttttttctgagtctctggggaagttggaacttgtaatagtcaggataggcaaggtatggcacagtaataaacaacccccaaataccagtggcagaaaaacaagggttaagttttgttcatgcaaggtgcactgtatgtctggtgaccctccaggca

SEQ ID NO: 470472 - DNA, 593 bp, Homo sapiens
tttttttttttttttttttttggagacagtgtcattctgatacccaggctgaagtggcatgatttcagctcattgtagccttgacatcctgggctcaagcaatcctactatctcagcctcccaactagctgggactacaggtgcacaccaccacacctggctaatttttgtagggatggggttttgccatgttgcccaggctgttcttgaactctggagttcaagcaatctgcctaccttggcctccaaactttttttttttttttttttttttatttttaagaaattaaatgttacagagaagtagtataatgccatatcaatcccttctctaactcttttttctcaraggtagctacttttccaaacttggattaaatccttctcatcaatgtttttatgccttcattatatgtgtgaactcttaagcagtatggcatatttttcattttttaaatttatataaactgtttcgtactatgccaagccttttgcagcttgctttttttgattcattaaaattttcaagatttaccactattgacgcatgtagatttagattatttaacatctttggagtatgttatgaaata

SEQ ID NO: 470473 - DNA, 526 bp, Homo sapiens
atcttcctgtcagattttaaattacacaaatttaagaaagaagtttgtgtacagactcaccctcagtttccactttctgcagcttccattttttaagacactactggattgactcatgctgtccctgtattgttyttagaatgtatgtcttagaaaaatctgagacagtccattattctttatctggatgtagcaatgagaaacacactacttacaggctttttctgtggccaccttcaattatactgctgtatttgagggaactatacatgccaagatacaatgtatcattcctcatttctttttacccctgctcatgctttaagttggaaattgtttctaaataattatagaaagactgatgttgatggtctagaagaagctgactatacctctgtctacctaaaaaagtctcttcacccatttgggtactggctgcccagatttcaaattggtgtagatcctgtgccttagctacttggaggtaacagaaaaggaccaaaatctttttcctgcctacttccca

SEQ ID NO: 470474 - DNA, 654 bp, Homo sapiens
cagtccattaaaaactgaaagcgccattccctggtacccaagctggggtttactgttcgggaagtcatgggaaagtggttttatggcgggactcgtccaaaacctgcagggttctgtggtttggacaggattcggggggattattactattcttttacatgaaggtgatcagcaggtctcactgctactttgggtttggggagaaagatggggagtttcggtaatgaaagtctggctctctagaagttctccccaaacccttcatccagggaagcactgccagggcactcaggagacttctgtgtctttatttccaactctatagactctcaaagaaggaatacaggttacaagattcacagccacttcctgtcccttggaatggaaaatgcctgcatgccaacctgagcccaactcactttgcagctcgaggtaatttctaaagaaaggaggggagggaaattgcacttggaagcactcagtctgccagggagttaacaaagagcctggatctgtgcctttrtagtaatcagtagatacaacacaatggtttcagaatctgcctatttacccaaaagctcaaagtacaaaatttacactattatccccttgcccaccatctataaaaaccaacccccaaaatacccctactta

SEQ ID NO: 470475 - DNA, 588 bp, Homo sapiens
atccaccatcctctcctcgctgtctctgctcgggacacrcagatctccaggctgttcatcatgcaggccaggtgcgctcttgctcaggaccttggcataggcagttccctccctgcagattaccctgtgagtcacccttcacctccttcaggtctttactcaaatgttaccttctcagtgggactgccttccatgcagcagttacattataaaatgcatatatctgcttacattctaggttcccaaagcccattgcctctctgatcagagtccatttcttctgcaaccccaggggacaatcacatagaacctccctcctcatctatatgggttttataagggacacaagagaagttgctggaagtgtctatgttcccatatagaatgtcagtttaattattttaaaattatgagcaaaacctcagagaactgctttgaaaatgcagagaactgctttgaaaactatgtgtagttctgaggatgtcttccgtaaatataagaacttggtgattagagttactattagagccagacttggaacccaaatgattagatgacttccacacatctgagccgtccaggcttgtg

SEQ ID NO: 470476 - DNA, 464 bp, Homo sapiens
tcagaggctatgcccaacaccttaatctggtagggcctccatcccttgctgaagaatctatggatggattgggacatacactcaaagttcagtcagcttatgggtctccctggcttttactttccgttatgccctttgtgtctcctctgtctgtgcacaatgcctcacattcacccaggggtgtgtggatagctggggccctctctgatctctcctgagtgtgagcacagccttgtaatgcatgcagcctttcagaccaccagggttatatgggactgtatcaagaccccgatgttttattttctggatctctttgttgtatgtctagcttgtctgccatttagttgcttgcttcaccttggcattgaccttcctcatttatttgccaccgagattgctactgtttatgacaatgcccaggagattgctttgttttgttttgcartatactccaaatcaagcca

SEQ ID NO: 470477 - DNA, 561 bp, Homo sapiens
accattttagaagtcacctctaagaacttggtgactgccaacaagtacctgctgttccttagcagactgaaagtcgagcttcgctttgtggctgccaatgggagggacagaaaaaaagatagacaaaaggagggactgagaaacaaagcatgctttctcccctccaaatagaggttttcttccctgtttggcaaggaattgggaggtaaagtggctgaggctgtgatgactgacatagcccttgatacatgtttgtcattgytgttattcattcataactttggaatcattccaactactgactccagaaagttggctggaatgttttccactacagatttaatcgggagattctgtttttctcacagccagtctgaggaggactcaagtgcctgatacggatccccagttgccctcacaaaaccagttctctttccaggagacatgatgctttgcaaggcatggaggtttctccagagggaatggcaaaccgaacccccaagccttgtggctcttgttccagtaacacacatctgatttctccagaggatcactcaaagt

SEQ ID NO: 470478 - DNA, 390 bp, Homo sapiens
ttcacctggccagatctgtgttgtgctggcatgttctaaggctcggaatctgagcatctatgtctgagcccggcctgcaggagtgactggctttaactgtttggacagattttaatgcctttaaaaaataaccagccaggcatagtggctcacgcctgtaatcccagcactttgggaggccgaggcaggtggatcacgagatcaggagatggagaccatcctggctaacacagtgaaacccccgtctctactaaaaatacaaaaatattatctgggtgtggtggcwcacacctgtaatcccagctactcgggaggctgaggcaggagaatcgcttgaacgctggaggcagaggttgcagtgagccgagatcgcgccactgccctccagct

SEQ ID NO: 470479 - DNA, 390 bp, Homo sapiens
ttcacctggccagatctgtgttgtgctggcatgttctaaggctcggaatctgagcatctatgtctgagcccggcctgcaggagtgactggctttaactgtttggacagattttaatgcctttaaaaaataaccagccaggcatagtggctcacgcctgtaatcccagcactttgggaggccgaggcaggtggatcacgagatcaggagatggagaccatcctggctaacacagtgaaacccccgtctctactaaaaatacaaaaatattatctgggtgtggtggcacacacctgtaatcccagctactcgggaggctgaggcaggagaatcgcttgaacrctggaggcagaggttgcagtgagccgagatcgcgccactgccctccagct

SEQ ID NO: 470480 - DNA, 525 bp, Homo sapiens
gctgtgggttcagaggcagctctatgacrttcagggaactgggtgtttcagccagaaaaccagaagattgaagaggaaggaagtcctccaaatggactcccccaaaaagtgagttagcacgtgttgcataggctgccaaagattttccaatcaagctcatccacgtgataatttttcatgcatttatatcctgtttttgtcaagggtaatttagtaagatttatcaggaaagaatatgtattctacaactcagttttctccaactgatcagtgagaagatcaaacttccaaagaaccaccagactcaaatctttggaaacagagtttaaagatttccacttctgataaatgtcctgatttttttgtttgtttgtttgtttgttttttgttttttttaaagatggagtctcactctgtcacccaggctggagtgcagtggcccgatcttggctcactgcaacttctgcctcctggatccaagctattctcctgcctcagcctcctgagtagctgggattacaggtg

SEQ ID NO: 470481 - DNA, 525 bp, Homo sapiens
gctgtgggttcagaggcagctctatgacgttcagggaactgggtgtttcagccagaaaaccagaagattgaagaggaaggaagtcctccaaatggactcccccaaaaagtgagttagcacgtgttgcataggctgccaaagattttccaatcaagctcatccasgtgataatttttcatgcatttatatcctgtttttgtcaagggtaatttagtaagatttatcaggaaagaatatgtattctacaactcagttttctccaactgatcagtgagaagatcaaacttccaaagaaccaccagactcaaatctttggaaacagagtttaaagatttccacttctgataaatgtcctgatttttttgtttgtttgtttgtttgttttttgttttttttaaagatggagtctcactctgtcacccaggctggagtgcagtggcccgatcttggctcactgcaacttctgcctcctggatccaagctattctcctgcctcagcctcctgagtagctgggattacaggtg

SEQ ID NO: 470482 - DNA, 525 bp, Homo sapiens
gctgtgggttcagaggcagctctatgacgttcagggaactgggtgtttcagccagaaaaccagaagattgaagaggaaggaagtcctccaaatggactcccccaaaaagtgagttagcacgtgttgcataggctgccaaagattttccaatcaagctcatccacgtgataatttttcatgcatttatatcctgtttttgtcaagggtaatttagtaagatttatcaggaaagaatatrtattctacaactcagttttctccaactgatcagtgagaagatcaaacttccaaagaaccaccagactcaaatctttggaaacagagtttaaagatttccacttctgataaatgtcctgatttttttgtttgtttgtttgtttgttttttgttttttttaaagatggagtctcactctgtcacccaggctggagtgcagtggcccgatcttggctcactgcaacttctgcctcctggatccaagctattctcctgcctcagcctcctgagtagctgggattacaggtg

SEQ ID NO: 470483 - DNA, 421 bp, Homo sapiens
ctgaggtcaggagtttgagggcagcctggccaacatggagaaatcccgtctctactaaaaatacaaaaaattagccaggtgtggtggtgcacacctgtaatcctaktacgcttgggaggctgaggcaggagaatcgcttgaacttgggaggtgggggctgcagtgagctgagtcatgccactgcactccagcctgagtgacagagccagactctgtctcaaaaaaaaaaaaaaaacaaacaaaacaataaaacagtaaagcccaaaagttttgggaaaggtgaatggggtaaggtgtaaagagtttgtcacaggtcttagctcctgagaaacatttaataaatggtaggggaaggagaagaatggaataatacttacatcctgcataggaagaaaaatctcaagatgacagaaattataca

SEQ ID NO: 470484 - DNA, 550 bp, Homo sapiens
cactgtcaaacatgtgatctgtctttgacaaaaaccttgttatgtggtgcatggctctatagatgcaagatgataaagatgatatatgcaaaaactgtatagttactcctgaggaaccaactcmaccagaaaagccaaacctctttagaagagtaatgtaatttatcatagcacatgaaattaatcttaaagatttcattttctaaaagttttctttgaataatataacttctatttcaatggataggacaatttattccatttaagggcattgcttactgagcagagagcattttagataaaaaatatagtaacataggagcttttataaagaacacagagagcaaggatatataaatgatgccattataactttgatgaatatgcttttcataactaacaacctagctgtgatattaaagaaaaggtttttaaatagtaatgctttttttaatgtagggacttggcttcaagtcttgcttgctttcatttttgcataaaacatctttagaagggagtgaagcgtggaactctggaaccacgcagactt

SEQ ID NO: 470485 - DNA, 550 bp, Homo sapiens
cactgtcaaacatgtgatctgtctttgacaaaaaccttgttatgtggtgcatggctctatagatgcaagatgataaagatgatatatgcaaaaactgtatagttactcctgaggaaccaactccaccagaaaagccaaacctctttagaagagtaatgtaatttatcatagcacatgaaattaatmttaaagatttcattttctaaaagttttctttgaataatataacttctatttcaatggataggacaatttattccatttaagggcattgcttactgagcagagagcattttagataaaaaatatagtaacataggagcttttataaagaacacagagagcaaggatatataaatgatgccattataactttgatgaatatgcttttcataactaacaacctagctgtgatattaaagaaaaggtttttaaatagtaatgctttttttaatgtagggacttggcttcaagtcttgcttgctttcatttttgcataaaacatctttagaagggagtgaagcgtggaactctggaaccacgcagactt

SEQ ID NO: 470486 - DNA, 550 bp, Homo sapiens
cactgtcaaacatgtgatctgtctttgacaaaaaccttgttatgtggtgcatggctctatagatgcaagatgataaagatgatatatgcaaaaactgtatagttactcctgaggaaccaactccaccagaaaagccaaacctctttagaagagtaatgtaatttatcatagcacatgaaattaatcttaaagatttcattttctaaaagttttctttgaataatataacttctatttcaatggataggacaatttattccatttaagggcattgcttactgagcagagagcattttagataaaaaatatagtaacataggagcttttataaagaacacagagagcaaggatatataaatgatgccattataacttkgatgaatatgcttttcataactaacaacctagctgtgatattaaagaaaaggtttttaaatagtaatgctttttttaatgtagggacttggcttcaagtcttgcttgctttcatttttgcataaaacatctttagaagggagtgaagcgtggaactctggaaccacgcagactt

SEQ ID NO: 470487 - DNA, 622 bp, Homo sapiens
gaatctgtttccaagcttactcaaggagtagcagtatttctttgcagttttgaaactgagggccctgacttcttgctgttcaataacaaaaggctgcctttagatcctaaggagctgaacctgaagttccttgctgcataatatgcttctccaaaatggccatttacttcatcatgccagcaaggagagcctctagcatgagtagggtagaaatagggtggagtcttagataatgttacacaatcacaagtgattgacatcctgtcacctttgccatgtcccattggttagaagccagtcatgggctctgccttcacttaaggaaagagttctataaatacgtgaattccaggggtgaagttcatggagcagacattgtggattctgtctgcctcatgtgttttcatttttcttgatacctataagtgcaattactgggtcacatggcagktatatgtataattttataagaaagtgccaaattgttttccaagacggccatattattttgcattcttgtgaacaaggttctattgcttttaattcatatgtgtttttatttttttttaatttttgttgtttgagatggaatctggctctttcagtcaggctggagtccagt

SEQ ID NO: 470488 - DNA, 481 bp, Homo sapiens
actgggactcataactgcctaacatgctaagttccctgggtcggggaagggcagcatccctctctatagctccaggtcacgcttttcccctgctagagccagggaggctggacagcttcatccctagaggtgccccccacagccccacacaccagctgtgttagacggcggccagagcgcctcttcaggcctgaccctgactcatccttcctcacggggcagggcctccctgaaggaactccagcaactccagccagaggctcagggacagaaccctgatctccctgggcctgagcccctagggggaagggtggccgcagtctctgcagaccrtcatacttagcctttcctcttggtagttctgaggaatctgggcagcccagacaagtgggtttccccccaggcaaagcataccctctccaccagggaacagtcaaagtgcttcattaagcaggtcctgttccccatgccacccaactgg

SEQ ID NO: 470489 - DNA, 559 bp, Homo sapiens
tgctgctgagaaaacaggaaaggtaatcccatgtttcagctttaacgtgcctggtcaattgtgaaaactgacttgaagggagagaaatttcatcttgacccccttggataatgaacaagaaggacagcctggcctgtgaaggaaacaccagagtggggcaagctcagagaaaattcagccaacatagcagtggaatcatgctctttaagtgtcaggccagcctcacaggtaccacactttttctaaacacaggtttctccattcacaaattgtttacttcagaaatgactttttctcctataaatggaattcctttgtctgagaaccacatacgcaagaaacaaggatgaaggaagagccatctaaactaccaggtcagctacattcattcrttcattcacctgccccagcatatccatcctacgggtttactaggtaacaataggggtatggatgaggcaacagggatgtacagagaaagaaagtgcttagagtgagttgtatagcttaaatgctcatattagaaaagatggaaggtttaaaatcaatgccctacgtt

SEQ ID NO: 470490 - DNA, 527 bp, Homo sapiens
ttggaacagcaaggcattctaagacagaaagacaaccctctctgtgttggaagaaaagtagcagtgactgtaattaacagagcagcagttgtggaacttctagggttgtatttaaaggcccatgcaggaacagggtgagcagtcgtgactgcggctgtgtggtaaaataaggatgggagcgggaaatggggcaggagaagtaaataggtatacttacagcccgcggagccgaagccagattttctcgatctgttccggttgcaggtatttcagagagttgctctcaaattcttcaatctccttggttggcgactccatagctgcaggtaggtgaccactggcggtgaagctgagatagtttgggctgtcccctccccgtctcctcgcccagctcgcgatgcccagccaggcgcggcgcgcgtttgccsggcactttctcggcgcgctcccccttctgcgcccccagactccgacttagagcggactccgatcgcggcaaaccatggccccaggtgcgctccggaggc

SEQ ID NO: 470491 - DNA, 569 bp, Homo sapiens
tactatttttttaaagcttcaatgaaactgcttgatttctacaacaaactactagagacagagtagtttataaagaaatttatttctcacagttctggaggctgggaagttcaagatcaagtccccagcagattccatgtctggtgagggcccattycctggttcatagacagccatcttcttgctgtaaccttacatcacagaaggcacaagggtcctctctcaggcctcttctataagggcataaattctgttcacgagggctctgccctcatgatctaatcacctcccaaaattcccacctcctaataccatcacctttggatttaaaatttcaacatacaaatttgagggggatacaaatattcagtctataccactactttttgaacatatagaatgcacttataatgactttaaatgttcttccctctaattctaacatctgtgtcactttgggtcagtttctattggttgacttttctcctaattgtaggtggtgttttcctacttctttcatacctagtaatttttggctgcagacattgtgaattttatcttgttggcag

SEQ ID NO: 470492 - DNA, 474 bp, Homo sapiens
catgtgaatgtttccaaggacagggaagcccctcatctcgaattaagatggtttttgcccatatataagtgtaagtttgtggcatatgtccattttcctcaccagagtgtatgtcaccactcctagtacagctacaaaaatgattgaagccatcatttttaccttgaggagatgggaattgggaaagagaaagaatcttgtagggctcatgcagtgtcaaaaaactctggactgatggagatttgcagtcatggggattttagcttgtggggaggggcagatgggaaggggacaaaatgagactgtcctgggggaagaggaactggccattagatttttatgtttattaaaaggggacataagatgctttaaaaaaaatgagcagtactcttgtttgtgcggtttcagtgaacgagctgtggttttttttttttttkgctgggtcatcatcagtagacagttcctgtgtaatca

SEQ ID NO: 470493 - DNA, 479 bp, Homo sapiens
catccctggtggtgtcccctccaccctgtgccaggaccttcgcagtgccctctgctgggagtgctcctcaggcaggtcccacctgcaggcctttcctgtcatcggcactgcagcccctccccacccaggactccgggcctactttcctgctttcggtcttccgtgtcagacagcgtcacataatatatatatttcctatttatagatttcatcgtatgtcaggtctacctcattagaatgtcagtttcaaagtacaaagactttttaactgttttcttcatatattcattctaggcacctgrgatattgctgagcatagagtaggaattcagtaactatttgctgaatgtatgccatgctttgtaattcaaaatgtgtgtgtgtgtatgtgtgtgatgtgtgtgtgcgaaataatggatttttgatatcatttaggtctcccagacctctgtagggcagccgcttgtcctgaattgtct

SEQ ID NO: 470494 - DNA, 479 bp, Homo sapiens
catccctggtggtgtcccctccaccctgtgccaggaccttcgcagtgccctctgctgggagtgctcctcaggcaggtcccacctgcaggcctttcctgtcatcggcactgcagcccctccccacccaggactccgggcctactttcctgctttcggtcttccgtgtcagacagcgtcacataatatatatatttcctatttatagatttcatcgtatgtcaggtctacctcattagaatgtcagtttcaaagtacaaagactttttaactgttttcttcatatattcattctaggcacctgaratattgctgagcatagagtaggaattcagtaactatttgctgaatgtatgccatgctttgtaattcaaaatgtgtgtgtgtgtatgtgtgtgatgtgtgtgtgcgaaataatggatttttgatatcatttaggtctcccagacctctgtagggcagccgcttgtcctgaattgtct

SEQ ID NO: 470495 - DNA, 647 bp, Homo sapiens
atttgtcaaatgaaaagcaaatttcttttgttaaaaaaaaagatactcaaaaaataatagtcttttaaaaatgtggcacatacacaccatggaatactatgcagccgtaaaaaataacgagatcatgtcctttggagcaacatggatggagctgcagggcgttatccttagcaaactaacacaagaacagaaaaccaaatactgcatgttctcacaagtggaagctaaatgatgagaacacatggacacagaaggggaacactacacacttgcacttgagggtgacaggagagaagatcagaaaaaatacatatgcatagtacatggctgacgaaataatctgtacgccaaatctccatgacatgagtttaccaatatgacaaacctgcacgtgtacccctgaacctaaaataaagttagaaacaaaaagattctctacagagtaccacttataggaatttgtccttcaaaaatattcctataattgcrtgaagacacatatatgtggagattcatggaatgcagtttttaaattcctaacagcaaacactggagaccatctaaatatccattggcagggaattggttaaaaccaggctttgtctcttaccctggaggggttgaggagaaggtgaagatgcagagaa

SEQ ID NO: 470496 - DNA, 604 bp, Homo sapiens
ttgggaagctgagacgggaggattgcttgagatggctaggtctagactagcctgggaaacagcaggaccccatctctattaattaaaaaataaaaaaatgagctgaacatgtggcacgggcttgtagtcctacctactagggagattgaggcaggaggattgcttgagcccaaaagtttgagggtacagtaagccgtgacctataccactgcactgtagtttgggtgacagagtgagacctctgtctctataaaaaattaaaaattaaaaacaattcgctgggcatggttgctcgtgcctgtagtcctagctattcaggaggctgaggtggcaggattgctggagcccaggagttggaggctgcagtgagctgtgatcatggcactgtactccagtctgagctggacctgagctgagtgtgagactcttgaaagaagaaaaggagatgtaaggaaaaaggaaagggaagacaagggagaggaggggaagggagggaagggactagtcagaaaaatacartcattcacctgttgagtgacatgtcaatggcttggatctagtgcatgagactacagactaaaaaatctctctgtttcaaatctcc

SEQ ID NO: 470497 - DNA, 604 bp, Homo sapiens
ttgggaagctgagacgggaggattgcttgagatggctaggtctagactagcctgggaaacagcaggaccccatctctattaattaaaaaataaaaaaatgagctgaacatgtggcacgggcttgtagtcctacctactagggagattgaggcaggaggattgcttgagcccaaaagtttgagggtacagtaagccgtgacctataccactgcactgtagtttgggtgacagagtgagacctctgtctctataaaaaattaaaaattaaaaacaattcgctgggcatggttgctcgtgcctgtagtcctagctattcaggaggctgaggtggcaggattgctggagcccaggagttggaggctgcagtgagctgtgatcatggcactgtactccagtctgagctggacctgagctgagtgtgagactcttgaaagaagaaaaggagatgtaaggaaaaaggaaagggaagacaagggagaggaggggaagggagggaagggactagtcagaaaaatacagtcattcacctgttgagtgacatgtcaatggcttggatctagtgcatgasactacagactaaaaaatctctctgtttcaaatctcc

SEQ ID NO: 470498 - DNA, 516 bp, Homo sapiens
caacaacctggtgaggtaggtgttattgttcccattttacagagaaaaagatggaagaacagagaagtaaggtaacttgcccaaggtcacatagctcaaactgggggagccaggaagggaatcaatgcagtctctgtgctgaaccaagttgctacggcatttccctagtgaagtgaaggggctggtagacaggaagtgaggatagttaggctcaggaggtggatttctttcaggacaggacttgctgactttccccaggctacaccattgttgtggctccctagagtaaggagaaaagaatgtgagagagaagaggagctgctctcacctcctccccaccccmcttcacttggctcctgaccccaccttctcattggctctggttcctcacttggctgggaggtgcatccattcaggtaaatgatgcacttacaatataagatgtaaacacttatattggaaatatttcaggaatacttcaggaagaaaaccggactaagaattatgagaattgga

SEQ ID NO: 470499 - DNA, 653 bp, Homo sapiens
ctggtagacatagaataaagagcaaaaaaatttaatgttttatcctcaacaggcttgctttctgatagggaaaaggaaaagttaatcacataaccacactgatgactgtttaattacacatgtagacgactctctgaaggaaaaactcttccagatttcaggaggagtcagcgacacasgaacatcatgacccacactggacagggtgaaggcggggtggccttcaggggtggctttgctaaagaggtgatctcaaactagaagctgaaagatgagaatgacctgactagttgaaggggtgtgcatgcatgtgtggtgcacgtgtgttgtggtgggattttaatcagaggatttttgtcagaaggaacagcaatgcaaaggctcgtggctccagcgtagttggaattccagtgcggcaggaaggtagagctcaaaaggcttggggaaggaagctggaaacaaggccttaccaatgcattgtagtttgggtttctgtgctagagttcatgtttcacttcttaccccagattcaaaagcctgggccttcacatctgtttctgagcatgggctcataagcctgccccatctgacccagctctatgtaggcacatctccttgcttttctgggaatgcagtccagggaaaaaaacacc

SEQ ID NO: 470500 - DNA, 566 bp, Homo sapiens
tggcactctgctgctacgcatgtgctgtcagccaacatctgcagcagaatgtgtacacacaagttctggctcccctcacttcctgccccagcaccttgctgctgaacccaagttgttgctaaggacactaagagcccttatggccactgtggacctcctacagccctcaccaccaaggatcacacagttgttgacatcccagatttcagttgtstaactcaatatgacaccatgtccagctggacctggagtcaccacagacccacaaacttggcaacctacaccactagatctgtggccacagtgtgccccagagtgacccatttcccctggcaccagatgaaggctttttattaccaaaactaatatatactgcctggaaaatgtgactacgtttttcaaatgagcaccttttcagggtgacaagtatcacaaaaaatcagggaaacatgacatcactacaggaagaaaataatttttcaataactggcctcaaagaattggagttccataaattgcccgacaattagaaagaattgtttaaagaagctcagtgaactataaga

SEQ ID NO: 470501 - DNA, 566 bp, Homo sapiens
tggcactctgctgctacgcatgtgctgtcagccaacatctgcagcagaatgtgtacacacaagttctggctcccctcacttcctgccccagcaccttgctgctgaacccaagttgttgctaaggacactaagagcccttatggccactgtggacctcctacagccctcaccaccaaggatcacacagttgttgacatcccagatttcagttgtctaactcaatatgacaccatgtccarctggacctggagtcaccacagacccacaaacttggcaacctacaccactagatctgtggccacagtgtgccccagagtgacccatttcccctggcaccagatgaaggctttttattaccaaaactaatatatactgcctggaaaatgtgactacgtttttcaaatgagcaccttttcagggtgacaagtatcacaaaaaatcagggaaacatgacatcactacaggaagaaaataatttttcaataactggcctcaaagaattggagttccataaattgcccgacaattagaaagaattgtttaaagaagctcagtgaactataaga

SEQ ID NO: 470502 - DNA, 566 bp, Homo sapiens
tggcactctgctgctacgcatgtgctgtcagccaacatctgcagcagaatgtgtacacacaagttctggctcccctcacttcctgccccagcaccttgctgctgaacccaagttgttgctaaggacactaagagcccttatggccactgtggacctcctacagccctcaccaccaaggatcacacagttgttgacatcccagatttcagttgtctaactcaatatgacaccatgtccagctggacctggagtcaccacagacccacaaacttggcaacctacaccactagatctgtggccacagtgtgccccagagtgacccatttcccctggyaccagatgaaggctttttattaccaaaactaatatatactgcctggaaaatgtgactacgtttttcaaatgagcaccttttcagggtgacaagtatcacaaaaaatcagggaaacatgacatcactacaggaagaaaataatttttcaataactggcctcaaagaattggagttccataaattgcccgacaattagaaagaattgtttaaagaagctcagtgaactataaga

SEQ ID NO: 470503 - DNA, 566 bp, Homo sapiens
tggcactctgctgctacgcatgtgctgtcagccaacatctgcagcagaatgtgtacacacaagttctggctcccctcacttcctgccccagcaccttgctgctgaacccaagttgttgctaaggacactaagagcccttatggccactgtggacctcctacagccctcaccaccaaggatcacacagttgttgacatcccagatttcagttgtctaactcaatatgacaccatgtccagctggacctggagtcaccacagacccacaaacttggcaacctacaccactagatctgtggccacagtgtgccccagagtgacccatttcccctggcaccagatgaaggctttttattaccaaaactaatatatactgcctggaaaatgtgactacgtttttcaaatgagcaccttttcagggtgacaagtatcacaaaaaatcagggaaacatgacatcactacaggaagaaaataatttttcaataactggcctcaaagaattggagttccataaattgcccgacaattagaaakaattgtttaaagaagctcagtgaactataaga

SEQ ID NO: 470504 - DNA, 616 bp, Homo sapiens
acactaaaattctcatagaatataatattttatgactataaatcagctaattttatttgaagcattatataggaaaaaaaaggcgattggacaaaattagtaaagttagaacttcttgtttatctaayttaatccttagatttttctgagctacaagaacatgttgtattaccagatccttgaaattcacttcagaatctttgccacagagatatcctttatttaagttaagccaagtgtctttagttaaattaagctaagtgtcttaaattaattcacagtctacgtttttaaatttttgatatttttattttgtgagctgagccttatatgtgttgctttatcttagtgattttatatatgtcagtccactttttttttttacagaaacacaaaatctgtccttaataatttccaagtttctcagtacagagaaattacttgttaagtttcctttttaagcttatattttctgctctgaagaaaaaagagaaaccaaaactctataaaaacactttgaaaacattttggaagtttcacaatgagaccaaattacacatttctgaatgaatatgagaaacatttaccccacgtctttttccctctgttttaattt

SEQ ID NO: 470505 - DNA, 616 bp, Homo sapiens
acactaaaattctcatagaatataatattttatgactataaatcagctaattttatttgaagcattatataggaaaaaaaaggcgattggacaaaattagtaaagttagaacttcttgtttatctaatttaatccttagatttttctgagctacaagaacatgttgtattaccagatccttgaaattcacttcagaatctttgccacagagatatcctttatttaagttaagccaagtgtctttagttaaattaagctaagtgtcttaaattaattcacagtctacgtttttaaatttttgatatttttatttygtgagctgagccttatatgtgttgctttatcttagtgattttatatatgtcagtccactttttttttttacagaaacacaaaatctgtccttaataatttccaagtttctcagtacagagaaattacttgttaagtttcctttttaagcttatattttctgctctgaagaaaaaagagaaaccaaaactctataaaaacactttgaaaacattttggaagtttcacaatgagaccaaattacacatttctgaatgaatatgagaaacatttaccccacgtctttttccctctgttttaattt

SEQ ID NO: 470506 - DNA, 616 bp, Homo sapiens
acactaaaattctcatagaatataatattttatgactataaatcagctaattttatttgaagcattatataggaaaaaaaaggcgattggacaaaattagtaaagttagaacttcttgtttatctaatttaatccttagatttttctgagctacaagaacatgttgtattaccagatccttgaaattcacttcagaatctttgccacagagatatcctttatttaagttaagccaagtgtctttagttaaattaagctaagtgtcttaaattaattcacagtctacgtttttaaatttttgatatttttattttgtgagctgagccttatatgtgttgctttatcttagtgattttatatatgtcagtccactttttttttttacagaaacacaaaatctgtccttaataatttccaagtttctcagtacagagaaattacttgttaagtttcctttttaagcttatattttctgctctgaagaaaaaagagaaaccaaaactctataaaaacactttgaaaacattttggaagtttcwcaatgagaccaaattacacatttctgaatgaatatgagaaacatttaccccacgtctttttccctctgttttaattt

SEQ ID NO: 470507 - DNA, 616 bp, Homo sapiens
acactaaaattctcatagaatataatattttatgactataaatcagctaattttatttgaagcattatataggaaaaaaaaggcgattggacaaaattagtaaagttagaacttcttgtttatctaatttaatccttagatttttctgagctacaagaacatgttgtattaccagatccttgaaattcacttcagaatctttgccacagagatatcctttatttaagttaagccaagtgtctttagttaaattaagctaagtgtcttaaattaattcacagtctacgtttttaaatttttgatatttttattttgtgagctgagccttatatgtgttgctttatcttagtgattttatatatgtcagtccactttttttttttacagaaacacaaaatctgtccttaataatttccaagtttctcagtacagagaaattacttgttaagtttcctttttaagcttatattttctgctctgaagaaaaaagagaaaccaaaactctataaaaacactttgaaaacattttggaagtttcacaatgagaccaaattayacatttctgaatgaatatgagaaacatttaccccacgtctttttccctctgttttaattt

SEQ ID NO: 470508 - DNA, 370 bp, Homo sapiens
gacaaaaagcttaaattgcaaatattgatattctataggtctaattcattgactaaaaatttaacaaaattttaaactaacaaatgagagttcaaaatatgtctagcctaaatattctaaaacacactttaaattattcttgggtttgaagaagaaatcagaaagaaattaccaagtgctttgagtgaaatgacaatgatagttctaaatattaaacctgtgtgargaagtcaaagtagctttctgataaataaattgaattttttgaaatgattgcaaatatttgaacaaaagcttctatccagaattagccaaactcaaactcaagggtaagggtgcagtcctctagaatgccaattttccccatgat

SEQ ID NO: 470509 - DNA, 623 bp, Homo sapiens
cactaagttcccatatatgtatgtttacaggcactcttcctttgatttacttgtctatttctgagctaatttcagacgtttaaaatcagttgtttaatgttagtccaaaaccatctcttattttatttttaggatttgacttggctagtttgaaatgtattatgtataggastcaatttgggaaataccgtgaaaaattatattgaaattcagattgaaggtccctttaatttgtatttgaacctgaggcttaatcaacatttgtgacagtgtgtcttctcattcagtagcagggtatgtatttcatttttttgccaagtcttttttgttacaatattttataatccatagtgattttgtacattttatcttgaatttattctgaggcattctatagatatttaatctttggtactttgggtcagttttatcatttttgaaggaatcaaatttctttatttactttttaacttttattttagtttcagggatacatgtgaagatttgttatataggtaaactcatgttacaggggtttgttgtacacattattttgtcacccaggtactaactctagtacccaaaagttgttttttctgctcctctccagcacccccctgaca

SEQ ID NO: 470510 - DNA, 623 bp, Homo sapiens
cactaagttcccatatatgtatgtttacaggcactcttcctttgatttacttgtctatttctgagctaatttcagacgtttaaaatcagttgtttaatgttagtccaaaaccatctcttattttatttttaggatttgacttggctagtttgaaatgtattatgtataggagtcawtttgggaaataccgtgaaaaattatattgaaattcagattgaaggtccctttaatttgtatttgaacctgaggcttaatcaacatttgtgacagtgtgtcttctcattcagtagcagggtatgtatttcatttttttgccaagtcttttttgttacaatattttataatccatagtgattttgtacattttatcttgaatttattctgaggcattctatagatatttaatctttggtactttgggtcagttttatcatttttgaaggaatcaaatttctttatttactttttaacttttattttagtttcagggatacatgtgaagatttgttatataggtaaactcatgttacaggggtttgttgtacacattattttgtcacccaggtactaactctagtacccaaaagttgttttttctgctcctctccagcacccccctgaca

SEQ ID NO: 470511 - DNA, 623 bp, Homo sapiens
cactaagttcccatatatgtatgtttacaggcactcttcctttgatttacttgtctatttctgagctaatttcagacgtttaaaatcagttgtttaatgttagtccaaaaccatctcttattttatttttaggatttgacttggctagtttgaaatgtattatgtataggagtcaatttgggaaataccgtgaaaaattatattgaaattcagattgaaggtccctttaatttgtatttgaacctgaggcttaatcaacatttgtgacagtgtgtcttctcattcagtagcagggtatgtatttcatttttttgccaagtcttttttgttacaatattttataatcyatagtgattttgtacattttatcttgaatttattctgaggcattctatagatatttaatctttggtactttgggtcagttttatcatttttgaaggaatcaaatttctttatttactttttaacttttattttagtttcagggatacatgtgaagatttgttatataggtaaactcatgttacaggggtttgttgtacacattattttgtcacccaggtactaactctagtacccaaaagttgttttttctgctcctctccagcacccccctgaca

SEQ ID NO: 470512 - DNA, 623 bp, Homo sapiens
cactaagttcccatatatgtatgtttacaggcactcttcctttgatttacttgtctatttctgagctaatttcagacgtttaaaatcagttgtttaatgttagtccaaaaccatctcttattttatttttaggatttgacttggctagtttgaaatgtattatgtataggagtcaatttgggaaataccgtgaaaaattatattgaaattcagattgaaggtccctttaatttgtatttgaacctgaggcttaatcaacatttgtgacagtgtgtcttctcattcagtagcagggtatgtatttcatttttttgccaagtcttttttgttacaatattttataatccatagtgattttgtacattttatcttgaatttattctgaggcattctwtagatatttaatctttggtactttgggtcagttttatcatttttgaaggaatcaaatttctttatttactttttaacttttattttagtttcagggatacatgtgaagatttgttatataggtaaactcatgttacaggggtttgttgtacacattattttgtcacccaggtactaactctagtacccaaaagttgttttttctgctcctctccagcacccccctgaca

SEQ ID NO: 470513 - DNA, 647 bp, Homo sapiens
ggttccccaaatcacctaatttatgctagacttggaatattaatatattctatgtctcatgaataggtattacttttctaatctattacatatgctgctatacagttagtccaactaagtttttttctgatttttttgtacactctgtactttaccatttttatgcatttgtgcaaactttgtcttcatcctggaatgccttatgtacaaatcatagtcaccagccacacatcagttcacttgtgccatttctatatggctttatgcagctcctcaacaaaaatgactctacttcctatgtttcaatgtcattttcttaatatcattattttagtacacatttttttcttgactgtcttatgttacttgtatgtatcttaattattttaactagattgtaaatatgctaagcattcacatgctgtccactctttatgtatgtctcatattatcaagcatgatgtctcttgggtacaattggatagatatgtcatctggtgtattaattgctatgcagcaaattatcccaaaactcaggagattaagataaatattatctgacaatttstgtgaaccagaattctgggagagccttagctgagtagttctgactcaaggtcccacatgaggtgtattgtggccacagt

SEQ ID NO: 470514 - DNA, 459 bp, Homo sapiens
agtacaacctccgcctcctgggttcaagcgattctcccgcctcagcctcctgagtagctgggattacaggcacccaccatcatgcctggctaatttttgtatctttgtggagatgggatttcaccatgttggccaggatgaactcctgacctcgggtaatccacccgcctcggcctcccaaagttctgggattacaggcgtgagccaccamacccggccaacagcattctgatgatatagctggtgatagcagatgggaggacagtggtgtgcccagaaacctctggacctggagcacaaaaggctcagggtgcattcccagcccagcggattctctgcctgcatctgctaaggatgaatgactcagctttgggggaattagttgtgagactttggacttcaggggcggggccccaagaggcaatggtgataaagttgaatttgagcagggaaggtgcc

SEQ ID NO: 470515 - DNA, 555 bp, Homo sapiens
atttaaaacactagctgggtgtggtggcacatacatgtaattctagcttctcaggagacggaggttggaggattgcttgagcccaggagtttgaggctgcagtaagccatgattgtaccaatacattccagcctgggctacagaatgagaccctgcttcaaaaagaaaaaaaaaaaaaaaagaccaagactgctgccatgctggggaaggggtggggcaagactaagtaaaaacaccacaaaactttgctactgttttgaagayggccttttttaaattgagtgtttgcctggttgctgtaggcctttgttttctagagtgacaacaaagttggttctgacagtttggcttgtttattcagtgtttcagtttggaaatgagagcttggagcttcctaggccaccattttgctgatgtcatttccaatggcattttttgcatctcgactttttcctcgcgttcaatgcttcaggaccacaagatggttgctacagctctagaccttccatctgtctagtgtggcgaaaagtggggaaggctagaatatcatgccag

SEQ ID NO: 470516 - DNA, 629 bp, Homo sapiens
ttcctcactctattttaacgctgcaggacagctggtctgttacattattatatttcagttccaattatttgtcattcaaattctaaatgtgtgatataatgaatgtggaagagagaagtattatggccaatgttttttggcaattgtgctcatggtttttctaatgcaaactatgtccaatcctaaaagtcaataagaaaaatatctttaaaactttcaagtacttattatagttaaaagttaaagccatgctattatggtaaaaagtataatagtatatataaaactatgggcctagctgacaaattgaagattattttgagaagagaaataattaaggaccagacagatttaagcaagattaaagtaatgtaataactcaataataggacttcatgactgttaaatggatggcaaagtaacctcagaataacttgaagatgtacaaattaaggcagagtaaaattgattataatagtgtaaaattgagcaaaaaatgtacatagmtcattacataaaacacaaggataaatgtaattggattaaagttatctcatagaagaagtgattttatttgtaataagtcaactgcatttttatcctttttaaaatctgaaataaacttaata

SEQ ID NO: 470517 - DNA, 605 bp, Homo sapiens
catcttacactgtttccaaaggtcatgagcatgcatatggttttgatgggcaggcctagctctgagtctctcatgaagctgcagtcaagctgtctgcagtctcctcaaggctcaatcagggcaggaggacagtttctaatgtcattcacatagttttttgtagaattcatttccccattgacgtttgggccacagaggtctatccacaggcttcctaaacattctcacaacatgccatctggcttcctcagagtgaataataccaagatggaagcacagtttttaataacccaatcttgtcagtgacataccgtcacttctgccactaccctatttgtttttaagtaagctgctaggtccagcgcctactcaaaaggagggtataatacaagggcatgattaccagtaagagggggtcattgggggccaacttcaaggctgtatgccacagatggcaatgtggagaggcacacctgaagactggagagactgcagtggcttctgggraagctcaaaatcctcaagccaagtatacatttaaacccagcatttccctgagttcaaagtgaagaattctactatgtggaagattgttctgtgatatc

SEQ ID NO: 470518 - DNA, 651 bp, Homo sapiens
tctaggaccattttccttctaattgaagtacattctttaatcagtctacaagtggcaaactctgtttttgttcatttaaaaatgtgtttattttgcctttattctaaaattatccttttctgggtataggattctatgttggtagttattttattagagcatattgaagatattattctactgtcctctggcttccattgtttgtgttgcataaccaattgactatctaaaagctatttctttgaaggtaacaagtctgctttctatgcctactttggcctcagttttctgcatcctcactatgatatgtatacttcttttgttttcttttttgtaaaatttttctttttttgaagatacaatcttgctctgttgcccaggctggagtgcagtggcargatctcagctcactgcaacctccgccccctaggttcttctgcctcagcttccttattagtagctgggattacaggcatgtgctaacatgcctggctaatttctgtattttcagtagagacggggttttgccatgttggccaggctggtctcgaactcctggcctatataattattttctttacttccctgttcttcttctactttccattgtactttgaatctctggatttgtctctttcaatatttctagaa

SEQ ID NO: 470519 - DNA, 524 bp, Homo sapiens
ggtttatagttaggaaaaacctgctatctgctcctccttccagtagaggcaaacactttgataagaaaacagccaggctaagggtttatccaggataagcaaggctcctccagcttaaacacagtatggttggatctggttgttccataacctggtcaatatctgagtgttggctctttcatttgttttgaatatgggactccatttttcagaattttgtttaaagcaataagaaaaaaaaagtaataaaagtggtagtgagaaaatatatatacccacttccctcatgaaaaaataatgtgactcagcattcaggtcactgaattagaaagcccaatttttattccctgttaaactgctttctgttttaccctgtctagttatctggcatatatttccatttatrcttgggtttgaaatttgttctgatgtggacaccaagatgctgtcattactttaataaacaattttagacaatcaattttattcattaaaatcataaggccacaatataattttgaaaa

SEQ ID NO: 470520 - DNA, 610 bp, Homo sapiens
acattctaaaataacaatgaaaagtgtaatatagtacatacataaaccagcaacatcgtcttttattatcattatcaaatattatgcactgtacataattgcatgggctatactttcataaaactggcagttcagtaggtttgttaacacaagcttcaccataaatatgtgaataatgccttgcactacattatgagagctatgatgtcactagataaccagaatttttcagctcyatttcaatcttatgggaccattgttgtatatgcggtccattattgaccaacttgtctttacgaggtgcaaaaccgtatgccagtaaggagcttggaaccccagagggcacagactcagtcttcctttcgctagttaccctttcaacttcaggtacagagaattcctagtagcaaaaggatggctaattttatctgtcagctttgcatcctttctagtcaacaccccaacccttaaatttcacgtgtgtttatgaattttcagtttcataaaagtagtagaaaacataagcacctttgtcccaaatatgcacagatagttctttgacaggcagtagagcacagcagttgagggcaaagtctttagaactcacaca

SEQ ID NO: 470521 - DNA, 610 bp, Homo sapiens
acattctaaaataacaatgaaaagtgtaatatagtacatacataaaccagcaacatcgtcttttattatcattatcaaatattatgcactgtacataattgcatgggctatactttcataaaactggcagttcagtaggtttgttaacacaagcttcaccataaatatgtgaataatgccttgcactacattatgagagctatgatgtcactagataaccagaatttttcagctccatttcaatcttatgggaccattgttgtatatgcggtccattattgaccaacttgtctttacgaggtgcaaaaccgtatgccagtaaggagcttggaaccccagagggcacagactcagtcttcctttcrctagttaccctttcaacttcaggtacagagaattcctagtagcaaaaggatggctaattttatctgtcagctttgcatcctttctagtcaacaccccaacccttaaatttcacgtgtgtttatgaattttcagtttcataaaagtagtagaaaacataagcacctttgtcccaaatatgcacagatagttctttgacaggcagtagagcacagcagttgagggcaaagtctttagaactcacaca

SEQ ID NO: 470522 - DNA, 691 bp, Homo sapiens
taagaacactaaatctagggcctggtgcagtgacacacctgtagtcccagcactttgggaggctgaggtgggaggatttcttaaggccaggagtttgaggttacaggaagccatgattgcgccgctgaagtccagcctgggcaacagagtgagacactttcttaaaaaaaaaaaaaaaaaaaaaaaaaaacagtacatctaatctgtgatagcaaaaataagmaaatagttgtacctgtgacaggagaaggagaattggccacaatgagaaatgagaaacaatattctccatctttattgagattttgatgacatgggcgtatacagtttttgcaaattataaaatcgcatactgagatgtaggtattttacgacacataatgaaatattgatttaaaataagcatcataatgtttcgctggtgagaggtcttggatcagaatgggtgggaaaaggcccgaggaacataaaaggagggtttagtctccgagaacaggtggagtaggtagacctgtgtaaaaccagataaggactcactgattgaatgacagcagggtggagcctacgtttgttcagtgggtttatcgtgatattaagcgaaccagccggagtgaaatggagacgttcttaaggagttttggaaagaaatactcagcaagaaccacaagtaaaagtgctctggtaggagaca

SEQ ID NO: 470523 - DNA, 628 bp, Homo sapiens
ttggcccttacgtggaaaagtatgtcctgatacagagtcatgagggtttggaattggttgaaagatgaatgagggaaggattactgaggaaaattatcagtgagggaatgagaagaaacaaagaactcatcaaatctcttgctagtacaaaagcaaagttgctgtttactgtcatgagggaacatacgagagaagaagacatttgtacagaaaaacaagagctttgtttacacaaactttgagaggcttgatagccatccaaatggaatggtttataagaaaaggraattggctacgagaatagacttcaggaaaaagtttgggctacaattattaaatagttatctgaatgatatcaatgtataggtaaaagtttagtcatggcactgatgacatcacctagcataccagagtccaagtgaagaaactttgttcaccctgaaatgagctgcctaagtgaaatggtgtgattgaaactctgattgtaaggctcaaaagaaaacaggacctaatagtttgaaggtgtatgtttgtcagctattttcacaatgctgctgcatcacaaattgtctctgaactcactggcatagaaaattagcatttatttcatgctcatgagtctgaaggt

SEQ ID NO: 470524 - DNA, 622 bp, Homo sapiens
cctcgcattccccggggcaggcccccgcccgcgcgtcccgccagtaggggaatttagcggacggctgcggttktctggtgaaaggctatccaaggataaggggcttcacttttcccaagtaggggaaagagaaggggtctacagggctaggggtggagggagcggatgcagtgagcagcctccgcagagaaattgacaatttaaccagggacctgcggcagagacaaggcggagacactcccttgcccaggaaagccgccagagtccggcttgtacctggggaagaatccttaagacggtctggcccaacactcctttgctcacagagaaaggggagaagactcccgagggtgaaaatggtacattcggagctggaactcagctcgctgaccccaagcagtgttcccttcttttcgccaggtttgcatccaagagaggggaggacaggggcaaaaggatgcagggaggctgctgatttccactgaagagctaatttcctgtgagacattaacagtgatttaagaaaaagattcctgtaactggtaaatgaatttcatttgcttaacttttagatgatatgtttcaggcaaaaaaaaagttgtgcacccacttatctctttaa

SEQ ID NO: 470525 - DNA, 558 bp, Homo sapiens
tacataatgaggacccagagggtgttgtctagaacccactgaatttatgaacttttatgcccatggtaaccgtaaatggataactacagcaacaatggttagaaaaggtgtttgtttatatatttctctgtaaaatttagtggattaagattaaaacaatacattgttttgtttataatgtataatttgtgcagagctcagcaggaacatcttatctttgctatataaattgtctgtggcctcaactggaatgacttgaaggtatgggggctggagaatttggggactgcccatgcatctctttctctttatgtggtctcaggcactcatatgattcagggcctctgaatagggtctctctagcatattatcctcaaggtagatggatgtcttatgcagtagcccagagaaccaggagtgtgtcttccaagagaccaaggtgtaagttgcaacgcctttcataacccagcctctgaagtcatacatgatcacatctgcyatattctgtcagtcacacagggacagatattatttaatgcatgagggcactacaccaga

SEQ ID NO: 470526 - DNA, 636 bp, Homo sapiens
tgaaaaaatgttcaatacaatttttcacacagttaaggcaaaaatttttagcaaatgaggaaaaagagaggcacttctttaataaaaagggagctatctactgtataataagtgtcatatttaataatggcctttcarattcattccttttctggtggacgtcaagacaaagacgcctgcaatcactactatagttcaacacagatctgaggtcctggccgagacattgaaacaagaaaaataagtaaagataataggaacaagaggcaaaatgccatgatatgaatatcctaatgtaatgctgaaaacaatttataaacaaattactggaattaatatgaaaaattaatcactttaagagcagagaaataatataataaacactcatgtaatcaccactctaaaagtgaaaatttgtcaaatttgtttcatgttcctctttttaagtaaaactgatacatttataagaacatttattgcagcattgtatataagaacaaacaactggtaaaatctattttacattaaaaacattaacgttgaatgagcaataatcacctacactttctgctctgtgaaaattttcaattaactcaatccagattttttccccaaagtccttctagataacatcca

SEQ ID NO: 470527 - DNA, 636 bp, Homo sapiens
tgaaaaaatgttcaatacaatttttcacacagttaaggcaaaaatttttagcaaatgaggaaaaagagaggcacttctttaataaaaagggagctatctactgtataataagtgtcatatttaataatggcctttcaaattcattccttttctggtggacgtcaagacaaagacgcctgcaatcactactatagttcaacacagatctgaggtcctggccgagacattgaaacaagaaaaataagtaaagataataggaacaagaggcaaaatgccatgatatgaatatcctaatgtaatgctgaaaayaatttataaacaaattactggaattaatatgaaaaattaatcactttaagagcagagaaataatataataaacactcatgtaatcaccactctaaaagtgaaaatttgtcaaatttgtttcatgttcctctttttaagtaaaactgatacatttataagaacatttattgcagcattgtatataagaacaaacaactggtaaaatctattttacattaaaaacattaacgttgaatgagcaataatcacctacactttctgctctgtgaaaattttcaattaactcaatccagattttttccccaaagtccttctagataacatcca

SEQ ID NO: 470528 - DNA, 634 bp, Homo sapiens
tactcttcttaactaacaggtggggctgatactcaatcagccaataagatggaatagccaagctatagttactctaagttgtcaaggtaacacattcatccttgagattttctcattaatctcctctcatgcttaggtttatggaataacaccgaggacaattccactcctttactacttggctgctatgatctgaatgtgtgccttcaaattcaaattgaaaactatccccattgtggtggtattaaaaggtggtgcctttgggaagatgactaagtaataaaggctttgccctcatgatgggatcagtgaccttatatgagaggttgaagggggctgttttggcacttcagccatgttgaggacacagcaamaaggagccattctgaagcagagagtaagccctcaccagacactgaatttgtgggcccctcgatctttggcatctcaggatgtgtgtatttttgtggatatatatgtatacacacacacacgttatatataaatagtgaaaagttcatatgcctcttcaaaatttatttacttcaacagagatggctcacaaatttttatgcttgtgtgtgtgtgtgtgtgtgtgtgtgtgtgtgtgttaacattaacttagaggacattt

SEQ ID NO: 470529 - DNA, 658 bp, Homo sapiens
ggatgcaattgagttaatattcaataacttatcaaagaaggaaacttttattgtttcttccagaccactcaaaacagtcaacaatatatattaaacttaacacaaattttaacttttttaaaaawatctcaatatgaagtccttttagagttgacaaagatgtcagtaagacgtaataataaaagcaatttttattaattatctatgatgatatggacattgtactatgtatgtccctatgcaagtctttaacaatgtaaattcagcaattattatattactaagttttctatataagataatttacttttattaaaggaaatataacaaatacttactagagacagaagagagctgagaatagaatggagtaagtaataataaagtcactaaactaaggcagttgtatgtttgttgtcataatatatagccagattatagctaggagagatttttagaaattaatactgaaccctggagcttcaaggtagatgtttccattgaactgtaaaataggattaattcaacgaaaatgctaaaattatggggaagctagcagtggaagtattgttggttgcttcaccttgtaacagtattaatacacagacttacttatattgcatttctttcatacaaagtatgaaaatactataaaata

SEQ ID NO: 470530 - DNA, 551 bp, Homo sapiens
gaatgaaatcaactgcaacgacaaatgtaatttttaagataaccaatgagaaagaaaaagatgaaaattagcttgatgaaaaatggatatagtgactctttccccatttcctttagcatctttcagaagacgatcgttttagggcagtccccacatgatggtgacaggacaatcactcttttggagatcatttttgaaattatggcaaagtcaagggcacccgctgtaagttccttcgcatcctcttctccatctccagctctttgcctgttctgagctcctgtctctgaagaatctctctacttccattgtgagttcatctccctgtgcccttggtccctcctgctgccctaaagtctcrctctatcaggaacgcatgctccccttggatcttccagctctcctttccgggacctgcaagcatgtttggatcgccccttccttcaaaacacatgccttaggcctgctccccaatcaccttaccgacctcaacccctccttcctttcattagtaaacgttttaaaagagtactatcaccagctacctgtct

SEQ ID NO: 470531 - DNA, 497 bp, Homo sapiens
tatgccagttctataatagaggtcaaccaagattgcctgaatccttcaaaagagggacaaacagctgcctctccatatcttgacatattgcaggatgtttatgctagcattatatactctcatggtactgggtagcgtgtatcaactatacactactaagctggaaatatgtccctcttctatatgttcatgggcagatgtgggcttggggactgttctagtcattctcctagagaaaaagcagatggaacagatgctttcaaagccctgttcatagcctcttggcactaatctcgagcatcctacagcaagtgtctccaccagcaggcctgygcccacgcctaaagtaccaggggattaatgcctctgcgagtagccctcggctatggcaggtggaagttggagaataaataccttggccacatttatagacatacttcttgcttgaaatcaatcccttggctgtgctctggataccctggttgcttcccggatga

SEQ ID NO: 470532 - DNA, 497 bp, Homo sapiens
tatgccagttctataatagaggtcaaccaagattgcctgaatccttcaaaagagggacaaacagctgcctctccatatcttgacatattgcaggatgtttatgctagcattatatactctcatggtactgggtagcgtgtatcaactatacactactaagctggaaatatgtccctcttctatatgttcatgggcagatgtgggcttggggactgttctagtcattctcctagagaaaaagcagatggaacagatgctttcaaagccctgttcatagcctcttggcactaatctcgagcatcctacagcaagtgtctccaccagcaggcctgcgcccacgcctaaagtaccaggggattaatgcctctgcgagtagccctcggctatggcaggtggaagttggagaataaataccttggccacatttatagacatacytcttgcttgaaatcaatcccttggctgtgctctggataccctggttgcttcccggatga

SEQ ID NO: 470533 - DNA, 537 bp, Homo sapiens
gctggtgatgaagcctagaaacgaatcaggtctgcttccttgcttggcattcggtgccattgacagcagcctcccctcagcaagcaaaacttgctccaaattgagctgcgagtttcttgcagggtggagctgccctcggctgagtggagccaggagggtgaagcaggagtgtgaacggtgtgaagcacccattacaaatttctggccgccatcctaattttagaggcttcatgtttcaatatgaaatgctgttgttcgtgccacaaaaggaggaaacaaacagaatcgtgccaggagaaaccccctcccccaccaagtttgatgctgtaaaaatgtctaatggggaaatcttttcagtggtaaattaccccactgccttcttttcctctyattttgcatcggaagctctcctcagttcctactggaagatgttcaaggctgggccaggagaattctagagactttttcccctaataggcaccgtgtttgtggagaagtccactaagaatcccagacttgacatagccctggcattca

SEQ ID NO: 470534 - DNA, 671 bp, Homo sapiens
atgactatagaggctgagaagtcccaggatgcgccatctgcaagctgaagaatgaggacagccagtggtgcaattcagtccaattccgaggtcctgagaaccagggtagccaatgatrtatctctcagctgaaggcatgagaacatgtgtgtgtgcgtgtgtctgtgtctgtgtgtgcgttggggggtgcaagtcctggagtccaaaggtccaagaaccaagagctttgatgtccaaaaacaggagaagatggatgttcaggctcaagaatagaaaaattcattcttcatccacctttctgttttatcctggcactcaatagactggatgatgtccactcacataggtgaggctggattatctttactcagtctactgattcaaatgtgaatctcttctggaaacatcctcacagacacacccagaaataatgtcttaccaactatctgggcatccgttagcccagccaggttgacacatacaattaaccaccacaacgtggctcaaaagtcaagaagtataaagaaaacaaagtgaaaaggtttttttttcatccccatccattatcttccagtttccccaccctatcctcatggagtttgtagtatattgaacaggtagaccaccaagaaattataataaggtacattcagtcttctcattatcagtaa

SEQ ID NO: 470535 - DNA, 386 bp, Homo sapiens
aggtaaaaacaggctgatascagccagtgggctccagtggcctccttcttcttaaagaagtcatttcgttctaaatcaggagatttccattaggacttaattgcctagatgtatgggggatggattcctttctaagagagcactagcgtttgacagatcatgagtgatttgctgtttctctgcttaagttttctccgcttaagttttctccagtaaaccatagactttatactgtgtggcccttctgttatttgtgtttgtgttggcctgacagctttaactttttttgtattcttatgttccaggtgtgtctgtcttgtaaatagtgcatatagctggcgattcattttttctctcttttgtccatttatattgattgtggctac

SEQ ID NO: 470536 - DNA, 386 bp, Homo sapiens
aggtaaaaacaggctgataccagccagtgggctccagtggcctccttcttcttaaagaagtcayttcgttctaaatcaggagatttccattaggacttaattgcctagatgtatgggggatggattcctttctaagagagcactagcgtttgacagatcatgagtgatttgctgtttctctgcttaagttttctccgcttaagttttctccagtaaaccatagactttatactgtgtggcccttctgttatttgtgtttgtgttggcctgacagctttaactttttttgtattcttatgttccaggtgtgtctgtcttgtaaatagtgcatatagctggcgattcattttttctctcttttgtccatttatattgattgtggctac

SEQ ID NO: 470537 - DNA, 386 bp, Homo sapiens
aggtaaaaacaggctgataccagccagtgggctccagtggcctccttcttcttaaagaagtcatttcgttctaaatcaggagatttccattaggacktaattgcctagatgtatgggggatggattcctttctaagagagcactagcgtttgacagatcatgagtgatttgctgtttctctgcttaagttttctccgcttaagttttctccagtaaaccatagactttatactgtgtggcccttctgttatttgtgtttgtgttggcctgacagctttaactttttttgtattcttatgttccaggtgtgtctgtcttgtaaatagtgcatatagctggcgattcattttttctctcttttgtccatttatattgattgtggctac

SEQ ID NO: 470538 - DNA, 386 bp, Homo sapiens
aggtaaaaacaggctgataccagccagtgggctccagtggcctccttcttcttaaagaagtcatttcgttctaaatcaggagatttccattaggacttaattgcctagatrtatgggggatggattcctttctaagagagcactagcgtttgacagatcatgagtgatttgctgtttctctgcttaagttttctccgcttaagttttctccagtaaaccatagactttatactgtgtggcccttctgttatttgtgtttgtgttggcctgacagctttaactttttttgtattcttatgttccaggtgtgtctgtcttgtaaatagtgcatatagctggcgattcattttttctctcttttgtccatttatattgattgtggctac

SEQ ID NO: 470539 - DNA, 528 bp, Homo sapiens
gtgttttgctggggggaaacccactcatctgggctacctggattccccataactaccaggaggagaggccaagtctgctggtccacagagactgcagccacccttccccctaggggctcaggaccagggagatctgaattctgtcccygagcctctggctgtcgttagcctcttccctgtagagatcctgcagggaagccccacccactgatgggtgatggacaagggttagacctgaagaggcactctggccacagactgccatagctggtgtgttgggctgtggggacaagtcttgggaccaagccatccagtctccctggctccagcaggggaaaagcacagcctagagctatagaaatgggtgctgcccttcctccgcccagggagcttagcctgttaggcagttgtgagtcccagtgctggctgctgcccctcccccaaagagctcaaatggcttaacaggcagccacaattggtactggttgccccttccctagaagttcggtaggcttaagcagatttcag

SEQ ID NO: 470540 - DNA, 528 bp, Homo sapiens
gtgttttgctggggggaaacccactcatctgggctacctggattccccataactaccaggaggagaggccaagtctgctggtccacagagactgcagccacccttccccctaggggctcaggaccagggagatctgaattctgtccctgagcctctggctgtmgttagcctcttccctgtagagatcctgcagggaagccccacccactgatgggtgatggacaagggttagacctgaagaggcactctggccacagactgccatagctggtgtgttgggctgtggggacaagtcttgggaccaagccatccagtctccctggctccagcaggggaaaagcacagcctagagctatagaaatgggtgctgcccttcctccgcccagggagcttagcctgttaggcagttgtgagtcccagtgctggctgctgcccctcccccaaagagctcaaatggcttaacaggcagccacaattggtactggttgccccttccctagaagttcggtaggcttaagcagatttcag

SEQ ID NO: 470541 - DNA, 537 bp, Homo sapiens
atccttaggaaagcactgcctaagattgtaagctctgtggaggaaggggccatcttcttttctggttttctctcagaatctagcacagtgcctaatccgcagtaggctcttaattcatgtctactgaatgaatgaattaatctgcacctgtattccttttaagactcagttacaactctctatcagctgtaatggctgaggaaaacaaaacatgcaagtctgtttcccttcacacacgtttgcatattgcacatgctcctagggtgcttcatkcttaaaaacagaacaccgtcaagaactctacctaggttttctgattcatttgaacacagcataaaattcaggtcccatgataaaagtcaaagattgtgtttgcaattaaactcctagaaagcaaaagaatcaatgagaccatatcttaaaagacattaatgtatgtgtttttatatgtttctgttatatgtcttgatatttttgtaaaattttctgttttatctctttaaaacaagggtatatgtaatttgtatacaaagacat

SEQ ID NO: 470542 - DNA, 560 bp, Homo sapiens
tgctggaactgctggaccacacacaggaagaaccctcacactcctcctcctcgtaggaaaagatatttctacaatgaaactaacccataaagtctgcaagaggtgactgttccatcaaatatgcagacatcaatataatacaataagaagtatataaaaaacaatgggatataccaccaaaagaacatagtaatcttctggtagctgatcctaaagaaaatgagatatataaatgatctgataaagaatttaaaatatttgttttaggaaatcttattgagctttaataaaaaacagagaaacaawtcaatgaaatcaggaaaatgaacacccaatagtagaaacctgacaagaaaagttgaaattatttaagaaatcaaacaaattttggagctgaagtatacaataaatgtaaaatgcaatacagagcatggacagcagaatttttcaagcagaagaaagaatctatgaagacagtttatataaaaatatgcaatcggagaaaaagaaaaaaatgaaaatgaataaagatttcaggatttatgggacagcatcaaaag

SEQ ID NO: 470543 - DNA, 560 bp, Homo sapiens
tgctggaactgctggaccacacacaggaagaaccctcacactcctcctcctcgtaggaaaagatatttctacaatgaaactaacccataaagtctgcaagaggtgactgttccatcaaatatgcagacatcaatataatacaataagaagtatataaaaaacaatgggatataccaccaaaagaacatagtaatcttctggtagctgatcctaaagaaaatgagatatataaatgatctgataaagaatttaaaatatttgttttaggaaatcttattgagctttaataaaaaacagagaaacaattcaatgaaatcaggaaaatgaacacccaatagkagaaacctgacaagaaaagttgaaattatttaagaaatcaaacaaattttggagctgaagtatacaataaatgtaaaatgcaatacagagcatggacagcagaatttttcaagcagaagaaagaatctatgaagacagtttatataaaaatatgcaatcggagaaaaagaaaaaaatgaaaatgaataaagatttcaggatttatgggacagcatcaaaag

SEQ ID NO: 470544 - DNA, 546 bp, Homo sapiens
atttcagtctttatgtcattataattaagactgaaattctgaatttgttggaggagaatctggctgtccaagtttgggcttcgtacctatcactccttagctgggagaggagaggtatcctaaactacagtctaccacactgtatgttaaaagagtaaaaatgagcacctgtagcaaatcaaagggttgtagagcctgagtatataaaaccaaccgatgtttccctacaactacttttgcagttaagtaatatattgaacaagaaagaagaataattggaaaattctttcattgatgatttcatattaatatttttcctaactcttcaattattataatgggaatatatttgtttatatagtatgatcattattgttacagtaaaccttggaatcaatttttagaaataatgcatggattagggtattatatagtttggatgtgtgttcctgctcaagtytcatattgaaatgtaaacctcagtgttggaggtgggacctggtgggaggtgactggatcacgggagtggatttctcatgaattgtt

SEQ ID NO: 470545 - DNA, 580 bp, Homo sapiens
tttgtagctattgatatttcagatagagtgatgttcttttagctagctggtaggtgctatgccatgaaaatctaacttatttcagtgatgattgcattacataaagggtgaggccatagaagaatgttttatgaggatgttatagatcatatgtgtgtcttggcagggtttcatcagtagccttgggccagggatttgacactttatgaaataagaaatatttttaattctcttgtgatgataccatctactattacatgaagtaaacaaaaacatgtgtcatatgctcagatgaataattcttacaaataatagatgactgatattctcaatgcaagttaagctttcattgtttcttcgggaaggagaagcatgatcattactattttcattttaaaggtgggaaatagagataaaagactaaaacaagtagaagtctttttattattgcttgttttatgttatcttttacaggtaattmagacttgtagtctatggatgggtgtattgaggtatgtagttggaaatgtttagagaacatatttatgatgttcttttatctcattgcactttagcagaa

SEQ ID NO: 470546 - DNA, 548 bp, Homo sapiens
cttgcctactcagtgctaggtcctgtgctgagtacgagctcagaacctaaaagtaaattaggcttggtcctttcctcaagaagctagtgatagagacaggtagagaaataatcataagaaaatatatgtaatatatgtccacattctatattctggaataggatgctatattttggtacaaaggtcactgaccaacttgagggtactggaaagacatctcaaaggagataatggcaaagctgagctaagccttgaaagacaagtaaataaacgttaagcctggtggagaatgttcagaagggtagttgtaagacaaaggcacagaagagaagagaaccataagtaactgtcccttcaagataaggagagagaatgctgaggctggaggagggaagtagcccccatcaayggcagaggaacttcagcctggcaccctccccaccccgcacccttgtaactctgccctctagttccacccaggcaggtggagcaatgtgtgaggaagaatgggcaggcaagtgcattctgactaggtgtaaacaaagcag

SEQ ID NO: 470547 - DNA, 671 bp, Homo sapiens
ctggtgtgagccctcatgcaccatcctggagacccaggagccttgggccygacagcacagctcaaacccgtccagcaagcaggggttccagctcctgcaacactgaatcccccaaatccctacaagtccccaggggcatctggggacagtctgcatttcagccaggacctcacctatgggtcctgggagcaaggggaagccatcccctttgcctggagtgtcctgcttgggaagggcccccacagcagggtggctgggaccccagagagacccctctctcgaaccatagcccttgcctttttgtgaccctgcaatggaaatatcccccaggaaggttactttgatggggtcagaccgggtagcccccgcccactcgctgccccagactcttggacaagctgattccctccccgaggcttcacagccccccactgcccaagtcttcagacccctcaggtaaacccttatttccaagagcgccccggctcccatgtcaaagagggggtgcagagacacactgtgtgggtgagtggagggctgcctggtttccaacagtggtccccttggggcacctgtgctcctgctgcagtggacggctgggtgtctggaggaagggctggggtgtggagacagccgtggggcacagccagcaggggtgggggttccaggct

SEQ ID NO: 470548 - DNA, 671 bp, Homo sapiens
ctggtgtgagccctcatgcaccatcctggagacccaggagccttgggcccgacagcacagctcaaacccgtccagcaagcargggttccagctcctgcaacactgaatcccccaaatccctacaagtccccaggggcatctggggacagtctgcatttcagccaggacctcacctatgggtcctgggagcaaggggaagccatcccctttgcctggagtgtcctgcttgggaagggcccccacagcagggtggctgggaccccagagagacccctctctcgaaccatagcccttgcctttttgtgaccctgcaatggaaatatcccccaggaaggttactttgatggggtcagaccgggtagcccccgcccactcgctgccccagactcttggacaagctgattccctccccgaggcttcacagccccccactgcccaagtcttcagacccctcaggtaaacccttatttccaagagcgccccggctcccatgtcaaagagggggtgcagagacacactgtgtgggtgagtggagggctgcctggtttccaacagtggtccccttggggcacctgtgctcctgctgcagtggacggctgggtgtctggaggaagggctggggtgtggagacagccgtggggcacagccagcaggggtgggggttccaggct

SEQ ID NO: 470549 - DNA, 671 bp, Homo sapiens
ctggtgtgagccctcatgcaccatcctggagacccaggagccttgggcccgacagcacagctcaaacccgtccagcaagcaggggttccagctcctgcaacactgaatcccccaaatccctacaagtccccaggggcatctggggacagtctgcatttcagccaggacctcacctatgggtcctgggagcaaggggaagccatcccctttgcctggagtgtcctgcttgggaagggcccccacagcagggtggctgggaccccagagagacccctctctcgaaccatagcccttgcctttttgtgaccctgcaatggaaatatcccccaggaaggttactttgatggggtcagaccgggtagcccccgmccactcgctgccccagactcttggacaagctgattccctccccgaggcttcacagccccccactgcccaagtcttcagacccctcaggtaaacccttatttccaagagcgccccggctcccatgtcaaagagggggtgcagagacacactgtgtgggtgagtggagggctgcctggtttccaacagtggtccccttggggcacctgtgctcctgctgcagtggacggctgggtgtctggaggaagggctggggtgtggagacagccgtggggcacagccagcaggggtgggggttccaggct

SEQ ID NO: 470550 - DNA, 671 bp, Homo sapiens
ctggtgtgagccctcatgcaccatcctggagacccaggagccttgggcccgacagcacagctcaaacccgtccagcaagcaggggttccagctcctgcaacactgaatcccccaaatccctacaagtccccaggggcatctggggacagtctgcatttcagccaggacctcacctatgggtcctgggagcaaggggaagccatcccctttgcctggagtgtcctgcttgggaagggcccccacagcagggtggctgggaccccagagagacccctctctcgaaccatagcccttgcctttttgtgaccctgcaatggaaatatcccccaggaaggttactttgatggggtcagaccgggtagcccccgcccactcgctgccccagactcttggacaagctgattccctccccraggcttcacagccccccactgcccaagtcttcagacccctcaggtaaacccttatttccaagagcgccccggctcccatgtcaaagagggggtgcagagacacactgtgtgggtgagtggagggctgcctggtttccaacagtggtccccttggggcacctgtgctcctgctgcagtggacggctgggtgtctggaggaagggctggggtgtggagacagccgtggggcacagccagcaggggtgggggttccaggct

SEQ ID NO: 470551 - DNA, 557 bp, Homo sapiens
actggcacaagctttgggctaaggacacccgcccccaccctcatctagaaacaatctctctcgccagacttgatggctcacgcctgtaatcccagcacttcgggaggccgagtcrggcagatcacaaggtcaagagatggaggccatcctggccaacatggtgaaaccccatctctactaaaaatacaaaaatgagctgggcatggcggcgtgtgcctgtagtcccagctactcaggaggctgaagcaggaaaatcgcttgaacccgtgttgcagtgagccaagatcgcgccagcctggcgacagagtgagactccgtctcaaaaaaaaaaaaaaaaaaaaaaaaagtaaagaaaagaaacaatctctctcagggtccagaagcttcagggcgtgtcccagcccaggctctgcagcctgggccagggaggaggtgtagggacacgtgggcccctctggtacccctcaggaatccccctcggccagagtgctgaacgcgaggtgcgtggtgtatcttctcacactccctgtctcctctgggcctgatagggaagtgct

SEQ ID NO: 470552 - DNA, 542 bp, Homo sapiens
ttttttttaaatggagtctcactctgtcacccaggttggagtgcagtgatgcaatctcagctcactgcaacctccacctcccaggttcaagccrttctccttcctcagcctcctgagtagctgggattacaagcacgtgccaccacacccagctaattttttgtatttttagtagagctggggtttcactatgttggccaggccggtcttgaactcctgacctcaggtgatctgcgggcctcagcctcccaaagtgctgggattacaggcgtgagccactgcacccggcctgtatggcgtcttgaggcaatgctcagagcttggtgtgaaagcaattcacctcctccttgggcgcctccccgactggggtgtccgcaggcggcaaccacttgcaatcccagatgctgccaccagggggtgcacagtacccgcttggaaggtgggcaggggcgggcggggaggaactagagagggaggggttaatgcccaagggccccgcccctcccaagaggcatgggcggtctcagcccggtccactcacc

SEQ ID NO: 470553 - DNA, 542 bp, Homo sapiens
ttttttttaaatggagtctcactctgtcacccaggttggagtgcagtgatgcaatctcagctcactgcaacctccacctcccaggttcaagccgttctccttcctcagcctcctgagtagctgggattacaagcacgtgccaccacacccagctaattttttgtatttttagtagagctggggtttcactatgttggccaggccggtcttgaactcctgacctcaggtgatctgcgggcctcagcctcccaaagtgctgggattacaggcgtgagccactgcacccggcctgtatggcgtcttgaggcaatgctcagagcttggtgtgaaagcaattcacctcctccttgggcgcctccccgactggggtgtccgcaggcggcaaccacttgcaatcccagatgctgccaccagggggtgcacagtrcccgcttggaaggtgggcaggggcgggcggggaggaactagagagggaggggttaatgcccaagggccccgcccctcccaagaggcatgggcggtctcagcccggtccactcacc

SEQ ID NO: 470554 - DNA, 356 bp, Homo sapiens
catgggagccccaagttacgggcacttcctgggaggtcaggtccggtatgaaccaggaagctttcccggcaactctatgccccatgggcatggrtgggaggcctgagtccagcccctggcccctctcttaggagcctactgggggtgggcactgtgggaggtctaggacaatggtggcatgggaggtcccaccctggcggtaggcacagttctcccgggccgggccatgttgggatggaactggaatttggggacagcctgaccctaggctgaactctgttcctgacatgcctagtgacctccaacttaagtccctccagctccacccatatggtctaggttgttttgcttgatga

SEQ ID NO: 470555 - DNA, 356 bp, Homo sapiens
catgggagccccaagttacgggcacttcctgggaggtcaggtccggtatgaaccaggaagctttcccggcaactctatgccccatgggcatggatgggaggcctgagtccagcccctggcccctctcttaggagcctactgggggtgggcactgtgggaggtctaggacaatggtggcatgggaggtcccaccctggcggtaggcacagttctccygggccgggccatgttgggatggaactggaatttggggacagcctgaccctaggctgaactctgttcctgacatgcctagtgacctccaacttaagtccctccagctccacccatatggtctaggttgttttgcttgatga

SEQ ID NO: 470556 - DNA, 356 bp, Homo sapiens
catgggagccccaagttacgggcacttcctgggaggtcaggtccggtatgaaccaggaagctttcccggcaactctatgccccatgggcatggatgggaggcctgagtccagcccctggcccctctcttaggagcctactgggggtgggcactgtgggaggtctaggacaatggtggcatgggaggtcccaccctggcggtaggcacagttctcccgggccgggccatgttgggatggaactggaatttggggrcagcctgaccctaggctgaactctgttcctgacatgcctagtgacctccaacttaagtccctccagctccacccatatggtctaggttgttttgcttgatga

SEQ ID NO: 470557 - DNA, 356 bp, Homo sapiens
catgggagccccaagttacgggcacttcctgggaggtcaggtccggtatgaaccaggaagctttcccggcaactctatgccccatgggcatggatgggaggcctgagtccagcccctggcccctctcttaggagcctactgggggtgggcactgtgggaggtctaggacaatggtggcatgggaggtcccaccctggcggtaggcacagttctcccgggccgggccatgttgggatggaactggaatttggggacagcctgaccctaggctgaactctgttcctgacatgcctagtgacctccaacttaagtccctccagctccacccayatggtctaggttgttttgcttgatga

SEQ ID NO: 470558 - DNA, 462 bp, Homo sapiens
cctccagctccacccatatggtctaggttgttttgcttgatgagaggatgcgtggcttggcaggggtcggggggatggcacaggaaggtccccttggctgagaccccaggctgggacacagactgcccagagggtccgggggctctgragccagagcttggttccgagtgagtctagaacgtcctcttcaacctgtctggttctctgccacctcccaacatggccccaaggcatcttcgccttcaggaccaggtccccctctcagactcccacctcatctctctggggaagggtgggggacgaggacaagcttcccaggtctgtaccccaaaggggactcaggattggcaacttggcctgtgtccagccttgctggttggagagctcagacctccccaaccccaaatactggtccaggagaagcagaacgatggagtgggtttctatgcgagtctccagcag

SEQ ID NO: 470559 - DNA, 462 bp, Homo sapiens
cctccagctccacccatatggtctaggttgttttgcttgatgagaggatgcgtggcttggcaggggtcggggggatggcacaggaaggtccccttggctgagaccccaggctgggacacagactgcccagagggtccgggggctctgaagccagagcttggttccgagtgagtctagaacgtcctcttcaacctgyctggttctctgccacctcccaacatggccccaaggcatcttcgccttcaggaccaggtccccctctcagactcccacctcatctctctggggaagggtgggggacgaggacaagcttcccaggtctgtaccccaaaggggactcaggattggcaacttggcctgtgtccagccttgctggttggagagctcagacctccccaaccccaaatactggtccaggagaagcagaacgatggagtgggtttctatgcgagtctccagcag

SEQ ID NO: 470560 - DNA, 462 bp, Homo sapiens
cctccagctccacccatatggtctaggttgttttgcttgatgagaggatgcgtggcttggcaggggtcggggggatggcacaggaaggtccccttggctgagaccccaggctgggacacagactgcccagagggtccgggggctctgaagccagagcttggttccgagtgagtctagaacgtcctcttcaacctgtctggttctctgccrcctcccaacatggccccaaggcatcttcgccttcaggaccaggtccccctctcagactcccacctcatctctctggggaagggtgggggacgaggacaagcttcccaggtctgtaccccaaaggggactcaggattggcaacttggcctgtgtccagccttgctggttggagagctcagacctccccaaccccaaatactggtccaggagaagcagaacgatggagtgggtttctatgcgagtctccagcag

SEQ ID NO: 470561 - DNA, 545 bp, Homo sapiens
agtctccagcagctgcccctgttcagttcagttcagttcaacttgattcatttacgttgaattcaactcaactccaaaggttcaggctagagtcttccttggggaaggattgtcacgattcctttcttagagctctcagtcctatctctgaagcccagggcactctgcgtgcaggaggcacttaatgtttagaaagagaagtggaggccgggcgcggtggctcacgtctgtaatcccagcactttgggagactaaggcgggcatatcacgaggtcaggagttcgagaccagactggccaatatggtgaaaccctgtttctactaaaaatacaaaaattagccagacatagtggcgcacggctgtaatctcagctactcaggaggctgaggcargagaattgcttgaacccgagaggcggaggttgtggtgagccgagatcgcgccactgtactccagcctgggcgacagtgggagactctgtctcgaaaaaaaaaaaaaagaaagaaagaaaaaaaagaaaaagaaagagaagcggagcagtcag

SEQ ID NO: 470562 - DNA, 583 bp, Homo sapiens
gctgcataaatgtcttcttttgagaagtgtctgttcatatcctttgcccactttttgatagggttgtttgattttttcttacaaatatgtttaagttctttgtagattctggatattagccctttgtcagatgggtagattgcaaaatttttctcccattctgtcggttgcctgttcactctgatgatagtttcttttgctgtgcagaagctctttagtttagttagatcccatttgtctattttggctttcgttgccattgcttttggtgttttagtcatgaagtctttgggcctgagcttttctgctgatacatcaacaaaacatcactgctttttgcataaaacttcctgggcttttgagtcctttccaccacscttgttattcctcagagcatactgctttcagggagatggtatcaatccccctatgttcagaatgagaatccagcagggaatgggtcagggaacttctgggtgatcactcactcccatatcccattagagtttgggagtgggggtctggcttagcctgcactgtggggccaggtatgcagcacactccaggtactgcccagcagcag

SEQ ID NO: 470563 - DNA, 606 bp, Homo sapiens
atgaaatgacacatggaagtggtgttgaaaatgacaggtgctagacaggatgaggggattccggaaataatgatggcgacgaggatggcggtggtggtggtgaagtcctgtcagagctttaactgtctggaagctgagtgactagatcaccagggaaaacacctcagaggggacatcaagccggagctgctgcagcctcgttttcctaacatgaggggcataaccacagttgtggggacggaacagcttttctaaattccaacccgccagcatacggacctcaccagatgttgtgccctgtragaggggaagccaggcaatggctctggccttgctggaaacaagccctgtgcgcagagaccattccacctcgattttcagaagagcagagggctgcttggaccatgagactgcagagggtgactgtgccagggtgggtcctctggggccacagagagctggagctgtgcactggggcgctggcttccttgctggtctgtggtctccaatgggggcctgggagccgcagcatgggttcccgatggtccgtgtgaccctccttggactgctcagggactctggtcaggatttgcatttgacacccag

SEQ ID NO: 470564 - DNA, 606 bp, Homo sapiens
atgaaatgacacatggaagtggtgttgaaaatgacaggtgctagacaggatgaggggattccggaaataatgatggcgacgaggatggcggtggtggtggtgaagtcctgtcagagctttaactgtctggaagctgagtgactagatcaccagggaaaacacctcagaggggacatcaagccggagctgctgcagcctcgttttcctaacatgaggggcataaccacagttgtggggacggaacagcttttctaaattccaacccgccagcatacggacctcaccagatgttgtgccctgtgagaggggaagccaggcaatggctctggccttgctggaaacaagcccygtgcgcagagaccattccacctcgattttcagaagagcagagggctgcttggaccatgagactgcagagggtgactgtgccagggtgggtcctctggggccacagagagctggagctgtgcactggggcgctggcttccttgctggtctgtggtctccaatgggggcctgggagccgcagcatgggttcccgatggtccgtgtgaccctccttggactgctcagggactctggtcaggatttgcatttgacacccag

SEQ ID NO: 470565 - DNA, 606 bp, Homo sapiens
atgaaatgacacatggaagtggtgttgaaaatgacaggtgctagacaggatgaggggattccggaaataatgatggcgacgaggatggcggtggtggtggtgaagtcctgtcagagctttaactgtctggaagctgagtgactagatcaccagggaaaacacctcagaggggacatcaagccggagctgctgcagcctcgttttcctaacatgaggggcataaccacagttgtggggacggaacagcttttctaaattccaacccgccagcatacggacctcaccagatgttgtgccctgtgagaggggaagccaggcaatggctctggccttgctggaaacaagccctgtgcgcagrgaccattccacctcgattttcagaagagcagagggctgcttggaccatgagactgcagagggtgactgtgccagggtgggtcctctggggccacagagagctggagctgtgcactggggcgctggcttccttgctggtctgtggtctccaatgggggcctgggagccgcagcatgggttcccgatggtccgtgtgaccctccttggactgctcagggactctggtcaggatttgcatttgacacccag

SEQ ID NO: 470566 - DNA, 448 bp, Homo sapiens
aaacacagtcaagatgggtcccaagccccactccgaaccacagtgtggctcttgagcccctcctaggtagacaygctggagcccctactacttgcagcccccagaaggaggctacagatgccaggggtggcaatcccaggtctggccactactagaccccaaagcacagggcaagaactggagaaggcccgtggaggaggaggctaggaggggcgccttcctccccaaagaagggccatgcctgtacccgcactgtctatacgggcccaggagattccaaggcacctcctagactcactggacagacagcaggcatgctcacagcatttgagggcttagtgaggtgggctgggggcttctggtctctccctaggaagctggagcagcggggggctctactcattgacggcagcccttcctcctgattcaccccaacccagcttcccag

SEQ ID NO: 470567 - DNA, 698 bp, Homo sapiens
ctctcctgccctgtggaagtttgggaacctcaatttgcccgaatgacaaaggtattctgatcccctctggcaatacccctggggcaaggagctgtttgggatgaagcagccttggtctaatggggaggagcagcattagagagaaggcagccccgctgctggggggaaggcagagctgtgcacaaagcacccaggataccgcacagaggggaaatctgagccccgcctagagggagggggacagagagggtgtcstggggcagtggcagccgctcctcaggggataaaagcctaaatggcactttgggaggccaaggtgagcagactgtgaggtcaggagattgagaccatcctggctaacacggtgaaaccccgtctctactaaaagtacaaaaaattagctgggcgtggtggcgggcgcctgtaatcccagctactcaggaggctgaggcaggagaattgcttgaacctgggagatggagattgcagtgagctgagatcatgccattgcactccagcctgggtgacagagcaagacgctgtctcaaaaaaagaaaaaaaagatgcataaagggtgcttcaggcctcagccaagttaaactggaggggctgcacagggcactctgggtgggtgtgatgctgtgggaaccggctctgctgactctcagcacccgccttcgagctctgtgagcagtgca

SEQ ID NO: 470568 - DNA, 578 bp, Homo sapiens
ctgaacggtgacctcggaccctctgccgttgctggcctctgtggaacctcccacccagctctctctgctgaggtaggggagcagcagggcagggcctaactctcctagttctagagacagggagctgggctgagggaggctcaaccacgtgccactgtctcctgcgagttcaggcagagcaggtgcccaaatccaaatctgatccggccaccgtggtcccccgggccggaagctcagtgaaaccatctgagctttcactttccatcctgtgccttctgctttgtggagagtagaacagggattctctccggagtttggtcctgatggttctgagagcacaggaggctcaacacgcaatacccgtgagacacaacatcaaacaccagtgacgtcacccgtgagcctttcctcaggctgtgccgggggccacgcgcttctccagcctttcactgcaggggcctggcagtcctgccaagtgcattcaggtgcccctctggccagagttagtttcgttccttctgctgtctycctagaaatgccttaaagagcccactgcgcttaatgaaagctcttcacat

SEQ ID NO: 470569 - DNA, 578 bp, Homo sapiens
ctgaacggtgacctcggaccctctgccgttgctggcctctgtggaacctcccacccagctctctctgctgaggtaggggagcagcagggcagggcctaactctcctagttctagagacagggagctgggctgagggaggctcaaccacgtgccactgtctcctgcgagttcaggcagagcaggtgcccaaatccaaatctgatccggccaccgtggtcccccgggccggaagctcagtgaaaccatctgagctttcactttccatcctgtgccttctgctttgtggagagtagaacagggattctctccggagtttggtcctgatggttctgagagcacaggaggctcaacacgcaatacccgtgagacacaacatcaaacaccagtgacgtcacccgtgagcctttcctcaggctgtgccgggggccacgcgcttctccagcctttcactgcaggggcctggcagtcctgccaagtgcattcaggtgcccctctggccagagttagtttcgttccttctgctgtctccctagmaatgccttaaagagcccactgcgcttaatgaaagctcttcacat

SEQ ID NO: 470570 - DNA, 582 bp, Homo sapiens
accagcctggacaacacagcaagacctccgtctccagccatctctacaaaatatagaaaaatgaaccaggcgtggcagagcacgcctgtagtcccagctactggggaggctgagatgggaggatcacttgagctcaggagtttgagaccagcctgggcaacatagcaagaccccttctccacaaaaacaattttaataattagccgggtgtggtggtaagtgcctgtggtcctagctacttgggaggctaaggtgggaggattgcttgaggccaggagtttgaggctgcagtgagctgagtttgtaccactgcacttcagcttgggcgacagagtgggaccctgtctccaagaaaagagagagagaaaaagaaacaaaatagaaatcactggtaactccatgacccagaggtactccaattaccattggcgtccatgtgtgtggatggacggttacatatgcataaatatctatrcacatacatatgtatatatccctgtaggacagtatgaatgaactttaatttatttaaactattccctactattgttcccacctaaggcgtgggaatcccaggtccca

SEQ ID NO: 470571 - DNA, 623 bp, Homo sapiens
tgcaggtcgtcagagcctgccagagccctgtgcccgcctcccaggccagacaatggagacaaatgcaatcccaagtggggcacaggtcagggctccatgtggccccaggaatgatgacacctggggacggttctcagagtggccagacgtctgcctaaacgctgaacccaaaattcaagcacagaataactgtccaccatgacyttgaaggccagctctcacagccccggggagcaacagccaggcttctaggcagcgggcgccagcggtgcccaccctgaggcacacccaggccccaccgtccccttggtgtgggtctgagctcgtgcctttcggcaggtgcacagccttggggtcggtctagcctggattcgaatcccacctgtatcacttacaaatggagggaccttgatcgaggagggtttataacctcccagaggctcagccctgcccctacacccagggggctgctgagaagccgagaagctgaaggagttcagggcatagacagccgcgcatgctgtaggctcacacataggaaggggacttcccctccctcccaactgtggccatctgcaccctgactggcatgacaaaagggcaaaaaacattggtcaaatttc

SEQ ID NO: 470572 - DNA, 623 bp, Homo sapiens
tgcaggtcgtcagagcctgccagagccctgtgcccgcctcccaggccagacaatggagacaaatgcaatcccaagtggggcacaggtcagggctccatgtggccccaggaatgatgacacctggggacggttctcagagtggccagacgtctgcctaaacgctgaacccaaaattcaagcacagaataactgtccaccatgaccttgaaggccagctctcacagccccggggagcaacagccaggcttctaggcagcgggcrccagcggtgcccaccctgaggcacacccaggccccaccgtccccttggtgtgggtctgagctcgtgcctttcggcaggtgcacagccttggggtcggtctagcctggattcgaatcccacctgtatcacttacaaatggagggaccttgatcgaggagggtttataacctcccagaggctcagccctgcccctacacccagggggctgctgagaagccgagaagctgaaggagttcagggcatagacagccgcgcatgctgtaggctcacacataggaaggggacttcccctccctcccaactgtggccatctgcaccctgactggcatgacaaaagggcaaaaaacattggtcaaatttc

SEQ ID NO: 470573 - DNA, 490 bp, Homo sapiens
tggcaagcagatgcctgtggcctgcagtaccttggcgctggcttggttctgcggggcacaaacaggtctgacaagttcctcagcagcagagacagggctcggtccgtgatttctaggaaagtcaaagtcttggagagcaagcggagccaggcttggggtggagggaggagctcctctgctatgtacctgtcccctgtgtcctgagcccagagctccagactgatggtggtgcttctctctcccgcctcccacagagggaacaggagctcagcagtggggaaagaggaggggagacctttcactgtggccaaggggtaggggagtgtggcccctgtggtgaagcagctaccgtcaaagccagggctggcyctctgcagggtccaacatgccactctccttggcctccttcctcctggcctctcagggtctgaattctacccctcaacccacagcctccaatccttggctccagggacctgctcccccaacc

SEQ ID NO: 470574 - DNA, 469 bp, Homo sapiens
agtggtctgggtgagggggcatgactctggggctcacgtgttacccaagctgtgcacaagaggccgtgggtgkaggaaaaagagttctgtacgtggatgccaaaaggctggggcttgggcagtgtggcattggaggggtctgagagagattgtcccggccagaagtggggcaggtgggccaacaggccaagggaagggattcacgggggcagaagtgaagccagagaagttctgcttttatcccggtcacagcacagccttggggagagatgtcattagaagaaattaatctgatacccacaatgggattgaatgtgcagcccccacattgcaccaatgggaaactgaagcccagagagaggaagggtcttgcccaaggcttcacgggctgcgtgaatgacagcaggtgacctggccaccctcgcccggtgccctttccccttctgtcaccatgtcccccttgttcact

SEQ ID NO: 470575 - DNA, 521 bp, Homo sapiens
tgtggccttcctttagtgagaaggatgctcagtacagacaaatttggcactaaaataatggaaacaaatmgcttgtggaagattagtaaaaaattacctttaactcaataggaaaatgcggttcagtcaaaaaataactcttagaaaaccatttaaggataagaactgcctgtcattgatcttacctgtcattactgaagcaaaaggctgctgaggatcgaaaggacatttcagtctgccagactccaaattatgtgtgtctagtttgaatataatatcctgttatgagaaatattaacactagtgaactttttaaaaatattacaaacagtaagaatgtgggagatacaaactaaattccaactcatgaatttgataaaactaattgagcatatagcatgtgcataatgctgaactccttaactttttagcaaatatatctggcaagacttaataaccatgttttggtctcccttggcccaaagtggcaatataatactgagtgaatttttcaaatggaa

SEQ ID NO: 470576 - DNA, 641 bp, Homo sapiens
tagaaaaatatattgaaatatttgccacattatcagcttggcctgtcagctgaggcttttgctggggctacgtcacagctcaattctccctttgcctaatactgcttcctagctttcctcccactgggctgattccaagaacactcacttatgagctaatcttcatctcagagttggcttctggagaaactgaacctacaacaaaagtgtcataactggtaaatacagttcttgatccatgtccttctcttacaatgtgatcacttctggttctgattgttccattttgatctagtgttgggggaatggactgtcaaatcaatgggcatcatctttccagacccygtcccagagaaggagtccacgagtattccctagccgaagagaggccttacggaccaactttggaatcgttaagcttcgggatagttaagttgtgaggtgtcacatccttgcaatgtgtgcttatacttgcttttaagtctaagtccctatagaaatagtccttcctctcaaaaaaattttcaaaaaagacaaaaggtcataatatcatccatcttcttttaataccagagaatttaaaaaacaaagaaataaaaaacaactcagtctacttaatttttattttctagatagtggaa

SEQ ID NO: 470577 - DNA, 630 bp, Homo sapiens
gtggtttctgggactggtatataaaccaagttggttcaataaaactccataggtacagaaagtgtttttatcttcctccctgactcaaatttctctcttcctttctaaggttatctgcccatctatgcttttgagcacattttcactcaccttttccatcaatcaacactctccttcaatggcttttttttttctgtttctgaaaatgtgttcaatctttcctcatttcctagaaatgagtttcttaagactttactcaagaatggtaactttcaatgtggttcctagagtcacagggatgtagcaggagtcaccataagaaccctattattcaaaactcaataggttgcaagtgacaccctattcaacctagcttaagtaaaaatctaaaaattgtaatttttaagcctatatcatttaragactagggatatatatacttttaggaggggcaacatccaacatccaaggggcataaacagtatcattggatcattgggcctctctctcctctctcgctttctcccctttctcctccctcccctcccccttctctcctctacccctgcattcatttgtgctggcttctttttcaggatattcttcttcatgtggcagcccctgacagat

SEQ ID NO: 470578 - DNA, 544 bp, Homo sapiens
ttctgaattgttgattctcatgcagtgttatgcacaaatatttttactagcaccatttcctaaatgaccaacgtactagagtrgacaaagtgtaaacattaatatgctaaatagacatataagtcataatccaataaaaggtcagattcaaatagaaagaatatacttgattttttatccaaatgatgatttttaaagattgttttatgatgttcaaatgactaaaaacagtagtagtggcagcagaaataacttacatttattgagcaccagttatgtttatttacctttgatagtttggcaatttagccatgagctaaatgttctatatgacttatttcattgatttaatcttcactgagaatactataaggtagacttttttttctgtcacatagatgagaaaactgaggctgagataagttacaaaatataatttgcccaatggttccacaatattgtaacaaatatttaaaccaatagaccttactttaaaaatccatgcacttaactggcattctatcccatcaccttctatcacatt

SEQ ID NO: 470579 - DNA, 599 bp, Homo sapiens
ctataataatcaaacaaacatataawacaaagtaatatcattttaggtgcttaatattccttagcctcaattttcttttctatgaattaagaaatatactaccggcttcagggctgttgctgagatctaataaactaatacgtggaaagcatttaatacagtaaaaattgcagctctactctggctactatagaaatatttaacttttgtttgaatctttctttgtacatctttttttcttctaaaataacacatgcatactttttcatttaaataatataagcgactttcttaggtattacacaataggacctcagtttatcctcgaacatctaggcctccctgcattcccagtgttagcaataatctattctctgtttaaatttttgcttttattagtagctttaaggaatttaagataaatatttgcataagaaagagtttttattgaaatgatcccaaatcaacatatgctttgtcatttgtaatattcccattagggagtagaatgaataataaatggccagccagatgtaggacttatttaagtacttaacagcgagtttatatttgaagcatttagccataaccatacttca

SEQ ID NO: 470580 - DNA, 619 bp, Homo sapiens
accaacttcataaatctctgcaaggattctagaagatagatatcaatgtcactaatggaaaaagaggaataatacaatataattatgctttgttgcttgaatatttcaagggttgatttttccagatgcgagtaaaaaaatatggaaaaaagagaacactgaaaactacaaattaattctaattaaaacctgtagcttactactttttcrtctctactggggcttaattgccacaaataagagaaagtcttggaagatgcaaggattttgaaatacttatgctgtaatgaatgagacacaagacatttcctggagcttaatgtgtgactattcagaattgatggcatagagttcagtcaggcactgtttagacccagatggttgtcaatccctggaaatgccctgagctcaaataagccagcaacaaaccaataatgtatatggattcctttgtaatagatgccaatgtgattgttatttatgaggatagttgtgagaattaatatatacttatttaagttcatttttcagatctagatattttaaatgaataggttaatggtaaacatacaaaattcatcatttctctttccctgtagcttatcctagaggagggttt

SEQ ID NO: 470581 - DNA, 676 bp, Homo sapiens
agaagcccagagagaaagctgattttagcatcatccrgcccaaccacctcttttacaggagaaaagatgatgtatgtgagagtgcagcacagcacagacccacgggaggagctgagaaaattcaggcatcactgttgttactgcagagggtaagagacttctgcagacccactcagctactaccggtgctagagttggatttggacgctggaccagatagggaatggccctctcactagggacaatgaaacagagaagtggctcaacacaggccagcaagtctgggacccagcacagagcaaagctgactcacaaggcctgtgtttgcatgacagacctaggaccagaaaggaggtggcagcagggagccgctcaaagcttaaaatctgcagggaactgtccagggagcccaagacagggccaaatatttgtttccatggcctaacacccaagtcccaaattccctccacctgtgcgcataccacctcagccaacatgcctgtgatgcaggcaggccacatggggtcacccctgtttgcagatgtagaagctgagccacgccagtgggctctccaggacccctagaggagtgagaggcaggggtgggattccaatctcatcttctgtttcctccccacacctgacaaggcaggagcacaagagcatcaccacccac

SEQ ID NO: 470582 - DNA, 558 bp, Homo sapiens
ttccctgcctgtcttgtactatggcccacaggcggcaggctggggccaggtggggcggggctcggtgtgcaggagcagaaaggctgctctgtgtcatcacagaggacattccagttgtgcaggaaggacatatccacaggcctgccaccttgtgacttttatttctgcagtgtcagccttcacagagtcagcatgatgaggtggaaacaacaggggcattggagggaggcagatctgaacttgaatcctggcacttctgccctgggctatggggctgggccggtggctttttctgtagtctctgtttcctgatctgtaaaaggaggaagatgcattataccttctgaggctgctgtgagaacccagtgccatgatgcactgaggagcccagtgacactggagaaatgttcattctctttcctgtttgtcattcctcctccccagaaagaaaaytagtcagctgtcaggaactgactctgaatctagaggacagcctgtcatcaggggcaaagttcaaaatacaaggcaaatattttccttaagaacaagcaaggtgtc

SEQ ID NO: 470583 - DNA, 493 bp, Homo sapiens
caggtccggatggactccctgccttaggctgacctgggagcggagccagttcgattcttggtcgggaattgtgaatggggatgttgcgacacccgcgcggtttgaaacgcccacccagactggaaggcctgattcccgagagcagaagaggctgggagcagaggtgagaaaacactgggaagctgccaattaagggacagaattttctagacatacaggtaaaataagatggttgtgaggcttctgagagaaacagaagacagctacctcagtgtggcagttttctagtccgggcgctcaatccctcaggcctgagtgcctgtctttggrctccggtaggccacactctatccttatgagaaagccccgtttactttagttgactggagtgtggtctcagctcctgcagccagaaaagccctgactaaagcagagggcagggtggcacggcgagtgagttacgggacagggccctagcctaagcctcgtgctc

SEQ ID NO: 470584 - DNA, 539 bp, Homo sapiens
ctgcctggcttttccaggatcggaagggatgtaacaacgtgcacaggaacagggagaaattaaaggctactttggatatgtagatccaagaaattctgaagtttatttgccccctgcccccaaagaggaggagtgagaaatatcagtccagcgaaacctctgggactgcactccttggggaaagcctctaccacagctctgggctrtaaaggctgagcaaggctcttagagacaaaagagctcaggtccaccccagccctgcctggcctcctagctggtaggcaaatgcagtcgtgtgctccacccaagctgtgttttcttcaactgtaagaccaggataataacatggcatctacccctgccgcctccaccactaggttgtccagtgcctttcctctagggctgcagatctaaccccggtgcacattagaatttcctggggaactataaaataataatgtctgcacaaccagcatcttgggacagagggtggcagtgggtgcatatagtgactctaatgcagtcaaggttgagaatca

SEQ ID NO: 470585 - DNA, 279 bp, Homo sapiens
gttctacaaaaagtagaaaatcagtagtctcttatggaaacaggctgtcttcagaggtagcaatagtaggcaacaaaaaaggaaaaaaataaataaatagaagaaaaaagaattttaaaaaaagaagaagctrggcgcagtggctcacacctgtaatccagcactttgggaggctgaggcgggctaactgcttgagcccaggagttggagaccagcccgggcaacatggcgaaaccctctctctaataaaaatacaaaaattagccaggcatggtggtg

SEQ ID NO: 470586 - DNA, 563 bp, Homo sapiens
gacttttattgaacctgcccttggcagcctcagtgccagatcccctctgcagccagcctaattcctccctgttcctgcctccatgaggcctcaagtctcacatctgctggtcatgctagaagaagccatgtaggccactctattgctgcccacccttcctgcctaccaaactcctgccctcagaattccccaagcaggagacaggagacaggcacaaccccaaccttcaccgaggctcctccaagtccagagaagtcacatcaatttcttccctatttcaggtgatcccaagaatgcactcatcaaaccctgctctcgcctatgaagatggacctatgagtgccacagttcagccagcacccagccagtgaaggagaggccagcctcctctggcaggcagcccaatctcttttttttaatatttatttatttatttatttatttatttatttatttatttattgagatggatctcattctgttgcccaggctggagtgcagtggtgctaccatggctcactgcaacatccacctccccrgttcaagccatcctcccacctcag

SEQ ID NO: 470587 - DNA, 621 bp, Homo sapiens
atctttgtttcagacttctaggctctagaaatctgagatgagttgaagccatccagtacagcagtcctggcaaattaatacaaggttgcaggtaacctggagcaagtcaataaacctctgagcctcaatttgctcatctgtaaagaaggctactaacaaaaggacctattcattcatagactagttatgtggattaaacagaaacatagtaactgacacacagtgacctcttttcttagtatcattattattactttttgctgcatcccccatcccaccctctcctgggcacacatcaaaagctaagmtgaactgcctagcttgacctcctcttaagtatcataaataaaaaagttagcaggagaaagaagctcaattatcttaggctccaaacacaagctatgctcacagattaaactttccaaactgaaaagaaataatggatttgaagttttcttccccttggtgtaagtgaaatgtttttcttcacgggtgaccgcccatggcacaaaagtggcatgtcaataaatgaaaaaggagggcacagatgggcactggggtgaaaaagactgcaataatcattattcctccaaaggaaacactctctcccctcctctggac

SEQ ID NO: 470588 - DNA, 398 bp, Homo sapiens
accgggcgcatttatagaattcctgcctgcaaaggccatgcagttgttttaaattagcatacaaatcgacattagtgtagtacatctgttgttaatccacatcccggtggaasggagatgccaacacgccttttattaggcacgtcgatcccataatgtcctttctccctgcctttgtcttctatcagagtccgtaatgggttccaggatgtcttttattttgctatggaccacgtttcctcctgcccagcggatcagaaacgtaatggattccaggatggaatttatgttcctttggaatcagaccctgtacgatgaattctaaagccttcgggcaaatctccagggaggccgtggccctgtgtttgcccccatggtcatcagacaggcaccgggaa

SEQ ID NO: 470589 - DNA, 489 bp, Homo sapiens
tctggcatctggtcactctgtgcmtagggccttcaaagtcctcacacataaccagaaacgtggctcaaggccgggcgcagtggctcacacctgtaagcccagcactttgggaggccgaggcgggatgatcacacgaacccaggaatttgagaccagcttgggcaacatagtaagaccctgtctctacaaaaaataaaaaaaattagccaggcctgcggtaccagccacttgggaggctgaggcaagaggatcacttgagcccaggagattgaggctgcagtgaaccatgattacaacactgcactccagcctaggcagcaaagcgagaccctgtctcagggaaaaaaataaaaaaggcggcttagcatgactaggcatggcccagttcccagcagcccacgtctcctggcaaaccggatgttgcatttcccaagaccatctgcttccatccagagtggagaactcctactggtcagagtctaaaggcag

SEQ ID NO: 470590 - DNA, 489 bp, Homo sapiens
tctggcatctggtcactctgtgcctagggccttcaaagtcctcacacataaccagaaacgtggctcaaggccrggcgcagtggctcacacctgtaagcccagcactttgggaggccgaggcgggatgatcacacgaacccaggaatttgagaccagcttgggcaacatagtaagaccctgtctctacaaaaaataaaaaaaattagccaggcctgcggtaccagccacttgggaggctgaggcaagaggatcacttgagcccaggagattgaggctgcagtgaaccatgattacaacactgcactccagcctaggcagcaaagcgagaccctgtctcagggaaaaaaataaaaaaggcggcttagcatgactaggcatggcccagttcccagcagcccacgtctcctggcaaaccggatgttgcatttcccaagaccatctgcttccatccagagtggagaactcctactggtcagagtctaaaggcag

SEQ ID NO: 470591 - DNA, 661 bp, Homo sapiens
ggggacactgaacagggagcggggtcaggcactgggaactgccctgtgcatcctcaggcagagcacagccctctctgtgcctcagccacccatagatcagaggcagggaccacctggacactcttttaaagcccgttcaacctcgtcattctgagtcagtaactaacggagctagaagtcacgtcatctgggcgtccagtgttccctcctctctcctcgggaaaaggagctgagttttgcttgctgagagcagatggatcacatcaccgcggctcattctcaagcttccatggtgaaatgtgatcccctgtgaagcatcccaggccctccagtccaggcagggctacaggatgagcagccagatgccctggttccatttcagctcatctgctccctctcagtggccctcagttttcctccacaataaaatggggcaataatcccctggtctattgcctggtccagatctttaccctcagcctgcagggagtgtccttatctttagtcccagctktttatccagggaggatgtgcaggaagggacaagctctctgtgtgcatgctgagtagagaccaccattgctacatccagaagtccccccggagcatcataagctgaagatggggtctgaaggtctcagggtacgctcttgagtcaagc

SEQ ID NO: 470592 - DNA, 520 bp, Homo sapiens
gggcagctcagctagagacggtgcagaacacagggtccttggggaccctcccagcctcctgatagcagagccttttatagccaaatcattttggagagagactcatttaagaactggccaggtgcaatggctcatacctgtaatccctacactttgrgaggccgaggtgggagaattgcttgcggccaggagacgcgaccaccctgggcaacatactgagacttcgtctgtacaaaaaaatttttaaaaattagctgggcatggtggtgcacacctgtactcccagctactcaggaggcaaaggtgggaggaagagaaccaggttgacagacaagcacagacacatacacacacacacacacacacacacacacacccccgtgttcttgcatgtttttgctccagcagggggacatgtggagtggtcttccttttgctcccctctcatgctccttccccagcagcagggccctgactctctctataagcccctttatgttttttctggacttagtggaaa

SEQ ID NO: 470593 - DNA, 635 bp, Homo sapiens
ccattgctacatccagaagtccccccggagcatcataagctgaagatggggtctgaaggtctcagggtacgctcttgagtcaagcccacccaacacctgcctggggcaggcagggcagctcagctagagacggtgcagaacacagggtccttggggaccctcccagcctcctgatagcagagccttttatagccaaatcattttggagagagactcatttaagaactggccaggtgcaatggctcatacctgtaatccctacactttgagaggccgaggtgggagaattgcttgcggccaggagacgcgaccaccctgggcaacatactgagacttcgtctgtacaaaaaaatttttaaaaattagctgggcatrgtggtgcacacctgtactcccagctactcaggaggcaaaggtgggaggaagagaaccaggttgacagacaagcacagacacatacacacacacacacacacacacacacacacccccgtgttcttgcatgtttttgctccagcagggggacatgtggagtggtcttccttttgctcccctctcatgctccttccccagcagcagggccctgactctctctataagcccctttatgttttttctggacttagtggaaatgg

SEQ ID NO: 470594 - DNA, 591 bp, Homo sapiens
gaggtgcacagagcatggcaagtaggccacagcagcagcacatagggtgacaaggttggattggcatttgaggacaattaagagaacactttggcatgtttattacaaactgatcatgcctgtgtaaccagcacccacattaacaaagaacgttctcatgatcttgaaagccctcttcttgcctctttcaactgtgactctccccaygggtaaccactcacctgaattccaacaccttagactcttccgcttgtttctgaacttcagataaatggaatcagacagtaggtacttgtttgagtctgtccgccttcacctgacgtgttctgtgagactcgtccacactgttgcatgtggtttgcctactgttctgaccgtgttgcatttcattttgtgatatgcaatttatttatccagttggccattaataggaatttgggctgtttctaattttgggttattctgagcaatgctgccatgaacgttcttgtgcatgcctttcagtgaacatatttattcattttgtgaatgaatttcgtgcctgtcttgttctctcatctagaagtggctcccaaccctccctcacacccg

SEQ ID NO: 470595 - DNA, 591 bp, Homo sapiens
gaggtgcacagagcatggcaagtaggccacagcagcagcacatagggtgacaaggttggattggcatttgaggacaattaagagaacactttggcatgtttattacaaactgatcatgcctgtgtaaccagcacccacattaacaaagaacgttctcatgatcttgaaagccctcttcttgcctctttcaactgtgactctccccacgggtaaccactcacctgaattccaacaccttagactcttccgcttgtttctgaacttcagataaatggaatcagacagtaggtacttgtttgagtctgtccgccttcacctgacgtgttctgtgagactcgtccacactgttgcatgtggtttgcctactgttctgaccgtgttgcatttcattttgtgatatgcaatttatttatccagttggccattaataggaatttgggctgtttctaattttgggttattctgagcaatgctgccatgaacrttcttgtgcatgcctttcagtgaacatatttattcattttgtgaatgaatttcgtgcctgtcttgttctctcatctagaagtggctcccaaccctccctcacacccg

SEQ ID NO: 470596 - DNA, 591 bp, Homo sapiens
gaggtgcacagagcatggcaagtaggccacagcagcagcacatagggtgacaaggttggattggcatttgaggacaattaagagaacactttggcatgtttattacaaactgatcatgcctgtgtaaccagcacccacattaacaaagaacgttctcatgatcttgaaagccctcttcttgcctctttcaactgtgactctccccacgggtaaccactcacctgaattccaacaccttagactcttccgcttgtttctgaacttcagataaatggaatcagacagtaggtacttgtttgagtctgtccgccttcacctgacgtgttctgtgagactcgtccacactgttgcatgtggtttgcctactgttctgaccgtgttgcatttcattttgtgatatgcaatttatttatccagttggccattaataggaatttgggctgtttctaattttgggttattctgagcaatgctgccatgaacgttcttgtgcaygcctttcagtgaacatatttattcattttgtgaatgaatttcgtgcctgtcttgttctctcatctagaagtggctcccaaccctccctcacacccg

SEQ ID NO: 470597 - DNA, 591 bp, Homo sapiens
gaggtgcacagagcatggcaagtaggccacagcagcagcacatagggtgacaaggttggattggcatttgaggacaattaagagaacactttggcatgtttattacaaactgatcatgcctgtgtaaccagcacccacattaacaaagaacgttctcatgatcttgaaagccctcttcttgcctctttcaactgtgactctccccacgggtaaccactcacctgaattccaacaccttagactcttccgcttgtttctgaacttcagataaatggaatcagacagtaggtacttgtttgagtctgtccgccttcacctgacgtgttctgtgagactcgtccacactgttgcatgtggtttgcctactgttctgaccgtgttgcatttcattttgtgatatgcaatttatttatccagttggccattaataggaatttgggctgtttctaattttgggttattctgagcaatgctgccatgaacgttcttgtgcatgcctttcrgtgaacatatttattcattttgtgaatgaatttcgtgcctgtcttgttctctcatctagaagtggctcccaaccctccctcacacccg

SEQ ID NO: 470598 - DNA, 575 bp, Homo sapiens
agggccatgagtctggcctgttggggcagtgtgcatctacctcctgccccccagctataggcaccggttcctttttccatctgttgttatgagcaggtgccttccgtaccagctagggaacaagtatccaacaaccaggcttttttttttttttttttttttaagayggagtctcactctgtcatctaggctggactgtagtggtgccatctcagctcactgcaacctccgcctcccgggttcaagcaattctcctgcctcagcctcctgagtagctaggattactggtgcccaccaccatacctggctaatttttgtatttttagtagagatggggtttcaccacattggccaggctagtgtcaaactcctgacctcgagtgatccacccgcctcagcctcccaaagtgctgggactacagggatgagccattgcacctggccaaaaaccaggctttttggtgatggctgggaacccagaaagggtgacagtcatttgtgatccaattcctagttgtctgaaatgtgcctccctccaccgcatggcctcaccactgatagcttggtcacctatc

SEQ ID NO: 470599 - DNA, 612 bp, Homo sapiens
ctgtctcaggccagtaagtgtctcaggatctggtgcttagaaagggcttcacaaatgttcattgaacagaggacttagaattgctttcttttccttccttccttccttccttcttcttcatcttctttctttttttttatctttcttttttctcttctttcttttctctttctttacttcttttctccttcctcctttctttgctctccttccttccttccttctcctttccttctccttctccttcccttcccttcccttccttctctcctcccccccmctcctttttttttttgagacagggtctccctctgtcacccagggtgatgtgcaatggtggggtcatagctcagtgcagcctcaacctcctgggctcaagtgatcttcctgccttagcctcccgagtagctgggactacaggcacacaccaccgtgcctggataattttttgttgtttgcagagacaaggcatcttgctaggttgcccaggctggtctcgaactcctggcttcaagcagtcttcccacctcagccccccaaggtgctgggattacaggtgtgagccaccatgcctggtctaaagtgtataatctcaactatacagcttgatga

SEQ ID NO: 470600 - DNA, 612 bp, Homo sapiens
ctgtctcaggccagtaagtgtctcaggatctggtgcttagaaagggcttcacaaatgttcattgaacagaggacttagaattgctttcttttccttccttccttccttccttcttcttcatcttctttctttttttttatctttcttttttctcttctttcttttctctttctttacttcttttctccttcctcctttctttgctctccttccttccttccttctcctttccttctccttctccttcccttcccttcccttccttctctcctccccccccctcctttttttttttgagacagggtctccctctgtcacccagggtgatgtgcaayggtggggtcatagctcagtgcagcctcaacctcctgggctcaagtgatcttcctgccttagcctcccgagtagctgggactacaggcacacaccaccgtgcctggataattttttgttgtttgcagagacaaggcatcttgctaggttgcccaggctggtctcgaactcctggcttcaagcagtcttcccacctcagccccccaaggtgctgggattacaggtgtgagccaccatgcctggtctaaagtgtataatctcaactatacagcttgatga

SEQ ID NO: 470601 - DNA, 547 bp, Homo sapiens
ggatgtctgttgacagcacttcctgtagctggggctaaaagcctttctcaatgcaggggatctgggtggcacagcccaacatctaccacaagggctggtgggcatggaggggaacaaggtgtgttcctgatgctattttgctagtaagacagcctgggatggcctttgatttgtagaggccacaactcygttgactcatgctgaacttattgttggcaagaacctctacatcccatctgaggcttgtcctctgggctctggggctgcagtgcaggacttcatatttgcctggttgtatttcatgttgttagacttggctccttgctgcggctgtgcagatctagcttggatcccaactctctcctaagacccaggcccctgtctctgctggctcctggtcttccacagttcccagcagcagtttactgcctccccagtcaaggtcttcctctcctagaggcatggcctcaagaagacagacagccacgtgccaagacccagatcgtctggctgtttagcaaagtgtctaagagttgcccgttgactt

SEQ ID NO: 470602 - DNA, 442 bp, Homo sapiens
ctttctgcctttctgccctgttggtgtttagcccgggggcctgggctcagcctggctctggagcctgagagggtcacataacagcacttaggtgggccagcagtggcagacagagcaaatcccccttcactgctggccagggaaattgagtcctgcctaatgaacaagtttgcagcccaccttgttccccagcatggctggatgggtctggaggctgaggctcagcggtsagatttttcttctttttcttttttttttttgagacaaggtctcactctgttgcccaggctagagtggagtgacatgatcatggctcactgcagcctcgaactcctgggctcaattgatcctcccacttcaccctcctgtgcagttgggactgtaggtgtgcaccaccatacctagctatttttttgtatgatttttagagacgggtcttgca

SEQ ID NO: 470603 - DNA, 442 bp, Homo sapiens
ctttctgcctttctgccctgttggtgtttagcccgggggcctgggctcagcctggctctggagcctgagagggtcacataacagcacttaggtgggccagcagtggcagacagagcaaatcccccttcactgctggccagggaaattgagtcctgcctaatgaacaagtttgcagcccaccttgttccccagcatggctggatgggtctggaggctgaggctcagcggtcagatttttcttctttttcttttttttttttgagacaaggtctcactctgttgcccaggctagagtggagtgacatgatcatggctcactgcagcctcgaactcctgggctcaattgatcctcccacttcaccctccygtgcagttgggactgtaggtgtgcaccaccatacctagctatttttttgtatgatttttagagacgggtcttgca

SEQ ID NO: 470604 - DNA, 379 bp, Homo sapiens
gggcttggcaccacctgcagtcaaacctggtcccaccacctctagttgtgaagttttggacaagggctcatacaggcaacctcagcactttgggaggctgaggcagragaattgcttgaggccaggagttcaagaccagcccaggcaacagagcaacaccttgtctccacacacacacacacacacacacacacacacacacacacacacacaaacacacacaacaaaaaacaaaaacaaaaacaaaacaaaacaaaaaaaattagccaggtgtggtagctcatgcctgtagtcccagctacttgggagattgtggtgggaggattgctttgaggctgggaggttgaggctgcagtgaactatgattattccaccaaac

SEQ ID NO: 470605 - DNA, 637 bp, Homo sapiens
tcctacaccagaaaccgggcttgcttttcctggcaccatcctctctgaggaggaaatgaatgaatcaacaattacaatacagggttgggctgggtgtgatagcttatgcctgtaatcccagcactttgggaggtcgaggtaggaggatcacttgagcccaggaagtcgagaccagcctgggcaatatagcaagaccccatctctaaaaaaaaaaattagccaggtatggtgtcacacacctgtagactcagctactcagggggctgaggtgggaggatcgcttgagcccagaagtttgaagctgcattgagctatgatccygccactgcactccagcctgggtgacagagccagaccctgtctcaaaaaataaatgaataaaataaaataaaatacagggttgcactgtgtctggggctatggtgaaaggcctctgcatgatggtagagggaagaaaagatttctattctcatccattgctaagtccatagttaatacccctgtgacacaagatagattaacaagagaaaaacatgcacatttgtttaagttttatgtgacataggaaacttcagacatgaagacccaaagaaacagggagacctgtgtatttttatgctaaatttgataaaaaagc

SEQ ID NO: 470606 - DNA, 556 bp, Homo sapiens
gctgaataaattacagagatctctcattcaataatgcaccaagagttaacaatattgtactatacatacacttaaaaatggttgagattatatattttatggaatgtggtttttacccaataattaaaaagaagagtctagcacagtgctggccatataaagcctcaataaatgtttgctgaaaattaaaaaaaaaaaaaaggccaggagtggtggttcacacatgtaatcccagcactttgggaggctgaggtgggagaattactcgagcccaggagttcaagaccagcctaggcaacayggcaaaaccctgtctctccaaaaaatatgtatattaaaaaaattagccaggcatggtggtgtgtgcctgtagtaccagctactcgggagactgaggtgggaggatcgcttgagcctggaggtcaaggctgcaatgagctgagattgtaccactgcactccagtcggggcaacagagcaagaccctgtcacaacagaaacaaaatcttgaggtgtctagtcctggcctcagcctcagagtatttgtttctgaactt

SEQ ID NO: 470607 - DNA, 582 bp, Homo sapiens
tttggtaactgtcatccagtttcacatttacattcaaaggttcttcataacataaggccctacccaaaagctccccacttggtgtgaagaaatgttaccttacagatttaatcatttccctgtctcaatctgaatacccaagtatttacaaagctcctagaatttcttcatcaagctcccttgacacaggtaaagggtctgccaagcaccaccagccccaacccgaactaatgctgctgccccaggctcaggactggcaaggctgcagaagtcagagtcaggtctcccttcagttcccatcccactcacatgaccacaccatcctcctggttatgacggagcatgacttatgaattatccaacgcttgatcaaagttctgcctcatgtttgtttttattggaaacaactaataagcacttgaaaagcaacaaaatagtttttccacaaaygtcactttactcctcataaacactgccctatgaggtatacagcaacatcaccttcctcatttttcacatgagaatatggatgaaagggggaccaatcccacactgtagtaaagtccagacctgcatcaaagt

SEQ ID NO: 470608 - DNA, 565 bp, Homo sapiens
tggaggcagaggaggagggaaggaaaaaagtggtaaaaagagatcttagtacaggccactgtatgacttagcaggtgcatctacctaaatatttgtacaaataccaactagaatcaaataagtttaaaagaccttatytaggccatgtcatccaaagtattttatagttgaggaaatcagaactagagaaacaaagtaaattggccaaagcatactgggcctagtctagtgatatatcttcaactctatattataatcaaagttcaatcttaaatcaacctaaaatattatattatgtaaaatacagcacacagattcattatgtatcattggcacttttactatgttttgcatttaatctgcccataaatattctgaaactcattctttaaatcatttcctgtttgccccaaaaatactcatctctaatcctactgtaacatcatcatctacatttctgttacattaggattagagacaaattctgtttataaataactctaagaacagtttttatattttattttcatgttgaaaatcagtcagatttgcttcagcctcaaat

SEQ ID NO: 470609 - DNA, 565 bp, Homo sapiens
tggaggcagaggaggagggaaggaaaaaagtggtaaaaagagatcttagtacaggccactgtatgacttagcaggtgcatctacctaaatatttgtacaaataccaactagaatcaaataagtttaaaagaccttatctaggccatgtcatccaaagtattttatagttgaggaaatcagaactagagaaacaaagtaaattggccaaagcayactgggcctagtctagtgatatatcttcaactctatattataatcaaagttcaatcttaaatcaacctaaaatattatattatgtaaaatacagcacacagattcattatgtatcattggcacttttactatgttttgcatttaatctgcccataaatattctgaaactcattctttaaatcatttcctgtttgccccaaaaatactcatctctaatcctactgtaacatcatcatctacatttctgttacattaggattagagacaaattctgtttataaataactctaagaacagtttttatattttattttcatgttgaaaatcagtcagatttgcttcagcctcaaat

SEQ ID NO: 470610 - DNA, 565 bp, Homo sapiens
tggaggcagaggaggagggaaggaaaaaagtggtaaaaagagatcttagtacaggccactgtatgacttagcaggtgcatctacctaaatatttgtacaaataccaactagaatcaaataagtttaaaagaccttatctaggccatgtcatccaaagtattttatagttgaggaaatcagaactagagaaacaaagtaaattggccaaagcatactgggcctagtctagtgatatatcttcaactctatattataatcaaagttcmatcttaaatcaacctaaaatattatattatgtaaaatacagcacacagattcattatgtatcattggcacttttactatgttttgcatttaatctgcccataaatattctgaaactcattctttaaatcatttcctgtttgccccaaaaatactcatctctaatcctactgtaacatcatcatctacatttctgttacattaggattagagacaaattctgtttataaataactctaagaacagtttttatattttattttcatgttgaaaatcagtcagatttgcttcagcctcaaat

SEQ ID NO: 470611 - DNA, 565 bp, Homo sapiens
tggaggcagaggaggagggaaggaaaaaagtggtaaaaagagatcttagtacaggccactgtatgacttagcaggtgcatctacctaaatatttgtacaaataccaactagaatcaaataagtttaaaagaccttatctaggccatgtcatccaaagtattttatagttgaggaaatcagaactagagaaacaaagtaaattggccaaagcatactgggcctagtctagtgatatatcttcaactctatattataatcaaagttcaatcttaaatcaacctaaaatattatattatgtaaaatacagcacacagattcattatgtatcattggcacttttactatgttttgcatttaatctgcccataaatattctgaaactcattctttaaatcatttcctgtttgccccaaaaatactcatctctaatcctactgtaacatcatcatctacatttcwgttacattaggattagagacaaattctgtttataaataactctaagaacagtttttatattttattttcatgttgaaaatcagtcagatttgcttcagcctcaaat

SEQ ID NO: 470612 - DNA, 324 bp, Homo sapiens
ttgttttagttttgtttgagttgtgatkatctcagtggctcttctctccctcacccacccacctctcctatttgttcaatctctctccctcgtctggtgccttaaaagggtctccatgctttgcatccctcctccactccacgatcagggacccacccggcatcacacgttctgcttcagcaacaatgaactgctggaaatttccagcaactctttttcctgccagtgctcacactgtacccttgcctgttaaggtcttacctgtcttcctcgcacacccctgcctctcacctgctcagaagtcccctcctgccagcagccagt

SEQ ID NO: 470613 - DNA, 324 bp, Homo sapiens
ttgttttagttttgtttgagttgtgattatctcagtggctcttctctccctcacccacccacctctcctatttgttcaatctctctccctcgtctggtgccttaaaagggtctccatgctttgcatccctcctccactccacgatcagggacccrcccggcatcacacgttctgcttcagcaacaatgaactgctggaaatttccagcaactctttttcctgccagtgctcacactgtacccttgcctgttaaggtcttacctgtcttcctcgcacacccctgcctctcacctgctcagaagtcccctcctgccagcagccagt

SEQ ID NO: 470614 - DNA, 573 bp, Homo sapiens
aacccagaacacatatttttcctgacaatccagccaaatgtgaatccagggactcggtgtaattcatcagaacaaagcaacactgcaggcaggttgtgtggtacccatttgcctttgtaataccgccatgctcaattccaaacacmgtctgtcaactcatcggagccccactggtgagaaagccaaggctggcagcaggtttggtgccacctcttggtgccagagccacctgcacacagcatggagcaagggaatagccagggtgccctggatccagttccttccagaagccagcagccctagggctcctccatcccactcccagcaagaagaagctgccatgaatatgaaggtgggaagaggaagctcagaccaggggaaggcttgggctgtgtgttaattcttctctggtccccaggacccaacacagttgtctggttaatactgcattaaatgcagttaattgattctagccccatttccactaagaaattcctgagtgctctcagaaagttacttctcttggagcctgcagcacaacaaaccactcagaacttggtgctataaaacaac

SEQ ID NO: 470615 - DNA, 610 bp, Homo sapiens
caaaagtggaacccgaattaacagacaatcaaattatcaccaaatacttggggaaaattaacatcattagaaaggatcatctgattcaaataactgaataactaaaacttgaagaaaattaatggcagcaacagaataagactttttaagtataatttatttggaggtattcgagaatatattactttaattagcaaaaatatgacagctatgaaaaaaacagaaacaattgggattcttggaattaagactattattactattttttttttcttagggatgagatctcactatgttgctcaggctagactctaactcctgggctctagtgatcctcctgcctctggctcccaagcagctgggactacagaccagcatcaccacacccagtttagttacmaaatattttttaaactataaaaaactattctgcatagtaaaacactgtttattaagttaaaaaaagaaaaacactcatggaaaacaacaaaataccttttggcatacaaaaagacatgcatatttaagaacatatatgaaatatcttaaatagaaacaatggtggggagaatgggaacacgcgtcaaggatgaaagttttaaaaataaac

SEQ ID NO: 470616 - DNA, 495 bp, Homo sapiens
tgctgattggtccattttacagagtgttgattggtgcgtttacaaacctttagctagacacagagcgctgattggtgcatttttacagagtgctgattggtgcatttacaaacgtttagctagacacagagcrctgattggtgtgtttacaatcctttagctagacagaaaagttctccaagtccccacccgacccagaagcccacctggcttcacctctcaatatcatatctgcctttaagcaagaggcatttccatccccatataagcattatttatcaaattttaggaccacatgcctatgccatggtatatcagtctaagactgatattcctatccttgatgctatttttctgagggcagtcaacagaaaagggattagaacaggttatttctacatatatctcccattttaagaaataaagatgaaggctgggtgtggtgggtggctcactcctgtaatccccccagcactttgggaggccaaggtggtt

SEQ ID NO: 470617 - DNA, 495 bp, Homo sapiens
tgctgattggtccattttacagagtgttgattggtgcgtttacaaacctttagctagacacagagcgctgattggtgcatttttacagagtgctgattggtgcatttacaaacgtttagctagacacagagcactgattggtgtgtttacaatcctttagctagacagaaaagttctccaagtccccacccgacccagaagcccacctggcttcacctctcaatatcatatctgcctttaagcaagaggcatttccatccccatataagcattatttatcaaattttaggaccacakgcctatgccatggtatatcagtctaagactgatattcctatccttgatgctatttttctgagggcagtcaacagaaaagggattagaacaggttatttctacatatatctcccattttaagaaataaagatgaaggctgggtgtggtgggtggctcactcctgtaatccccccagcactttgggaggccaaggtggtt

SEQ ID NO: 470618 - DNA, 612 bp, Homo sapiens
aaaaacagatataattacaaagagggagaggcttcgtttgaagtcactggaagagtcgctgaggctatcaggacttgaggggtcaagatccctcaaagaggtcaatcacaaaagggttwcctgacattctgtaagcagctttcatatttagatcatttgctggagagagagattgagaaacaaggcagaagccaaagcaaaaacacaaaaagctgagaaacaaaatagctttggtaaacacatgaggtatgtagggaaaatatggtaggatcaagagacagaaattagtgtgaggtatctagaacttaaaaggcaaaatccaagagagacagaaggaaaaaatgggcttacagttagcaatacttctctttaattttttaaatctatacacagagaaagagtctaaaaaaattaagaagaaaagtagaggctgggcacggtggctcatgcctgtaatcccagcactttgggaggctgaggcaggtagatcacaaggtcaggagatcgagaccattctggctaacacggtgaaaccctgtctctactaaaaatacaaaaaattagcaaggtgtggtggcgggcacctttagtcctagctacttgggaggctga

SEQ ID NO: 470619 - DNA, 612 bp, Homo sapiens
aaaaacagatataattacaaagagggagaggcttcgtttgaagtcactggaagagtcgctgaggctatcaggacttgaggggtcaagatccctcaaagaggtcaatcacaaaagggttacctgacattctgtaagcagctttcatatttagatcatttgctggagagagagattgagaaacaaggcagaagccaaagcaaaaacacaaaaagctgagaaacaaaatagctttggtaaacacatgaggtatgtagggaaaatatggtaggatcaagagacagaaattagtgtgaggtatctagaacttaaaaggcaaaatccaagagagacagaaggaaaaaatgggcttacagttagcaatacttctctttaattttttaaatctatacacagagaaagagtctaaaaaaattaagaagaaaagtagaggctgggcacggtggctcatgcctgtaatcccagcactttgggaggctgaggcaggtagatcacaaggtcaggagatcgagaccattctggctaacayggtgaaaccctgtctctactaaaaatacaaaaaattagcaaggtgtggtggcgggcacctttagtcctagctacttgggaggctga

SEQ ID NO: 470620 - DNA, 423 bp, Homo sapiens
gaggtcatgaactgagacattgttctctttctaacttggtcactgttgtattgccattgttgagccgtatttctatgacacaacaggcattcaacatatatttgctgaatagaggaatagaggaagaaaacaacacataaaggttctatttgaaagtgtcctttcaacaaatattacccttggaaaaaaaattggaaacttcaatttagtacttcaatatggcaatgttgttatgacaatttaargttgcacaacctatagtaaccataaataatacgtataagttaagaaatacgtagcaaacaagcagatgaaggccagtgctggtgtccacagaaaagcctgctgaagtttggctgggcctaaaactctatggtctggctgtgttccttcaaagaccagctttcagtgcccaaaagtaga

SEQ ID NO: 470621 - DNA, 564 bp, Homo sapiens
tgcggaagctccagtggtggtgtttctcctcttaataacattgtgcctgttcataattgcctcattcaaatcaaataatatactctggacatcatagtgggcaaagcactttggacatgtccagggcctgacagagtcttctgatcggttatcttcaagatctgatgacttcccaagttcttcacctttggcattgcgcaatttacgaaaaatagakgagtctccagtttcagattttgaacgtcgcttgagtggtttttccctttccttaaaaagcctgaggttctctctctgtgagataggcccgtctattacatccaaagagaaaccagaacccttgccaccaccagtaatgagaaagtcactgagcttggttggagttggacctcgatcagatttgtcatctttgtagccctttaacaaatcaaaaaagctttctccagatgttccctgtttatcaattgaagatgtgctaccatattccctgtgcagtgatggtccagtcttgtatgtaggtgagatacattcatcaaagctatccacatcaagttcacttatggtgat

SEQ ID NO: 470622 - DNA, 316 bp, Homo sapiens
gcaccaccgcactccagcctgggcaacaagagggaaactccatctcaaaaactttaacatttctcttaaaaggtyagctttatattgctattttattagccacttcctgatgaggagacacaagcagtgcaagcctgctgactctggttgcgggggcaggcacccgggtgaagatcaccttccagagcgccgggcgcccttccacacgcagtgcccactcctgaccaccagatggagcccacgcactgcccaggaccacgaagccgacccggggtctggagcaggccaggcaggcacttgctggacacgtgggcag

SEQ ID NO: 470623 - DNA, 596 bp, Homo sapiens
ctgctgacaccctgagtttggacttccagcctccagaactgtcaaataataaatttcagtttttctaagcctccctccccccccaaagagtgtggtaatttgttgcggcagtcctattaaactaatagtcactaggcagtaacttactgtcttagtccgttttgactgcttataacagaagaccygaaactgagtaattaataaaaactgaaatccatttcttatagctggaaggccaggagcccatggtccagaggcagcccctggtgaggtcttctcattggtggggactctgcagagtccggaggcggcacagggcatcacaaagctaggggctccctcctgtaaaaagtcaccagggcccttcccacaataaaccactcatccattcatgacggccgagctcacatgatctaatcacctcttaaagattccacctctgaatactggcacactggggatcaagtttcaacatgagtttggaggggacattcaaaccatagcacctacttacaaccatacaaatttgtttcgtgcagtgcttttgcaacatttagcatccaaatttaaaacaaacagtattttatggtaaacct

SEQ ID NO: 470624 - DNA, 596 bp, Homo sapiens
ctgctgacaccctgagtttggacttccagcctccagaactgtcaaataataaatttcagtttttctaagcctccctccccccccaaagagtgtggtaatttgttgcggcagtcctattaaactaatagtcactaggcagtaacttactgtcttagtccgttttgactgcttataacagaagacctgaaactgagtaattaataaaaactgaaatccatttcttatagctggaaggccaggagcccatggtccagaggcagcccctgstgaggtcttctcattggtggggactctgcagagtccggaggcggcacagggcatcacaaagctaggggctccctcctgtaaaaagtcaccagggcccttcccacaataaaccactcatccattcatgacggccgagctcacatgatctaatcacctcttaaagattccacctctgaatactggcacactggggatcaagtttcaacatgagtttggaggggacattcaaaccatagcacctacttacaaccatacaaatttgtttcgtgcagtgcttttgcaacatttagcatccaaatttaaaacaaacagtattttatggtaaacct

SEQ ID NO: 470625 - DNA, 621 bp, Homo sapiens
ttcacaggccccatgcgctgctgccctctgttggctttggtgcatagtcacccaaacatatctgccctggagcatctcaagggacatgtaacctctagaagcattctggaaaaggggtttagcagaatgtttgatagagcctccatgcaatctcctcaaaaccctgtctatccctagattgctatgtacacgtgtcagtaattttgaagttaccgtacctggagtgtaaatagtctatgatatgtgtcaaatagggcaaatacaatttactggactgactgaggcttacagccaccacacagaaataccaagttcccattcactgagcagtggtcgctgactgaatggacaagatggggycactctgcacagcagcagggatgcagtgctgccctgccgtgcccgccacctctgggtcagtgtccgtgtcacccttgggaatcaggtaaacacatctaagccatttggctccagcttgctttcctgcttctggaataaatttcctctgcttcaggaagaaatggtaattctgcccattaaatgaaataaaataaaagtaaccaaccaacaaaagcagacaagtgaggctctccagaactgatgacagcagagtgcagagcc

SEQ ID NO: 470626 - DNA, 539 bp, Homo sapiens
tggggcatgggctagagaggaggggaggagttctgtgttgcaaggacttgcaggtaggaggttgctggactggttccgggagccctcttggtgtgtaccggccctgaggcagcagccagggtgtgcagggcctcatgcactgtygctgggctgggcccttatccccgcggggcatggtgtaaagcaggatacagcctggcctgcaccggctttggaaggtttctctggggagaacggactggggttggggacactgggagttgaaagacctgtgaggggtcatgccacattttggaaagtagttgggggcttcatgtaggcctggcctggttggagaaatgctgatgcccttcctacatcccagggaaaatgaggaaacccagtgctaagagctggctggaactgagctggctgtttgagtaagaagagatgtacgaccttgtgaaggtccttctagggacgtggccccaggccttcccagaggtcagaggccccaggttctcgaccatatggatggacagcctgagtcccggctctgc

SEQ ID NO: 470627 - DNA, 468 bp, Homo sapiens
tttatttgcagagctatgaccttatctagtgtgcccacttcctcccctgcagtattggatagaggagtggtgatctccagtgtgcccttttgtttctagtatgaagaacaattgaagttgtgatttcttagatgtaaagtaggaatctcccagggatttccctcatttgtatctcatctccagtggtgcctaccgcagtgctgtacatagtaggtcttccataaatagtcttyggatgagtctcgaatttttgaacagacttcttttttgaacaaacctctttgggaggaaagccttatactgaagcatatttctcttccgtctctgcttttatgagcattcattattaaattagaaggagccagattttaaataaactgagttttcattttctagggatttctctcacttcgaattccatataatatagcttttaactgggcatatgttctagcagctttacattgg

SEQ ID NO: 470628 - DNA, 638 bp, Homo sapiens
tcagcactgaagcagggcacctcctgattcagcagagagaccctcccctccccagccatgttggcggctgccctaggattgctgatgcccattgcaggggctgaatttctcattggcctggttggaaatggagtccctgtggtctgcagttttagaggatgggtcaaaaaaatgtaaggagtccctataaattctcatgattctggtaagtagccactttctcctactcaggccgatcatgttggacataagtctgtttccactttcccagagcagtggttggctttactatcttaatgtcttcgagtcctggtaagccaggccaacatgtrgtttgccactttcttcagtggcttctgctgcatggagatcatgacctttgtcccgctgacttcttgtagctgaaaagactgggtttttgttttttgctagtgtctttcaagatcactttttatttctcagctcttgttggctggaccctttaaaaacccttaacaggaaacagcaacatcctgcatcccattttaaatctgttatttttatagattgctgtccagtgaaggagactgattgctatttgtgatgtttctgttccacttgtctttttgtaaagacatcacaggaagatggaggaccac

SEQ ID NO: 470629 - DNA, 602 bp, Homo sapiens
tgttaacattgtgttcttgacactgccactgcctctgagactgtgtctcttcgagccatcctgggtgggatttttggctggctgattctagatcacaggcctaacctagctgacaggccctggggtgaggaaaagcctggtttccctttggcttctgaaatatgcacttttaaattaggtgaaataaattattccaccattgaattaagcagcagaatgggtacagctcctggtgtggaattgatgcactggaaggccagctctagaactctcgcaggagatatggcaaagtaataaagtgatgggaaatttaaaagcaaagcaatatggcacacagaaataaaaggacactcataggtrtgattggagccccagaaggagatggaaaaaataagcacaaggaatgaaatatttgaagaattaatgaccaagaattgcattaacgatgaaaaaagactaaaagggctcaaggggtgtcaaagaagacagataaagtgggaggaattcgtcacacttaaacacattgtagagatttaagaatatcgaagacaggcaattttacaaaattttgaaagaacagatcaagaatcagattgacattt

SEQ ID NO: 470630 - DNA, 549 bp, Homo sapiens
aaagtgggatgtctgcattcatgaattcagaagtagacatgtcctggtgaagacaagtgcacaggtggctgtgggagtggttggctgaagtggagttaaggtaagggtccttggaaatgaggcactagcagctcaactcagtgctggggtttcactttcctggagttcatgctgctrtttcatttggaactcagatgcttttagggtactgagtatgttttcactaatatctgtaccttaatatttgtgcccatacacacagggggtcatgtataaaattctttggtgggtgattctgctgtatctaattatctcatggagaaaatggaacttactgaagaaaagaatggcagctcttctgcaaataaataagcagatacacataagcttgtaatacattactgttaaaaccagagaaaagaacctgctttataattaatttaattaacatattcaccactattggattcagtttaatttaataaaatttggtttaaaagtgctggcatagataaaactaaatgtttatataaacaagcatttgaacag

SEQ ID NO: 470631 - DNA, 549 bp, Homo sapiens
aaagtgggatgtctgcattcatgaattcagaagtagacatgtcctggtgaagacaagtgcacaggtggctgtgggagtggttggctgaagtggagttaaggtaagggtccttggaaatgaggcactagcagctcaactcagtgctggggtttcactttcctggagttcatgctgctatttcrtttggaactcagatgcttttagggtactgagtatgttttcactaatatctgtaccttaatatttgtgcccatacacacagggggtcatgtataaaattctttggtgggtgattctgctgtatctaattatctcatggagaaaatggaacttactgaagaaaagaatggcagctcttctgcaaataaataagcagatacacataagcttgtaatacattactgttaaaaccagagaaaagaacctgctttataattaatttaattaacatattcaccactattggattcagtttaatttaataaaatttggtttaaaagtgctggcatagataaaactaaatgtttatataaacaagcatttgaacag

SEQ ID NO: 470632 - DNA, 549 bp, Homo sapiens
aaagtgggatgtctgcattcatgaattcagaagtagacatgtcctggtgaagacaagtgcacaggtggctgtgggagtggttggctgaagtggagttaaggtaagggtccttggaaatgaggcactagcagctcaactcagtgctggggtttcactttcctggagttcatgctgctatttcatttggaactcagatgcttttagggtactgagtatgttttcactaatatctgtaccttaatatttgtgcccatacacacagggggtcatgtataaaattctttggtgggtgattctgctgtatctaattatctcatggagaaaatggaacttactgaagaaaagaatggcagctcttctgcaaataaataagcaratacacataagcttgtaatacattactgttaaaaccagagaaaagaacctgctttataattaatttaattaacatattcaccactattggattcagtttaatttaataaaatttggtttaaaagtgctggcatagataaaactaaatgtttatataaacaagcatttgaacag

SEQ ID NO: 470633 - DNA, 549 bp, Homo sapiens
aaagtgggatgtctgcattcatgaattcagaagtagacatgtcctggtgaagacaagtgcacaggtggctgtgggagtggttggctgaagtggagttaaggtaagggtccttggaaatgaggcactagcagctcaactcagtgctggggtttcactttcctggagttcatgctgctatttcatttggaactcagatgcttttagggtactgagtatgttttcactaatatctgtaccttaatatttgtgcccatacacacagggggtcatgtataaaattctttggtgggtgattctgctgtatctaattatctcatggagaaaatggaacttactgaagaaaagaatggcagctcttctgcaaataaataagcagatacacataagcttgtaatacattactgttaaaaccagagaaaagaacctgctttataattaatttaattaacatattcaccactattggattcagtttaatttaataaaatttggtttaaaagtkctggcatagataaaactaaatgtttatataaacaagcatttgaacag

SEQ ID NO: 470634 - DNA, 242 bp, Homo sapiens
ctaattgctagaaagcagatacttgagcagttgttgagatatgcaaatgcaaataagcattgtcacaaatatatctgtatcacagcgagtatggcttttggtttagttagttacacaatgaytgtgatatttagccatcagagtaattgaactttataaagtaatcagcagtagcaaacaggtatataaatagcagttacttagatgatagtcaaatcacaattaaaaaatatataaagaac

SEQ ID NO: 470635 - DNA, 242 bp, Homo sapiens
ctaattgctagaaagcagatacttgagcagttgttgagatatgcaaatgcaaataagcattgtcacaaatatatctgtatcacagcgagtatggcttttggtttagttagttacacaatgactgtgatatttagccatcagagtaattgaactttataaagtaatcagcagtagcaaacaggtatataaatagcagttacttagatgatagtcaaatyacaattaaaaaatatataaagaac

SEQ ID NO: 470636 - DNA, 595 bp, Homo sapiens
cttgcctcctatttcactgaggaaatggatgctgtcataaaacaaaatacttcattttatcactaacaattctacctaattatcattatctatgcccatgaactccattttccacctgttacaactgatgaactttattgctacggccaaaacttccaatgatacactggatctcatccctttttttgtcaactcaagaactttattcctacagttatccatctttcctaaaacatatatctctatatttgtaggattagtttcatcagcatttgaacatactctaggaagtaccacagtaatgtgagctttagtaattaaataccaaactaaatagcatttctaagcctcagttacttcatctatcataaagaataataaaatctacctttttggattattgttagcattaaataaaatgaagcataaaaagctcccaaaatatatgacattggttaatactttattattaatattctattacatagctaaatataacaaagctaaaatattgtcttctctcaagcatrtcttgatttgtacattcattctggaacagatactcagactcaaagctcactggagagcagaatga

SEQ ID NO: 470637 - DNA, 509 bp, Homo sapiens
tcagctgatacatttcaaatcaataaattaatctggtcaccatcttaaaacctctaattctaataatatgagtgtgcatttggtaaaatgtatacaaatgtgtaagcatatgtgcacawgtatgtttgtaaaaattttaagacgcaagtaatggcaaaactgaaagacatttcattcaattttctctgatgttgagctttgcagttggcataatgctaaacccccttaacttgaaatctcatgaaatgctgttttataagcagtgatgttggtccttggatataaccacatgtcctgctgcagcctggatcttgcatcaggcaattccacaacttgaactgggtaatttttgtcaaaccatggttagttaacttgggcctttttcttaaactggagcttgcattggcaatctagatttcctgtttttttgcagccataacatgcaacggtgaaagaagcaaaagtctggtcagaggaaaaaccaaaagtccggtcagactctttaagag

SEQ ID NO: 470638 - DNA, 509 bp, Homo sapiens
tcagctgatacatttcaaatcaataaattaatctggtcaccatcttaaaacctctaattctaataatatgagtgtgcatttggtaaaatgtatacaaatgtgtaagcatatgtgcacaagtatgtttgtaaaaattttaagacgcaagtaatggcaaaactgaaagacatttcattcaattttctytgatgttgagctttgcagttggcataatgctaaacccccttaacttgaaatctcatgaaatgctgttttataagcagtgatgttggtccttggatataaccacatgtcctgctgcagcctggatcttgcatcaggcaattccacaacttgaactgggtaatttttgtcaaaccatggttagttaacttgggcctttttcttaaactggagcttgcattggcaatctagatttcctgtttttttgcagccataacatgcaacggtgaaagaagcaaaagtctggtcagaggaaaaaccaaaagtccggtcagactctttaagag

SEQ ID NO: 470639 - DNA, 457 bp, Homo sapiens
catttcaaatcaataaattaatctggtcaccatcttaaaacctctaattctaataatatgagtgtgcatttggtaaaatgtatacaaatgtgtaagcatatgtgcacaagtatgtttgtaaaaattttaagacgcaagtaatggcaaaactgaaagacatttcattcaattttctctgatgttgagctttgcagttggcataatgctaaacccccttaacttgaaatctcatgaaatgctgttttataagcrgtgatgttggtccttggatataaccacatgtcctgctgcagcctggatcttgcatcaggcaattccacaacttgaactgggtaatttttgtcaaaccatggttagttaacttgggcctttttcttaaactggagcttgcattggcaatctagatttcctgtttttttgcagccataacatgcaacggtgaaagaagcaaaagtct

SEQ ID NO: 470640 - DNA, 509 bp, Homo sapiens
tcagctgatacatttcaaatcaataaattaatctggtcaccatcttaaaacctctaattctaataatatgagtgtgcatttggtaaaatgtatacaaatgtgtaagcatatgtgcacaagtatgtttgtaaaaattttaagacgcaagtaatggcaaaactgaaagacatttcattcaattttctctgatgttgagctttgcagttggcataatgctaaacccccttaacttgaaatctcatgaaatgctgttttataagcagtgatgttggtccttggatataaccacatgtcctgctgcagcctggatcttgcatcaggcaattccacarcttgaactgggtaatttttgtcaaaccatggttagttaacttgggcctttttcttaaactggagcttgcattggcaatctagatttcctgtttttttgcagccataacatgcaacggtgaaagaagcaaaagtctggtcagaggaaaaaccaaaagtccggtcagactctttaagag

SEQ ID NO: 470641 - DNA, 570 bp, Homo sapiens
ctttaaattataatatttttgactttcattcattcaatcytagggtttccgtgattctggagaaattctgaaataatctgaacaaagttgccaagtgtttgtggtaaatcagggtttggtgtcccaataaaacaatagatttgaaatccagacttaaataaaagacaaaagaatttacaaattccaaattttcttacaagttaaaacattttggagatctgaattttatgttttattatgtagaatataggtggaaagaaagcaactacaggctattccagagaaaacacatatgtgagtctgtagactgaacagggtaggagagagagagagacaggggaaaataaaaaagtaggaggcaagataccagtgtctttagttctccatttcatctcaatctggttcactataggataagcctcaagatgaagattgagcagtgatggaaagccccaagagagggatggaggtgggggtggctaaaagaaaaggaggctggggccctacaacctattgggacttgaggaggccacttggctgaatatcccacaacaatagtaagcaaccgca

SEQ ID NO: 470642 - DNA, 570 bp, Homo sapiens
ctttaaattataatatttttgactttcattcattcaatcctagggtttccgtgattctggagaaattctgaaataatctgaacaaagttgccaagtgtttgtggtaaatcagggtttggtgtcccaataaaacaatagatttgaaatccagacttaaataaaagacaaaagaatttacaaattccaaattttcttacaagttaaaacattttggagatctgaattttatgttttattatgtagaatataggtggaaagaaagcaactacaggctattccagagaaaacacatatgtgagtctgtagactraacagggtaggagagagagagagacaggggaaaataaaaaagtaggaggcaagataccagtgtctttagttctccatttcatctcaatctggttcactataggataagcctcaagatgaagattgagcagtgatggaaagccccaagagagggatggaggtgggggtggctaaaagaaaaggaggctggggccctacaacctattgggacttgaggaggccacttggctgaatatcccacaacaatagtaagcaaccgca

SEQ ID NO: 470643 - DNA, 570 bp, Homo sapiens
ctttaaattataatatttttgactttcattcattcaatcctagggtttccgtgattctggagaaattctgaaataatctgaacaaagttgccaagtgtttgtggtaaatcagggtttggtgtcccaataaaacaatagatttgaaatccagacttaaataaaagacaaaagaatttacaaattccaaattttcttacaagttaaaacattttggagatctgaattttatgttttattatgtagaatataggtggaaagaaagcaactacaggctattccagagaaaacacatatgtgagtctgtagactgaacagggtaggagagagagagagacaggggaaaataaaaaagtaggaggcaagataccagtgtctttagttctccatttcatctcaatctggttcaytataggataagcctcaagatgaagattgagcagtgatggaaagccccaagagagggatggaggtgggggtggctaaaagaaaaggaggctggggccctacaacctattgggacttgaggaggccacttggctgaatatcccacaacaatagtaagcaaccgca

SEQ ID NO: 470644 - DNA, 651 bp, Homo sapiens
gtattaaaaggtttacattaagatttgctaactttactccaactatgatcaacaaatcattataaatattttataactcatatttatgttagaaacatatggtcataggggaaaaattagaatatatagatgaagaaaaaatgaaactttcctcttatatcatacctagacatgcagattaatattttgctgtagaatttgaataggtatagttcatatattctaaagaattcatattagaaattttgagaaccataggcacagactatgaccaaataaaaaccaaaaaccaaaaacaccttctcatattcccacctccacctctgactccttaatttagatggtcattacttccacctaaattatagatacacttagcctcctacctagtttttgtcatcagttttgttttttcgtacctattctcattttgatcagaaggayttcaatcatactttatcattccatcacttaaatttcctcaacgaattctcaccaagattaaataaattctcaacttctcaatataacacacaacattttttggctctaatttcatctcttcttatttattacaaagcattacaaactctagccattttgagcacacatatgtggtaaatgcagcacccatctgctgtttgttctctg

SEQ ID NO: 470645 - DNA, 518 bp, Homo sapiens
ctggagaggtggtcctccaattggttctagaagggaggaaggagggatcagagactgcaggtgaggccgggtgcagtggcacatgcctgtaatcctagcactttgggaggccgaggtgggaggatcactggaggccaaaagttcaagaccagcctgagcaacatggtgaaaccccatctccactaaaaatgcaaaaattgtccgggtgtggtggcaggcacctgtaatcccagctactcgggaggctgaggcaggagaatcgtttgaacccgggtggcggaggttacagtgagcttagatcacaccaccgcactccagcctgggtgacagagccagactccatctcaaaaaraaaaaaaaaaaagaaaagagagagagagagactacacatgagggagctgggagggaggagagcaggccttgacccagcacgtgccccatgtggcagggacatatgtctcttcctcctcctctccccgcccagctccagcctgtggtggccggaggaggccccggag

SEQ ID NO: 470646 - DNA, 346 bp, Homo sapiens
tcggaaaaaatgcgatgcccaaagtagtgaaaggatgtcttaatttagctttgggctgcatttattactgctgaaaatttttttagaaactatcaactccattcaattaataacgttcttgtgaatttatgtaacacaaaggaaatattaagaatagatcatctaaagtaaatcaatctgtatgrcttaacaacgccttttatttatttatattttttaccatgccatgtctgtaggctttctgacttgtcattttttattcaggcctatgcaaggaagcaacttaatcatgttagtagaaactgtttgtgttttcagagtgactaacagactgcatagttcactt

SEQ ID NO: 470647 - DNA, 402 bp, Homo sapiens
agtttgcaagctgaactgtgatggaagctccacaaagcctccggaagcccgttgtggtgtgggggatggtgaggaggggggcacggtgttgcggaatctgaagtagacattcctcttcagagttgtcttctgtcaggttgaaagttctggggcattttattcccaccttgcttagcttcctgatgtgggtgtcctgggaagggtatgactttgagtggggcagcttctctccagcttagrtggaccctgaaggagctgagcattaaagattgtctgttgaccactcccattccagcgaggcagaaagtctctccttgaagggaattctgagtgggcgtctcctgttttccacattaccatgtattcctttttttacatctgcaaaacccaagaccaggcagg

SEQ ID NO: 470648 - DNA, 542 bp, Homo sapiens
tgcataaataaagatattgtaggccagtcaggcacagtgtctcacacctgtaattccggcacttagggaggctgaggcgggtggatcacctggggttgggaggtcaagaccagcctgggcaacatggtgaacacccgtctctactaaaaatacaaaaattagccaggtgtggtggcgggcacctgtaatcccagctactctggaggctgaggcaggagaattgcttgaacccaggaggtggaggttgcagtgagccaagatcacttcattgcactccagcctgagtgacaagagcaaaactccgtctcaaaaaaataaaattaaaaatatatatatatttattatatatatatttatwtatatatatatatatttttttttaagacaatggcccatggcatatataaatatatatgtccatgctggtcttgaactccttgacctcaggtgatccgcccacctcggcctctcaaagtgctgggattgcaatatatatatatatgcatgccatgggccattgttataggccatggaccattgtc

SEQ ID NO: 470649 - DNA, 485 bp, Homo sapiens
gaaatgtccccctttttttggagacaggttctcactttgtcacacaggctggagtgcagtggtgcartcatagctcaccacagcccccaactcctaggatcaagcagtcctcccacctcagcctctagagtagctgagaccacaggcatgtatcaccaaggcatgtgtcaccagacccagctaatttctttttttttttttgaaacagagtcttgctctgtcgcacaggctgggctcaaactccaggcctcaagtgatcctctggcctcccaaagagctgggattacaggcgtgagccaccttgcccagcccaaaatgtccttttttaatatcctgtgataaaaacatatcttttgtagggagaagctgccgggttcacgtagccgtttacaagtatccctctgtacacaggcagaaggaggcagacattttctcctgccttcccgccaaagcggccagccttgcccactgcacggggtgacccg

SEQ ID NO: 470650 - DNA, 485 bp, Homo sapiens
gaaatgtccccctttttttggagacaggttctcactttgtcacacaggctggagtgcagtggtgcaatcatagctcaccacagcccccaactcctaggatcaagcagtcctcccacctcagcctctagagtagctgagaccacaggcatgtatcaccaaggcatgtgtcaccagacccagctaatttctttttttttttttgaaacagagtcttgctctgtcgcacaggctgggctcaaactccaggcctcaagtgatcctctggcctcccaaagagctgggattacaggcgtgagccaccttgcccagcccaaaatgtccttttttaatatcctgtgataaaaacatatcttttgtagggagaagctgccgggttcacgtagccgtttacaagtatccctctgtacacaggcagaaggaggcagacattttctcctgccttccygccaaagcggccagccttgcccactgcacggggtgacccg

SEQ ID NO: 470651 - DNA, 436 bp, Homo sapiens
tgcccccttgggagatgccccacgtgtacactgtgtggaaattcagtgtaagcgtttttttccccttgtatcttgggcatacyacatttttctctttattagtaatacctgtgttagtcattgtgcgcactagaaacatcagttaatgcaagcctgatctaaactgtgaatgtggtaagatcaaaatcctgacccctctgcggagcacttggtctgcagctcaaggttgctgtccgtttctttgttgttccattagttgtcccaggatgacaaccttgtgcttggtgtgtgtcaccagccttgtgcttctaaccccctcccctgggtgtcccgggcactttgcagtttctcaggccccgggcagcagtgttgataggctcaaaactcctgaggcctggtaggttttgtaggtggattttttcccctcttctacttg

SEQ ID NO: 470652 - DNA, 436 bp, Homo sapiens
tgcccccttgggagatgccccacgtgtacactgtgtggaaattcagtgtaagcgtttttttccccttgtatcttgggcatactacatttttctctttattagtaatacctgtgttagtcattgtgcgcactagaaacatcagttaatgcaagcctgatctaaactgtgaatgtggtaagatcaaaatcctgacccctctgyggagcacttggtctgcagctcaaggttgctgtccgtttctttgttgttccattagttgtcccaggatgacaaccttgtgcttggtgtgtgtcaccagccttgtgcttctaaccccctcccctgggtgtcccgggcactttgcagtttctcaggccccgggcagcagtgttgataggctcaaaactcctgaggcctggtaggttttgtaggtggattttttcccctcttctacttg

SEQ ID NO: 470653 - DNA, 485 bp, Homo sapiens
ccaaagagagggttatatgtcctctccctccatgccaccctcttgctatgtctgaggctcttccaattggctgcctgttgatccatttactcttgatagtttcctggaaggaatatgaacgttaatattgtgtgtaaggaaaactgatctaagatctggaacccaagccacaactcacacaccactggcttccttcccagagaaaaaagccatttgtgacctcatcctctcagtcctgctgccaggacactcaatcttctgctgggctcttcccgctggcacccgtacttgctctctcccttcctagagtcttctcattcacatctctattaccttctgtgtcctacccacctgtcatttcacacaatctgctttttgaaaaagtagacacagatggtcccagaagattcagaatcttggcaaagktctattcactggcttcactccagagctcctactctcaccagggctgaagaaagcagcct

SEQ ID NO: 470654 - DNA, 655 bp, Homo sapiens
ttggttggagtgcagtggagtgatctcggctcactgcagccttcacttcccaggttcaattcattttcctgcctcagcctcctgagtagctgggattacaggagcccaccagcacacccagttataatttttgtatttttaatagagatggagtttccatattrgttaggctggtctcaaactcctgacctcaggtgatccgcccaccttggcctcccaaagtgctgggattacaggcgtgaggcaatgcgccctgttgtcatatagtaatgtattagttaggacagacgtgctttgttctaataacaaataaatgctgaaatctcactgcttatcataccaaggtttgtttcttactcataacgagtccaattctgcttgggtggccctcccaggctattcttcccctgtactgattcaaatatccagacagcttccatcttgtggctcaatatgtggcctggccatggttgtccccaaaggggagggagagcatgaaggtaacacattggctcttaaacacatggcctgaaagtgacactttattccactgacatggccctgcacctgcaaaggggctagaaatctcttccgtcctgagaacaagtggactgtgttacagttagtaattatcaagttatttgtaatgaagtgt

SEQ ID NO: 470655 - DNA, 647 bp, Homo sapiens
tcttcaaatgtagcccagggaagccaaaagattggacaccctttttctaagatctaacccttcaaataagatctaacccttcaaattgccaaattcaaagtgtatctaaaaaaggattgccctttgcctgagagttcgcattttaaagcactcaacattttcatttagaaatagtttctttggacttttatagacatactctttcaagtttttaccttggagacctcttcatataacaatacttagaattttaaacatggtttcactttaagtaatctcagcccaactctgttgagtgaaatagatttgtttcctctctcaattgtgtctgctgtaatgtaggatcagattataggtcaaccctcaaaccatggttatatacttaagccatgggaaaaaccaaccaaccaacccccaaacctgagttactgaggcagtaggatgctgtgctttgccatggttaccacgggactgaatgaagggggatgaacccagaaatgaaaacttaaaagaaactgttttaatgaagggatctgtcggggggaagaagagggctccctgcttctrgtgagcaaacacagcagccctgagcctttacagcccttcgtatttattgggtagaaagagcagggaggaggaggtaacga

SEQ ID NO: 470656 - DNA, 579 bp, Homo sapiens
aaattattctggaattaatgattttctcctccaggtcaaaaaattcctctgacttataaaaggtgtagattaaatagaggagccattttgagtataaataatactatctccatataaaatttgtttctttcaaatatgaagccttccaccaackgcctgtatgactcatctggggacttctgctctatactcaaagtggcttagtcactgccaatgtatttccatatgagggacgatgattactaaggaaatatagaaacaacaactgatcttcacagacttggaagtgtagtaatggcacacttcttcaatcacatggcaatctaggtgaatacaagataataactggccccagtgtccatgacgcctacatgaacatccacacatgttccagtgactgtcatttgaaagaagcaagcaaaaacagagccacctttttagaagactgaaacaatattagcatggcctttagtactattttatgatactctataactcaggtagtatttttttaaaataacattattcattaaactaaaatttacatataacttcatttgatctaatgacaaatgttga

SEQ ID NO: 470657 - DNA, 579 bp, Homo sapiens
aaattattctggaattaatgattttctcctccaggtcaaaaaattcctctgacttataaaaggtgtagattaaatagaggagccattttgagtataaataatactatctccatataaaatttgtttctttcaaatatgaagccttccaccaacggcctgtatgactcatctggggacttctgctctatactcaaagtggcttagtcactgccaatgtatttccatatgagggacgrtgattactaaggaaatatagaaacaacaactgatcttcacagacttggaagtgtagtaatggcacacttcttcaatcacatggcaatctaggtgaatacaagataataactggccccagtgtccatgacgcctacatgaacatccacacatgttccagtgactgtcatttgaaagaagcaagcaaaaacagagccacctttttagaagactgaaacaatattagcatggcctttagtactattttatgatactctataactcaggtagtatttttttaaaataacattattcattaaactaaaatttacatataacttcatttgatctaatgacaaatgttga

SEQ ID NO: 470658 - DNA, 598 bp, Homo sapiens
aagcaggcactgctgggaaccacatgggatcacagactcttatgaacatgatggcttgtggtgaagaagatgttttatcttcttgtctgaaatattagtccagttggcaccaccttcacacagaaacctggaaaaattcccatgatgccatcccccaaggcagtttctagaggagaggaggaaatattctttcttctaatgaaaaaatgaaggctgagtgtggtagctcatacctgtaatcccagcactttgggaggccgaagcaggcggatcatctgaggtcaggagttcaagaccagcctggccaacatggcaaaaccccatgtctactaaaaataaaaaaagtagcygggtgtggtagtgggtgcctcaatcccagctattcgggaggctgaggcaggagaatcacttgaaactcggaggcggaggcttcagtgaaccctgattgcaccactgcactccagcctgggtgacagagcaagtcaaaaaaaacaaaaaggaaaaagaaaacatacacaaagtactgtgtgtgaatgagaaatgtctgtctaccaaaatctgtcctcccaattccatagtgtggagtggtgtctgccag

SEQ ID NO: 470659 - DNA, 606 bp, Homo sapiens
tgtgctttaggaaggttaatctggaaagaagaggaaggccttttaggcaaagatcaattaggaggtgcttatagcaatgaaggtataaatgataaagtctgaagtcggtgatagcaaaggaaagacaaaaggataaatataatgcattttaaaggtacatgacaaatctagtcacagaggacagccaaaaaaaaaaaaattgaagatacctggccataaggatgactatgaccatgatttattcagtaaaagttttttaattaatttaaatcaaaattttactcatctttattttgtacattgcaaactcccaggataaagtaaactgattagaaattacttaacttgttttaattttttacttttataccacagattatctcaagaacatgagttggcarttaccttcttggtttaaatatcaattttatgttgatttcacttccatttgtgaaacaaaaacagtagataaatccactcttgcttaaaaaaaaaaagactagaataagaaaatacagtcattcctgggtatccacgtgagattggtagatatccggcccttctataaataccaaaatccaaggattctcaaatctcacagtcagc

SEQ ID NO: 470660 - DNA, 620 bp, Homo sapiens
ggtgtcagtgacatttaaccccgttcccctgagtgctcatatgtggcaaacagttacagcagcaagtcttttaggaactttgtttcaagagggtgttaaagaagaaagtaacagttggtgcagaaatggaagtgatccaaactacccagcgtatctagtccttaaatcagcacaaagcctgccttcctcccttcctcacttctgtatggtctgagctcagtgaagagagctgcctacacttcagttgattattcatttatttacttatttatttttgaggcagagtctcactctcacccaggctggagtgcagtggtgtgatctcggctcactgcaacctctgaytcccaggttcaagcgattctcttgcctcagcctcttgagtagatgggattacaggtgccagccaccacgcccagctaatttttgtatttttagtagggacggggtttcaccatgttggccaggatggtctcgatctcctgacctcatgatttggcccacctcggcctcccaaagtgctgggattacaggtgtgagccaccgcacccggcttgataatttaatccttagaagagaaaactttaaaaaaacgaacaatccacaccagcgattgtcaa

SEQ ID NO: 470661 - DNA, 499 bp, Homo sapiens
actctgttgcccagactggaatgcagtgatgctatcatagctcactgcagcctcaaattcctgggctcaagccatcttctgagtagctgggactacaggtgcacaacaccatgcctggtttattttttatagagatagggtcttgctatgttgcccaggctggtctcaaactcctggcctcaagtgatcctcccattcagcctccscaaatggtgggttacagttgtgagccatcatgcccagcacactgattgtctttctattatctgtggaatctatagtgatgtcacctccctcatacccgatactggaaatttatatattctcattgccctgtttagtctggctaaaattttataaatttcattgtaattttccaaaaactagcttttgattttactgaatttcctctgttgttttttattgtctatttcattgattaacattctcatatttgattctgctcttctgctttttcccctcaagttttgtaaagtgg

SEQ ID NO: 470662 - DNA, 484 bp, Homo sapiens
ggcagggtttggcatgagcttgggagcactgggaagaactaactcctaccccrggaccaggaatctgaaaccctggctcaggctcaggctgacatccagtcttgttgcctccctgtgccttagtttccccttttgtagcatcaaaggtagaagtaggttgggcatctgaaagacagtgccttcaggacctgagatcctactctatgtaaggaagtacttctctggggctcccagagtcctccataaaaatgaagtgtagaacccaatgctgtcatcagcaaagcccacaatcgtaagccaggggctgggccgatgatagttttggaaaggtatttcaagaaagaaggttgggcatccttttctcttttttattttttatttatttttctggagacagggtctcactctgtcgctcaggctggagtgctgtggtgtgatcttggctcattgcagcctcaacctcctgggctcaagtgatctacca

SEQ ID NO: 470663 - DNA, 623 bp, Homo sapiens
tggctaattttgtatttttagtagagacggggtttcaccatgttggccaggctgatctcgtactcctaatctgaggtaatctgcctgccttggcctcccaaagtgctgggattacaggccggagccaccttgcctggcccctgtaggttatttttgcatttcatttgttacagataccaacatatactttaagataaactattttgagttaaataaagattggaatatgcttgtttggttttttccctttggagtaaacacatcagaattgccttccattgctgtcggattacagtgacactttagagtctggagggtatagacyctcctcatttagatgccactaatctgcgtcttctccaccccgcagcctcacttgcacaagattgtgaacagctctatggagctcgcgcagactgccaaggaaccctacaactacttcttgctgctacgggcgctgtttcgctctattggtggaggtagccacgatctcttgtatcaggagttcttgcctctccttccaaacctcctgcaaggtcagagcagtgactttggttgccttttagtcttgtgtgtcatgtagtcatgtgtctagccatcctgattgctgggtttcatcctct

SEQ ID NO: 470664 - DNA, 624 bp, Homo sapiens
atttaagagtcatccaatgagatgcacttcgataaatgttagaagccagagcgggagtgaagttattctttcccaggcagagatagcagcaggcacacctggagtgcagaaacatgagtgtttgcggcagccagctagctagattctatgtcccctgccagtccctgccccagggccagcagagtgccttgtgacttctgtgaggatttcctgcagctttcttccctaggagacagttgaagctgccaaacctctaagtccaaattgtaaaagtgggaccaaagatcctactggcggtgccgtaatcttcacccttcagccccttcgaygattatgtaagtacctcatcccctgccataaaattcattctccttaaaagactattcagtgttttttccacactgaaacctgactggtacttgtttataaatatttccttcacagaagagccaagtaacgtgttaggagtacattccttctttgtaggtccaatggcattacctctatgccatgcaaaagaaaacattcacttaccccacatcccttgctcagcatcatgccccatttacgattccctcacacttgacccacagctttgctttttatggagctgaactttttatt

SEQ ID NO: 470665 - DNA, 502 bp, Homo sapiens
ggtactcctcagagactggcctcagcactccattctccctctgcaaacayggttcatcagtgaatgttttcattgtcacagttatacccattatcactgaaccaaagactgaaatctccttttcttcctgttcgccttttctagcccttatctccaatcagaaatggccagaaatgcatttctttgcacatcgacttgattttaattgaatgtgtttaaatattatccattatccgtcatcctcggtttctcctcctgatgtcactactttggccaataggtaatcaagattgtgaaaccttaatgtctgtcaacgctaatgacacactatctcaaactacccaatgacaaatgagcttaaactgctcagtttggtaatcagggccccaatatgccgttattgtcaaaatgactgcactgaataggctttccattgcatgtattagataagagcatagatttgggggcctgaatttcatctctctcacggtcatcagtgtca

SEQ ID NO: 470666 - DNA, 595 bp, Homo sapiens
ggggtccatgggatcttgtccggactatgactttaagcaaacacctctctcataatggtattctcacactgccttcttggccatggacttcaaaagctgattgcagggagggccagaaaggcaataacccttaatatagcaggactagcctagaggggacagacagggcaaaggtaaggcgtctctgaggttggcatttgtgtgtttagccacatggggtgattaagggccatctgttcttcagtgggctaaatcatcgttttcacagcatcccaggatcaagtacatttcatgcttagaaagcatgaagaagcaccctagasttttcccagtcctaatgagacatattttaaatttatttatctttgatttctaaataatgatagtatgcataggtgcattagtgtgtgtgcacctgtgtgcgcatgtatagatttgagttgtttttgtagacttgaaattaagagtatcacaattaaagcaaaattcttgtatgtattcatacatcttttggacagggaaaaaaacctctggaatgttatgctgatagaagtctttgttttgttttgaatatatcgtgtgaccagttcatttt

SEQ ID NO: 470667 - DNA, 595 bp, Homo sapiens
ggggtccatgggatcttgtccggactatgactttaagcaaacacctctctcataatggtattctcacactgccttcttggccatggacttcaaaagctgattgcagggagggccagaaaggcaataacccttaatatagcaggactagcctagaggggacagacagggcaaaggtaaggcgtctctgaggttggcatttgtgtgtttagccacatggggtgattaagggccatctgttcttcagtgggctaaatcatcgttttcacagcatcccaggatcaagtacatttcatgcttagaaagcatgaagaagcaccctagagttttcccagtcctaatgagacatattttaaatttatttatctttgatttytaaataatgatagtatgcataggtgcattagtgtgtgtgcacctgtgtgcgcatgtatagatttgagttgtttttgtagacttgaaattaagagtatcacaattaaagcaaaattcttgtatgtattcatacatcttttggacagggaaaaaaacctctggaatgttatgctgatagaagtctttgttttgttttgaatatatcgtgtgaccagttcatttt

SEQ ID NO: 470668 - DNA, 652 bp, Homo sapiens
ttttattcaaaggccattgaataaagtagtagagaaagggttcaaataaccaaatgtaaaataactgtacagtttcatttaacttctactttattcataactatgcagatgtctgtgtgtaagcacaggccaaactcctaccttgcaaatctatcataatcttctggaattacactaatttttcatggagaagctcagcaagcattgctttgcaagaaatgaagagaagctttaaataatttacagagcctatctgtyaggcctaagtctgataacacatccctcagaatgctgtggtgattagtttggcatgttgcagcagaaagcgcatggctagggcccttgcaaataaaatagttgtccagctattgtgacccaaaaagcaaataaagtaatagtaacaaaaggattaacaaaaaagtagttttcctagaaacattaaggttaatcatctcaaataagaactggtgatcaaactataatatggcacgaatgggaagcgatgtcactagacgcatcaaagcatgaactcatctatgtctcttcatctgtaggaaaacctaaaaaaacacagggattaccagtttccaccacatatgtgagtgaatcttcccctcagggtccctctgaattgattattctattcttcaat

SEQ ID NO: 470669 - DNA, 615 bp, Homo sapiens
taaatatcacttatatcatgtatacatgtatatgtatttcattttaaaaactattataaatgttatttaaatttttcatttccaaatgtttattactagtrtatagaaatattattgatttttgtcgattaactttgtaaccttgccaaattaaattatgtcttgaaatttgttttttaatacaaattccttgagattttctacacaatcacataatctgagaatagggactcttttatatcttttccctcaatctatatgacttttattcctttttctcatgatattacactggctgggacttcaatgtgacttggaataggtgaggtaggagtagacattattgccttgtttctagtcttagaggaagaacattcagtctttcactattaagtaatatcatgtgacttgtatagtcacatataagtaatatgtaatatgttattacctgtaggttttttaagatgccctttatcagtttgagaaagttcccttcttttccagtttgctgagggtttttaccataaatgtatgttgaattttgccaaatgctttttctgcatcaattattatgttcctatgttttttcttctttagactttttttttctcagcc

SEQ ID NO: 470670 - DNA, 511 bp, Homo sapiens
gctaactgtagccatgtggctaagttatggccactggaatgtaagtggaactggtgagtgtgtgtggcttacagaagcatctttttttttttttttttatggttgtttttgtcttgttttttcttgagactgggttttactctgtagcccaggctagaatacagtggtgcaatcataactcactgcrgcctcaatctcctgggctcaagcaatcctgttgtctcagcctcctgagtagctgggactacaagtgtgcatcaccaagcctggctaatttttaaaatttttagtaaagacaaggcctcactatgttgcccaggctggtctccaactcctggcctcaagtgatcctcctgctttggcctcccaaagtgctgggattatagcataagccaccaccaccagtcagattggatgaaactgaagaagctaccctgcacctggaggaagccatgattgagcaaagcagaatgacaaaatgaaagcagcacaggtccctgatgctgccgaa

SEQ ID NO: 470671 - DNA, 636 bp, Homo sapiens
tatagatctctttcattctttttggtggctgtataatatgccattgtaagaaggtaccaatacttacttaactaattccttactggtggatattttggtggtttctactttcgttttgttttcctattgtaaacctatgtacaaggacacacattacaccattatttttccacacatgtgcaggtatagtgttggatggttgggtaacttcctaggaatgtaatctctaggtaaaaggacatgtgcatttttttttttttttttttttgagacagagtttcactcttgttgcccaggctggagtacagcggcgcaatcttggctcaccacaacctccacctccctggttcaactgattctcctgcctcgcctcctgagtagctgggattacaggcatgtgccaccacacccagctaattttgtatttttagtagagacaagatttctccatgttggtcaggctggtctcaaactcccgacctcaggtgatccacctgccttggcctcccaaagtgctgggattacaggtgtgagccactgtgcctggcccgtgcattttcaattatctagttttttagataatatgaaaatttagaaaatatgtcytatagtaaaaagatcaatctatatagaaag

SEQ ID NO: 470672 - DNA, 701 bp, Homo sapiens
gttttctgaccaaaacactcaaatttttatttaataataatattagggaaggagcctactctttttaggcaaactgtattatgaaaggctttttttccccatcaaaaattaatggaagggggtgacaatttcatagcaacatgaaatctaagtgttacaagggtcctttgaaatcatctagtccactcttcattttacagaggaagccactgagatccaggtggggtgaccggcccaggagctcacagtcgggacttggctctactaggtctcaagcaagttacctgatgattcattgcctcagtttcctcacagagattctaaggattggatgagataattcatccaaaaataattagcacagtgcctggcacagaatgaatattagccactgatttactgatattactattatttcccagatcgtttgttgctaagtttcactcttcattgcacctggctctgtccttatgtcaccaacagtatgctcaaatctggacctcagaagctgccttataatgggagggtatgatgtatttttgggggatgtgatgatcttatttttccatatattcaaagcctccagaggtttagaarcctcatgaacaaattatcccaacaggttgctcctaggttccaattatcacataagttaaaagccaaatttttaaaacagagttgaaaatgtttcccttataaac

SEQ ID NO: 470673 - DNA, 455 bp, Homo sapiens
agaaattggggctcaagcacttcaataattggcctgaggtctcaaagctggtaraaattagtatgggacaggattgaaacctgggttgatgtgacactaaagcttgtgctcttaacgactgccatatggctccacacacacatctgatttagttcacttatgattacaaggggatatattttcaagtgtccgaaatatgtcagtttatgtattcatttttataaccatagtggttattaaatattttaatatcaccccagcaaccaattttattgttcattactctctcaaacctgagtgatattccagttaaacgaaaccagtcactcttactcaaataaaccttgtgttttccagcctaccagtagatactttggttctagaaatgctgagaagagtcctcacgtcattcagttctgttttgcagtggttctgctaaacaattatagagcaag

SEQ ID NO: 470674 - DNA, 455 bp, Homo sapiens
agaaattggggctcaagcacttcaataattggcctgaggtctcaaagctggtaaaaattagtatgggacaggattgaaacctgggttgatgtgacactaaagcttgtgctcttaacgactgccatatggctccacacacacatctgatttagttcacttatgattacaaggggatatattttcaagtgtccgaaatatgtcagtttatgtattcatktttataaccatagtggttattaaatattttaatatcaccccagcaaccaattttattgttcattactctctcaaacctgagtgatattccagttaaacgaaaccagtcactcttactcaaataaaccttgtgttttccagcctaccagtagatactttggttctagaaatgctgagaagagtcctcacgtcattcagttctgttttgcagtggttctgctaaacaattatagagcaag

SEQ ID NO: 470675 - DNA, 601 bp, Homo sapiens
ttaacctggaccctttgaataagaattccccagggtgttctggacagcctttccagcaggagctgcaggaggggacccaggcgggcgcagctcctcacacaccctccactgccctggaggtgacctagatgtttattgagaaatggctcctctggatttctgtgcagagggagaaaggctttttctgcctcgtttttacatacggtggtcctccacctaccatgaaaggcaaaaactgggaggcccagggagatagctagttgcttgaggagtccaaatgtaccaaaggtccaagatgaaaaatctggcctggggccagtggtgtgactctgtgatgagcattttattctgcagccgcaaatgaatggtgtatgtttgaaaatgaagtacttagtgattattacttgagaggtcttaaaacattyagctctcaacttatcaggcctccatgtatgacatttcacattagccaaaacggatggaatttttaaagacctaaaagataaaatacgcaacaactttcgaaattgtaacagagaattagaatgacagatcactactggttaaaaaaagctattatcttgggtgtacatacaaaaga

SEQ ID NO: 470676 - DNA, 610 bp, Homo sapiens
tcctttaatttggtctgtatggcagctctttgggataatargatcaagtaaatgcaatgtccctcaggcgcaaagatagaatgtgacccactatcaattggacacgtgcttagaattatttaactagtagtgattgtaagagccttgagtcagaaactgttgaaatgagtcttgagatagagctctctctatttaattactatctattacagtcagtcttccctgtccatgggttctgtggccaaggatttaaccaaccacagagaaaaaaatatttgaaaaaaaaaaaaaacaataaaaaatagcaatacaacaataaaaaataatacaaataaaaacccaatacagtataataattatttacacagcatttacattgtattaggtattataagtaattagagatgatttaaagtataagagaggatgtgcgtaggttaaaggcaaatactatgccattttatatcagggacttgagcatccatggattttggtatgtgggggagttgggtcttggaactaataccatgtggatacccagggacaactgtacattcgctctttcttttttacattatcccctttcattcctctttcctcctcacctctt

SEQ ID NO: 470677 - DNA, 610 bp, Homo sapiens
tcctttaatttggtctgtatggcagctctttgggataataagatcaagtaaatgcaatgtccctcaggcgcaaagatrgaatgtgacccactatcaattggacacgtgcttagaattatttaactagtagtgattgtaagagccttgagtcagaaactgttgaaatgagtcttgagatagagctctctctatttaattactatctattacagtcagtcttccctgtccatgggttctgtggccaaggatttaaccaaccacagagaaaaaaatatttgaaaaaaaaaaaaaacaataaaaaatagcaatacaacaataaaaaataatacaaataaaaacccaatacagtataataattatttacacagcatttacattgtattaggtattataagtaattagagatgatttaaagtataagagaggatgtgcgtaggttaaaggcaaatactatgccattttatatcagggacttgagcatccatggattttggtatgtgggggagttgggtcttggaactaataccatgtggatacccagggacaactgtacattcgctctttcttttttacattatcccctttcattcctctttcctcctcacctctt

SEQ ID NO: 470678 - DNA, 610 bp, Homo sapiens
tcctttaatttggtctgtatggcagctctttgggataataagatcaagtaaatgcaatgtccctcaggcgcaaagatagaatgtgacccactatcaaytggacacgtgcttagaattatttaactagtagtgattgtaagagccttgagtcagaaactgttgaaatgagtcttgagatagagctctctctatttaattactatctattacagtcagtcttccctgtccatgggttctgtggccaaggatttaaccaaccacagagaaaaaaatatttgaaaaaaaaaaaaaacaataaaaaatagcaatacaacaataaaaaataatacaaataaaaacccaatacagtataataattatttacacagcatttacattgtattaggtattataagtaattagagatgatttaaagtataagagaggatgtgcgtaggttaaaggcaaatactatgccattttatatcagggacttgagcatccatggattttggtatgtgggggagttgggtcttggaactaataccatgtggatacccagggacaactgtacattcgctctttcttttttacattatcccctttcattcctctttcctcctcacctctt

SEQ ID NO: 470679 - DNA, 610 bp, Homo sapiens
tcctttaatttggtctgtatggcagctctttgggataataagatcaagtaaatgcaatgtccctcaggcgcaaagatagaatgtgacccactatcaattggacacgygcttagaattatttaactagtagtgattgtaagagccttgagtcagaaactgttgaaatgagtcttgagatagagctctctctatttaattactatctattacagtcagtcttccctgtccatgggttctgtggccaaggatttaaccaaccacagagaaaaaaatatttgaaaaaaaaaaaaaacaataaaaaatagcaatacaacaataaaaaataatacaaataaaaacccaatacagtataataattatttacacagcatttacattgtattaggtattataagtaattagagatgatttaaagtataagagaggatgtgcgtaggttaaaggcaaatactatgccattttatatcagggacttgagcatccatggattttggtatgtgggggagttgggtcttggaactaataccatgtggatacccagggacaactgtacattcgctctttcttttttacattatcccctttcattcctctttcctcctcacctctt

SEQ ID NO: 470680 - DNA, 568 bp, Homo sapiens
ggcaccatttcggctcactgcaacctctgcctctcaggttcaagcagtagcctcccaagtagctgggattatagacatgcgccaccacactgggctaattttgtacttttagtagagacagggttttgccattttggccaggctggtctcgaactcctgacctcaggtgatccacccacctcagcctcccaaaatgctgggattacaggcatgagccactgtgcctggcctgggagcatctttttaatcagaccacatgactatggctaggttgcatgaatcactgctgctctggagttttctggattgcagagctcttcctgattgaagcaggcctcctgaaaaatcacagtgggactttgaataaatacttccatctcttaggcctgtctcataaaattggkggggttctgaaatatgttttctcaagggttgaagtgcatatttatttttttgttgggtgggctgagccaataatgattgcaatcaataagaaagtccttcatcagtagagttttatgatagcagctttaaaagtctccagatatgagatgaactcagttaagtt

SEQ ID NO: 470681 - DNA, 535 bp, Homo sapiens
gatgactttccatctcttcacacttgtacttttaaaaatatcaaaacccttgaatttggaaatcttccttcccttcagtttcagatgtcccttctccttccctctttgaatacaattaccaactacaatcagcttcagaactcctttcccttcataacagatttataatgattaaaaaattatttttcacttgtggaattttatctgtaagcaactttaaacatgctgtatttaggcatgcttagcactaggaatctagygcaagaaaaataaaatgtaagtctaaaagcttacatactgagtagttttactaatttctagactataactttcttcaaggcaaggagggcatttgatttatgaaaaagttatttgacagcatacatctttggagttcaaagaaccaagggtccaaggtaaaaacatatataggatctcctagacctcctattctgaaggaaagaaagaaaaagaaaggaaaagaaaagaaaaatattttgagcactggaccatagtagggttttttttttttttt

SEQ ID NO: 470682 - DNA, 525 bp, Homo sapiens
aacagggttatatcctgaaaaacccattgtaagtagaaaatattgtatgtcagaaatgcatttaatatacctaaactaccaaacatcatcgcttaacctgacctaccttaaacacgctgagaacacttatattagcttacagttgggcaaaatcataaacacaaagcctattttataataaagtattgaaaatctcacgcaatttattgaatactgtacagaaagtgaaaaatagaggtcgtatgagtacttgaggaacagtttctactgaatgcggatcacttttgcaccattgcaaagtagaaaaatcctaagtcaagtcatcatgagttggggactgtccgtaagagttattaacagaggaytggaatggggattgggtagtaaggaataaagagaagcctgggcagatgcagggaacagccgatatgggcttttcaccccaggctgagacagaacaactcaaagaagaaagctcagggctgagatccgggctgagatccagacttcgtgtgagaggacaca

SEQ ID NO: 470683 - DNA, 627 bp, Homo sapiens
gctggacagccaggacgccgggccgttcccggacaggaagccayggctcgggagcctggtggcggccatgatctgggcgggaccagcggaggcctccgccagggagcctgggctcggggccttgggcagtttgcctggtgccccttcccgtgggagcaaccggggtgacggcctagctgggtcctcggcccgggaggctccgtcggccacactgcacgcctgcggtgtgaggagggccgactgccagtgctgagttccgtggccattggcgcgggtgcccgccgctgctggccggcgccggggcgttcctccttgcgtcctagggaggaaggtgggccgcggggcatcccgcggggcccgtacccagacggttcttgacgaggtggacgcaaggccaggcccggcccggcccggcccggcccggccaccttcagacgccgcgcacccgccttgttgagacttgccaccctgtcttgttgtgtccatgtccccgaggttgtcttggaggcgggccgttccccgtggtgctcatttctgcctgggggccttccggggaccccgcttgtctttgggggtgcgcaggcccttgccctgcgatcagaggcgcaccgaccgatgagttcggtg

SEQ ID NO: 470684 - DNA, 627 bp, Homo sapiens
gctggacagccaggacgccgggccgttcccggacaggaagccacggctcgggagcctggtggcggccatgatctgggcgggaccagcggaggcctccgccagggagcctgggctcggggccttgggcagtttgcctggtgccccttcccgtgggagcaaccggggtgacggcctagctgggtcctcggcccgggaggctccgtcggccacactgcacgcctgcggtgtgaggagggccgactgccagtgctgagttccgtggccattggcgcsggtgcccgccgctgctggccggcgccggggcgttcctccttgcgtcctagggaggaaggtgggccgcggggcatcccgcggggcccgtacccagacggttcttgacgaggtggacgcaaggccaggcccggcccggcccggcccggcccggccaccttcagacgccgcgcacccgccttgttgagacttgccaccctgtcttgttgtgtccatgtccccgaggttgtcttggaggcgggccgttccccgtggtgctcatttctgcctgggggccttccggggaccccgcttgtctttgggggtgcgcaggcccttgccctgcgatcagaggcgcaccgaccgatgagttcggtg

SEQ ID NO: 470685 - DNA, 627 bp, Homo sapiens
gctggacagccaggacgccgggccgttcccggacaggaagccacggctcgggagcctggtggcggccatgatctgggcgggaccagcggaggcctccgccagggagcctgggctcggggccttgggcagtttgcctggtgccccttcccgtgggagcaaccggggtgacggcctagctgggtcctcggcccgggaggctccgtcggccacactgcacgcctgcggtgtgaggagggccgactgccagtgctgagttccgtggccattggcgcgggtgcccgccgctgctggccggcgccggggcgttcctccttgcgtcctagggaggaaggtgggccgcggggcatcccgcggggcccgtacccagacggttcttgacgaggtggacgcaaggccaggcccggcccggcccggcccggcccggccaccytcagacgccgcgcacccgccttgttgagacttgccaccctgtcttgttgtgtccatgtccccgaggttgtcttggaggcgggccgttccccgtggtgctcatttctgcctgggggccttccggggaccccgcttgtctttgggggtgcgcaggcccttgccctgcgatcagaggcgcaccgaccgatgagttcggtg

SEQ ID NO: 470686 - DNA, 502 bp, Homo sapiens
ttagctaaaagaaagtagaactgtatacccagactatgacagtggggaaattttctatatttttagtgtggcctttgacaaagtcttccgattttgtttcaacaggaaacagatgatttgaagagagctgagagtatgcttcaacaagcagataaattaggttgcagacagtttgttacccctgctgatgttgtcagtggaaaccccaaactcaacttrgctttcgtggctaacctgtttaataaatacccagcactaactaagccagagaaccaggatattgactggactctattagaaggtaactaaaaacctcaatttcgaatgtgtgggactatagagtagaaatacataggccacaatgattttacaatctagacttaataagtttttttatatctacaagaagtagatggcagatgctgagtaaaaactggcaggaaagtacgatacaagtgaacttttaaagtaaagtagtcgaggccgggcacggtggctcaca

SEQ ID NO: 470687 - DNA, 624 bp, Homo sapiens
aaggacagatatcactatggaaacaagttagataatcataattgtatttgctaacatcattatcaaaataagaayaaatttgaaaagattcatacatgaagaggatctttcaccaaacttggtacattccttttgctttgtctggctggctgttgtttttgctttgtttggctggctggtgttaactacttgggggttttctgagtcagcgtcatgttatactcatggtgaagaggtcctgccatctagtggccaaattgcaaagtgctactagcttatttaaaattgaacccagtgttcaaggagcgcagcaggtacaccgcactccttgggcttccatgaaatacgaacaaagcctcagctatttcaagatgcaaggaatcctttaaacttttgggaaacagtctgtcttttgtgggaaaacaaagtcttcatttgggaaggactgatttgaccttgaagctgaggtcactttgaccctatctatatatgtttgtgagtctctgttctgaaaccaggaggggatatatttaggcagcaggattctgggagcacaacaggtgagaatgtggattttaggaacagtccttgccagcctgggtttccactacaccctgcaaaggt

SEQ ID NO: 470688 - DNA, 452 bp, Homo sapiens
taatgggacactatcaacaaccatcctagttctgtggcagaatgggcaaaccatgaagagtaggggttactatagccttccagtgtcctgttctaagaatagaasaggatgtcattttgtaaagagtggctctgtgtccctagtcaacaagagtgacacagtggattttctagggggaagatgggctgtaatttctaagagctctgctgtttggcctgaagggactaactttatttgtttgtttgtttgtttgtttatttatttagagacagggtctccctctgtcatccaggctggagtgcagtggcatgatcacggctcacagcttactgctcaagcgatcttcctgcctcagtccccgaagtgctagggttacaggcatgagcctgtataactaactaactttatttagaatagagagtggtgaaatctgtgaccagtagaggtcttgg

SEQ ID NO: 470689 - DNA, 448 bp, Homo sapiens
cctccagagggtcctctagcttccttctccactcctgaattgagcgaagcggtgccgacctccaccctttgggcacgagcccctgcgcacttgggagactcctgaacaccctcggagaagccagaaagccccgggagatggctccgtctgctgctgtaccagaccgggtcctgcaaaggatgcatcctccgagcctcctccctgcacgtccagtggggcctgcccstattctacctgagggacccactggaggagaggcacggggatgctgcctgagcagcggacccttctggcgcggagcaggctgtccccaggcagagtccgacgggtccttccttctgggtgcccccggcttcccggactccagcaggcctgggaaggccccgggcccccttagccgatgcccagagagtctccatttctcaagctttgccaccgaactcatcgg

SEQ ID NO: 470690 - DNA, 448 bp, Homo sapiens
cctccagagggtcctctagcttccttctccactcctgaattgagcgaagcggtgccgacctccaccctttgggcacgagcccctgcgcacttgggagactcctgaacaccctcggagaagccagaaagccccgggagatggctccgtctgctgctgtaccagaccgggtcctgcaaaggatgcatcctccgagcctcctccctgcacgtccagtggggcctgcccgkattctacctgagggacccactggaggagaggcacggggatgctgcctgagcagcggacccttctggcgcggagcaggctgtccccaggcagagtccgacgggtccttccttctgggtgcccccggcttcccggactccagcaggcctgggaaggccccgggcccccttagccgatgcccagagagtctccatttctcaagctttgccaccgaactcatcgg

SEQ ID NO: 470691 - DNA, 124 bp, Homo sapiens
ctgctatagtgatgtctcaggctaagcagtgactttaaggggaaaaggcttttatacatgaacaggctgcaraataaaaaccacatcacatgaggaagaagggatttggaagaccttgcagaat

SEQ ID NO: 470692 - DNA, 599 bp, Homo sapiens
tgattggcagccctaattctatccacaaccttaatttgtccttgccaagtaacaatacatattcagaggctccaggagatatatatttggtgcttatacttttgcctatcatagcttttttaaaaagactattttaaaaaagactatttcttttacgattctttaagacatttaacaaaataataaatgctttaaagggarttatacagtgttcctctttcactcttttttttacaagttcttttttattattttagattcagggggtacatgtgcaggtttgttacataagtatattgtgcaatgctgggttttgtgtttctattgaatccatctccaaatcatctctttcacatttcaaaaaagaagtccaacctcctgctgtagatcattcttacctaaataagtgggaaacaatgaaagctacataactgctcactagcagggatatttctaaataaataactaaggaattagtgtatgcagaattgcaggaaacttttgagtggaacttgaagctatacatgattatcttatgtttaaatttatttaataaatgcaagttagttaaaaatttatcacacaaatgactggattta

SEQ ID NO: 470693 - DNA, 360 bp, Homo sapiens
tgtgtgtgtatgcatgtgtgtgtgtgttgtatagatgtatgaatatgtgtgaatatctgtgcatgtgtgagtgtttccatctacttccccagtacccttaatgtctattcatttaccaaaactgyctcatagcccttctttgcactttatctgactttgacagcagcagaactgagaaagagttcttataagatccaatagagtttgtggcctaactggaagatctttcctctgttctttatagccttctgtgttcctcgttcccttttttccttaactaggtttggccacctacccacccctgcccactctaccattccaaggtgccccataacaaaaactacactagtacctttagac

SEQ ID NO: 470694 - DNA, 360 bp, Homo sapiens
tgtgtgtgtatgcatgtgtgtgtgtgttgtatagatgtatgaatatgtgtgaatatctgtgcatgtgtgagtgtttccatctacttccccagtacccttaatgtctattcatttaccaaaactgcctcatagcccttctttgcactttatctgactttgacagcagcagaactragaaagagttcttataagatccaatagagtttgtggcctaactggaagatctttcctctgttctttatagccttctgtgttcctcgttcccttttttccttaactaggtttggccacctacccacccctgcccactctaccattccaaggtgccccataacaaaaactacactagtacctttagac

SEQ ID NO: 470695 - DNA, 575 bp, Homo sapiens
aatagttctgactggttcagagtctcagatgtgattgtggtcagatggtgattagagctggaattgcaggggttctggctgaagcagtagggtgcaagccaggtattttttccactacatgtagtctccacatggtataatctgggcatcctcatggcactgcatggtggccttgagacacttgtttatgtggtagctcagggctacaagcaggtatccaaaagaaccagacattatatcactttttatgaactagtctcagaagttacattgcatcatgcctgctatagtcacaagcccatccaaatttaagggaaggcaacaaagagcccacttctccatgggaaaagtgtccacattactttgtaagaagawtgtgtgggatgggagatactgttgcaatcatctttagaaaatacaatctgtcacacttggcatttatactttatatattttttatttatgtatcatatttaaacaagctggtttttgatgttttgataagttgtttgctttcacacaaaagacataattgagtgggtagacatgctttcctacatccactcagaactata

SEQ ID NO: 470696 - DNA, 229 bp, Homo sapiens
agagtggttggctggaccaccaggagcccttttaaaaaaacctgcagtccctacaaactgctggaaaccaacagtcaggcccagcgcagtgccgggtctcccaacacaacatctgtgtgatacggcccaccatccaaggagccggcaaacacsaggagaggaaagccaagcaacagagtgaaggcaaagacagggtgggaaccaggaccaagcaaccaggaaggaggaa

SEQ ID NO: 470697 - DNA, 547 bp, Homo sapiens
acatcttcactctggctggctccagattaccattcagatcttaactcacacatcacctccttagaaaggtcttcccagagcacgtatctgaagctccccaaaattactctgtactgtaattactccccatcacagcactgacgatcggaaatgattaatttttttgttgtttgtctcctgctagactgtgagctctgagaagccagggacttgggtttgtctcgctcaacacggtccccaggacctagaaaggatctggcgtcaacgaaggggctcaacacacgtgtggaacaaatgaaccactggattcacaaaacacctttccctgaaggatgcatgtgaccccttggtcagccagccagcatgggtgggagccagtaaggaggcagccaatttgcaattagggagcaattaataactacctaattggtacaaaagacagctgaggggctgggaggagaacaagggaatgaagctcagaaaggagcctcaggtctttcttggaaaatactgggagcrggcaatgaggaatccccggggtaacatt

SEQ ID NO: 470698 - DNA, 622 bp, Homo sapiens
gcaggggtcacatctttcaaacactaacatctttgtaatgaaagttgagcatcctgtccctcagcaagcgggtatttgtttctttctgtctgygaaatgccctttaacaagtttttgtctgccctttatcatatctctcttctccacattcttcagcccttctcacacaaccaagtaaaaggttgcattttcatatttggacccagggaatggcttgagatgttctaagtttaggaggtttgtaaagtcattagactggcataaacataaatgatgacagaagaaaatccagcacttcaatatatggaagacaggagccagcaacggagacagaaaaagtaaacatggacgtaaaatgaaacctagtaaagtatgaaatcacaaaattcagtggaaggaaaaatgcaaataagaaggaagtgataacagtatcaaatggcagcagtggattgcataagaagagaactgagaattgataattcgatatgaaaaaaaggtcattgataaccttgtcacaaccagttttaataaaatgttttaaatacaattttaggattagatttaggagaaatttggaggtgagaaactggagataaaaaggtttgttgtaataaagttcttc

SEQ ID NO: 470699 - DNA, 576 bp, Homo sapiens
aggggaggaggcaggggtcacatctttcaaacactaacatctttgtaatgaaagttgagcatcctgtccctcagcaagcgggtatttgtttctttctgtctgcgaaatgccctttaacaagtttttgtctgccctttatcatatctctcttytccacattcttcagcccttctcacacaaccaagtaaaaggttgcattttcatatttggacccagggaatggcttgagatgttctaagtttaggaggtttgtaaagtcattagactggcataaacataaatgatgacagaagaaaatccagcacttcaatatatggaagacaggagccagcaacggagacagaaaaagtaaacatggacgtaaaatgaaacctagtaaagtatgaaatcacaaaattcagtggaaggaaaaatgcaaataagaaggaagtgataacagtatcaaatggcagcagtggattgcataagaagagaactgagaattgataattcgatatgaaaaaaaggtcattgataaccttgtcacaaccagttttaataaaatgttttaaatacaattttaggattagatttagg

SEQ ID NO: 470700 - DNA, 628 bp, Homo sapiens
tttgcactgtctctggacaatgttaatgtcatagttgtgtctattccagttcttctccatagcagcggcgcccacgtgccccaggggccttctctggggcagcaggaggtacctggggtggttctgcttgggctcaggcacagtgaraagaacctggaggctggagcagggggcacagaactgaaacaagagtgcaggagtcactctggggaggccagctttgcctggattctgaccctggactccgtggttgagagtttgtttgttctgcagccacacaagtgagcatcgagggatgaggctggggggcgaaggaggcagaatgtcacatgggtggcttggtgaaggctggattgtagggacagaaagcattttttcatcttagccctttgtaagtaagttcaacagcattaaatgcattcatgttgctgtatagccgtcagcacctctgtctctagaactttttcctcttctgcaagtaaaactctgtccccatgaaacactcagtccctttcccctccccagccctggaacccccattctgctttctgtctctgaaactgactcctccagggccctcctagaagtggaaccacacaggatttgttgttttgtgactgctcatttc

SEQ ID NO: 470701 - DNA, 472 bp, Homo sapiens
atctgccagtcatgggtagtgactgacgacttcccgggattgttagcagaaccacatgaaatcagcaccatgccgacraccatgaaaactgcctctcatttcatacccgagaaccaatatcttattcattcctaaaaaaggattatctaacatccatggggtcagattagccatacagaggcaggtgcattaaaattctgaattttcaagtgaacgaaaagatcttcctttttccattcggtaaaccagagcaccaccttgatctgaaagcattttgagcctggcgtgatggactttgtgcttctgcgaaagtgtagtataaattccatggggccagccctgcatcctgactgtccccgagggctctctagagaaagatgtcaaggccagccctgtcctcaggtgcagtcagcagactctgaatctgaacccgcgtttggtctcatattcattttgtctcccttttgcccaa

SEQ ID NO: 470702 - DNA, 620 bp, Homo sapiens
aaatccactctgcccgtggcccccatgccactgcccactcascagacacaaatccactctgcctatggcccccatgccattgtccacttagcagagatggtgcaacagttgggtccattcttccatttatccaggatttatcactccattgatgagtccaacaaatgtcaggcattctgccaaactcgatttatacgtgccccaatcattctttttccctaaatctgacgccgtgttgtagataataaagcagagaaagcagccatgtgatgggtctggacagcgacctgcctgccagggacctgctaacttgaaagtcctcgaaactcctctgagtcactctttgggggttaatgtaatgaaagtttctgcaaaaaaaaaatattatgttaccaggaggtatcaacacatttttgctgttgcctattcgcatcttagtttatcttatattccttcacgttttatggattccaacgtaattcatttatttccattttagatgacattgctgaagctcagctttgtaactcagggaagctctcatgatgcctgttttatggacagaaacatgactcagggaaatgaggtgctggaggctgcacaagccaccaaggctctca

SEQ ID NO: 470703 - DNA, 421 bp, Homo sapiens
ctgtggggcgtctgatgagatggagaagagagagcggtgaactggaggggcatcttctgggatggagaggagagaggtgaactgtgggggcatctgatgagatggggaggagagagggtgaactgtggggrcatctgatgagatggagaggagaaaggggtgaactgtgggggcatcttctgggatggagaggagagagggtgaactgtgggggcatctgatgagatggagaggggagagggtgaactctgggggtgtctgatgagatggagaagagagaggggtgaactggaggggtgtcttctgggatggagaggagagaggtgaactgtgcgggcatctgatgagatggggaggagagagggtgaactgtgggggcatctgatgagatggagaggagagaggggtgaactgtgggggc

SEQ ID NO: 470704 - DNA, 421 bp, Homo sapiens
ctgtggggcgtctgatgagatggagaagagagagcggtgaactggaggggcatcttctgggatggagaggagagaggtgaactgtgggggcatctgatgagatggggaggagagagggtgaactgtggggacatctgatgagatggagaggagaaaggggtgaactgtgggggcatcttctgggatggagaggagagagggtgaactgtgggggcatctgatgagatggagaggggagagggtgaactctgggggtgtctgatgagatggagaagagagaggggtgaactggaggggtgtcttctgggatggagaggagagaggtgaactgtgygggcatctgatgagatggggaggagagagggtgaactgtgggggcatctgatgagatggagaggagagaggggtgaactgtgggggc

SEQ ID NO: 470705 - DNA, 491 bp, Homo sapiens
atgccctgtgccccagagagacatccactctcagatccttgagaacttttacccttcctccccagcacatttgttctctctgctgtttagcttcccctgacacccagatgtctctatttgttgaaacctaacctcccatggcctgagggctttgaagatagggcagggggccagatgcagctatcagacaaaaggagcaaacttgacagtgagaagccaccagtgtcacagggaatctgaatacgytggtgcagggatggagctgagcagggccagggttgggcttgagcattgtcacccaggccaagacagggacaaagctggtcaacacaggctggaagaggagcattaatttcccacaaagtgtttactgagcactttctctgtggccgtcacccttcagggtaggctgtagagtaaggcacaggttcaaccggtagacagaaaactacagtaaactaggtaagttccaaaattctctaaagatagag

SEQ ID NO: 470706 - DNA, 610 bp, Homo sapiens
tttgaaggtgtcagaggataccccatgatgctaagatacgggggaaaagtactcttaggataccttaagattctgcattaatttccactcacagtacttgctgattcctaaaatgcacatgtataaggtgaaatttgtgaaactaaaccaaaagtatcaattaagtggtagagattttgacagttttatagtcctgcaaagattaaaaaacgggggccccaaacctacaaaaacaagtctttaatgatttttacctgaaagcttgaacagtgatacaccttgagaaactaacagtcccaactagatcaaagagtgattttttcatttgttatgtacccattagaagaaaattaatttccaaattcaggaaaataactattcagattctctataatttttcataytcgatataatttttcatatttaataaaacattaacaggcattttcactaagataaagaacaaggcaaggatgaccactaactcttctactatcccacactgtactagagttatgagtgaaagtaatcaggtaaaggaaatcaatcaaggcctaagaatggataaagctaaagtaaaatgttctctatttgaagatgctataacagt

SEQ ID NO: 470707 - DNA, 581 bp, Homo sapiens
ctggccactctaaataggtggcacctgagaccagacgcaaactcctgagaagcgagtgaagctgaagcctgaggcccttcttcctcacaggcctctgtgagttctgtgaggagtcatcgagttttccagaagagaggaagctgggttgcaatcagaaagcatttctaatcagccatttttggtaaattgcctaaagagatcttcatgagaaaaaggatctaaacttacaagtctccaataattttttgtgatatcatttttcattctaaagaaatgttcactttcctgcctaattttgtatttgtaattgtatattctttttaaaagaaatcatatgagctttgggcttcacaaaatcaggatctcccctgcctgtgcctttttccagtgcttaaacattttgcctstcatcccctaaaaagctaaacaatttattgtgatcttgaagccatcattgctgggcatagtcctgaaatatagttttcctgcaaaaggagagggaggggaggaagaaggaagggaagaaggaagggaagaaggacagaaatgcacaagattatatgtagagttagtaattcatt

SEQ ID NO: 470708 - DNA, 627 bp, Homo sapiens
tggcattattgacattctgggctggataattatttgctgtggggcgagggggctggtagtctgtccggtacattgtagaatgttgtttagcagtgtccctacccactagatgccagtaycacagcaccctcctcctcccccaagttgtgacaatcaaaagtgtctccagatgttgccaaatgtcacccaaagggaaaaactgccctcagttgagaacaactaggttaagccatgaccaggttaggccagggttaactacatagatttgatttgttaccaactgaaaacactagttagccccagagcaatagcaccatctatttaattcaagttagaacaatctaacctcattctaaaatctcaacagaaacaatccctttaatctatcatgttacagtgcatcgcaggcaatggaatctactgcattttgagtcttttggaaataggcagtatcatctttgtcttggtattcttaccgtgcacaaagtaaacgcttagcaaattattgaaagaataaacaacttgctccaaaacaccagagaagtgcagaatgaggagctgccatgctcaggcagtcattctgcatgattcttattctacaggaggaaatgaagcaagtgtttgcca

SEQ ID NO: 470709 - DNA, 627 bp, Homo sapiens
tggcattattgacattctgggctggataattatttgctgtggggcgagggggctggtagtctgtccggtacattgtagaatgttgtttagcagtgtccctacccactagatgccagtatcacagcaccctcctcctcccccaagttgtgacaatcaaaagtgtctccagatgttgccaaatgtcacccaaagggaaaaactgccctcagttgagaacaactaggttaagccatgaccaggttaggccagggttaactacatagatttgatttgttaccaactgaaaacactagttagccccagagcaatagcaccatctatttaattcaagttagaacaatctaacctcattctaaaatctcaacagaaacaatccctttaatctatcatgttacagtgcatcgcaggcaatggaatctactgcattttgagtcttttggaaataggcagtatcatctttgtcttggtattcttaccgtgcacaragtaaacgcttagcaaattattgaaagaataaacaacttgctccaaaacaccagagaagtgcagaatgaggagctgccatgctcaggcagtcattctgcatgattcttattctacaggaggaaatgaagcaagtgtttgcca

SEQ ID NO: 470710 - DNA, 627 bp, Homo sapiens
tggcattattgacattctgggctggataattatttgctgtggggcgagggggctggtagtctgtccggtacattgtagaatgttgtttagcagtgtccctacccactagatgccagtatcacagcaccctcctcctcccccaagttgtgacaatcaaaagtgtctccagatgttgccaaatgtcacccaaagggaaaaactgccctcagttgagaacaactaggttaagccatgaccaggttaggccagggttaactacatagatttgatttgttaccaactgaaaacactagttagccccagagcaatagcaccatctatttaattcaagttagaacaatctaacctcattctaaaatctcaacagaaacaatccctttaatctatcatgttacagtgcatcgcaggcaatggaatctactgcattttgagtcttttggaaataggcagtatcatctttgtcttggtattcttaccgtgcacaaagtaaacgcttagcaaattattgaaagaataaacaacttgctccaaaacaccagagaagtgcmgaatgaggagctgccatgctcaggcagtcattctgcatgattcttattctacaggaggaaatgaagcaagtgtttgcca

SEQ ID NO: 470711 - DNA, 652 bp, Homo sapiens
ggggactgattagcaggaagttgtggcagtagcccaggtgaggaaaatggggcttgaagcggtgattgatcatggctatattttggagaaacagcacttgcagatggtttggatgttgcaagtgagaacaagagagaaagacattgagactgacttccaggttttcagcttgagtaacagatagtagtggtaccatttacagagatggcaaggcttggagaagcctgtgctggggcattggagcgggtacagtatcaagaattctaagtttgcaatgcctggtagacactcacatgcctataggagggaagcaggtggagtttcagggcaagattaggcctagagatataaatttggggcccatcagtttataaacgttatttaaagccacagaactgaatgagatcacttaggaagagagtgtaaatacagaagaggtcccaagactggggygttggatccaacatcgatccagagggcagggagaggaggagctgctcttccagaatagtgagaccttttccactccagagggctgtttgctttttaaaagatgtcctaagacatatagatttttccacatatcttagtaataaatgttacagcagtgtctcctgtgagttctaagtcacatgtgtcacttcgggaaggc

SEQ ID NO: 470712 - DNA, 584 bp, Homo sapiens
ggtgtaaatgtgttatatattaaagatgtacaaatacaaaggggctctgtaggctggttcaacacccacttttgtactttctttctttgctcttctccccataacttcccttgtttttgctcccaccttctctttttccccctcattttttccttgccttctgcatttcctaggttccctgccttccctggcctctcccaccaccagatcagcccacctggcagctctcacgctaggccctctctgattccacttcatcaataccacctcttcttgcgacttgtatctgttcttcaatttccaatcttcgtctctgttaggaggctttccctaaactgtgtgacctcatttccctgctgtctccataagaccacccgcgaagcttgaagctgtggccagatttctctgggactccttgcagtgacctacccagtgaagctttgtttaaccattcacaagaaatgagtcattgaagccttccatgtttgggraaaactcctgtttgtctaaggaggccgacagagtagctgaatgctatctgaacttgatgtctacaaatcctaatggagagcttcattatttct

SEQ ID NO: 470713 - DNA, 604 bp, Homo sapiens
caaagaaaagtagctagacttgcccagtctttccatttccttctgtgtcatcattttcagtgtaagtggttggtaacacaggaagaaaagatatgatatgattgttagtgtttcttagaaagacatggtattgttttctctgttggaagtaacttckggtttaaaaagcaaagtgtcagcttccccccactgccatcctacttactgagtaacagacattacacgtttactttgtactttgagcctcactgaactcccatacattgtgggtttactggaatgctgtgctcatgggtcagtaaatgttatatgcaaatgggcagtaaggaatgggggcggatacactcagtgtgcaaattatcacattcagcacaatctggttggggtatgccttggaagatttcatttttaaccaagaaaggcatatatttactgtctgaatatgtcttgcccaaaaagtaaatgctagtgtccgaaaatgcacatatttattctgcttaaagaaatatgtacaggcttcgtgagactacgtggaagaaatatatactgtatattaatttgtcgttgtcctgttaggcataaagagcctcaggatgaaagtcat

SEQ ID NO: 470714 - DNA, 604 bp, Homo sapiens
caaagaaaagtagctagacttgcccagtctttccatttccttctgtgtcatcattttcagtgtaagtggttggtaacacaggaagaaaagatatgatatgattgttagtgtttcttagaaagacatggtattgttttctctgttggaagtaacttcgggtttaaaaagcaaagtgtcascttccccccactgccatcctacttactgagtaacagacattacacgtttactttgtactttgagcctcactgaactcccatacattgtgggtttactggaatgctgtgctcatgggtcagtaaatgttatatgcaaatgggcagtaaggaatgggggcggatacactcagtgtgcaaattatcacattcagcacaatctggttggggtatgccttggaagatttcatttttaaccaagaaaggcatatatttactgtctgaatatgtcttgcccaaaaagtaaatgctagtgtccgaaaatgcacatatttattctgcttaaagaaatatgtacaggcttcgtgagactacgtggaagaaatatatactgtatattaatttgtcgttgtcctgttaggcataaagagcctcaggatgaaagtcat

SEQ ID NO: 470715 - DNA, 604 bp, Homo sapiens
caaagaaaagtagctagacttgcccagtctttccatttccttctgtgtcatcattttcagtgtaagtggttggtaacacaggaagaaaagatatgatatgattgttagtgtttcttagaaagacatggtattgttttctctgttggaagtaacttcgggtttaaaaagcaaagtgtcagcttccccccactgccatcctacttactgagtaacagacattacacgtttactttgtactttgagcctcactgaactcccatacattgtgggtttactggaatgctgtgctcatgggtcagtaaatgttatatgcaaatgggcagtaaggaatgggggcggatacactcagtgtgcaaattatcacattcagcacaatctggttggggtatgccttggaagatttcatttttaaccaagaaaggcatatatttactgtctgaatatgtcttgcccaaaaagtaartgctagtgtccgaaaatgcacatatttattctgcttaaagaaatatgtacaggcttcgtgagactacgtggaagaaatatatactgtatattaatttgtcgttgtcctgttaggcataaagagcctcaggatgaaagtcat

SEQ ID NO: 470716 - DNA, 604 bp, Homo sapiens
caaagaaaagtagctagacttgcccagtctttccatttccttctgtgtcatcattttcagtgtaagtggttggtaacacaggaagaaaagatatgatatgattgttagtgtttcttagaaagacatggtattgttttctctgttggaagtaacttcgggtttaaaaagcaaagtgtcagcttccccccactgccatcctacttactgagtaacagacattacacgtttactttgtactttgagcctcactgaactcccatacattgtgggtttactggaatgctgtgctcatgggtcagtaaatgttatatgcaaatgggcagtaaggaatgggggcggatacactcagtgtgcaaattatcacattcagcacaatctggttggggtatgccttggaagatttcatttttaaccaagaaaggcatatatttactgtctgaatatgtcttgcccaaaaagtaaatgctagtgtcygaaaatgcacatatttattctgcttaaagaaatatgtacaggcttcgtgagactacgtggaagaaatatatactgtatattaatttgtcgttgtcctgttaggcataaagagcctcaggatgaaagtcat

SEQ ID NO: 470717 - DNA, 546 bp, Homo sapiens
tttctcttacaacaaataactttgttctcaatgaaaagtgtgcataaggccagaaacagtggctcgcacccgtaatcccagcactttgggaggctgaggcaggaggaccacttgagcccagaaatttgagaccagcctggacaacacagagagaccctgactctacaaaaaatttaaaatttagccatgtgtggtggcrcatgcctgtcgtcccagctactcgggaggctaaggcaggaggatcacttgatcccatgaggttgaggctgcagtgagccgagattgcatcactgcactccagcctgggatacagaaggaggcccgtctcaaaaaaaaaaaaaaaaaaaaaaagttttaggagacatcaggtattgggacacccagtcagatgacagaaaaaaacaaacaaacaaacagcaaaactgtccctttttaatcctgccctgcaactacagatggtacagttccgcctagaggcagggctccacctccagcctcctctggccccctcaccccatgctgtcactagggcaggggctgcaagag

SEQ ID NO: 470718 - DNA, 395 bp, Homo sapiens
taaaattattacaaattgcaaaaacaatatgttttattttgaaatagtttcaaaatcacagaaaagttgcaggaacagttcaaagaactcctatatgtacatcactcagagatcccattcatttcactaattgtctgaataatgtccttagggaaatgatctaatacagtgtcatgtgtggcctttggttgtcakgcctcttcagtctctttcaatccagaacaattccatagtccttccttggctttcatgactgtaaaattttaaaatcatgggcaagttattttagtagaatgttcctcaatttaggggacttcaatgtttcctcattattagagccaggttatgcatgcatttttgagggaatattacaaaagcaatcccaagttcttaca

SEQ ID NO: 470719 - DNA, 536 bp, Homo sapiens
gtggggagagcaatgtctatgggtctttcataacccaggttttatgtagtgtggtccttctacctttcctgcaccctttcctaagtacattacccgaccccatttcttttctcctttttattgatgtgtggataaattgatttaataaattgtgtgcttygagtattttaatttggtctctgatcctttttagtcctgcatctctggggtagcttgtgcaacagtgtactggtagcatagaggctatcatggcatcaaggtaatttccctcatgacactgggggtagatgggattgagactgcctcagggtgactctgcccagacaggctgtgctatcatcactatctactgctgctgctctaccacactgctgtgggagagggcaagaagatttggctcttctgtgaaccccaactaaggagtgagacatagcccttgatcatgctcagattcccaaacttactagggggttctatctagccagactcggccaggggcaggagtcactccttctctgggacacccaccagtgttt

SEQ ID NO: 470720 - DNA, 642 bp, Homo sapiens
taatgtttgaaatcttgcatatgtgctcgggtatttagtaacttaagacattcgtactgcattsaattctatcgcacgcaagaaattagaaaacacaaaatcagtgtaacaaagccaacatgggatttctgaaaggctttaattcaacatttgtcacaaatgttgactaatcaccttctctggtctcgttgtagtgctaggcaccagagataatgcagtgaaccagacagacaccatccctagcctcatagagcttgcaattaaaaaccatactccaatggaaataaggaaagaaagaggcaaatgcccagacctctacttgctcttctggtcttccattgccttctcagctgttaaaccaactctttgtgtcatttcctttttgaacaatgaagggcctgctactggcctaacttataaggaaaagctcataaaattgatttgccagattgactcacaacccaaatgcatctcatttttatggcataaaacgaagatgtagtgtgaataacaaacatacttactttaatggatgttaattgtattcttagtccctctccaggcaattaatattttcccttgccattttatacataaagatcctctgaaaaactcagctaagggcataacaggactgttgtc

SEQ ID NO: 470721 - DNA, 642 bp, Homo sapiens
taatgtttgaaatcttgcatatgtgctcgggtatttagtaacttaagacattcgtactgcattgaattctatcgcacgcaagaaattagaaaayacaaaatcagtgtaacaaagccaacatgggatttctgaaaggctttaattcaacatttgtcacaaatgttgactaatcaccttctctggtctcgttgtagtgctaggcaccagagataatgcagtgaaccagacagacaccatccctagcctcatagagcttgcaattaaaaaccatactccaatggaaataaggaaagaaagaggcaaatgcccagacctctacttgctcttctggtcttccattgccttctcagctgttaaaccaactctttgtgtcatttcctttttgaacaatgaagggcctgctactggcctaacttataaggaaaagctcataaaattgatttgccagattgactcacaacccaaatgcatctcatttttatggcataaaacgaagatgtagtgtgaataacaaacatacttactttaatggatgttaattgtattcttagtccctctccaggcaattaatattttcccttgccattttatacataaagatcctctgaaaaactcagctaagggcataacaggactgttgtc

SEQ ID NO: 470722 - DNA, 656 bp, Homo sapiens
ttggtgttgaagctttggggtatgatccagcaggtggcacttaggcttattggtcggttggtagactcttgcttggttgtgtggctcccccatgttaactcmcagttgcagccatgttctctctcaatgctctgaaagtgtgggtttctctcccccttgagtgctgtctgtagatcatgacttggcactcctcggatgcccactgcagctcttgtgtaatctcagtgtttatgttcctttcccaacttggaggcagcagaggaagggactttggtattggttgtggccaagggtcatttgcttgtcacctggggactccaccccagagagatgcaggtcagcagtggctcagtgcaagcagcccaggatggagagtctgtgctgtgggcccaagccaggggtttcctgtcttgtgtcaagcaatgcggggggtgtgtgggatgcacgggagacacactggcctcctctccttgggtcagctgcagcttgctggaggtgtaaaatcaccctttctaggtgtacagttctgtgaattttgacaaatgcatcagtcatgtaaccaccatcacaattaagttatataacatttataagcactttaaagcttttgatgcatgttaatcaaattacctgctggtaacattatatgtattcct

SEQ ID NO: 470723 - DNA, 549 bp, Homo sapiens
ttatgtaaatacagaaacagacgatgctattcacatattctggggtacttgagcattaaaagctatctatgggattgctatgatatatttaaatgcctttgcattatgtatctgctttttaattagatattttcatccttaggacacaacgaagctactgttcatgctataatattctatttcattagcataatctatttagaacaaacagtatttcttgcagctagattttctgttacgagcttaattattaccttaaagcaaaagtaaatcaaataacaaaaatcaattgtatttctatagactttgcaatgcataatctgaaaatgaaatttttaaaaaatgaaattttaaaaaaattttacttaaaatagcaaaaataataaaatacttaataataaatttaacaaaaaaagtgtaaaacttatactctgcaaaataccaaacattaytgaaataaattaaagacctaaataaatgaaaagacattcatttacatggatcagagactcaataagattctacataatttacattttaaaaatccca

SEQ ID NO: 470724 - DNA, 309 bp, Homo sapiens
cactttgcagatgaggaaatggagacccagggtgataaagtgactcacccaaggatgcacagctaatggcaggatgctgcaggggcctggggctacccagaagctaaggcctggtttttttttgttagtttgtttttcattttctttcccaagtacctcacacatttttctaattaaatctttatttttatastccaggtgtcttctaacaaaaggtatagctaacaaaggtatttaaactgtctacttaagagtttttgcaaatgcaaacttaaaacaaatagccatgcaacaatttggagatgagtt

SEQ ID NO: 470725 - DNA, 608 bp, Homo sapiens
accggttccttcacacacttgtattttgaagggaatataaaatgtgattccctcacacctgtaatcccagcactttgggaggctgacgcgggtggattacctgaggtcagaagtttgagacaagcctggccaacatggtgaaactccgtcyctacaaaaaatacaaaaattagccaggtgtgatggcaggtgcctgtagtcccagctactcaggaggctgaggcaggaaatacttaaacctgggaggcagaggttgcactgagccaagatcacatcactgcactccaccctgggcgagagagcaagattctgtttgaaaaaaaagaagaaaaaagtggtttcatatgatacaaatgttagaaaaaggacagatgtcagtttgctgactccagcagagttacctttcgggtgctagttcccaccacagcccaggatgccaatgttttctctagttacatgttaagatctccaaatccagggcatccctcctgaaacaatgccagtcctacactgctaaatgtttactgaatgaatggatgaatgaaggcaacatttttagatgtgggaatcctatagtgcttggttctctaatccctaggggcctcctt

SEQ ID NO: 470726 - DNA, 553 bp, Homo sapiens
gcctgcggctgaagctcttccagcagtccccgcacttgtagggcttctccccagtgtggctgcgctggtgcacctccaggtggtgtctctggctgaaggttttccagcactcgctgcacacgtagggcctctttcccaggtgggttctctggtgcttcatcaggtaytctctcagggtaaagcccttcccacactccacacagccataagacttctcttcgtgggttcgctggtgcctgacgagattggagctccgactgaatcctttcccacactcagggcactggaaaggcttccagaaggagctgtgggttttgacttcgtcaggcagggggatggcaccgtgctggggaggaggaagcccaggcgcactgcctgcagggccaccaggctcctgctcacagacccttccgagcccagggccctggagagaggcttccccaaacctctctgatgtcagtgccaccagcgcccctttcaggtcttcctgtgggggttttgcctccttttccttgctcccaccgcctacaggacaggaggagataaagattga

SEQ ID NO: 470727 - DNA, 563 bp, Homo sapiens
caatctgtggcccatccttggaagcatatttcagtaaacccccttctacatgaccactggcctggttcctgctcttaccccagtgcctacactatttcaaccctccagactggccgtaccctgccgtcaatccaattttcctcaagtaaaacctccatcacattactctgcgcagaaaaaatttttaaacaaggacccrgagtcctcacggactcctcagcggcctcactctactcactcctgcctcctccttactcctctgagcactcatctttcactccaggaccctcaccatcctgggaaccagcctgcagagtcctgcattcaggtttctgcacctgctactttttgcctctgtgattccaaatcctgttgtgagttcttgctccagtccttgtggacattactgcaattacaacccagacaacaaggtctgcacctcaccgtctgctaatgagaacagacgaacaactggaagtgatctgggcagccacctagctcaaccctgccctgtgcattcagtctctttacaggtgaagcagctcaggcccagccccaagcag

SEQ ID NO: 470728 - DNA, 479 bp, Homo sapiens
ctggcagtgggataaggagtcaaagttgctgttgaagccccagatatcccagagtctacccttgggttaaccaagcctggttaattttttgtgttttgttgttgttgttgttgttgttgttkttgttgttgttttgagacagggcctcactctcactcccaggctggaatgcagtggcatgatcacagctcactgcagcctcgaacttctgggctcaagcaggagccctccaacctcagccttttgagtagctgggactacaggcacatgccaccatgctcagctaattttctcatttttgtagcaacagggtttggctatgttgcccaggctggtcttgaactcctggcctcaagcaatcctctcgcttcggcctcccagagtgctgggattacaagtgcaagccaccgcatccagccctgagctaattagattttgtcctctctgctcccaccctgttctttcaccccccacctctg

SEQ ID NO: 470729 - DNA, 260 bp, Homo sapiens
tggtttctggttgtgttccatccatgggaggcatcaacaggataatggagcaggaggaaaggagagaacagggcccttctttctctagtcgtttgaggtggtgtcttcttaactccagctttcaatcaggagacttctggctgcaaactccagtgatgacatcttctcacctggtccctccagccaagaascctggaggatgaatgaaggtccctccagccttcatcattctctgccagtgggaccaggtgagaaggtgt

SEQ ID NO: 470730 - DNA, 538 bp, Homo sapiens
ccaaaaccatttcttttaaaaagacaagcataaagcaatgatcacttttgtatgtgcattgctctgtttctatgactggtaccaggaatgatctggtttttctttccgcagtattcttccttggatgaaaggactaggagaaagccctgcaaccccacgagtccgcccgtttgttgaaatcagttcaagatcatccaggtctgcaaaactcggctgaagcagcttgttgcataatttaccagagaaaagagggccatctggagagccaatctggagaactcgagcaaaggcagagtctttttttttcccctcttaagttatcctgattgactccctgcctatattgggcctccgcagtgcttggcccgcatcctgaaagatggcagtccaggtcaaaggccttggcctcctggctttgaaccctggcaaagcactgcctggcccacaactgctagtagccccacctaccatagctgtgcaaggttctcagwcacctcccacctgtcttaccccatgacaccgtgggggcctgtgtcat

SEQ ID NO: 470731 - DNA, 623 bp, Homo sapiens
gtttacgcatatgcagaggaggcagctacccacaaagggatgtgggaaagctctaccaaatttaaaaaaaataaaaataataaataaaaagaaagaaagaaatctgccttaacctctagtcaaggagaaagtcatttcttccacaaagattaaatcctttgtgttaaagcaatctatttctttccaatccagagcctgtgagtgattctatagggtagtgaacacaataaactattaccagagaatagtatttttgtcaatgatttaggtgatattttaagaggtataaggagtttctatagaattttccttccatagagcctggggaagaggctaagggsctgggggggagggcagctcctatcaaccagctctacctgctccctctccagtcccatcctgtcccctgaacctggctgccctggactccaggtgccacctatgtgctggctatagctgatttgtagtgatttcctgaaatgttccactgagcagctttctgggccgggaaagaaatagcacagacttcaaatttatgaggtctgccacaagtatgggatgagaggaagttcgaggaattttccaaccctgtgctagccacctttcttagtctacaatgcttt

SEQ ID NO: 470732 - DNA, 658 bp, Homo sapiens
agggaaacatgttagggtctagactttcgctcctcctatgggtgcatattactagctaaggaaatgtgagatcctaaagaataataacaaaacctctgaggaataatactcctttaagagagagacaaaacaaacaaacaaacaaacaaacaaactgaacaacctattcatcatgaaatgaattgtctagagagaataactttttaaggtcagcatagtaagtttctcaaaggggtaagaaagaatattgataaaaagaaacagggataaatatttatgaaaaacaaatggagaagattaagtatgaaactacatagcagattaaaaactaaataaaaagrcattgaaaggtggaatagatacagcaaaagaataaataagttgctgtcgaattggattaatgaattatgagtcaacaagaagggagaaagaaggaagattttaaataaaatttaaaaggtatgaaggataaaagtagaaatgtcagcattcatataataggaatctcaaaaggaagagaaaaacatacatgggaggaagaaaatagttttcaaactaattatagaacatttgccataacttaagtgacatgaaagaactcaggctgaaaggacttagagtatgaaacagtattcctaaggaagggggaaaaagtcaa

SEQ ID NO: 470733 - DNA, 558 bp, Homo sapiens
tggccagagctacctccttgtgccccactggctaycttccagaggcagtacctagctgctagccgctgtttatcatcaagctccccacacctcaacaacagctccaggctcagccattgccatggatttctttcctcctatgtctccacagactctttcaccttttgattttaaaacatcctttgtttaatttttttgtttctctcgttcaaagggaatggacagagactcttccttgttctctgccttccctccattattttgcctaaaccaagattcttcggcttgaaacaaaaaatcataatccaactctgcagttctcatagaggccctagttttgtctgtggcctgtgctttagaggggtccaaatgtatcaattatgatgctcacacctgaatgctacctctgaaatcatctttgtccccttgcttgtgtaacacaacagaacgtgcttttagaaggggtcttttgtattactagattctaaaatattgacagaacaatttccaacctgttagcctgctttcttaaaaaagttaattcaacaccaagcacca

SEQ ID NO: 470734 - DNA, 558 bp, Homo sapiens
tggccagagctacctccttgtgccccactggctaccttccagaggcagtacctagctgctagccgctgtttatcrtcaagctccccacacctcaacaacagctccaggctcagccattgccatggatttctttcctcctatgtctccacagactctttcaccttttgattttaaaacatcctttgtttaatttttttgtttctctcgttcaaagggaatggacagagactcttccttgttctctgccttccctccattattttgcctaaaccaagattcttcggcttgaaacaaaaaatcataatccaactctgcagttctcatagaggccctagttttgtctgtggcctgtgctttagaggggtccaaatgtatcaattatgatgctcacacctgaatgctacctctgaaatcatctttgtccccttgcttgtgtaacacaacagaacgtgcttttagaaggggtcttttgtattactagattctaaaatattgacagaacaatttccaacctgttagcctgctttcttaaaaaagttaattcaacaccaagcacca

SEQ ID NO: 470735 - DNA, 558 bp, Homo sapiens
tggccagagctacctccttgtgccccactggctaccttccagaggcagtacctagctgctagccgctgtttatcatcaagctccccacacctcaacaacagctccaggctcagccattgccatggatttctttcctcctatgtctccacagactctttcaccttttgattttaaaacatcctttgtttaatttttttgtttctctcgttcaaagggaatggacagagactcttccttgttctctgccttccctccattattttgcctaaaccaagattcttcggcttgaaayaaaaaatcataatccaactctgcagttctcatagaggccctagttttgtctgtggcctgtgctttagaggggtccaaatgtatcaattatgatgctcacacctgaatgctacctctgaaatcatctttgtccccttgcttgtgtaacacaacagaacgtgcttttagaaggggtcttttgtattactagattctaaaatattgacagaacaatttccaacctgttagcctgctttcttaaaaaagttaattcaacaccaagcacca

SEQ ID NO: 470736 - DNA, 558 bp, Homo sapiens
tggccagagctacctccttgtgccccactggctaccttccagaggcagtacctagctgctagccgctgtttatcatcaagctccccacacctcaacaacagctccaggctcagccattgccatggatttctttcctcctatgtctccacagactctttcaccttttgattttaaaacatcctttgtttaatttttttgtttctctcgttcaaagggaatggacagagactcttccttgttctctgccttccctccattattttgcctaaaccaagattcttcggcttgaaacaaaaaatcataatccaactctgcagttctcatagaggccctagttttgtctgtggcctgtgctttagaggggtccaaatgtatcaattatgatgctcacacctgaatgctacctctgaaatcayctttgtccccttgcttgtgtaacacaacagaacgtgcttttagaaggggtcttttgtattactagattctaaaatattgacagaacaatttccaacctgttagcctgctttcttaaaaaagttaattcaacaccaagcacca

SEQ ID NO: 470737 - DNA, 647 bp, Homo sapiens
ccagctggcttcacctctcactgggattacaagtgtgagccaccgaacctggcacagctttcttttgattagtgctactatagcataatctttctccatcctttttcagaaaaaactcctgtctccaaatcaaaaccattcttttacttttgatccatgtctttatattttatttatttatttatttatgagacaaggtctcactctgttgcccaggcaggagtgcagtggcgtgattatggctcattacaacctcagcctccctgggctcaggtgatcctcccacctcagccttcygagtagctgggactacaggcacaggccatcctgcttggctaatttttatattagcaggggttttgccatgttgctcaggctggtcttgaaatcttgagctcaggtaatctgcctgcctcagcctaccaaagtgctgaaattacaggtgttaactaccacacctggcctgtttttgtatttaaagtgagttttttgtagccagtatagagttgggtcttgtatttttatccactctgagtgtttctgtcttttttttcctcttcatgctcatatcatgaagtttctgtctgtcttttaatttgtgtatttagatcattcacatttaaagtgattattgatgtatttggatt

SEQ ID NO: 470738 - DNA, 575 bp, Homo sapiens
ctgtggggctttttatctgcacatccagsaatgagtatgaggtagctgcaaagtggacggtggacttgagaaggcattctaaagaagaaaggtatttcggactccttcagatgataccatttgatagatgctcacatagccaatgtctttgaggtgtgtgtaaaatgtgcagcttgtggctaacatagggttgcagagaaaggagaaatagaagaaaaatggggaatgttttctacttgtactcccatgagccaagaaatgtgaagtggatttttttctttctaagcagcgggggattctctcccttttctatcatttccttgctcatcctttcaaggaagccatgtcgtgtgctttattgttttacagtcatggtgaaagaaacccttaaaacaaactctttgctttaaagctttatgtgtttctgcaaacaatgatgcttcttagacagtgagggttcagagtttaagggacacaagaaagtggagccttttaatgctcccagtgtgcagtaaacatgctggaatttcaatggattccaaagcgtaacaataatagcattaagtacatgccag

SEQ ID NO: 470739 - DNA, 621 bp, Homo sapiens
caatacatacatttaggaagattaattaaaacaagtaaaataattgttatatttactgagttattttagttcagggccttgggtggccggagtataccccagcagctcagggcacaatgtggaaccagccctggacaagacgccctccaatctcagggtacactcacaccaggacactttagacataccagttagcccaacatgcacatctttgggatatgggaaaaaactggagggcctggagaaaacctacaacagacatggggagaatgtrggaactccacacggtcagtgttagaacaaaaaaatgtgtaatgaccttataacaagaccacgttgaaagaagagagcttatttgaggaccggctgtacaaggatggtgatgaggttgaggaggatgataactatctcctaggattattgtgaaaattacataaaaagtgtttgaaaattgctagcacgccatcaggaacatgataaacactcaataaatgtatgcatttgttttctttcctcctacatattgtcttcagagtatctttttgggggctcaatatgccaaattccagtttggatagaagcttagaaagtttcaacttccttatagagtaggattttaac

SEQ ID NO: 470740 - DNA, 544 bp, Homo sapiens
ctctaattaaacagtttggagctataaacatatggccatctcaggaagctcactaaatatctcagagctttctcctactccctcttcaaatacattaaaacttagtctacagaagtcttatttcaaaggatccagtgttgcttctaagcacctcctggagagctaagtggagaatctrgaaaatctactagcctattttctgttgtcctttcttctgtcgctatggctcagtatcattcttgaatataattggtcctgcccagtctgatgcaatttcctgctacctttgagatgccactgttggtcttactcagtaattgctcagtatacagtgagggtaaggaaaagaagagatcctggcttctggtgttaacagtttttcaaacacagtgctgcagcagatcagggtttgaacaggtcacaattgttcttcaggggaggacaactccatttcctgcaaaacggactccaaaaacaaacaaacaaacaaacaaaccatttgccaaaggagaatgtgggttctggctccctgaacccacattca

SEQ ID NO: 470741 - DNA, 544 bp, Homo sapiens
gttggtccatgagccagggtcaacaatttcatcagcccagccaagtattaaaaacatgtaggaaaaataaagagcccccagtttcaatgaagctttaaacaaagttggctcgttatccattcaatgggaattctgttgcataagaaggggctatgcctttctgacagtcgctgatctcgggaagccatgtaccactgacaagtcactgccagggatccttaccacagtctacctcagcatgcctctgttcagtgtctcgacatctgggaacaataggtaagttatttttttgaccctttcctgtaaaaactagattaaaatctcaggccattttggataggatgaaggttaggatcagatcagtggcaattgtgtgcccatgatgaagagggaaatctatatgaaggcaagctctatgtttgccttgtaaagtccaycaatcaaagaccaaagggagatttcaccaatgggacccaagagctaccaggtgcagggaaaagtgtgaaaaacacctaacacctcttaaaaggttttcaaattaatt

SEQ ID NO: 470742 - DNA, 617 bp, Homo sapiens
aggaatgggaagcacagcttcttcaagtgcacatttgggaataatgataagcaggatcatgcctactccagtctcttggttcgtggactctatattctacttatcagggtcagagcatcatatatgatcgagcatgtacactgtacctggaggatgacgtcccatctcacaggacatgattttcaaatggggcttcaggtggtcatttggtactctatcaggctagtagcttctagtggtgtgatatagttctgtgaccctctgatacacttcctttgccacatctccttggtctgaagaaatattatgtggaattccacatcatggatcaaatactttgcaagcgtttggtagtggggctggctgagcccctgcaagcaaaaaaggcaaacctgtacccggaatatctgttgcttccagtcaagatgaatttctacttttgagtggtaaaattggtgcagtgtagtcaacttttcaccaagtagccagttgatcaacttgagaaatggtgccatatgtgatggctcagcacaggtatctattgctrgtagactgaagatacagatgtagctaatcagccttagtgaatgggaacctagctgtgggacccacacata

SEQ ID NO: 470743 - DNA, 577 bp, Homo sapiens
tatgacctgaggagcattcctgacctatagccttgctgtcccttacaattccttatgtttcctccttgagggtataattcaggtgtagggaggatcttgatcaatgggctattacataggtaagtaaatcaaaagaacggggaagagaaaaatgtaaaaccactagcagttaagctgttatattttaacttgcaaatgacttaaggaaagattctagggcctgaataaactaaaataaatcttatgcaagtgttaagtattcttgtagtgctctttgcataatctgtgcttctagggtgacyttcatttcaatctgggaggaattcttcatcatctctccttgatgaaaagtgttgaatatcaacgtctctggaatggaattacttcttgagaaaaggccagatggaccagatctatattactttcatggtgtattagttatctactgcctgtaagaaattatcccagaactaagtggcttagcacatcaggcatttattatctcagtttctgtgaatcatgaacttgggtgtgattgagctgggtggttctggctctgggtttctcatgcacttgc

SEQ ID NO: 470744 - DNA, 471 bp, Homo sapiens
tgctactctgactgcatcttggaagtgcaagttttcttggcagtcattcctgagctctgtgagggcaggggccatgtttatactgttctggtggatttctagaatttagtacagaaccaaggacacaagaggtactttataaatatttccagaatgaatgagggagtagattaagcatagtgttgttaagtctctgycaatcatggtaacatccaggtgttaggaaaagaacatgagccccggaatcagaccaaattttacttgaatcctgggtccagtagtggcatggtgtgttagaattctccagagaaacagaaccaatagtagagatagacagataatagagagatagatggatagatagatggaagatagaaaaaaagaaataggatatatacagagatctgtttatctattgatgatgtatagatagataggtagatcaattgattgagagagactgagattgag

SEQ ID NO: 470745 - DNA, 584 bp, Homo sapiens
ggaactctgcacatgttaacatttgtaagtcccagagcagtcaaaatgggtcgaggggtggactccaggagaggccttggaggccagcacactttttacaacattcacatcgggatttctctgagttgaacagtctcayggggtgtgcaaacgcaggtctatgtgtgctctggagctgcacctgctgccaccatcaccttggtcttacgttgcctcctggccagggccagcttcatgggcctgcgacctgcgtaggtcttcctgactaataaccctgcattttcattttgcactgggcctcccatattatgtagccagtcctactcctggcaaccaccgaatggtgatggtcctgtgctgaagggggtatgttttctcatctttacctggtcagcgctgtccccagcacttgaattgaaccatccattcatacaacttgcttgactcctgcaggcatctagtttgttgcctgtattttacagtttggacctggctgtactaaggagttcctgcagaaaaatgctgtcctgccatcaagctctgtgaaattttgggagtccagggcagaaggctgcattcatctt

SEQ ID NO: 470746 - DNA, 584 bp, Homo sapiens
ggaactctgcacatgttaacatttgtaagtcccagagcagtcaaaatgggtcgaggggtggactccaggagaggccttggaggccagcacactttttacaacattcacatcgggatttctctgagttgaacagtctcacggggtgtgcaaacgcaggtctatgtgtgctctggagctgcacctgctgccaccatcaccttggtcttacgttgcctcctggccagggccagcttcatgggcctgcgacctgcgtaggtcttcctgactaataaccctgcattttcattttgcactgggcctcccatattatgtagccagtcctactcctggcaaccaccgartggtgatggtcctgtgctgaagggggtatgttttctcatctttacctggtcagcgctgtccccagcacttgaattgaaccatccattcatacaacttgcttgactcctgcaggcatctagtttgttgcctgtattttacagtttggacctggctgtactaaggagttcctgcagaaaaatgctgtcctgccatcaagctctgtgaaattttgggagtccagggcagaaggctgcattcatctt

SEQ ID NO: 470747 - DNA, 584 bp, Homo sapiens
ggaactctgcacatgttaacatttgtaagtcccagagcagtcaaaatgggtcgaggggtggactccaggagaggccttggaggccagcacactttttacaacattcacatcgggatttctctgagttgaacagtctcacggggtgtgcaaacgcaggtctatgtgtgctctggagctgcacctgctgccaccatcaccttggtcttacgttgcctcctggccagggccagcttcatgggcctgcgacctgcgtaggtcttcctgactaataaccctgcattttcattttgcactgggcctcccatattatgtagccagtcctactcctggcaaccaccgaatggtgatggtcctstgctgaagggggtatgttttctcatctttacctggtcagcgctgtccccagcacttgaattgaaccatccattcatacaacttgcttgactcctgcaggcatctagtttgttgcctgtattttacagtttggacctggctgtactaaggagttcctgcagaaaaatgctgtcctgccatcaagctctgtgaaattttgggagtccagggcagaaggctgcattcatctt

SEQ ID NO: 470748 - DNA, 627 bp, Homo sapiens
tctccaccttgtacttacctgatcatgcatcctcctctctctactagaatgcaagctcatgagtataggagccagcttcactccatcatgctcatggagtggagccctgtgcccartatctagtagggtctcaatgaatgaatgaatgaatgaatgaatgaacctaaaattagactgaagatgcttgaagcacatgctaaaagctgggggattatatgaacaagacaggaaattcatattattgcctttcacaccacagctgtaagggctgtagaactaaaccaacaagcaaatacacacaacaaaagaattatcttccccagataggccaagtgcacatctccagacttggggtacacactgctggttacctacctagtacccatgtgcatctttttccttgctaatagaatcccagttttgttcaaggggacaatgtcctacattttaaaaataaaagctacatttctcatgtttttttttttttctttttcagtggagttcaccatctcagacaattctcaccagtgagaagcagaagattgctggcgattcagagaaagtttcattttcctgatacgaaggtatcctttccttcctgttgcctgtcttcctctttttttgcct

SEQ ID NO: 470749 - DNA, 627 bp, Homo sapiens
tctccaccttgtacttacctgatcatgcatcctcctctctctactagaatgcaagctcatgagtataggagccagcttcactccatcatgctcatggagtggagccctgtgcccagtatctagtagggtctcaatgaatgaatgaatgaatgaatgaatgaacctaaaattagactgaagatgcttgaagcacatgctaaaagctgggggattatatgaacaagacaggaaattcatattattgcctttcacaccacagctgtaagggctgtagaactaaaccaacaagcaaatacacacaacaaaagaattatcttccccagataggccaagtgcacatctccagacttggggtacacactgctggttasctacctagtacccatgtgcatctttttccttgctaatagaatcccagttttgttcaaggggacaatgtcctacattttaaaaataaaagctacatttctcatgtttttttttttttctttttcagtggagttcaccatctcagacaattctcaccagtgagaagcagaagattgctggcgattcagagaaagtttcattttcctgatacgaaggtatcctttccttcctgttgcctgtcttcctctttttttgcct

SEQ ID NO: 470750 - DNA, 627 bp, Homo sapiens
tctccaccttgtacttacctgatcatgcatcctcctctctctactagaatgcaagctcatgagtataggagccagcttcactccatcatgctcatggagtggagccctgtgcccagtatctagtagggtctcaatgaatgaatgaatgaatgaatgaatgaacctaaaattagactgaagatgcttgaagcacatgctaaaagctgggggattatatgaacaagacaggaaattcatattattgcctttcacaccacagctgtaagggctgtagaactaaaccaacaagcaaatacacacaacaaaagaattatcttccccagataggccaagtgcacatctccagacttggggtacacactgctggttacctacctagtacccatgtgcatctttttccttgctaatagaatcccagttttgttcaaggrgacaatgtcctacattttaaaaataaaagctacatttctcatgtttttttttttttctttttcagtggagttcaccatctcagacaattctcaccagtgagaagcagaagattgctggcgattcagagaaagtttcattttcctgatacgaaggtatcctttccttcctgttgcctgtcttcctctttttttgcct

SEQ ID NO: 470751 - DNA, 579 bp, Homo sapiens
agcttgttgacctgtgggagctcactctggccacgcagcttcctcgtgtctccacacagcctgcactgccgacacctcacctcacaggaacccccagccttgcattttctcccatctgcctcacrtgatgcagctcataggaccaggatcaggctcccttgtctttgaagcttctctgactcctcagggggagcagccccatgcctttggaaccccctgtggttttgtctcacatcctgttcaacagacagatgagcgtctttgttcaagtgacagtttcctctgaggctgcaagatccttcagggaggactcaggtcccctcactgtgggaagtcttgcttacttgactggtgccaggcttattatagaggctcaaacaaatttgtggaatgcatgagtgaatcaatgggtgcaataatgagtggatgagcgagtgcatgggcgaatgactgaatgagtgaatggacaaacagctcctgtgtctggcctcaccaggaaagtgtttcaattaaggcacctttcgagaaaattttcatagctgtcagactttttgtaacaatttatgttagaaatgtttc

SEQ ID NO: 470752 - DNA, 579 bp, Homo sapiens
agcttgttgacctgtgggagctcactctggccacgcagcttcctcgtgtctccacacagcctgcactgccgacacctcacctcacaggaacccccagccttgcattttctcccatctgcctcacatgatgcagctcataggaccaggatcaggctcccttgtctttgaagcttctctgactcctcagggggagcagccccatgcctttggaaccccctgtggttttgtctcacatcctgttcaacagacagatgagcgtctttgttcaagtgacagtttcctctgaggctgcaagatccttcagggaggactcaggtcccctcactgtgggaagwcttgcttacttgactggtgccaggcttattatagaggctcaaacaaatttgtggaatgcatgagtgaatcaatgggtgcaataatgagtggatgagcgagtgcatgggcgaatgactgaatgagtgaatggacaaacagctcctgtgtctggcctcaccaggaaagtgtttcaattaaggcacctttcgagaaaattttcatagctgtcagactttttgtaacaatttatgttagaaatgtttc

SEQ ID NO: 470753 - DNA, 634 bp, Homo sapiens
ctgctcagaagcagtttaatgccttcaggctgtgggtggggaaggcgggaggaaagggttgttggagtaacccaggtaaatttgccaaggttcccagcagggtttgccagctcaggctgagactgcctcaatccggtgctttcaaaccaatgctgagcggcacgattccttccttgtttgtcttgcactgaaaccaggagagggatttggtagctctcaccagctaggaaactagtataaacattctttacttacttggtttctcctctctctttcatcttttgtctctgctttctttttcctgaagccttattatacctcatcaaatcaccacacccaccaggatgaatttagggttgtaggcaaaacacagttaccatgttgggccctgcgaaggttcactactggtgtctcctacygtaaaaggcacagtggtggaaaatgagcatcacctgataccaagctccacctgcagaaaagaacaacctgagttgatgccacactgttgtgaacttgcttatcttgctgtgtcttgcaaccagagtatgtatatttctctcctgttgatgggaaaatgcaatgtcattcttttccatgagtcaaaaatctttggacatttggcctacgatgttga

SEQ ID NO: 470754 - DNA, 603 bp, Homo sapiens
ctgttgttaagagtcatgagcttagctggtgcttctttgtctccataataggatggggcttcagttcagggtaggaagatggaagtaggttatacttgttaggagaaatatttgttctgatagtgtgtktgtgtgtgtgtgtgtgtgtgtgtgtgtgtgtgtgtgtgagagagagagagagagagagagaagattgagtggggacttgggtttctgcctcagaatcatgaacttcactgacttctaaactctttcttagctcagaaatgcagtatcaatgtcctgactgagctcacccactactgtgttatgtgtcatattcccagacagaaatcaacatccctgaaacataattctataaggggtggtgtgtaatctagtttttaccttcctgggctttgaattcctgattctaattgcaaggcaaggcccataaataacaggtataataatactcgtttaatatagccaacacttactgagttatcattctgtcaggcgctagccttgtaaagcagtgcctaaatgtagttaacatttaactgttactggttttatatgcattgcctcatctaacgctcacaaaagaccctatgaagtagg

SEQ ID NO: 470755 - DNA, 603 bp, Homo sapiens
ctgttgttaagagtcatgagcttagctggtgcttctttgtctccataataggatggggcttcagttcagggtaggaagatggaagtaggttatacttgttaggagaaatatttgttctgatagtgtgtgtgtgtgtgtgtgtgtgtgtgtgtgtgtgtgtgtktgtgagagagagagagagagagagagaagattgagtggggacttgggtttctgcctcagaatcatgaacttcactgacttctaaactctttcttagctcagaaatgcagtatcaatgtcctgactgagctcacccactactgtgttatgtgtcatattcccagacagaaatcaacatccctgaaacataattctataaggggtggtgtgtaatctagtttttaccttcctgggctttgaattcctgattctaattgcaaggcaaggcccataaataacaggtataataatactcgtttaatatagccaacacttactgagttatcattctgtcaggcgctagccttgtaaagcagtgcctaaatgtagttaacatttaactgttactggttttatatgcattgcctcatctaacgctcacaaaagaccctatgaagtagg

SEQ ID NO: 470756 - DNA, 621 bp, Homo sapiens
gcaggggttgctctccaggcttctttgactgctgtgtcaggygaccacaatgtcctggcaaggacagcttaactcttgccaatgggactttcactgatttattcaaacactgactgaacacctaccaagtgccaggcatgtgtaagatgctggggatattgagggcacaccaagacagatgtggtccccgtgctcatgggcctcaaagtcgaaatgtgggacagtcaaaaacgtgtgagtgggcatagtaatttcataatgtatgagggctgaggaagttatgaccagactgctgagaaagaaaataatagaaaagcaagggatggatttcgaatggggcaattgtggcgagaccaaaaggataaggataagccaaagccaagagcatgagtggtccatctgaaaaacaaaagcagcatgtgtcaaggccatgaggcagaaaaagactgacatgttccaggaaccaaaggggcactggagtggaggcgatgaagcccgagaagggaggcacgagtaaggtctttgaaatgtgtatgacacaggttatgcaggactcactaaggctttccaactgcattcttcatgcaatggaagtcatttgaaaggctttaagcaggataa

SEQ ID NO: 470757 - DNA, 621 bp, Homo sapiens
gcaggggttgctctccaggcttctttgactgctgtgtcaggcgaccacaatgtcctggcaaggacagcttaactcttgccaatgggactttcactgatttattcaaacactgactgaacacctaccaagtgccaggcatgtgtaagatgctggggatattgagggcacaccaagacagatgtggtccccgtgctcatgggcctcaaagtcgaaatgtgggacagtcaaaaacgtgtgagygggcatagtaatttcataatgtatgagggctgaggaagttatgaccagactgctgagaaagaaaataatagaaaagcaagggatggatttcgaatggggcaattgtggcgagaccaaaaggataaggataagccaaagccaagagcatgagtggtccatctgaaaaacaaaagcagcatgtgtcaaggccatgaggcagaaaaagactgacatgttccaggaaccaaaggggcactggagtggaggcgatgaagcccgagaagggaggcacgagtaaggtctttgaaatgtgtatgacacaggttatgcaggactcactaaggctttccaactgcattcttcatgcaatggaagtcatttgaaaggctttaagcaggataa

SEQ ID NO: 470758 - DNA, 621 bp, Homo sapiens
gcaggggttgctctccaggcttctttgactgctgtgtcaggcgaccacaatgtcctggcaaggacagcttaactcttgccaatgggactttcactgatttattcaaacactgactgaacacctaccaagtgccaggcatgtgtaagatgctggggatattgagggcacaccaagacagatgtggtccccgtgctcatgggcctcaaagtcgaaatgtgggacagtcaaaaacgtgtgagtgggcatagtaatttcataatgtatgagggctgaggaagttatgaccagactgctgagaaagaaaataatagaaaagcaagggatggatttygaatggggcaattgtggcgagaccaaaaggataaggataagccaaagccaagagcatgagtggtccatctgaaaaacaaaagcagcatgtgtcaaggccatgaggcagaaaaagactgacatgttccaggaaccaaaggggcactggagtggaggcgatgaagcccgagaagggaggcacgagtaaggtctttgaaatgtgtatgacacaggttatgcaggactcactaaggctttccaactgcattcttcatgcaatggaagtcatttgaaaggctttaagcaggataa

SEQ ID NO: 470759 - DNA, 591 bp, Homo sapiens
tgtttagatttagtttcaccattcaacaaattcaacatttgatggttttcactcatcaaagaactaaatcagcagtttccctacaaattggtaaaagctagtcctttcatgatctgaaatcccgtgcctggattgggtctggataaccatagaggggaagaagtgatccatgtttagaccttactttttgaaatcaataaggtaatgccacagactkcttagatcggattctgcctgcagatgtccatgtctcctgagacataagggcagttccatctcaaaagcctgggtagggtttgacagaggtagctagaagaccactgagttaagattcccttgaccatggacaggctcctgtcttttctcataggacatagctagaaggctagaagaccactgagttgatattcccgtggtcatgaacaggctcctatcttttcttctaggaaaatagagatttacctcattgctacatggatttgaacttttacttttgataatccagggtcatccccaacttgatttttgaagttactgagttttttctttggactctgaccttaatccctgcagatgctcccaagccagaga

SEQ ID NO: 470760 - DNA, 591 bp, Homo sapiens
tgtttagatttagtttcaccattcaacaaattcaacatttgatggttttcactcatcaaagaactaaatcagcagtttccctacaaattggtaaaagctagtcctttcatgatctgaaatcccgtgcctggattgggtctggataaccatagaggggaagaagtgatccatgtttagaccttactttttgaaatcaataaggtaatgccacagactgcttagatcrgattctgcctgcagatgtccatgtctcctgagacataagggcagttccatctcaaaagcctgggtagggtttgacagaggtagctagaagaccactgagttaagattcccttgaccatggacaggctcctgtcttttctcataggacatagctagaaggctagaagaccactgagttgatattcccgtggtcatgaacaggctcctatcttttcttctaggaaaatagagatttacctcattgctacatggatttgaacttttacttttgataatccagggtcatccccaacttgatttttgaagttactgagttttttctttggactctgaccttaatccctgcagatgctcccaagccagaga

SEQ ID NO: 470761 - DNA, 333 bp, Homo sapiens
gtgttccgatttcagtccatataggtcattgtttatcatctttacattgttctatctttcattcactctagatgtaatattcaaagcaagattttcagctccctacaggcagaggacatgtttctcttcttcctataacctgtacagttcttaatgtagagatagttatagagaagagctctaaaaatacagactgaagtgaattatgaggaaaaactgaaataaaaataaaatctgaatatgccatctgcctctggatttttggaagttgtaaagaaaatgttaaactgcctacattggtagytgtatttatatttaccttggtactcttag

SEQ ID NO: 470762 - DNA, 532 bp, Homo sapiens
tgctcgctaggactgtagctggagtgtttagtagatgaggggaatagtttgtgcaacggtaagctgatgttgtattgattttattttaatcctcaatgaaagamactcaacaagaatacaaaaaaagaaaaataaaacaaaaagaacgaaagctgattaagtgctgttagactgcttaaagagcactaagaaagcctgtctcaaacaacctggttcatgttattgctcaacaagggagagagctgctaagagtaaagccttaatggtatcttgaaaaaaactttgggtttttatgagcctaggattgtaattaggtttagagcttgagtggtttggggatgggacttaacaatttgggattaggtaaagcaggccagttgaagtcactttaattgacatgggagcatagagcagggtttttagcaattgttacacttagtgtcttagggtgtttgcttttatctttcaaagcagtctgtggcaaagcgagctgggtcttgcttatccacactcttggtaaacatccaacttt

SEQ ID NO: 470763 - DNA, 655 bp, Homo sapiens
cttctctcaactctggatctagcttgtaggactaaattaaccatttgtagtttctgsgcaatgtaagtaggaagtgggttttgttattgttattattattatgcacacttcctatagtaaatattttttgtttttgttttttgagctcctacacgtcttgctgggtataccaagaatgcaaggccctcagccctctttacccaggacatttctcaggtgtgggtttgctgtggccaaccataagagatgaggttgtgtcacttgaaataaagaataggtgtgtttattgcttcccgtaaaagcagcatattccttaagctcagtgctccttcactgtgaaatgaacttactatgtgggcaccattcatctgggcctgtggtgtcacccatctgggacttgaggacaaggggaacctttgcaaacatgctgatgctcacgctatgtcatgaataataaagtgctttgtctccagcccaagagtctatgtcttctaccagtgttcatgaaacaagatgctaacttatttacttttaaagtagggtaaaatcaagtcccagctccttcaattttgtgttacttttataatagcaaatcagttgctatgattacaaaattagaaaatattcttttctaacaaattgttatttccttcca

SEQ ID NO: 470764 - DNA, 655 bp, Homo sapiens
cttctctcaactctggatctagcttgtaggactaaattaaccatttgtagtttctgggcaatgtaagtaggaagtgggttttgttattgttattattattatgcacacttcctatagtaaatattttttgtttttgttttttgagctcctacacgtcttgctgggtataccaagaatgcaaggccctcagccctctttacccaggacatttctcaggtgtgggtttgctgtggccaaccataagagatgaggttgtgtcacttgaaataaagaatasgtgtgtttattgcttcccgtaaaagcagcatattccttaagctcagtgctccttcactgtgaaatgaacttactatgtgggcaccattcatctgggcctgtggtgtcacccatctgggacttgaggacaaggggaacctttgcaaacatgctgatgctcacgctatgtcatgaataataaagtgctttgtctccagcccaagagtctatgtcttctaccagtgttcatgaaacaagatgctaacttatttacttttaaagtagggtaaaatcaagtcccagctccttcaattttgtgttacttttataatagcaaatcagttgctatgattacaaaattagaaaatattcttttctaacaaattgttatttccttcca

SEQ ID NO: 470765 - DNA, 655 bp, Homo sapiens
cttctctcaactctggatctagcttgtaggactaaattaaccatttgtagtttctgggcaatgtaagtaggaagtgggttttgttattgttattattattatgcacacttcctatagtaaatattttttgtttttgttttttgagctcctacacgtcttgctgggtataccaagaatgcaaggccctcagccctctttacccaggacatttctcaggtgtgggtttgctgtggccaaccataagagatgaggttgtgtcacttgaaataaagaataggtgtgtttattgcttcccgtaaaagcagcatattccttaagctcagtgctccttcactgtgaaatgaacttactatgtgggcaccattcatctgggcctgtggtgtcacccatctgggacttgaggacaaggggaacctttgcaaacatgctgatgctcacgctatgtcatgaataataaagtgctttgtctccagcccaagagtctatgtcttctaccagtgttcaygaaacaagatgctaacttatttacttttaaagtagggtaaaatcaagtcccagctccttcaattttgtgttacttttataatagcaaatcagttgctatgattacaaaattagaaaatattcttttctaacaaattgttatttccttcca

SEQ ID NO: 470766 - DNA, 600 bp, Homo sapiens
aggttattatattaagtaaaataatccaggcagagaagtacaaatatcgcatattatcaccatatgtgggagctaaaaaggtgggtctcatcgaggtagtgcatagactggtggttatcagaagctgggggggtgtatgtgtgttgagggagcagggagacacagataagttggttgaggggtataaaaatacatttatatagaagggataagttctagtattcaatagcacagtggagaaactacagttaacaataatttactgtatatttcaaaatggctagaagagaattgtaatgttcccaacataaaggtaaatgtttgagttgacggacatcccaaccaccctgatatgatcattacaggttgtataagtgtatcaaaatatcacatgtatccccaaaatatatactatgatgtcccaatttttaaaagaaaggaaagagagagactttttaataagggaaraaagagaaaagctagaggggacctagaccgtccagcgttgctgtgtggtgctgtggccaccagaggacagcctaaccacacatgctgtggaactctgccttccagagccctgagggtgcaatgttttccaca

SEQ ID NO: 470767 - DNA, 551 bp, Homo sapiens
atgaaagatctacaggtgttcattgtattactattttttggtaggctttaaaattttcaaagtagaaaattgaggaagagaaagaaattcatgggaataatcaccaaatttaggatagtaatgaactatcctaaatacacaggggcttccacaatattgataatttatttcttgaggtgggtggtaaagacatgaatattcattgtactgtcatttatactttttatgtagattaaatatttcataatgagcttaaaatcagttaaagaagaaaaaaagaagattattattttttaagcaaaaggatttcacctttgtaagacttacacaattttcacatagcttcatttctacaatcacaacaatcctgaggtaaacaggcagggtctaatcattctctttttacagagggagaaccagcaacttagggaaatcaaaayggggacactaacaggatttctgtggaaatttaagtaaatgagaatttatggtgaattttttattctaaaacgaatacctcaccttggccaaaatgggacattacccaaggt

SEQ ID NO: 470768 - DNA, 551 bp, Homo sapiens
atgaaagatctacaggtgttcattgtattactattttttggtaggctttaaaattttcaaagtagaaaattgaggaagagaaagaaattcatgggaataatcaccaaatttaggatagtaatgaactatcctaaatacacaggggcttccacaatattgataatttatttcttgaggtgggtggtaaagacatgaatattcattgtactgtcatttatactttttatgtagattaaatatttcataatgagcttaaaatcagttaaagaagaaaaaaagaagattattattttttaagcaaaaggatttcacctttgtaagacttacacaattttcacatagcttcatttctacaatcacaacaatcctgaggtaaacaggcagggtctaatcattctctttttacagagggagaaccagcaacttagggaaatcaaaacggggacactaacaggatttctgtggaaatttaagtaaatgagaatttatggtgaattttttattctaaaacraatacctcaccttggccaaaatgggacattacccaaggt

SEQ ID NO: 470769 - DNA, 606 bp, Homo sapiens
aaggacccacaaaagagaaggatcaatgtgagctagcagcctcagagaagatggtttagtaaagacggtgacgatgtttgaactgcacctcgctggacagaaggaaaacggagaacattccaggaaggtgggcaaagtatgtgcaaagacataaaacaaagttactgggaacagaaaagaaccttcattatttagcacaacagcatgcttgtgttatgcatgctacttaaagcaaagtcatctgactatgcatgtggcccatgctaccacacygcttgtaatagagtagagcagtaaaaatcccctgagcgggggttcttgggcaggagaattatacagaaacacactgatggtgatgctcacagcagatgctcaatacaccccagtgaaatataccatgaacacatccgtaaggaagtaaaatgggcagcaacaacgtgaccctcgggaacaagaaaagcatcccatcgcaatgccgatctatttgctgtaagcttggtgacacaacacaaagctccagccaactccacctggagccagactggaccccaggcctaagcactgaaccgcaagcagagaaaccatgcaagcactggccaagtgagc

SEQ ID NO: 470770 - DNA, 436 bp, Homo sapiens
aacaaagttactgggaacagaaaagaaccttcattatttagcacaacagcatgcttgtgttatgcatgctacttaaagcaaagtcatctgactatgcatgtggcccatgctaccacaccgcttgtaatagagtagagcagtaaaaatcccctgagygggggttcttgggcaggagaattatacagaaacacactgatggtgatgctcacagcagatgctcaatacaccccagtgaaatataccatgaacacatccgtaaggaagtaaaatgggcagcaacaacgtgaccctcgggaacaagaaaagcatcccatcgcaatgccgatctatttgctgtaagcttggtgacacaacacaaagctccagccaactccacctggagccagactggaccccaggcctaagcactgaaccgcaagcagagaaaccatgcaag

SEQ ID NO: 470771 - DNA, 495 bp, Homo sapiens
gttgtcataaagataggactttatcttccctttaaaatcagttaactaacacagatggtggccccacttaccaggtaaatttaggatgaactatgtgtaagaaacagtgctgtcaagccctctttcttgaggactgattatcgtatatcttgagaacatatatgtaatgggttctatctgatggctgtataacaagggtaagatttgtttctgtctttgcgtctccttgcaaattgcctgtaatgcatatcacattgtggtttaatgcttatttaatgataaaattgtttcctttctgttctacctttgtggagagcttttctgagttgagggaagattttatgtttaatgatatcctcccctctacayagggcgaacaacttcatgtctctcttctcccagaggcatgaggtacactcaaactctgagcccatgctgtgagtctagccagtgctccctcacagcttcatgcctctggaaagttctcaaagttga

SEQ ID NO: 470772 - DNA, 547 bp, Homo sapiens
ctgtgagtctagccagtgctccctcacagcttcatgcctctggaaagttctcaaagttgacagctgtaggcctatggaagcccttgcacccctctaagcttgatttgcagctaccctgccctaggtcttgttgtcctgctcaccgctgtggcccagtgcagcatgcaggtggctgaacaagtgttgaattcctggtctccaactaacgtgtaaagtaacccaaggccaaccagagtgggaggagaggcccccgggagccaggactggggagatggatgagaagcccttgtagggtcagtgcagcatggcctctgaggctgtyggctgtctcccttctgaaacttttcctccccagtatggttcacccagtcttctttttgccatattgatatctcttagcttctaagtgggttatagggggcaggacccacagcccccagctgctcagagtcccacaaaggggactcccagctcccagttcactctaacagattttgggaatgtggtttctcccgggttggcctcccacatctagagacagtcaagg

SEQ ID NO: 470773 - DNA, 521 bp, Homo sapiens
tgcgctcaattcccagctcccagggagaggttgtggcagggraccctgggaaatgttgctttaggccaagccactgcatgactgttggcccagaggcccctaaattccttagattctgaggtaagctcacaggtcccaccaggacatggagagaagggtccagagcccgagacttccaaagaaaacaccggctgtctttcagaagactctaagtgcagaggctgagccaataggcacatggcaggagaggaggcagaagttcagggactgtgaactgcccagacctgctacttctgctactatgtgtcctggggcactcatttagcttctccaggtccccacctaccgcagcacagccagcaattcctgccctcccagatatgaaggtgccaggacccttgggagcacccaggtggatatgcataacctccagatatacaaggccagtggtcatgtcacggcgtctgcttttacaaactgacgtgtttgtttttgtttgttttgagacaaagtctcactct

SEQ ID NO: 470774 - DNA, 521 bp, Homo sapiens
tgcgctcaattcccagctcccagggagaggttgtggcaggggaccctgggaaatgttgctttaggccaagccactgcatgactgttggcccagaggcccctaaattccttagattctgaggtaagctcacaggtcccaccaggacatggagagaagggtccagagccygagacttccaaagaaaacaccggctgtctttcagaagactctaagtgcagaggctgagccaataggcacatggcaggagaggaggcagaagttcagggactgtgaactgcccagacctgctacttctgctactatgtgtcctggggcactcatttagcttctccaggtccccacctaccgcagcacagccagcaattcctgccctcccagatatgaaggtgccaggacccttgggagcacccaggtggatatgcataacctccagatatacaaggccagtggtcatgtcacggcgtctgcttttacaaactgacgtgtttgtttttgtttgttttgagacaaagtctcactct

SEQ ID NO: 470775 - DNA, 558 bp, Homo sapiens
gagaaatcttccttattgtctgattattgttttcacacagtacattattcttataatgtatacatgtagaacaggtgcaatatcttctcttacttcttaaagacttgcatcatgacttactgtctctctaggccttgatgtttytgaagaatgcaggccagctattctacagaatgggctgcaatttggatttgtctgacttttcctcatgattagatctagtcatgaatctttggcaggaatatcacaaaaagaatgtgagcttttctcagtgtcatagtatatcctttaaagaaaaagtcagtggttttcagtatacttaaaaaattgtgcaaccatcaccaccatctaattttgaccaatagaatgtggcagaagtgacaagcaatccaaacctaggtctcaagagaccttcgcagcctctgctctcctgctgggaattttcctatcaccatgtgaacaagcccaagctggcctgctgcaggctgagaggccatgtagagaaagtccccagccaccatggccattgcagctcaacagaagctccagacacgggag

SEQ ID NO: 470776 - DNA, 558 bp, Homo sapiens
gagaaatcttccttattgtctgattattgttttcacacagtacattattcttataatgtatacatgtagaacaggtgcaatatcttctcttacttcttaaagacttgcatcatgacttactgtctctctaggccttgatgtttctgaagaatgcaggccagctattctacagaatgggctgcaatttggatttgtctgacttttcctcatgattagatctagtcatgaatctttggcaggaatatcacaaaaagaatgtgagcttttctcagtgtcatartatatcctttaaagaaaaagtcagtggttttcagtatacttaaaaaattgtgcaaccatcaccaccatctaattttgaccaatagaatgtggcagaagtgacaagcaatccaaacctaggtctcaagagaccttcgcagcctctgctctcctgctgggaattttcctatcaccatgtgaacaagcccaagctggcctgctgcaggctgagaggccatgtagagaaagtccccagccaccatggccattgcagctcaacagaagctccagacacgggag

SEQ ID NO: 470777 - DNA, 581 bp, Homo sapiens
ttatgtgtaatttaccacaatgaaaacttttcttaatgtatttattatgcctgtttacatcagcacaaaatattgaacagaaaaaaattctatgagatggcatgtctaggaggcttgtgtatattctggctctagtgacactaaaagcagtgatttggtgattctaaaaggaggaaagtaggcagggaagaaagggatcttgaataatgtgggaaagtcttctagaaagcccttcacccagaaggtattcaggtttgcttcactaaacgaatgccctgccactttgtttataacaaaagaaggttcataatayttattttttctgaaatttctgctttgcatacagggccatactgttgcccaattccaaagaacacaactggagttttagtctctgtaaatagtgctgcctggagttgtggaatactccgttgtatccacagttcctagaatagtacatggtaaataggaaacagtagaaggaaagaaggaaggaaggaagaaagaaagaaaagaaggaagaagaaaggaaggaggaaaaaagaaaggaaagaaggaaaggaattatatatataaactcc

SEQ ID NO: 470778 - DNA, 590 bp, Homo sapiens
gaaagttggaaactactgccacaacctgcctccctgctcaactctcacaaattgtttctcttgtgtctgcatctgatcatagcatacaagtctccaggcctataaaattgctaccttctattcttgctccctttagccatttgcttttggttatttgaaagcagatagtctaggcaggaccagctacagaatttgcaaagcccagtcagtgcaaaataaaaatgtggggccccttgttaagaaattattaagagtttcgtaatggcaactgcagagcattaaaccaagtgtggggcccttctaagagtggaagctggtgggactgcacagatcacatacccatgaagctggccttgaacttcaactttgctgtaaaacaggtgagctaagttgtgttatgggtggtgcagaggatgggaaagaaggaggcagcatagacttrttgcctcgttacacttcttgaaataaaagagatacgtattttatagtctgacaaaatcaagccaacctgaagctacccacttgtgtctatcattagcactttactcattaagcagatggattaatcatgggtaaacaaaagggaacag

SEQ ID NO: 470779 - DNA, 615 bp, Homo sapiens
ctttgctgtaaaacaggtgagctaagttgtgttatgggtggtgcagaggatgggaaagaaggaggcagcatagacttattgcctcgttacacttcttgaaataaaagagatacgtattttatagtctgacaaaatcaagccaacctgaagctacccacttgtgtctatcattagcactttactcattaagcagatggattaatcatgggtaaacaaaagggaacagctgaaaataccattcgctatagctaatggcaattctaatttgaaaatgaaatgataggtgggtctatcagttatcaagatacattaattaaatgaagcattctcccaactattgtgtggggtgctcaaaggaggagaattgaggcataccagcttcaractacattctccatggcactcgaaccaagtctgggagtgaggatcaataatgagccagatctagatttcagagagggacctccttcacctccattcccaaagtgaggcctctgacagttgtggagtgaaacagaaaagatggagaaaaagatacagggaaggccctaacactaaccttaatcctaacttacctatagattggccggttagaggaactccctctgaaaaggc

SEQ ID NO: 470780 - DNA, 615 bp, Homo sapiens
aaacaactctaagataatatagcaaaatgatggtccaagaagacacagagatgaaacttgaaggaaaaaacagggacatttatacaaccacacattaaccctgctgwgctcttcatctgagctatctccaaaaaataaaattaaatatataatattatatatatcaacttattacacactcttggattcagaaccccaggtaagtttactccatcaaatttcacaatggtcagctagtccacacaaccaactgcagatccaaaccactagcaaaataatcattatcagaaaagtacatattctcccacaaatgtcatataaatagccttgaaaaagagttgtgttcatagtgccccccaaatccaaataacaggtgcatttgtcctgaattcctcttccatagttgtcacatcaagctccactcaaaatattgttttgatcacatttccctctcttagggacctaaaaattcaaccctggaccgagacaacccataaaaactgtagcaataaaaaagataaaaggtgcagacttttaaaataggtctgagaatgtcgttgtttcctgtaggtagaactgcaatgatataaaatcctggttagaagcaaggaagca

SEQ ID NO: 470781 - DNA, 603 bp, Homo sapiens
gggcgtgatttattggttttctatctagtgctttctgtttgtactgaaaatatgcaatttgttttccttctgaaacaatcaaagtgaattattttaaattgatgcctgcttaactcatacgggtggctcaacctgtcaatgatcaaaaagtcacttaaaagcataacgcatggcagccccctccccgcccaccaagtatttggtctagactgttgtttacactgactttctttattcatgtccccaccatctgatgtctctggaagatgctcagaaatatggcaagaggtagaggaagtgagtcttggagtttttattggttgagtaaccaaaaacaatgtactgtggtcaaatcagccagaactctatagacagcctacagattttaagatttctaagagaaatagycatgtgaaaaatgacttgccctactataaagtagaaatactgtcagcccacaaatgatcaactctgccaaatacattcctattaatttgagtcacaaacatgtattaagcacctgtgctgtgtactggcattgcagtggtagatcagacagaacatgcaattcctagtcttaggggcatatgacctacaaataaa

SEQ ID NO: 470782 - DNA, 417 bp, Homo sapiens
gcttttcccatctgcaccaaacctctgatctccaggcttggcaaattagttttcagacaaataaaaaatattttgacagtaaatccttgtttataatatctccctggggagggagtaatcagtgtagaatatcaggcaggccatcagtttaaccacaatttgagtattcaatctggtcgaacatawtttcctgctttgttgttgaatattttctatttttctgtcttttgttattttcttcaaaatcccactgcccaaataataataatattgtagagggttaattgtcataaggtaatcataaccattggaaaaaatatggttttggcttgttctcacctatataagaaaatgagtttgaatttataaactaacagtgttattctttgcagtactataaaaacatgcaatctctat

SEQ ID NO: 470783 - DNA, 572 bp, Homo sapiens
tgaaaacttagcactaggaaatgttctttcaaaatggactcaaaagcttaatgtcttgaaatggtttgaatttacaactgaaagtacacagaaagatatcttttggtaaatgttagtattgaaacatagatacactaaagagcactgtatatacaataaagaacacagctcaacaaatttttataaatttgaatgcacccaggtcaccaccatctacatcaagatagagarcattattagaatattagaatcccagaagcctcctatcctctctcaatcatcctcaatcattattcctccaaaggtaaccaatattctgacttctatcaccatagttttagctttggttgttgttgaagtttatatgaatggaatcatacattatcacatactcttgtgtctagttttttgaaaccttttttcaattgatatataatagttgtacaaattttggaggtacatgtgatttttgatacacctacataatgtgtaatgataaactcagaataattggaatatccaccacttcatacatttatattttctttgtcttgagaacattctaatatttc

SEQ ID NO: 470784 - DNA, 636 bp, Homo sapiens
aaaagatatttagtgagcacttgtcaaaaatttatttacctaattaataaagaaaccaccaggatgacaaagctcatacaaagataggggaaactactatatatagccaaagaaagtgctgaaataagattgctcagtaagatgctaaaatcacagcctttgctgtgatctcatctataagacagaaacgtttgcatatttaccaaacaaaatcatttgcaacttttcaatctttaccaaggtaacatctaattttactgagtctgaatcccaatcaaytgtaagtcaggcaatgttagattgcctaccagtgcctcacacatgagtgtgcatcagaatcacctggagggcttgataagaaagggtgttagatctaacccacagtagtacacctagggtgaggcccaagaatgggcatttctaacaagtgctagatggtgcctctgctgctagtccagggaccaactttgagaaccactaccctagcctgatgttaaaaaggcttgcagtaatatttctgccttattttcaagtgtcacatatagcagaataaattgttaaaggcttttaaatagaccaataagatcattagatatccctgatagaaaaccaggcattgtctaatttcagattttt

SEQ ID NO: 470785 - DNA, 475 bp, Homo sapiens
tcttaagcatgacaccataattatcatctcttccctttacatcatgttctccttttccttctttcttgtaattgcttcagaggagcaaccacactggaaattgacaccttctttcttctgtaatatatttcactctaatcagacttgccagcagaatgacttgggccagagcacagccctgtaatttaatgagtaaagtgcatttagcaggtaatagatgcctcraaaattcactttagctacatttagctttggtcacagcaaataattaagagcccttggctactcttccttctcaaataaatacaatgtgaatctagaagatggtaaattaagtttcaaaacctgctggtcggcctcatatcttctatcagccaagtggtcgccagagtaaataacactcatttctctccgtgtcaagacttggtaagtttggactgctctgagtgtggctgcatgttctcctttccctttg

SEQ ID NO: 470786 - DNA, 475 bp, Homo sapiens
tcttaagcatgacaccataattatcatctcttccctttacatcatgttctccttttccttctttcttgtaattgcttcagaggagcaaccacactggaaattgacaccttctttcttctgtaatatatttcactctaatcagacttgccagcagaatgacttgggccagagcacagccctgtaatttaatgagtaaagtgcatttagcaggtaatagatgcctcaaaaattcactttagctacatttagctttggtcacagcaaataattaagagcccttggctactcttccttctcaaataaatacaatgtgaatctagaagatggtaaattaagtttcaaaacctgctggtcggcctyatatcttctatcagccaagtggtcgccagagtaaataacactcatttctctccgtgtcaagacttggtaagtttggactgctctgagtgtggctgcatgttctcctttccctttg

SEQ ID NO: 470787 - DNA, 549 bp, Homo sapiens
tcgctgtgtcgggctcccagttctccagtgcagggctccctgggatcgtgacctaaaacagggctccttccccagggtcccaacatgactctcagctgctgctggccgagtaagaaccgagggcagtaagacctcagcgcagtgagccacgaagggcagaggcagaggtggcctgctccarggaggaggccctgcccagctcacccaccgccatgcagaggcagcaactcaggaagggctgcctttgtgggagagaattttcacctcacaccagtaatcgtgacacactcagtatcctcaaatctaagcagtcccatcaggcatttctcctcccaggaaagagtaaagatgagaagagacgtggcagctttcccctccccatcagatcgccaagggggttgagttaataagcgaatttcctgccatttgagatggtgattaaatccgggacttttagcatatggaacagaccaagagggattgtttcagagagggcatctcatgtgcagaaaaacaggttgtgaagtcaaacgcagctcagattctcac

SEQ ID NO: 470788 - DNA, 678 bp, Homo sapiens
acacaggagtcttcagacccagagaaggacggtgccaagggccccaggggcagcaaggccttggtggagcagccagagctgtgcctgctcagcagccagtctcagagaccagcactcagcctcattcagcatgggtccttgatgccagagggccagcaggctcctggctgtgcccagcaggcccagcatgcaggtggtgggacactgggcagcaaggctgctgccggaatcacttctccaatcagtgtttggtgtattaycattttgtgaatttgggtaggggggagggtagggataatttatttttaaataaggttggagatgtcaagttgggttcacttgccatgcaggaagaggcccactagagggcccatcaggcagtgttacctgttagctccctgtggggcaggagtgccaggaccagcctgtaccttgctgtggggctacaggatggtgggcaggatctcaagccagccccctccagctcatgacactgtttggcctttcttggggagaaggcggggtattcccactcaccagccctagctgtcccatggggaaaccctggagccatcccttcggagccaacaagaccgccccagggctatagcagaaagaactttaaagctcaggagggtgacgcccagctccgcctgctgggaagagctcccctccaca

SEQ ID NO: 470789 - DNA, 482 bp, Homo sapiens
attgccagttggttgacaattcccaaattgcctttgccagcgcagctctctctgcttccttccaggctacaaattcaccggcttcctgaacatttccacttggataatccacaggcccttccaactcaacatgtccaacaccgaactcatgagcccctgcctttcctcccaggagcygggatgtacccctcccccaggtcaccccgccaaaggcacacttttgcagggtctacctacctcctcaccctatccagtcaggcactaatgaattttcaaaattgcgtgttccagattggggcctggcagccccacgctcccctcatgccctgcatcagacctcatcctctttccacagcagcctccacctttctctccaaccccatcctctttactacagccagagtcatccacaaaaaatgcctgtctgattacaccattctgctcaaaaccctcccatggtccccagtgttaggatctttcca

SEQ ID NO: 470790 - DNA, 608 bp, Homo sapiens
catctttctgaactgcctctttggttcttttctgtatctgctccctacaacttgaaatgcaggaatgcatgcaccctgggatgaatggggagatggggctcccttacttgaaagcagggaatgatgttsacttgttatccttaacccccgtttgccataacaaacaatgaggatgcatctcttctgcctgctttggcgtccctgaggggccaaacaagggccaatggccataactggctgtcaggggtacaaatagagctaagcttacttggatggagcctgcttaggggtcagggtcctggccatactcttccgccccttggagcagggcagtgttggcatggtggcgcactgttccatgtgctattgggagataaatctcactgttttcttacttcataaagtcccgttggaattgagaccctggggattctgctagtggagagcactaagctaggtgtttgccagggctgcagctatggccaaggcttctctggatcaattggttggacatgtgccctctgaggagtgttctcaccctctcctccagcatgtctgccccagggctgcctggcaaaagtcttagtcctgctctgatttcacactgg

SEQ ID NO: 470791 - DNA, 608 bp, Homo sapiens
catctttctgaactgcctctttggttcttttctgtatctgctccctacaacttgaaatgcaggaatgcatgcaccctgggatgaatggggagatggggctcccttacttgaaagcagggaatgatgttgacttgttatccttaacccccgtttgccataacaaacaatgaggatgcatctcttctgcctgctttggcgtccctgaggggccaaacaagggccaatggccataactggctgtcaggggtacaaatagagctaagcttacttggatggagcctgcttaggggtcarggtcctggccatactcttccgccccttggagcagggcagtgttggcatggtggcgcactgttccatgtgctattgggagataaatctcactgttttcttacttcataaagtcccgttggaattgagaccctggggattctgctagtggagagcactaagctaggtgtttgccagggctgcagctatggccaaggcttctctggatcaattggttggacatgtgccctctgaggagtgttctcaccctctcctccagcatgtctgccccagggctgcctggcaaaagtcttagtcctgctctgatttcacactgg

SEQ ID NO: 470792 - DNA, 603 bp, Homo sapiens
agctttttctccagatgcagcgcactcagactgagccccctccctctacagcctcattccttagttcccggagctggcaagggctggagccccgcctgggtcagacgccagtgacagaagctgtgagtggaagacgagggattgccatcgcctatgaggatgagggaagcggctgataccatgtggggctggagacatagatggacttatgaatggctgctaggacctttagtgctccctgcaccaacctcccatccccctgccaagatccttgaaggaccctggaaggagggagagcaggcagcccttcacaggataggatccgtctctgtcctgtcctggcactggcacaagctcagcmcatgcccagtaatgcgtgttgtttggctgatggaataaagggcttagggacttccctgaggcctctggacccatctgtcttcctgagggcagcccaggacctttggccaatcccagttcccaggctgcagttgagggtctgtccttgtcaaaaggcaggtgctagacagtctagaccagggtttctcaaactcgtacttgacatttggggccagataattctttgttgtggggctgtctggt

SEQ ID NO: 470793 - DNA, 572 bp, Homo sapiens
tgggcagactgctgatcgagttcacctcacccatgcccctggagcgggtgcasagggagaacccaggcgtgctcatgggcggccgatacacaccgcccgactgcaccccagcccagacggtggcggtcatcatcccctttagacaccgggaacaccacctgcgctactggctccactatctacaccccatcttgaggcggcagcggctgcgctacggcgtctatgtcatcaaccaggtgcccatgcgggggtccatgtgcctgttggtgtatatatgtgggttgggggcgtttgtgggtccttgtctgcccgtgtggatatgtggatggacctgggcgtgggtagtcggtgtttgtcagtgtgcacaggaatgtgtacgcacagtgtgtgcatgtgaatgttggcatgcacactggcaggtgtgtgcatggtctcagaaggggttgagccccactctctacccttggcaggcctcaccccatggtggtgcaggccttgggtatgctgtaggaggagatgttgagggccctgaggagagggagttagaccctgaaagaaggatgaagcctgta

SEQ ID NO: 470794 - DNA, 522 bp, Homo sapiens
gttattctcataatttaattagaagagatacatatagaaaaaccaaggagaagcttmttggccctggcccttgctcaccctttcctcacttttctctttaatgttattcttgatgctactatttattttgtccattataccttcaatgcatatttgaatctgtctacatctcttctgcctttactgagtatcctaatctctcaaactatgcaataacctccaatttattttcaaaatatccactctggctatattccattaactatcataacaacctgagtaatcttttaaaacatgtaaaacagatcatttcattttcccacttaaaatattttttataaaatacaaaaaatagcacttcaagtattcatacatttggaaattctaaactatcaaaatgaaataaataaataaaatatttattttagaatggaaataaaaataaaatactgtagattaactttaagagaggctttcaagtggtatttaaagggaaaattataaaagtactacaaaaaagat

SEQ ID NO: 470795 - DNA, 636 bp, Homo sapiens
ccttcacatttatacataaataatatatatgcatataaatacttacatttgtgggtgtatatattttaaacaaagtagtagcatatcacaaatgattcatgtagaaatgtgctaggcaagtgtaacgytggactatggaactttacctgtggtttataaaatgaacctcatttacaggaagagcacaaatttaagcaataacagaaagaagtttatccacattccaaaatgattgctagggttaatatgccagattgatttattgatccactaccacattgccaagaaattaagtggaggataaacatcacattacaacttaggaaagggaaaaagaaaagtcaccacgagaaaaaaaaaagtgcttaatgttaaattctgaaaatgtttaggggtctacacgactgttttcaccacatatttttctatttattttcaattcttgtgagatgtgtgctggtgtgagaattaaaatggctttcatgtgttaagttgttggtttataagctttttcactatcacaggaaagagaaagttggaattgaattacttgtttctaatatataattcatagggggaaaaaatttcacgactttgatttttagaaaattttatgaacttttctttgtttccttc

SEQ ID NO: 470796 - DNA, 575 bp, Homo sapiens
ttacatttgtgggtgtatatattttaaacaaagtagtagcatatcacaaatgattcatgtagaaatgtgctaggcaagtgtaacgctggactatggaactttacctgtggtttataaaatgaacctcatttacargaagagcacaaatttaagcaataacagaaagaagtttatccacattccaaaatgattgctagggttaatatgccagattgatttattgatccactaccacattgccaagaaattaagtggaggataaacatcacattacaacttaggaaagggaaaaagaaaagtcaccacgagaaaaaaaaaagtgcttaatgttaaattctgaaaatgtttaggggtctacacgactgttttcaccacatatttttctatttattttcaattcttgtgagatgtgtgctggtgtgagaattaaaatggctttcatgtgttaagttgttggtttataagctttttcactatcacaggaaagagaaagttggaattgaattacttgtttctaatatataattcatagggggaaaaaatttcacgactttgatttttagaaaattttatga

SEQ ID NO: 470797 - DNA, 575 bp, Homo sapiens
ttacatttgtgggtgtatatattttaaacaaagtagtagcatatcacaaatgattcatgtagaaatgtgctaggcaagtgtaacgctggactatggaactttacctgtggtttataaaatgaacctcatttacaggaagagcacaaatttaagcaataacagaaagaagtttatccacattccaaaatgattgctagggttaatatgccagattgatttattgatccactaccacattgccaagaaattaagtggaggayaaacatcacattacaacttaggaaagggaaaaagaaaagtcaccacgagaaaaaaaaaagtgcttaatgttaaattctgaaaatgtttaggggtctacacgactgttttcaccacatatttttctatttattttcaattcttgtgagatgtgtgctggtgtgagaattaaaatggctttcatgtgttaagttgttggtttataagctttttcactatcacaggaaagagaaagttggaattgaattacttgtttctaatatataattcatagggggaaaaaatttcacgactttgatttttagaaaattttatga

SEQ ID NO: 470798 - DNA, 575 bp, Homo sapiens
ttacatttgtgggtgtatatattttaaacaaagtagtagcatatcacaaatgattcatgtagaaatgtgctaggcaagtgtaacgctggactatggaactttacctgtggtttataaaatgaacctcatttacaggaagagcacaaatttaagcaataacagaaagaagtttatccacattccaaaatgattgctagggttaatatgccagattgatttattgatccactaccacattgccaagaaattaagtggaggataaacatcacattacaacttaggaaagggaaaaagaaaagtcaccacgagaaaaaaaaaagtgcttaatgttaaattctgaaaatgtttaggggtctacacgactgttttcacyacatatttttctatttattttcaattcttgtgagatgtgtgctggtgtgagaattaaaatggctttcatgtgttaagttgttggtttataagctttttcactatcacaggaaagagaaagttggaattgaattacttgtttctaatatataattcatagggggaaaaaatttcacgactttgatttttagaaaattttatga

SEQ ID NO: 470799 - DNA, 520 bp, Homo sapiens
aatgtcagaagaaagtaatttcaggtttccagttcttatgccttcttaaaggtgttctgtgtgtccagggccgactgtggcccctgtgtctgtgggtgggagcctcccctccagccttccacatcatttctctccttgacttccttcacctgtcctttatcacattgcttcctacccagggcgatcttktgatgccattagctgattggagattaataggagagaggaggatcccacaggacaaacaaacaaaccaatcctgcctttttgaaagcctggttgtcagaagcttcctccggcaggtggctgcaggtcataaaaccgactggaagcatttccactttgtaaagccgaccacaaaaggcaaacgtggaatcaggattcacgttacatggcgatcctgcacatgcccctccactcctgatgaattgctcaggaagtaggtgagaactggaaacacacagaaaatggagctattaagctatttgggccactgatgagatgctgctggctggcttaa

SEQ ID NO: 470800 - DNA, 576 bp, Homo sapiens
gctggtccacattccagcctgtagccattgttggaggcctggggcagaatctagtagacattgacaccagctaagataggcttgtaccrtgccttgggctgccatcttggctctctgccctttgtgacctccagatgacgttgggagtaaattgaggcctccagtccagtctcttgcttagaaacatctcctcctccttctcatcatcatctctttctctctttcagagaagggctttgctatgttgccaaggctggaatgcagtggccattcacaggcagtctaggttcgttcttgcttgatttttccttataatttatttgttgaaagaactatttctcagaatctggattttcttaaaatgcatcctcatggtgttaataagttcctctgtcttctccattttctgtaaattattagttgggtttagagcagtgattttctgactaacagcatcagcatcatctgggaattgtaggaaatggtaattcctactcatcccagagaagctggccataaaagtcaccatcttggtgagacctagcatctcaattctgtgaagtcacccattgaaag

SEQ ID NO: 470801 - DNA, 616 bp, Homo sapiens
ttctctttttttaagagacagagtctcgctatgatgcccaggctggctggctggcctcaaactcctgggctcagacaatcctcccactttgaccccctgagtatctagagttacaggtgtgcaccaccaccccaacctggcttgaaatgtcctttcttgcctccttgtctctgattcacggggaaaggatggttcctgctggtttatattcaagattggcyaggcgcggtggctcatgcctgtaatcctagcactttgggaggcctaggtgggtggatcacgaggtcagcagattgagaccatcctggctgacacggtgaaaccccgtgtctactaaaactacaaaaaattagccgggcttggtggcgggcacccgtagtcccagctactcgggatgctgaggcaggagaatggcgtgaacccgggaggcggagctggcagtgagccgagatcgcgccactgcactctagcctgggtgacaaagcgagactccatctcaaaaaaaaaaaaaaaaaaaaaagacgaagatagaggtgctggaatgagtgccccctcatacacactgctttggatctgtctcaccatgtcctgtgtgtccgtggctctcatcaactta

SEQ ID NO: 470802 - DNA, 616 bp, Homo sapiens
ttctctttttttaagagacagagtctcgctatgatgcccaggctggctggctggcctcaaactcctgggctcagacaatcctcccactttgaccccctgagtatctagagttacaggtgtgcaccaccaccccaacctggcttgaaatgtcctttcttgcctccttgtctctgattcacggggaaaggatggttcctgctggtttatattcaagattggctaggcgcggtggctcatgcctgtaatccyagcactttgggaggcctaggtgggtggatcacgaggtcagcagattgagaccatcctggctgacacggtgaaaccccgtgtctactaaaactacaaaaaattagccgggcttggtggcgggcacccgtagtcccagctactcgggatgctgaggcaggagaatggcgtgaacccgggaggcggagctggcagtgagccgagatcgcgccactgcactctagcctgggtgacaaagcgagactccatctcaaaaaaaaaaaaaaaaaaaaaagacgaagatagaggtgctggaatgagtgccccctcatacacactgctttggatctgtctcaccatgtcctgtgtgtccgtggctctcatcaactta

SEQ ID NO: 470803 - DNA, 566 bp, Homo sapiens
cttctaacgggaccctagcttttgtgtaccccaagataattatataagcaaaggtctatcatgaacagaagaaaagaagaacagagcaagcttttggaagtaaagcaaggtctttacttgcctgaytcagaactgtcttaagtctcccgcccgtcctgtgtcctgaaggctgtagttatggtggaataggagtagaaaaggggtaaaagtccttggggaacaagggaaaccaaatcagcaaggtccagaagtcaaagccaagtgaaagaggagagttgtgggcacaggtgcagagcagaacacaagaggaggccagagcacaagcatcaggttccagtccgaccattccctccacagcacatggacaggcctgggaaggggcagtcctcacgcagtttagagtcagaagattgtttcactctcttcacttctagcccttggcttctacatccccttcctccacaaaggaaggagctcctgtcttcctccccataccaccctcttttacagggggcacccagagaaggctgagcaggtggtgtccaggctggcttcttgggccgtga

SEQ ID NO: 470804 - DNA, 566 bp, Homo sapiens
cttctaacgggaccctagcttttgtgtaccccaagataattatataagcaaaggtctatcatgaacagaagaaaagaagaacagagcaagcttttggaagtaaagcaaggtctttacttgcctgattcagaactgtcttaagtctcccgcccgtcctgtgtcctgaaggctgtagttatggtggaataggagtagaaaaggggtaaaagtccttggggaacaagggaaaccaaatcagcaaggtccagaagtcaaagccaagtgaaagaggagagttgtgggcacaggtgcagagcagaacacaagaggaggccagagcacaagcatcaggttccagtccgaccattccctccacagcacrtggacaggcctgggaaggggcagtcctcacgcagtttagagtcagaagattgtttcactctcttcacttctagcccttggcttctacatccccttcctccacaaaggaaggagctcctgtcttcctccccataccaccctcttttacagggggcacccagagaaggctgagcaggtggtgtccaggctggcttcttgggccgtga

SEQ ID NO: 470805 - DNA, 642 bp, Homo sapiens
ctgcaccatctcttctccacctactttcctcttactcaggaagatgcactgatgtgaaaatgacattagggtaggtatcatctcaaatttgctccaatgtctatgagagcaattattggaaaacctgtgctatgataataattttagctacctcatacttggtgcaaaaattaaggccctctaatatcattaaacagaactctaataagctccatttaagatctgttatcctgaaatcttgatatgaattacaatacaggcgattcttaatttattgttagtttcacctatttccaaaaaggaatgacagtaacgtgtrtttctaaagcacatgataataaaactcttaaaattgagatagaagtgtttaaaccttatctaagtaaggtggatgaagcaaatataacaaacatccatgccaggaaagttacggcaagtgctttattgaagcttgagctttctgatagcaaaagtaagaaaaggaagcagatgaagaaaaacatgccagtctttcaagaaaaagaaatatttttccaagtactaaattctaaaaatggtttgtcacacagacattaaatgtaaaatacaatgcaatgaatagcagttttgtaaaaatcacagatgcattatattcaagacccc

SEQ ID NO: 470806 - DNA, 642 bp, Homo sapiens
ctgcaccatctcttctccacctactttcctcttactcaggaagatgcactgatgtgaaaatgacattagggtaggtatcatctcaaatttgctccaatgtctatgagagcaattattggaaaacctgtgctatgataataattttagctacctcatacttggtgcaaaaattaaggccctctaatatcattaaacagaactctaataagctccatttaagatctgttatcctgaaatcttgatatgaattacaatacaggcgattcttaatttattgttagtttcacctatttccaaaaaggaatgacagtaacgtgtgtttctaaagcacatgataataaaactcttaaaattgagatagaagtgtttaaaccttatctaagtaaggtggatgaagcaaatataacaaacatccrtgccaggaaagttacggcaagtgctttattgaagcttgagctttctgatagcaaaagtaagaaaaggaagcagatgaagaaaaacatgccagtctttcaagaaaaagaaatatttttccaagtactaaattctaaaaatggtttgtcacacagacattaaatgtaaaatacaatgcaatgaatagcagttttgtaaaaatcacagatgcattatattcaagacccc

SEQ ID NO: 470807 - DNA, 421 bp, Homo sapiens
tagataaaatgcctgtcatcatgtccagcacatagataatgttcaagaaaaattgtccccattgtcacttcccattagaatggcatgtttgttggggctgtctgcctccacagactgtgagctcctcaagggccagaactatgcattatccacctctgtatctctgattctctgtggctccaaactctagaacagcagtagtatacagtaggtacccaggggatcagttatttattgccacaataatgctgcacagcaaaccaaacttaaaaccacaattcatttagcccatgattcagcaatcaggctgtttaagccaagctctgcctggggggttcttctggtctccactgggcccagccacaggccatgtaggcactgcttctacttatggrggtggtggggagagatggaccacgtg

SEQ ID NO: 470808 - DNA, 606 bp, Homo sapiens
ataaataatattttaggttgttttatttctgaatagtttctagatttaatactcatatgtctggtattttgaactagcagtcatcaaattaaactacttacagttcagcatttgctttgaatagacttgtgaggagacagtatggcacaggggagcttgagatgctatttgtrgcttaaaacctttggaatgtacttgatctttagatattttataacatgacatgttttctacttactaaaatcccatcaagctaacaatgagagaaatacaaataaagttaaaacattctctcctttcatagaacttgtttgccttcactttgcagcatagattcaagaatataatttctgtagactatcttccagcttttgaatatattttaaattctatgttatggcttagtctttttcacttcttgtgttccttctctcctttgcacagtggcacatgattgcttttggacatagcaaatttttgttggttatattatagataaatacggcaagactttttctgtggcattggaatcattttttttcttaattaaaagactatatcaaacatggtaaagtgattctgatcacggggatttatattttttta

SEQ ID NO: 470809 - DNA, 606 bp, Homo sapiens
ataaataatattttaggttgttttatttctgaatagtttctagatttaatactcatatgtctggtattttgaactagcagtcatcaaattaaactacttacagttcagcatttgctttgaatagacttgtgaggagacagtatggcacaggggagcttgagatgctatttgtagcttaaaacctttggaatgtacttgatctttagatattttataacatgacatgttttctacttactaaaatcccatcaagctaacaatgagagaaatacaaataaagttaaaacatyctctcctttcatagaacttgtttgccttcactttgcagcatagattcaagaatataatttctgtagactatcttccagcttttgaatatattttaaattctatgttatggcttagtctttttcacttcttgtgttccttctctcctttgcacagtggcacatgattgcttttggacatagcaaatttttgttggttatattatagataaatacggcaagactttttctgtggcattggaatcattttttttcttaattaaaagactatatcaaacatggtaaagtgattctgatcacggggatttatattttttta

SEQ ID NO: 470810 - DNA, 605 bp, Homo sapiens
tgctcattgcagcaccatttgcaaaagtaaaaaattacaaagaacatacttattccttagaatggaaatggaaaataaactgttaataggtacactctaaagcagttaaaatgaaactctagagcagttaaaatgaaataactagatctacatgtatcaacatggacatgtttgcaaaacagacttgaaaagctgtaagttgcagaagaatagctgtaggaggatataatctatgagcaatttaaaatatatatatatagctatatatatattgctatatakatagcaatactgcataataattaaatagtacttggtattgtttgtcagtgtgtgcatgtggagtaaaattataaaatattttggaatgacaccaatttaagatagtggaacctctagaaaggaagaaaggaggacgatactaggaattaggcttttgcagaatctgtagcattttattcaagagccatctggagcaaatataacaaaatgttaacaactgttaaatgagggagtggttgatatatgcatggctattagattatgttctggacttgtgaattttaaaatgttaaataattttaaggctatatcgttcattggct

SEQ ID NO: 470811 - DNA, 653 bp, Homo sapiens
actttcactgtcttcacgtgttgaccttcctgtcttcaccttactgaactagcttagtgcaatgatgaagagctatccaaacttgttttgggaagaataatcatgacatattgtttaatttgtgtaactgctctatttgttctgacgttaagacagagagcataagtctctagtgtaaagaatttatttcccgrgcaatccttacctgactaagagcaacagataaaggccctgtttcccaaacaggaaaaacggaactggttgtaacctaacagttacctattagtaagtggtatgaattttcagaacatcagaagacaggttatagcattagagaaccctctattccatcttagtcttctagatcctacttctcaccatgcttattgtaaatataaaatgagctcacggacattcttcttgagggtcagggtaaggagaaatctgacctgcccacaggtgaatgcctggtcttaataagaccagggacttccataggaattatattcaaaaagcggtattctcagcataaattcacgagcactcaagaaagctaaagcaaagaatgcatttaacctagctaagaattcacaagaaactaatggaatattttacaaatgcattaagagatagacggagtaaagttttaaatg

SEQ ID NO: 470812 - DNA, 638 bp, Homo sapiens
gaatctgatgcctctagtgtgtttaaggactcagatcataagagcaaaaccgtttgagttcaaatctactatcagtgtttgattctgtgacctgcaaatacttaatatctctgagtctcagttttcgctttacatgataacaatgataaaatccacctcctaatactggtgagggtaaaattcgctaattaatgccaattgcttccctgcacaatgagaacaggggaagtgattgcattaatgtccagaggcctctggtaggtaactcaatcactctgcctatacaggcggtaggtaggtcgctggggctccgccccgaggggtgtggccgaccaaagacgcaaagcagtgacctgggtgcatccgrgccaggctgtataaaagcccaggccccagaaggcgcccagaagtttcagagtgtgttcctctccgtctgcaagtagcaaagtgcccggcctgccatatggatcaatttctggtaagtctatctccaaatgaaagggcgaaggtcggtgtcatggagtggtaggtcagaaattcaaagatgtaggcgtccagaatcctagcaagggagcccgctaataggggaggacagagaagtgtctgaaacggttcatttattgaggaccatttttact

SEQ ID NO: 470813 - DNA, 586 bp, Homo sapiens
tagccctctgaatgaagttctctctttttctttgcccagatgattccgtctcaaaaaggaacaaagtatccctttccctttgtacaagctggagtgctttagctctgactcaataccctcctctgctagaaacttgactttattgattgagaaatagaaaccgatccaaattatataccagtatgcccaatgtatcgccgttttaggcacctattttacaggcaaagcatgtcatttattctttgtrtttaaattgaaatcaatggctaacatcatagcacttaattatgtaccatgcatattctgatataaacttcaactctcactacaagcctatgagcctatgagttagatgctgctatttgcattccacagatgaagaaactgaaacacaggtgtaatttgcccgaggttacagagtgtgtgccagaagggaggtttgcatctatgtatcctgtttccgtagagccaagtccatgctctgaattaactttagttttcctcaaatgcattgagagggcaaagggtctatttactctaaactgtgatagccttatagtacctgctgatattatcttaccactct

SEQ ID NO: 470814 - DNA, 586 bp, Homo sapiens
tagccctctgaatgaagttctctctttttctttgcccagatgattccgtctcaaaaaggaacaaagtatccctttccctttgtacaagctggagtgctttagctctgactcaataccctcctctgctagaaacttgactttattgattgagaaatagaaaccgatccaaattatataccagtatgcccaatgtatcgccgttttaggcacctattttacaggcaaagcatgtcatttattctttgtgtttaaattgaaatcaatggctaacatcatagcacttaattatgtaccatgcatattctgatataaacttcaactctcactacaagcctatgagcctatgagttagatgctgctatttgcattcyacagatgaagaaactgaaacacaggtgtaatttgcccgaggttacagagtgtgtgccagaagggaggtttgcatctatgtatcctgtttccgtagagccaagtccatgctctgaattaactttagttttcctcaaatgcattgagagggcaaagggtctatttactctaaactgtgatagccttatagtacctgctgatattatcttaccactct

SEQ ID NO: 470815 - DNA, 586 bp, Homo sapiens
tagccctctgaatgaagttctctctttttctttgcccagatgattccgtctcaaaaaggaacaaagtatccctttccctttgtacaagctggagtgctttagctctgactcaataccctcctctgctagaaacttgactttattgattgagaaatagaaaccgatccaaattatataccagtatgcccaatgtatcgccgttttaggcacctattttacaggcaaagcatgtcatttattctttgtgtttaaattgaaatcaatggctaacatcatagcacttaattatgtaccatgcatattctgatataaacttcaactctcactacaagcctatgagcctatgagttagatgctgctatttgcattccacagatgaagaaactgaaacacaggtgtaatttgcccgaggttacagagtgtgtgccagaagggaggtttgcatctakgtatcctgtttccgtagagccaagtccatgctctgaattaactttagttttcctcaaatgcattgagagggcaaagggtctatttactctaaactgtgatagccttatagtacctgctgatattatcttaccactct

SEQ ID NO: 470816 - DNA, 541 bp, Homo sapiens
ttgatctaattcaggctgttatgtgrtgtttgcaaacttaccgctatgatctctgagaatatgactgaaaatgccggctgaagccccccattggcaatggcacatactgttcccacgacaaagtagggccattctgttttattcagtttcaggaccttcagaaaggacactggtggcacatttgcttcctagaacatataaacatcagggcaaactggtgatgacacaacagttaccagagtctgtagacatagaaaaggcatggccattgccctcaagggactcgcaaactaggtgcagagaatgacaagcaaactactagagagtaggacagtatattataacatgttaacaatgtttactgattacacatcataagctgagtatgggttgttcggccaagaaataaccttcatgggatgcttagcccgtccctattctggcctcagcagactgcgaggtagcaggatctgggcacaaataccttggcatccagctctggagttacacaacactgtattggtgtgacagtcatggctgg

SEQ ID NO: 470817 - DNA, 645 bp, Homo sapiens
ggtattgctggggtgttaacttccttcttgggtactgcttaccttaacactttccaggcctttgtaaatagaccctttagcaaactcatcaattaacccatttgctgtgccatttgtttcctgctgggatcctgatacaaagattatatagatacattttttcatggtaattttaattttggatgaaaaaaaaaacccagctcttaacacactttcgcttttttgtcttgaccctgtttcaaaaatggctgttcaccactgctttaaaatcatcccaccagagcagaaacataccaaatgatcttaaaaagagttgcttccctctttcaagccyagattgcaacctaatggaatgtgctgagcacattatgaaagaaggcatcaaacagaaagaccagtagtttgccttggaaaccaaggaaaaaggagaggctgagaggcaaatgttggcagggctgtctcatctcaggcctggttagggagagagtgcctttgccagacttccaacaagtattcccatcttgttttccaggccatgttttggttgtagataatagtaagctatataaccctgttttgagtccatggtcaccagcaactttctaattatgattttttctgcctatattctataatgagaaaatt

SEQ ID NO: 470818 - DNA, 587 bp, Homo sapiens
tggtcactggccaggtgcattggtgcctataattccagtaccttgggaagccaaagaggattatttgaggccaggagtttgagaccagcctgggcaacgttagctgaaacaccaaagcctgtcaacacaattggatagactttagtcacaagccattgtctgctctgcaaacccaacaaacttcrtctcagaccattgtatgttcttcaagttcattgaattcccctaaaaattatttgctattcccctaaaattatccatctcccttcccctaagaaaaactgtataaccatccgtacctcattgtgtgatggggtaatcatgctatgattgttccctccatgcatatttataaatgtgtatgtcttttctcctgttaatctggtttttgtcagttaatttttcactgtaccttcagagaccaaaggagaagttgtcccttggtccctacacctctgtcacaaaatacagattcaggagagaaatgtagggtccagccccacagggtcggtgggttttcttcccatgtgcggagacaagagagtgtagaaataaagacatgagacaaagagataaaagaaaagaca

SEQ ID NO: 470819 - DNA, 587 bp, Homo sapiens
tggtcactggccaggtgcattggtgcctataattccagtaccttgggaagccaaagaggattatttgaggccaggagtttgagaccagcctgggcaacgttagctgaaacaccaaagcctgtcaacacaattggatagactttagtcacaagccattgtctgctctgcaaacccaacaaacttcatctcagaccattgtatgttcttcaagttcattgaattcccctaaaaattatttgctattcccctaaaattatccatctcccttcccctaagaaaaactgtataaccatccgtacctcattgtgtgatggggtaatcatgctatgattgttccctccatgcatatttataaatgtgtatgtcttttctcctgttaatctggtttttgtcagttaatttttcactgtaccttcagagaccaaaggrgaagttgtcccttggtccctacacctctgtcacaaaatacagattcaggagagaaatgtagggtccagccccacagggtcggtgggttttcttcccatgtgcggagacaagagagtgtagaaataaagacatgagacaaagagataaaagaaaagaca

SEQ ID NO: 470820 - DNA, 587 bp, Homo sapiens
tggtcactggccaggtgcattggtgcctataattccagtaccttgggaagccaaagaggattatttgaggccaggagtttgagaccagcctgggcaacgttagctgaaacaccaaagcctgtcaacacaattggatagactttagtcacaagccattgtctgctctgcaaacccaacaaacttcatctcagaccattgtatgttcttcaagttcattgaattcccctaaaaattatttgctattcccctaaaattatccatctcccttcccctaagaaaaactgtataaccatccgtacctcattgtgtgatggggtaatcatgctatgattgttccctccatgcatatttataaatgtgtatgtcttttctcctgttaatctggtttttgtcagttaatttttcactgtaccttcagagaccaaaggagaagttgtcccttggtccctacacctctgtcacaaratacagattcaggagagaaatgtagggtccagccccacagggtcggtgggttttcttcccatgtgcggagacaagagagtgtagaaataaagacatgagacaaagagataaaagaaaagaca

SEQ ID NO: 470821 - DNA, 465 bp, Homo sapiens
aaaaaaaagagaaaagaaaacatgtatgtaatgggttgtatctggtatctgcttggctatggaaaaggctgagatttctttctgtctttgcaatctcttagcatattgcctgtgatgggcatcacattctggtttagtgcttattcaataataaaactgttacctttctcttctttytttgctgagagattgggaagagattttgtttttaatttctccaacactatgtaaccttagccaaattacttttaactgtaaaattgggcctcagttcccttgtctataaaataagaatcctaataggattcttagagtcctaatgagatttataggattgttgtgaagattaaaggagttaatactataaagcacttaaaacagtgcctgccataaatcaaaaactcagtgagcattggttattatcatacaaaagtgatcaccatagcaacttgtagcattgatgct

SEQ ID NO: 470822 - DNA, 456 bp, Homo sapiens
gcttcagccactgctgttactgggagccaaagtacatactgtccagagtctgaaccccaccttcctgggatggctaccacaaatagcacccccatcccyagcagggctactgcacacttgcatatgccttcaggatgggtttttactgcccactgccactgctactatccctgcctgagcacactgcccaagaattggggatcgacccacaatgctcaccacagcctgtggccatacgcaacaatggggagcttaaggataggcccacccagactggaaccacacccccccgttcccaaaccttccacctggggacccaggggttagcccatcctatcagtcacccaggtgaggatgcaaaccagcagggggcctaataatagcctcagaacacctgccactgctggcaccctatcataccttccagaggcctgggggcctgccctgccccaccca

SEQ ID NO: 470823 - DNA, 641 bp, Homo sapiens
aagcttccttgatttccttttcctgtgtaatttaatagatttgttgactagtgcttgggcacattataaatcagtgttatttgctcttggagccattttttaaaaaaaattttggcagtgagcagttgaatttatcttgaatttatcatgtgtgtgtatttctgaagcagctacatagcagaacattttaagagattctgttagcccacatgttcatgttggttgctgctgaatggtaaatattaaataaaattaccagattaatcttaatatttctgtctttactcctatcatcagcatgtctttacttgtaatagaagcggctcttgatcttattatagtgagatttccagacttctttttagatagatcctgtttgtgttgtcctgccacgtagatgcatttcacactcactacggctcacttatgccatagggaacaatcaccagaaaggtaacaaacagtatgggttaatatcccatagaaagggtaacatttacstggttggctgaccattcattggcctaaccagagccaacttaacaagtcaaaccatcaaaatgtgtttgcatcagaaaacttgacataaaacagataacttccaagcatataagggcatggttaaatgctggttttgacag

SEQ ID NO: 470824 - DNA, 509 bp, Homo sapiens
gaggaaatctcaggctagattagttgataccatattcagaaagaaagagatcaagaaattacttcactcttaaaacatccctctgcaatccatcttctgtcacaactgactcctgagaattctctcacaatctcttctggcactcttcctccttctaatcaagaggaaaatagcacaccatttcrtcaacatgacatcccctctcatcgttttccagttctccatttatgtgctgattaaactagcttctgctaatatggatttcaaggataattttttaacactgatagcttaacatattattgacttaatgatatgatcaagtggcaatcaggactcctttaaatgtgggtgaggtttctatttttttgagaaggagcaatataatagtttaaaattacattaaacaatgaaggtgtgttttaagcactgggacataagaccaggatttacattgctatgtttgctgctgtattctcaacttgtagatggatgcctggcacacagta

SEQ ID NO: 470825 - DNA, 489 bp, Homo sapiens
gccacttccacttccatcctcagtttcctggcacatgrtttggccaagggtacaactggtagagtatttattgtataggagtgaaagaggcctttgtcaaatttgttttcacaaagtttatcaacagcttattgtttataaagccactgaaccatgctttaaaatgattaattgtcagaattcaatatttttccacatgaatttgtgttacctttgggatttttcaataaaaatgcaactgtctaaaatccctaggcattatttcagtgatatcataatcatggaatcaacagaggatgaacccatgaaaatatagagaatcttacacttcttttagaaattgggtatccacatgaagaagtagaaatgtgacattataactaccattttggaatgatgctttgtattagtcagcttagcctagattgatgacagcccccaaatctcaaaggcttacaacagcaaccaaatattttttggtcacagtag

SEQ ID NO: 470826 - DNA, 641 bp, Homo sapiens
gaaaagatcatcttgtttcatctcgcttagtctaacataaaaagaaagtagtactttgaatttacctagaatggcttgaaatagaattatcatcaactatttggcgaactcacctcagtgaggctgctattacaggaatactaggagaaaggataggtacaattagtaaaataagaatttatawctggtatgtctgcatttgtatatcacacagagatttcagaatattaaatggaagatgtcaaggaattcatagttcaacaaaaaagaaggttcaacttctaaagtactctgcacagaaagacataaatgaattgtttcaaaattgcatttgtcagccaactgtttggaatttgaatttttttttcataaaaacgttataaactatgatttgcttcccgggcaaaattagactaaggttaaaacaaaacaggaaaatacaaacacatcaaaacttggtatttctccttaatgccattttaatggagaagaaaagctcagaaggcttaaccaatcactctgtttagttttaactgagagctgaaaacatatattggattttcaaaaatgttttagactttaagggaattagcttattgtattctgtccatgctcacgttcttctttgttcttcatgctat

SEQ ID NO: 470827 - DNA, 420 bp, Homo sapiens
aaggaaggctcagaaacggaatctctgaggccatttgctcagcttaaattcaattactatggcatttggaagacaactagcaatctctgtcatagaatgcttaatatcatgtgataagtttctactatgtgacagtagtaacatcttaactttccagtgagttcggttcccaattatgtttatatattggctgtttgtaatctggaaagcaatttctcacaaacatttcgactggctatcttcctaggtcaataaatacaacctattctagcccacaatgtccytgaaatataattttcatttttactcaatgatcctttattccatcagtccaagggaaaaaaaatacattccaaatgactacagattatgtatctcaggggcaggaaagttcctcctaaaacaggaaagaatgaagag

SEQ ID NO: 470828 - DNA, 618 bp, Homo sapiens
gatagctgtcctctgacttcaaagaaaagctgtttccttactgaaaggcttcacattgaagttctcaggagaggaagactcagtctctcccagatgacccatagctctgtgcggcagaaccacggtgacagtttgtatagggctttccctcccagcttcctgggcttcctctgactctggttagaggaggtgctcaaggggagagatcgaggcctctgctccttgcttaactcagtccagggcagaagagagaatcatgatgctccagccagagagccctgggaatggctgccagttcctaggtctgcatccctcctattcctgcagccagacccctcccctcctcgccgtcaccatgctcaggcrtgggacagtcccgcacctgggtagggtaaacctaagaagtctatgcaacaacagatagagtgactcggcttctttgttcttgctacttgagccttgtgccttcatcttgataactggcttccacatgatggtgaacaggctcaacctgtttcctagttcccccgtcttgatgatttgcctgatacctagttctaaaaggtgggggcctgcctagctctaaaggacttatggccagccagaattgaagagaac

SEQ ID NO: 470829 - DNA, 556 bp, Homo sapiens
ctggtggggaagctggaatgaattttgttgcccacaattctacccctgggcagccccattctcagagagctgtaacmtttcctcctgcctcctgactttcagattttgggtttcattcctctacctgctggaactagaactaagctaagccttccagccaactgtgctggtcctgcctcctccctagagctggactgtgaccccttatcatggctgctggctaaaggccggcctgcaccctggtggatctcaccatcagcttaccttcttgaacaactgtggtatcaattctagcatggaaagagttgaggtcacagagtccttggggacaatgggacttgcactgctggccctctctcactggtgccagtcttatggctaggttactttctggagactgaacatcccagttgttggccacctctcctttcccactgtccactgttgcctcaacactgaagacaaatggtcagagctcaagcagccagatcaaaattgtgccaccccactggtaggaggataacatctcactcctcagggcattcagatgttttgg

SEQ ID NO: 470830 - DNA, 556 bp, Homo sapiens
ctggtggggaagctggaatgaattttgttgcccacaattctacccctgggcagccccattctcagagagctgtaacatttcctcctgcctcctgactttcagattttgggtttcattcctctacctgctggaactagaactaagctaagccttccagccaactgtgctggtcctgcctcctccctagagctggactgtgacsccttatcatggctgctggctaaaggccggcctgcaccctggtggatctcaccatcagcttaccttcttgaacaactgtggtatcaattctagcatggaaagagttgaggtcacagagtccttggggacaatgggacttgcactgctggccctctctcactggtgccagtcttatggctaggttactttctggagactgaacatcccagttgttggccacctctcctttcccactgtccactgttgcctcaacactgaagacaaatggtcagagctcaagcagccagatcaaaattgtgccaccccactggtaggaggataacatctcactcctcagggcattcagatgttttgg

SEQ ID NO: 470831 - DNA, 556 bp, Homo sapiens
ctggtggggaagctggaatgaattttgttgcccacaattctacccctgggcagccccattctcagagagctgtaacatttcctcctgcctcctgactttcagattttgggtttcattcctctacctgctggaactagaactaagctaagccttccagccaactgtgctggtcctgcctcctccctagagctggactgtgaccccttatcatggctgctggctaaaggccggcctgcaccctggtggatctcaccatcagcttaccttcttgaacaactgtggtatcaattctagcatggaaagagttgaggtcacagartccttggggacaatgggacttgcactgctggccctctctcactggtgccagtcttatggctaggttactttctggagactgaacatcccagttgttggccacctctcctttcccactgtccactgttgcctcaacactgaagacaaatggtcagagctcaagcagccagatcaaaattgtgccaccccactggtaggaggataacatctcactcctcagggcattcagatgttttgg

SEQ ID NO: 470832 - DNA, 584 bp, Homo sapiens
acacacagctaagggatcttaattttatttggtttgcaatgatagaatgaatagaaaccaatagcgagagttatcttaatttttacttctttgcccctaggaaagtcactacaaagcactctgacaaatccccatggcgtaagctcattgggttgagggctcatctatctctgcttctccctggctttcccatctgtgtgaagaacacaggctgcccgccagccagggaacagatactcaatctggctggaagctcctctgccttcttccagaaactgaaattggacacagctacaaacacgaggcaccttctaagcacaggtccccaagggtctcagtgcctcttcggggatgtcttatctgacaacaaactgcaagggtccagctaaatggtgttggtgttacagcattctagggtttctccaagttacttggctttatttccacccaaccacctgcaaaaatgcttttctgtagcaggaaaaagtctcctgaaattcaacctgtttttgtttcctcaaacatttctgtrcatgaggtagtgcagtgagggaattaaatactgcagttcaatttcatttgca

SEQ ID NO: 470833 - DNA, 618 bp, Homo sapiens
accacaaatatctaggttcatatatcctctgataaaccacacatataaaggcacattcaacaaacatttataaaaactggtcaatgtatgaaaataatgrtcccaacaaagaacaatcacactcatgaattagtccaagagtatactttattctttatcatcacccttcatgaaataatgtcagtttaggaaaggcatggtggctcatgcctgtaatcccagcgctttgggaggctgaggcgggtggatcacgaggtcaggagttcgagaccaacctggccaacatgttgaaaccccatctactaaaaacacaaaaaaatagctgggcgtggtggcaggcacctgtaatcccagctacttgggaggctgaggcaggagaatcgcttgaacccaggagatggaggttgcagtaagccaagattgcaccattgcactccagcctgagcaacagagcaagactgtctaaaaaaaaaaaaaaaaaaaaaaaaaaaaaaaaaaaaaaaaagaatgtcagtttgataactaaactattaaagtttagttcaattgctaaagctatctatctcagcattcctccgaaagtaacccgaccttcctactgaaatttcatttcatgtg

SEQ ID NO: 470834 - DNA, 649 bp, Homo sapiens
gtccttatatgcggtacacattttcactgaccagtctagtttgtttgggcgcctaagaaatgtttaataattaaataaattcaccctggatgtggtaaagaacttgaagatttttaaccacacagccctgccttagcttcggaggtggtgctgctaagacatctcaggagcactggtttagaattttattaatacttcattttctaactctgttagggtagcaatacagtatctttactattaggaaattggtaggatgtagtgctactggactagccaagatggtaaatgggcatcaatacaaytgacggcagatatctggaatgctgggtggagaccacagtggcaagggtcttcgtgactacaggatcacagactgcggaagacatctgagccctgatccctgggtttgtcctctgcctctttcctattccatgctagccccctagagggtccaacggaagctaaagaactaggcaagctttaggtaagccttgcccactccagacttttgtccatgtccctgtacctaaacacactagaaactgtggttgaaaaagtaagacagtaactaacgtatcagcaaagcaaccaggatattttccctggtgattttaccacttgcaagcttcctggcccattgcctcaa

SEQ ID NO: 470835 - DNA, 649 bp, Homo sapiens
gtccttatatgcggtacacattttcactgaccagtctagtttgtttgggcgcctaagaaatgtttaataattaaataaattcaccctggatgtggtaaagaacttgaagatttttaaccacacagccctgccttagcttcggaggtggtgctgctaagacatctcaggagcactggtttagaattttattaatacttcattttctaactctgttagggtagcaatacagtatctttactattaggaaattggtaggatgtagtgctactggactagccaagatggtaaatgggcatcaatacaattgayggcagatatctggaatgctgggtggagaccacagtggcaagggtcttcgtgactacaggatcacagactgcggaagacatctgagccctgatccctgggtttgtcctctgcctctttcctattccatgctagccccctagagggtccaacggaagctaaagaactaggcaagctttaggtaagccttgcccactccagacttttgtccatgtccctgtacctaaacacactagaaactgtggttgaaaaagtaagacagtaactaacgtatcagcaaagcaaccaggatattttccctggtgattttaccacttgcaagcttcctggcccattgcctcaa

SEQ ID NO: 470836 - DNA, 634 bp, Homo sapiens
tttatgctttaaagaaattttcttttaaattgatgcaaatgtcaagggaagacaaaatatcccccaactacacagatcagtttccctcctttctctctttacataccattccaaaaaatctaaaatatgcattactgaagattcttttggataagaaaaaaaaggaaatgtactctgggcatgaacaataatttttctgaagmcttaattctttctaaaatggaaaactattggaaaactaacctgcatggttctaagaacattttccacaaaaaaaaaaaataataattcaattcaaagatctaaacctgagtagaatttatggtgattgctcttagtctacatgcttacctgggttttctcttcagaaaagccatactttacttcatatcataatcttttctttttaacttggcaaactcattttctatcttctcaccttcttacactccagcaatgatgacctactttaattcattttaatatatcctggtgtttcatggcccccatcaatttgctcattctgtttgctttaggtattatagaatgtgtctttcttcctttgttcacttgctgaactcctattcatcttccaaaccctttgtgccagtcaaggttcaatgtaagaaataaa

SEQ ID NO: 470837 - DNA, 522 bp, Homo sapiens
gcaggctcaggaaggggccttgtgggtgtctggggaattccgaggtcctggcacccatggtatgtcatggggrggcccaatctgagtgggtgtttctcctgggtcagggtccctgagggatgccgtgtcccggggagggtgagagagggaagctctgaggtgtggcattcagtacaggtgtctctttgccctggtctaaggtcagagtcatctggcttcccggattgggcacttctccagaaaatggctgaggttatagaatgtgtggactgcatctctgttgggcaatgtggtcttaatatgatggtttattttctcatctcacggcaaggacttctcttatgaaaggttattagtattataaatggcatgtgtttaagttcacaaataattggacattgtggagcctgaactggatgctgaaatgtaagcataatgctgcccagagagagcggacacctggtcagttggtggtgggagaaaatgattggagaaaaatggggagcgtgagactccggagtc

SEQ ID NO: 470838 - DNA, 522 bp, Homo sapiens
gcaggctcaggaaggggccttgtgggtgtctggggaattccgaggtcctggcacccatggtatgtcatggggaggcccaatctgagtgggtgtttctcctgggtcagggtccctgagggatgccgtgtcccggggagggtgagagagggaagctctgaggtgtggcattcagtacaggtgtctctttgccctggtctaaggtcagagtcatctggcttcccggattgggcacttctccagaaaatggctgaggttatagaatgtgtggactgcatctctgttgggcaatgtggtcttaatatgatggtttattttctcatctcacggcaaggacttctcttatgaaaggttattagtattataaatggcatgtgtttaagttcacaaataattggacattgtggagcctgaactggatgctgaaatgtaagcataatgctgcccagaragagcggacacctggtcagttggtggtgggagaaaatgattggagaaaaatggggagcgtgagactccggagtc

SEQ ID NO: 470839 - DNA, 578 bp, Homo sapiens
  misc_feature (1)...(578): n = A,T,C or G
ctgccttagccatgtggatgctgagttaggtccctggagtctctgattagagcacgtgagacactgacccacaatccctggggcatggactgagcctgactccgcagagtggcagaagtggagataaaaggaaacacatcatgctgggcatcactgcctgcttcctaagcaaccatgccccagtccctgagaacaggcgactttggttccgttccccactcctgtgatatgcagcgccccacccagggggttagcgagctccacaccagctctggggaaaatgggttggcccatcccatatgaggccaggattgttggtttgggaacacgaaaggggccctgggtttgctaaggggrctggagcaggtgtgctctggctactgggggcacacatcaagaagggagtgtgaggagaaccagtgcaggccgaggcggatgcangctacaggcatagcaatgccgccgccagggagaccggagacctcacagagccactccctgggcacgctccatctggactcggagttcaggcccgtcatacgttcacgcccgttttaatcatgcagacctgagcccca

SEQ ID NO: 470840 - DNA, 491 bp, Homo sapiens
tcatatatcttctaggcaaacatactttcctgatatttcaaatatcggcagcttccaggactgggggcgtaggagtgagctggtgatagagccagctatgtgggaatcagcacagagcacaggccgggtgtgatgtgtgccctgcaggcagtgaaggtcttccaagagcttgctttagctaagccaacccaagtaagatacgctrcatctctcccgtgcaccaggaacgtgccctgcatgatggcctggcacttggggccagcatgggcctctgctcctcagacctagattcagtgtcctggcccatccccctttgagactctgctcgtgggctcttggccgtgtgaatgtctgtcctgtgaccctgggggtctctcttgctttgtcccagacctggagcacatggacccggcaggagaaccctccaatgctcagtagcaccaaagtgccttgtatccacaggccccactctcccgaacagcctcagatag

SEQ ID NO: 470841 - DNA, 536 bp, Homo sapiens
tatgcatcaaaggcctgttttcaagagatggattaagttttgtcatatatcttctaggcaaacatactttcctgatatttcaaatatcggcagcttccaggactgggggcgtaggagtgagctggtgatagagccagctatgtgggaatcagcacagagcacaggccgggtgtgatgtgtgccctgcaggcagtgaaggtcttccaagagcttgctttagctaagccaacccaagtaagatacgctacatctctcccgtgcaccaggaacgtgccctgcatgatggcctggcacttggggccagcatgggcctctgctcctcagacctagattcagtgtcctggcccatcccccyttgagactctgctcgtgggctcttggccgtgtgaatgtctgtcctgtgaccctgggggtctctcttgctttgtcccagacctggagcacatggacccggcaggagaaccctccaatgctcagtagcaccaaagtgccttgtatccacaggccccactctcccgaacagcctcagatagcag

SEQ ID NO: 470842 - DNA, 392 bp, Homo sapiens
ctgagattgaacaaggccacacggccttcttgcttcagggctcaggctgtgaagaagtatccttttcatggtcgcgcgtcttgtgtttaaaacaggccacgcacagtgctgacacgctatctgatgtcctaagcrcaaggggaggggaggccctctcgcgagaacacacgcgtgagctgagcttcactcaggtgtgagtgacgatgctgccggcccagagtcagtgcctcttaaatcaggtgcctttcaacaggaccacgcacaaaacgaggctatgccttggtccattgacaaaaatgtgactggaggctcgcgggaacctagccccgtgtctcctgagtagcggtggttcaggattcactaattcatcatttgtgttaacttcctcaaat

SEQ ID NO: 470843 - DNA, 641 bp, Homo sapiens
atctacagttgtgtgagttcccaggaagctcttaactccagggaaagtggagagatggagagcttattccataacatttttgttagacttcctctcattcttttctttgcagcatctacaccacttgcagagaccctgaattagtgtttttgggattatgtatgtgtactgaagacagcaatttaactctgagtgtaccctcctaatattcatggaaactgattctaattacactcttgtctcttgggttaacgacttctaaatagtgccttcactcaccgccctttcccgattgtctggcattgtaaagcctccatgcagcgtgtgcggggaggtagggtgctatgctgttctttctcagggaactccctggctgctgtagtgaccgccattccttatctaaatactcacagtgggagcttttgaattttcctccrttgcatgtttttggcacttctcaagacaaggtccatggggcattggtgaccttcaggggtcctttggtgctcatggctcagaatgcaggggagcagcaccagggctggctatctcctgatggaggcggggcgctgggggtcggaggcacgggcccacagcacgggcagccctagctccgctgctccccaagctctgctgctccc

SEQ ID NO: 470844 - DNA, 561 bp, Homo sapiens
ctgtgtggcctggggtgcagtaaccgggtctttctcttttctctmtttctgagtctttgactttgctgagcctggaaggacggcccattgcagggtcggccaattccttgatagtgatcacctcacctatgcacgtgcctatcgcatgcaaacccacagtctggagcccacgccccaccatctcctcctctgggcactcacatggctcacactgcagtggccactgtccccctgccacggtcactccaggacaggtaccagacacttaggggcagccccaattccccagagcccactgaaatcactcagtaactaggactgaaagcagccagtcctgagcttgtcccaccccacccaaccttcccacgaggaaggctcctgccccacgttccaggcctggccccagtgcctgcctttgcccaggctgctctgaggggccggtggtgctggtcacctgggacactttcaggactacaggttgccggcatctctttctaagcgttcctgtttagtgtagggcctggggtctgtgtaagacacagtcagcggggattttctggc

SEQ ID NO: 470845 - DNA, 595 bp, Homo sapiens
ccttgggttcaggcaagaagctgaatcccgcagggtgttccgggatgccattgcagcctgaccagaaggggctttgatggtgtagccctgtttgtttcctctgaatatctttttcttttcctttccagtttagccagctcttcactgagtgctgatcacacccccgcagggtctgtgcagtccttcggtttaataatctttgagtacattattttacatctgttcttgctctataaaagaaacagacttttcattccactgtccacttcgtgcctgttaaaaattcagggacacaattccatttcagtggaatgcaccaggacacccaatcttttattaatgcaaattgtgttcatttttggctagtgaggcaattaaattttccacggcaattaagaagtcaccagcactgaacctccttccacatccaggtgtggactggccagcaggtgaagacactgagaaaagagaggattccacacaaamcccatggcctcagagctctcccacccggggttcttgccagggacagactggccaaaagacttgatgcaagtgttcaaaatgttcgtctttcagtattccattcatttta

SEQ ID NO: 470846 - DNA, 560 bp, Homo sapiens
cagggatggatcccaaacatggagcctgctgtaccctggagaggtcccccctggctttccctgggtgtggtctccgttactaaccactcctcgtccctcatttcctactagtgggagctggacccctctgaaactcagccagcctcatgtaagaagcatctttgcctccgggcgggagtgcctggcgatcaggcaggagtcacttcccagcacccgggccagmcccacctgcgctggcagtcgcttctctcaagccaggcatgtttcctgagctctgagagggcaagggacatgctcagacctttcctgtccacagaggggctgggaggggaagctgaggactgcacaggaagtgagaagaggctggggctgcagtggggggcaggcagcttctctggggccatcttcctttttcccatgatcccagcctgagcatcctgtcatgtggcctgaccacttctgtctctgcctgccctccttcctttgcactcacctgccccaaatgccccaaggattctagcatctggaaaggaggagaaagcggggaggggctgaccaca

SEQ ID NO: 470847 - DNA, 411 bp, Homo sapiens
atgtcacttctgctgggaagccttcctggatttctcaaggctcmttctggccacccccaaccgagtcctgtctgcttctttcatcattgcacatctatttacacattagctgcccctccactagacaaaacatggtgtaagtagtgagagggagtattaaaccttagcaatgtgcactaattacaaggatccatgagcccaaattagcagactctgaataagagaatagattattttaaaaatgcccattcccacggtccttttatttgatgctttttttccccccagatattacattgctagaagctctcactggccctaggaggtacttcaggcagggctgtttctccccattttgcagccagggaaatggagaaccagtgagctgaagagcctggtctgggaccccca

SEQ ID NO: 470848 - DNA, 545 bp, Homo sapiens
acactccataacacacacagtgacagtccacaccagtgtcacacctggatgccagatcgcccatgtctacatgtgtacatgtctacatgtctgtcaggtggcagacttttgcacacactaaggagcagcttcatatacctcctccaaacatacgcatacacctgcctaaggatgaacctgtgagcagacatatgtacccctccagaaatccctttccctgttcagtgacacagccgggcatctgmacacatgcacacctgtgcatgcacacatacacacacgagcacacagcacgctcattcctgtgtgcatgcacacacacacacacacacaaatgcataccaggagtccctgcctgcctcagcagggagaacacagcagcagcttcccaacctgcaaacccatcctcagcggagccctgaccttcctgacggggggatcccggcttcccaggggtcaaggaacctgctgaggtcacacagctcactgcggttgagctggtatcaagcccaggttccctgtccccagggctggtgtgcacccca

SEQ ID NO: 470849 - DNA, 529 bp, Homo sapiens
tgcctgaactctcctgccagctcccagaggaagaagcatgctcagtggggtggtccccctggcccctcatgcaggttttggcttttggctctgggcagacactgcttttctctgccttgtgctctctccttgaaatcaccggggcagcctggatggtcttcctcctgccccctgcccctcccagaggagattgaagcctgctggggatgtagcagtgagggtgagtgtgtctgtgtgtgtctctgtgtyagtatatctgtggatgtgaggcactgtgtgtgcatgttgtcatgttgacttttgccagatgacatctgctcacgcaactgctaatgcaactcataagagtattttatttatttttgagacagggtcttgctctgttatccaggctgcagtgcagtggtgctatcatagcttactgcagcctcagcctcccgggctcaagtgatcctcccgcctcagtctcccgagtagctgggactacaggtgtgcaccaacacgcccggctactttttaaattttttgg

SEQ ID NO: 470850 - DNA, 590 bp, Homo sapiens
gaaaggggccatggagcattgggtttcattcctcaccaagctgagcactccctgaaagggattagaagagaaagaaatggagccgaccctcattcagtaagaaatgtcctccttgggttcagtgggatgactgtagaggcggggcgggtaggagaactgggactgtcaccctcctcaattccttgtygcctcctacctccacaaggcattgcaaaatgaaattaggtgaatggagcccttaagctggggaacgaggggtgtgacatattcagggagctgtttgtgtgagggaaggcacaaaacacctgcctagaaagagaaggtggctgtggagtctcacacggccccagaggagtgagattcactttggtcacaggatggaggctaggcaggaatttgaggttaggtaggatcaacgcgtgcagagcattaagagaaatgtaacctgcaaaaaggtagaatttccagactgctgaccactatcactgcttcagctaaaacaaaacaacattgaatgttttttcctaaatagaaatggatgacatattttacatcctgcataggaaggaaagtaaagccatctggcaact

SEQ ID NO: 470851 - DNA, 282 bp, Homo sapiens
tccttcaacacttacatatttagtctaaattggcttttaggtttccctttgtatctcccaataagtacagtaagacaggaatatagggggcaattaaccaacagacatcaataaatatttatyaaacatttattatatttagttatccagccaatagaaattcatttggtgctgtattgagtccaatttttctgctttcccaggtttgcctgcccctctccacactgttcctctggctgcttgctcagtgtaaagtccctgccacagccaccatcttctctc

SEQ ID NO: 470852 - DNA, 531 bp, Homo sapiens
ctcagtgtacagggcccagaataaaacaaaaagtattcacagagaagaggaaaaccatcagatctcacccacggcagactgctaggaagaggggcttaaaaaaacgctgggaagacagagwaggggggaagactgcagggagtgtgttccctggagaagagtcaccttggtgaagccagcacaaccacaacagtgggcgtggtaaggagaagcagggagagcctgaaggacattgggtttccctgaacagaggggcttgctggggagcagcagggtgagtccagggttcatagcagagggctgtggaggcaagacagaggggtttggaggtgaagggcatttgctactcctcatattaccacagaagagatgaaaaagaaaaaaaatactccatttcttaggaggttgcagtataatattcccagcttctcccacaccctccatcacacctgtgagccaacagcacaaggaatctgggggaagaaacaaggtcttcttggccctgagccttctggtttccctttcatatct

SEQ ID NO: 470853 - DNA, 553 bp, Homo sapiens
tacccagttaaggaatctgggaaagaaaacagaagtggactgaaatgtgttggtcttatctttgtctggcctctatgaatatcttgactgtcatcaaaaatatctctttagtagatattactatagagattctgcttttcagacacacacaaatccttgcagacacttgatgtctgatgagtgtctcttttatgcattttgacttctgagaaggtctctatccccaaacagtgagcactactttgctaaaaawagtctgtgtgttctgaataaatggaaacgtcttaccaatatatgaattgctgatctttaaagtaaataaataggcgaatagattcttatccacatttcttctagccacaaattttaaggaaatcctgcagtcctttacaagggggggagtttctcagctagatggaaagatatgacgacaatttccccattcacaaaacatttcctgtctccgtaagtacccactgcccaattactcattttacacttattctgtgtgaatttacattgtgacttggcatttttaggcatccgtggttcc

SEQ ID NO: 470854 - DNA, 553 bp, Homo sapiens
tacccagttaaggaatctgggaaagaaaacagaagtggactgaaatgtgttggtcttatctttgtctggcctctatgaatatcttgactgtcatcaaaaatatctctttagtagatattactatagagattctgcttttcagacacacacaaatccttgcagacacttgatgtctgatgagtgtctcttttatgcattttgacttctgagaaggtctctatccccaaacagtgagcactactttgctaaaaaaagtctgtgtgttctgaataaatggaaacgtcttaccaatatatgaattgctgatctttaaagtaaataaataggcgaatagattcttatccacatttcttctagccacaaattttaaggaaatcctgcagtcctttacaaggrggggagtttctcagctagatggaaagatatgacgacaatttccccattcacaaaacatttcctgtctccgtaagtacccactgcccaattactcattttacacttattctgtgtgaatttacattgtgacttggcatttttaggcatccgtggttcc

SEQ ID NO: 470855 - DNA, 481 bp, Homo sapiens
tggatttggctaggaatttaagcatgttacactgaaataactttagctttcaattcttagtaaattcttctcaatacatttcttttaaatgtaaatgtcttatcatatttcatttttgtaaggtgacttatgagttatttctattttatgatgtcaagttactgcaatgacccaaagtactacagtaaaatatccctagaatatttcgtattgagtgctatgaagtggagwctattctccattagccaggcaatagccataaaaacttttattcttttccctttctctttctttcaaattttaagctattacctttagaggtaatgagtctgatcatgaactcactccctctctgctgtttaatgaaccccctcatggttttaggacagcagtgaacccttgacatctatttaccttccattataatttcacatcacagtaactgttactagaaacgtaaacataaccatggagtttttta

SEQ ID NO: 470856 - DNA, 400 bp, Homo sapiens
acacctcagtgcttcctgctcaccttcctttcacacatatgccataacttcttactttctcacatggatttcacacccctatcccactgctcctacctgcaatgcccttgtccacccyaccctgctctttacctaactcctattccactttcaggagccattttaggggacacctcctctaggaagcctgcttttacacacagccctctggccccagactgcattagctgccttttccattccttaatgcaccctcaatatacttttatcatatagaagttggtcatatctatttatgtgcctgtctcttgcatttggcagatattccttgaaggcaaggacttatcacctttgcttcttgagagcctagcaatgtttactgaactgaactgaaaataaa

SEQ ID NO: 470857 - DNA, 498 bp, Homo sapiens
gccccgacaagtcccagccctcggaggcagggcggggcgcagggactcccgggacccgcacctgtaaggccgacaaagcccccgcaagcgccccacccctctgtcctccgtgtctctctcgttccgcctcgattccccgagccctctccaggcagcgastggagaagcgaagtcggcctcgcccccgaactccgtggtcagcacaggtgtacgcacttccgaacaaagcccacgcccagacgtgtccgcaggggcccgaacaggcacacgcccgtgcgctcccggcccggcccccgcgctcctcgccccgccggcactgtggcgtgacgccccgcgcctccgtgtccaagcccgggaagccgccgtgccgggcccgcaggctctccatgcccaactgcccacgagcaagagctctgggcagggcttcccggaaagcgtggggtgcgggcgcggagcagaagttggccacaggctggagggggtggtgggtgccggcgc

SEQ ID NO: 470858 - DNA, 582 bp, Homo sapiens
ggcggagcggatgccagatcccaccgctaagagcctgggctgggaaagcaatctttccaggcagcccccagcccggtgcgccggccccgacaagtcccagccctcggaggcagggcggggcgcagggactcccgggacccgcacctgtaaggccgacaaagcccccgcaagcgccccacccctctgtcctccgtgtctctctcgttccgcctcgattccccgagccctctccaggcagcgactggagaagcgaagtcggcctcgcccccgaactccgtggtcagcacaggtgtacgcacttccgaacaaagcccacgcccagacgtgtccgcaggggcccgaacaggcacacgcccgtgcgctcccggcccggcccccgcgctcctcgccccgccggcactgtggcgtgacgccccgcgcctccgtgtccaagcccgggaagccgccgtgccgggcccgcaggctctccatgcccaactgcccacgagcaagagctctgggcagggcttcccggaaagcgtggggtgcgggcgcggagcagaagttggccacaggcyggagggggtggtgggtgccggcgct

SEQ ID NO: 470859 - DNA, 628 bp, Homo sapiens
gaatttcctttctatttaataatatactattgtacatatctatcacactttgtttatccattcatctgttgatggacacttaattgctttcaccttttggctctcatgaataatgctgctatgaacatggggttatgaatatctttctgagatcctgctttcaatttttggggatatatattcaaggtgagattgctagatcatatggttattctcatttttttwagaaaactattgttttccatagtggctgcaccattttacattgcacaccaactctgcacaagggttccaaattctccacatccttgccaacacttaatattttgttttgtttttggagagtagccatcctaatagatgcaaggtattaaaatatttttaaatgtcaaaaattcacaagatacaagcaaattcagtattttagaaagtcctgctctaccctggaccctgtgctttaagaaagccctgttctgactctcctagaggttatgctaccatctcctccttctagaacatatctgggtacctaggatccaagaattctgttgggacttgcaaaagccccttccccacataacagacagtgggctgctctgctggtatacacaacagaaagcctcagaga

SEQ ID NO: 470860 - DNA, 628 bp, Homo sapiens
gaatttcctttctatttaataatatactattgtacatatctatcacactttgtttatccattcatctgttgatggacacttaattgctttcaccttttggctctcatgaataatgctgctatgaacatggggttatgaatatctttctgagatcctgctttcaatttttggggatatatattcaaggtgagattgctagatcatatggttattctcatttttttaagaaaactattgttttccatagtggctgcaccattttacattgcacaccaactctgcacaagggttccaaattctccacatccttgccaacacttaatattttgttttgtttttggagagtagccatcctaatagatgcaaggtattaaaatatttttaaatgtcaaaaattcacaagatacaagcaaattcagtattttagaaagycctgctctaccctggaccctgtgctttaagaaagccctgttctgactctcctagaggttatgctaccatctcctccttctagaacatatctgggtacctaggatccaagaattctgttgggacttgcaaaagccccttccccacataacagacagtgggctgctctgctggtatacacaacagaaagcctcagaga

SEQ ID NO: 470861 - DNA, 606 bp, Homo sapiens
ctcgcttctccccactcccagatttgcaaaccttccaagaccactgtgttaataaatgaagagataaagagaagtattcacataatttgatgttgtaataattgtttttccaaaaaaaaaaaaaaaaaccctctgaagttatgaagactgagaggacatttactgagacaagtacatttctccactgattaaaccccagatttcacagattcagtttagtaaactagatttgaagtcacttcacaacattccaggaaagacattcygggaaagagagacaggaagagttgtggctaagacaatggactggtcctagctctatcgctctctagctgtaattatcttgggccactttttctaacaaagggataatactgctattcaccttgtaggcttattgtgacaatttaacgtaacctgctgagctcagttcctggtactcagcaagcactcaagtgttagctatgttctagtcacaatactggcacagacacttgtgaaatattcaaaagtgtgactaggaccatttctagggcatagcgggttaggtacaattctgagcttcaaacttcagaggtcctagctaccccactaatcagcagctca

SEQ ID NO: 470862 - DNA, 606 bp, Homo sapiens
ctcgcttctccccactcccagatttgcaaaccttccaagaccactgtgttaataaatgaagagataaagagaagtattcacataatttgatgttgtaataattgtttttccaaaaaaaaaaaaaaaaaccctctgaagttatgaagactgagaggacatttactgagacaagtacatttctccactgattaaaccccagatttcacagattcagtttagtaaactagatttgaagtcacttcacaacattccaggaaagacattccgggaaagagagayaggaagagttgtggctaagacaatggactggtcctagctctatcgctctctagctgtaattatcttgggccactttttctaacaaagggataatactgctattcaccttgtaggcttattgtgacaatttaacgtaacctgctgagctcagttcctggtactcagcaagcactcaagtgttagctatgttctagtcacaatactggcacagacacttgtgaaatattcaaaagtgtgactaggaccatttctagggcatagcgggttaggtacaattctgagcttcaaacttcagaggtcctagctaccccactaatcagcagctca

SEQ ID NO: 470863 - DNA, 606 bp, Homo sapiens
ctcgcttctccccactcccagatttgcaaaccttccaagaccactgtgttaataaatgaagagataaagagaagtattcacataatttgatgttgtaataattgtttttccaaaaaaaaaaaaaaaaaccctctgaagttatgaagactgagaggacatttactgagacaagtacatttctccactgattaaaccccagatttcacagattcagtttagtaaactagatttgaagtcacttcacaacattccaggaaagacattccgggaaagagagacaggaagagttgtggctaagacaatggactggtcctagctctatcgctctctagctgtaattatcttgggcmactttttctaacaaagggataatactgctattcaccttgtaggcttattgtgacaatttaacgtaacctgctgagctcagttcctggtactcagcaagcactcaagtgttagctatgttctagtcacaatactggcacagacacttgtgaaatattcaaaagtgtgactaggaccatttctagggcatagcgggttaggtacaattctgagcttcaaacttcagaggtcctagctaccccactaatcagcagctca

SEQ ID NO: 470864 - DNA, 638 bp, Homo sapiens
tgacaccttaggcatatcctaattatactgtgtcagaattatcttcatagctcattttaataataatgtgaaaagatggttttcattagacacatctgggaagaaacagaagagtggtattaaaaataaaaacacaattttgggagacagaaggagcctggaaggtcactaaatccaaccatctatctgcctgtggcccattcyatttttaggaaattctatatgaagctgaatctctcttcctgtagctttgacttattgctcacaattctggccattggagccacacccaggttcatattctaatgttaacttccccaaccacagcccactgttcagaaaaacaaggataagctattgttttggtagaggtgctgcttggatcaggagtgagcaccttagaggctggtggatgacccaggaggtaggtttgtgcagagatacgctagaacaaagacaatagtaagacaaattgatcaaaccagctctttctgggatttagttgatgttgggagtcagaggagaacctactaaatatgcagagatagcagaaagaccatacgagagagcatgtgaaaggtgtcagtcccttgagtcatctcaaaccgaactttctactttacagatccaaacagggc

SEQ ID NO: 470865 - DNA, 619 bp, Homo sapiens
tgcatatgaatgtttagaacagctttatctgtaatatcccaaaactgaaaacaaacctaataattcaaatgagcatccataccaattagtttaaattgtggcatagtcataagtagaataccatttatcaataaaaagaaacaaactattgatgcattctacaacatggatgartctcaaaataattatgctgaatgaaagaagctagacctaacagaatacatatgatattgctccctttatataaagttctagaaaatacaaactaatctctagtggcagtaagcaaaacagtggttgccaaggatcaggggaggagggctggagagggtcagggtgaaatggttacaaaagtcatgtgaaaagtatggctgactatctagattttggtgtacatatacgccaaaatttttccaatcatatgttttaatatgtacagtttcttatattcaatgaaacctcaaaaaactgttaaaaacaaaaatcaaagtcaaataaaagaagcaaatacattcagcagcccagttggtcattctaaagttctgcaggaatcctgaatgagactgagacattttaatgaatgccctgcaaaaataatgacaaagtagattggggacaa

SEQ ID NO: 470866 - DNA, 605 bp, Homo sapiens
tctctaatacagcctcagcttgtagtagacacaagcttatcttatagtgatgttttaaataatatttttgcttttgtttaaaaataaaaattaaatcaacaaatactgaatgcttacttattgttcagtaatttatttggggtaaaaataagccttgcacatgatcatgaatcacagtcataatttgagaacttataattgtaaaacaaaagtaaaatattgcttgtgttatttctttttcttttttcttttttttttttttttttgagatggagtcttgctctgtcacccaggctggagtgcagtggcccgatctcggctcactgcaagctctgcctcccgggttcacgccattctcctgcctcaacctcccgagtagttgggactacaggcgcatgccaccacacccggctaattttttgtatttttagtagagatggagtttcaccacgttagtcaggatggtctcgatctsctgacctcgtgatccgcccacctcggcctcccaaagtgctgggattacaggcgtgagccaccgagcccggccttcttgtgttatttctttaagaaaaaagtcgtcatttgaaaaaataatcaccccatca

SEQ ID NO: 470867 - DNA, 323 bp, Homo sapiens
ataagactattattgagagatttattttgaaattatacaccctacctattatttctcttttaatattcacagtcttttagagtttgaggctaaatttgtttgtgtgcatcaatttaataggtatactttcctttttttcccctttgtttgtaaatatatttcccatgaaaaatggtgtctgaagcagcagaatattatttactttgcatatattatcagagaaaaaaaaacaaataaaccttaatacgaatcttcatccaagatcaaaactttagtttctcagtagmattcagtataagaatcaatcttttttttcaagaaca

SEQ ID NO: 470868 - DNA, 587 bp, Homo sapiens
tatctgatgttcagttggcaagatgtctgaaattgctttttggcaagacagcaattgtgtactccagggattgttttccagcataggcaayatatatgaaaacatttagggaggccaagatgggtggatcacgaggtcaggagatcgagaccatcttggctaacatggtgaaatcccatctccactaaaaatacaaaaaaaaaaaaaaaaaaaaattagccaggcgtggcggtgggcgcctgtagtcccagctactcaggaggctgaggcatgagaatggcgtgaaccctggaggcggagcttgcagtgagccgagatcacgccattgcagtccagcctgggcgacagagcgagactgtgtctcaggaaaaaaaaaaaaaaaaaaaaatccattatatgtaatactaattgtttagttagcctcaatggatattttttgttaaaaactttgttttttaaactttcaagttgaagagtacatgtgtaggtttgtgatacaggtaaacttgtgtcatgggggtttgttgtacagattatttaagttcttaatcaattattttgttcggcctgccatctgactgaagaat

SEQ ID NO: 470869 - DNA, 657 bp, Homo sapiens
ctgaatcagttctactatgcccccggtgttagattgacctaccaggacttcagygccctctttcattcccacaccatggcctctatagggagggattgtttggctcataagctttcccagcccttaggctctgtgagctttcaatggttgacgggtgggatgaggagggaatctctacaatttaccaaataaagggggttcaatcaatgattttgtgttagactcaagggaagagtattcaacttcaaccaattattattcccaaggaatattgaaaatcgtttcctgaccaaagattttaatctcagctctcatgaagatttaggcttttcatgcatcttttctatattgttaaaaaaaatctatgtcttttgacatttgatgcttttccagtatgagagtatgtaataaatggtagactaaaactagggatctgcatgcacatttacagtaatgtttgaattttaatgatgttaatgtcaggctcctaaaggagagccagaaagtttttgtggcgtacctaatataccattcaaattagtactatttgttctccatccatccagaaatgtcagggcattactgatttacatgtaggacagtgtcttgagaagggacagtagtgaatttaaaacggggctgatctactgcagagtg

SEQ ID NO: 470870 - DNA, 595 bp, Homo sapiens
gccctggcaagtgaaatgaaatactcatcagcagatctcagtagaaaggaaatctcctttctcttccattcccacccagcagccaatccatcatgccatacttcggataggattacacttcaactgtctcaggcagatgagcatctattctatttttaaaagcttccagagaaagaggcttcaaaatttccctgggaaatccattccagggtttatcaaatccatctgaaagagaaatttctccttatgcctaatccgaaacacctgtgctgtgatttaagccattgcttttctcctgtaacttgcagtgaaagtaggaaatggtgactgccatttgtcctaatcaagagcaattgttttccagaatatctgaaatgatatacatcctgcaagttaaatatacatgcatgcatacacacacayactctcaggactctctacacaggcaagatcatataagcaaacattaaattctgggcctgaaggttaatggaagttgccatgtagaaagcccacctaggctgttctgaagcacagaattacagccagagcttgttcgtctcactcatttcagtggtggcaacatcaggaacgc

SEQ ID NO: 470871 - DNA, 482 bp, Homo sapiens
tttgaatttagaattatcacaattaactttgaaattaaacgtcactatcaaatagctggatgcacttttcaacaaatatggtagaacttgtatttctcatttgaatgtttttatctttaatgatgttaccattgaagattattctcttattcaactgtgttaccacttaaaaatattgatrgctctaattttagagttgttttctggtttaatctaggaaatgtgcagaaaaagcaacctagtgtgtgtgcatgtgtgcacatgtatgtgcctgggcctgtgcatgtgtgtgtgtggctgttactgtggagtccatatttctggttctattcaatcagccaccttactgagtatgcttagttgcccatgactttgtgctctttctaaaagtaaaatccacctgctacaaatattgtaaccgcaaaggagagccaaaataacatgctatgagctctgcagggcaattctaaaagaatagttcc

SEQ ID NO: 470872 - DNA, 652 bp, Homo sapiens
gttgagtttataagaatatttcctttcaatattccttactcagattatttgccagcagatgtggtcattgaaaagctgtaattagaaaccrgcactatagcactataggctgagcgcaatggctctcgcctataatcccagcactttgggaggctgaggcaggtggatcacttgaggtcaggaggttgagaccagcctggtcaacatagcgaaactccatctctgctaaaaatacaaaaattagccaggcgtgatggtgcatgccagagtagtcccagctactcaggaggctgaggtgggagaatttcttgaacccaggaggcggaggttacagcgaactgagattgtgccgctgcactccagcctgggagacagagcaagacaccctctcaaaagaaaaaaaaagaaaaaaagaaaccggcactatatcacaatactgtagtggactcgactttccttagaaatcaacatgcttaatgacattaatatctgaatagtaagtttcctttaagttgctagaatgtaagtttctagaggacagggattcttatctgtttgttcactgacatatcccaagagaccagggtagtgcatgcatgtgttaaatgctcaataaatatttgttgattgaataaagttagaagacaaggtt

SEQ ID NO: 470873 - DNA, 652 bp, Homo sapiens
gttgagtttataagaatatttcctttcaatattccttactcagattatttgccagcagatgtggtcattgaaaagctgtaattagaaaccagcactrtagcactataggctgagcgcaatggctctcgcctataatcccagcactttgggaggctgaggcaggtggatcacttgaggtcaggaggttgagaccagcctggtcaacatagcgaaactccatctctgctaaaaatacaaaaattagccaggcgtgatggtgcatgccagagtagtcccagctactcaggaggctgaggtgggagaatttcttgaacccaggaggcggaggttacagcgaactgagattgtgccgctgcactccagcctgggagacagagcaagacaccctctcaaaagaaaaaaaaagaaaaaaagaaaccggcactatatcacaatactgtagtggactcgactttccttagaaatcaacatgcttaatgacattaatatctgaatagtaagtttcctttaagttgctagaatgtaagtttctagaggacagggattcttatctgtttgttcactgacatatcccaagagaccagggtagtgcatgcatgtgttaaatgctcaataaatatttgttgattgaataaagttagaagacaaggtt

SEQ ID NO: 470874 - DNA, 652 bp, Homo sapiens
gttgagtttataagaatatttcctttcaatattccttactcagattatttgccagcagatgtggtcattgaaaagctgtaattagaaaccagcactatagcactataggctgagcgcaatggctctcgcctataatcccagcactttgggaggctgaggcaggtggatcacttgaggtcaggaggttgagaccagcctggtcaacatagcgaaactccatctctgctaaaaatacaaaaattagccaggcgtgatggtgcatgccagagtagtcccagctactcaggaggctgaggtgggagaatttcttgaacccaggaggcggaggttacagcgaactgagattgtgccgctgcactccagcctgggagacagagcaagacwccctctcaaaagaaaaaaaaagaaaaaaagaaaccggcactatatcacaatactgtagtggactcgactttccttagaaatcaacatgcttaatgacattaatatctgaatagtaagtttcctttaagttgctagaatgtaagtttctagaggacagggattcttatctgtttgttcactgacatatcccaagagaccagggtagtgcatgcatgtgttaaatgctcaataaatatttgttgattgaataaagttagaagacaaggtt

SEQ ID NO: 470875 - DNA, 551 bp, Homo sapiens
tgcagaaggtgtgtttacatatcatcctgtgaagcatgacttttcatctagatcaaacaataattctttaaattaattttgactattcttattccaagtccgtacatacaaaaagtgaactgatacctgcacatgtgatggctacattagcaaaagagctgccacatagctgtatgaagccctttgctattagaatcctgatacttcagattatcagctagttccaatgaagattttttttttttcatacaagtcatgaaatcaaagtaaaacttttggaagcttattctcaggtaaaacrtctgacattgttgggactgctgctataaattcagttcaaaagttccatattgttcaaaaggtcaatattgaagacatgtttttatagtagtaataggaatacaaaattttgggggagcacaggttcatggaaaaataatgttcttactaaattcataaagtaacagaccagaacttggaagtgattgtgggcacataattcataaatgtgtccaatccactgtgattgatattccactaaaggaaataga

SEQ ID NO: 470876 - DNA, 552 bp, Homo sapiens
tgagagatgttttcatcactcagtaacattctctaccttcaccatgcttcagtagtccacgtgacctcattctttttggactctggacaagagcytgtgacccaccaagtgcaggtacccagaaaatctgtctcactggccctttgcccttgccagcggagggcagtcaccccacacaatgaggcaaggggccaactgagctgctaatgcactgccatttgtggatggcagaactaaaggagcactataacactccctctgggcttcagggtcatggcaccctcacctgggcaccgatgtgctcccctcaaggtgacacgcctggtctggccatgggccctgcacaaagcttgcttgggtgtcggtacccagagtggctggccagatctcacactctctcatgtgctccttcctgcaaggggctgagcacagtgggctgagtagactcagcaaccctgctatgagtctggtgaaggggctgagaaaaatcctgcatcattggggcttggactttcttgctccagggaacatttgctccaccatattaacaac

SEQ ID NO: 470877 - DNA, 401 bp, Homo sapiens
cagggccccttttcagtgggatacttgtaaggtgatgtgaagatggagtttcttactgtttagttgaaacagcagcagcctgtgttctctttcttccttgttatacctcctggatagtccccccagytttcctttcctctccaaattagcctcttcccattcctccccttgtgcttcctttcccccaaggctggctgcagagagggcttcggtttccctttctccttgttgccctgaagataagtctgcccctcctgttctaagaaatgtgctgctagttgctaaagaataaaaactgtcaggtagcacccaaaccaatagtcatgaaataaatcataataaacttatgcaaaatgtattcttagtttatactgcagaccagacacaaagtggttgtgttg

SEQ ID NO: 470878 - DNA, 401 bp, Homo sapiens
cagggccccttttcagtgggatacttgtaaggtgatgtgaagatggagtttcttactgtttagttgaaacagcagcagcctgtgttctctttcttccttgttatacctcctggatagtccccccagttttcctttcctctccaaattagcctcttcccattcctccycttgtgcttcctttcccccaaggctggctgcagagagggcttcggtttccctttctccttgttgccctgaagataagtctgcccctcctgttctaagaaatgtgctgctagttgctaaagaataaaaactgtcaggtagcacccaaaccaatagtcatgaaataaatcataataaacttatgcaaaatgtattcttagtttatactgcagaccagacacaaagtggttgtgttg

SEQ ID NO: 470879 - DNA, 578 bp, Homo sapiens
gtgtggtggcatgcacctgtagtgttagctactcaagaggttgagacacaacaatctattgaacccaggaagtggaagttgcagtgaaccgagctcatgccactgcactccagcctgggtgacagagccagaccctgtctcaaaaaagttaatttttcatggtaagcattcrtgaataatgtctaaacttgataagtaaaaaaaaaaagccatataattttattacttagagcagtagttctcgattccaggaaagattgggaagtgtatcctgtggatggagaatgctactagcatttaatgtcaagaagagagatgctaaatgcacagaactatctcatacaaatcccacctgaaataccagtttctctttctgagaattgctgatttagagttaataataaactcaccagaagaattaatattaaaaatgattttaagaaaatggtggctggctacagtggctcacacctgtaatcccagcactttgggaagccaaggtgggaggatcacttgagcccatgagttcaagatcggcctgggcaccataatgagaccctttctctatgaagaaaaat

SEQ ID NO: 470880 - DNA, 578 bp, Homo sapiens
gtgtggtggcatgcacctgtagtgttagctactcaagaggttgagacacaacaatctattgaacccaggaagtggaagttgcagtgaaccgagctcatgccactgcactccagcctgggtgacagagccagaccctgtctcaaaaaagttaatttttcatggtaagcattcgtgaataatgtctaaacttgataagtaaaaaaaaaaagccatataattttattacttagagcagwagttctcgattccaggaaagattgggaagtgtatcctgtggatggagaatgctactagcatttaatgtcaagaagagagatgctaaatgcacagaactatctcatacaaatcccacctgaaataccagtttctctttctgagaattgctgatttagagttaataataaactcaccagaagaattaatattaaaaatgattttaagaaaatggtggctggctacagtggctcacacctgtaatcccagcactttgggaagccaaggtgggaggatcacttgagcccatgagttcaagatcggcctgggcaccataatgagaccctttctctatgaagaaaaat

SEQ ID NO: 470881 - DNA, 578 bp, Homo sapiens
gtgtggtggcatgcacctgtagtgttagctactcaagaggttgagacacaacaatctattgaacccaggaagtggaagttgcagtgaaccgagctcatgccactgcactccagcctgggtgacagagccagaccctgtctcaaaaaagttaatttttcatggtaagcattcgtgaataatgtctaaacttgataagtaaaaaaaaaaagccatataattttattacttagagcagtagttctcgattccagraaagattgggaagtgtatcctgtggatggagaatgctactagcatttaatgtcaagaagagagatgctaaatgcacagaactatctcatacaaatcccacctgaaataccagtttctctttctgagaattgctgatttagagttaataataaactcaccagaagaattaatattaaaaatgattttaagaaaatggtggctggctacagtggctcacacctgtaatcccagcactttgggaagccaaggtgggaggatcacttgagcccatgagttcaagatcggcctgggcaccataatgagaccctttctctatgaagaaaaat

SEQ ID NO: 470882 - DNA, 610 bp, Homo sapiens
attgtagaaagatgtacaaaaatacagcacctgacggtgctgtataattgaatgaaaagtccctcatatataaatagtctttaaaaattggcatgatttcagtatattgaatgctaagtttttttaagtcgcggttttggttaatacctgttttgggaagctggaaatttttttaaaggcattaggaaactggcagaattaaaatagtgatgagagggagattgaaatttattattaatatctatgttatctaagtgattgtttactgaccatgatataataaattgagacataacgtaggaagagaagggatgtaaaattattcagtataaagaattttaacaagtactggtattttttgagtgatagtatttttactatgaaattttttgcatactgtttaattgatgaaggattaaagatctagtttgcagatcawatagttataagaatttacggacttaaaatatataataattttattctctcaactctaaagtctatataaagattgcttttcagaatttatagtaatgtgctatagatcaaagataggcacttgaagctgattcttgctgggcacacagtggctcatgcctgtaatcccatc

SEQ ID NO: 470883 - DNA, 566 bp, Homo sapiens
ttgtactctttctctatttctcagaccagccaacacttagggaaaatagaaaacctacgttgaaatatggggggctggttcccccgatactctttggtgttggcacctaaaacaaatgaaagagttcaaattgttcttaggaaggtgttccatttcttgggaaaattattttaagatatctgtctacatgaacaatattccatacctgtgttacgttccaagctaaactagaaaagtattttttaaaaatcataaaaacaaatgctccaagtttcttctgtgtttccagtgcagttcagatttctatttggagaccacattaattgtgcagcaaagctaarggacatttaaggggaatgtggaaatgatttttcaacatccttcctagatcagttccctcttttaatatagaacaggtttgtgagactttatatacaatttaaaaaatagatatggtcattagtatattcaaacaaaagcaaaatctgcaaaaagcatcaataagcacaaatatagaaaaagaaaaaagataaaaaaatttctgaaaatataaacttctttttaaa

SEQ ID NO: 470884 - DNA, 476 bp, Homo sapiens
cttgaaggacacttggcaactccgcagaaatgagccgctgaaatgagggatcttacagtggaacagagataaatagaataagtaggggagggctacagaggctcaagggaggaaccaaaaactgatttcatctgtttcagagtttttcacagtgatgggggaggagggaggagcaggcggtaccagcactgaccaaggggccacagagctctcactcgggcattttttccttcccagtgatgatggacaatatgaaaagtaactcactctaytggggggcaccgtgctgaggacttaacatacattttctattttcatcttcataacagttctattaatataaagcaggtattgtatttattcttttagcgtaattagtgcttttcaaatgagaacactgagactcagggaagttacgaagttgtcctagctagtaaatgatagaatcgaaattaaaatccagatgccttacatct

SEQ ID NO: 470885 - DNA, 476 bp, Homo sapiens
cttgaaggacacttggcaactccgcagaaatgagccgctgaaatgagggatcttacagtggaacagagataaatagaataagtaggggagggctacagaggctcaagggaggaaccaaaaactgatttcatctgtttcagagtttttcacagtgatgggggaggagggaggagcaggcggtaccagcactgaccaaggggccacagagctctcactcgggcattttttccttcccagtgatgatggacaatatgaaaagtaactcactctactggggggcaccgtgctgaggacttaacatacattttctattttcatcttcataacagttctattaatataaagcaggtattgtatttattcttttagcgtaattagtgcttttcaaatgagaacactgagactcagggaagttaygaagttgtcctagctagtaaatgatagaatcgaaattaaaatccagatgccttacatct

SEQ ID NO: 470886 - DNA, 622 bp, Homo sapiens
ggtcagctcagagtttaccttaaaagtccacactcaccaagtgtctcaaccaagagctccaaaagagaagtcaaaagagaaaaccgagacacggagaccacactaagagctggacgtgcgtagtccacccatgatggtctcrgtcgccctgtagccaggcttgtggtcatttccagaaacaggggtgggaagtgggagtttttctgctgtcctgaatcaatgagtaggattcagacttgggaattaactggcactcgttctaaagacaagatctgagagctgggagcagacccctcctcgaggctgacttgaggtggaagactgccctctgactccaccccccaccaccgcccctccagccctcgaagaaggctgtgaaggaaggttactggagtggtgaggcttctgcccactggggagtgatgcaggtgttgcccttcacgatgcctttctgttccacacagccctgtgccagggcacaagatgtggcatgtgaacaaacgcgggctggggtctagtctccactgagaaggagcaacagcagagcagagagagaacggccgagcagtggcctgtccccttgacatggtgcagtaagagaagtagtgggcacagtggaagg

SEQ ID NO: 470887 - DNA, 622 bp, Homo sapiens
ggtcagctcagagtttaccttaaaagtccacactcaccaagtgtctcaaccaagagctccaaaagagaagtcaaaagagaaaaccgagacacggagaccacactaagagctggacgtgcgtagtccacccatgatggtctcagtcgccctgtagccaggcttgtggtcatttccagaaacaggggtgggaagtgggagtttttctgctgtcctgaatcaatgagtaggattcagacttgggaattaactggcactcgttctaaagacaagatctgagagctgggagcagacccctcctcgaggctgacttgaggtggaagactgccctctgactccaccccccaccaccgcccctccagccctcgaagaaggctgtgaaggaaggttactggagtggtgaggcttctgcccactggggagtgatgcaggtsttgcccttcacgatgcctttctgttccacacagccctgtgccagggcacaagatgtggcatgtgaacaaacgcgggctggggtctagtctccactgagaaggagcaacagcagagcagagagagaacggccgagcagtggcctgtccccttgacatggtgcagtaagagaagtagtgggcacagtggaagg

SEQ ID NO: 470888 - DNA, 623 bp, Homo sapiens
tcattttggagtttaaatctgggaaaaagccttatccttaggcttctgacatttgtgaaagtaaaatatcaaaatggtggatctgttccaaacatgatataaagagcaaaaaatctgaaagaagccagaagaccacagctactgacacaacctagcacccatcagtcatgtgcctctgagtaaagtggtccgattttcttgaaccttggaaaatgaaagtactgcctactccaggcacacaaagggctatctcagaggatccaacacccacataaagaaaaagtaytcatgacactgaaggcatcatctcttctcttcatttttgctttcttctctgagctacaggttttgggatactttgctctctgtcacttctccctggagctaccctttgccaactcctcaggtagaggaaggataaggataacatgccaaccctttctacaatcctaattcacttcctcctgagtccccatcaaaaccaacaagcatccacataacttagtagcatggtcaaaactgatattctcaaaaaagaaaggaaagtcaagggacacctttgcttgtcttcttcctagacacacttccaaagataactagtattagtgagaggtgaagccagc

SEQ ID NO: 470889 - DNA, 580 bp, Homo sapiens
gccttgtctctattttttaaatgttttaattaaaataaaaatctatccatattttttctttttttttgcgtatggctgcttaaacattttakttcagaattctatcctctgaaaagtgagtagcacataaatgctcattttgaggaattacaaagcgaaccccagggtcaccacctcccaggttgacacacattgtgaccgctccattctttccacttaaaccttccccaccaacatcccagggcccgatttttatggtaattatgtcctgcttgtctctattattttgtcagctaagtatccctaaacaatatggtctggttttttgtttgtttttgtttgtttgtttttttcagacggagtttcactctgtcacccaggctggagtgcagtggcatgatctcggctcactgccaccttggcctcctgggttcaaggaattctcaggcctcagcctcatgagtagctgagattacaggcgctgtccactgcacctggctaatttttgtatttttagtagagacggggttttgccatgttgaccaggctggtcttgaactcctgacctcaggcgatccgc

SEQ ID NO: 470890 - DNA, 580 bp, Homo sapiens
gccttgtctctattttttaaatgttttaattaaaataaaaatctatccatattttttctttttttttgcgtatggctgcttaaacattttagttcagaattctatcctctgaaaagtgartagcacataaatgctcattttgaggaattacaaagcgaaccccagggtcaccacctcccaggttgacacacattgtgaccgctccattctttccacttaaaccttccccaccaacatcccagggcccgatttttatggtaattatgtcctgcttgtctctattattttgtcagctaagtatccctaaacaatatggtctggttttttgtttgtttttgtttgtttgtttttttcagacggagtttcactctgtcacccaggctggagtgcagtggcatgatctcggctcactgccaccttggcctcctgggttcaaggaattctcaggcctcagcctcatgagtagctgagattacaggcgctgtccactgcacctggctaatttttgtatttttagtagagacggggttttgccatgttgaccaggctggtcttgaactcctgacctcaggcgatccgc

SEQ ID NO: 470891 - DNA, 580 bp, Homo sapiens
gccttgtctctattttttaaatgttttaattaaaataaaaatctatccatattttttctttttttttgcgtatggctgcttaaacattttagttcagaattctatcctctgaaaagtgagtagcacataaatgctcattttgaggaattacaaagcgaaccccagggtcaccacctcccaggttgacacacattgtgaccgctccattctttccacttaaaccttccccaccaacatcccagggcccgatttttatggtaattatgtcctgcttgtctctattattttgtcagctaagtatccctaaacaatatggtctggttttttgtttgtttttgtttgtttgtttttttcagacggagtttcactctgtcacccaggctggagtgcagtggcatgatctcggctcactgccaccttggcctcctgggttcaagsaattctcaggcctcagcctcatgagtagctgagattacaggcgctgtccactgcacctggctaatttttgtatttttagtagagacggggttttgccatgttgaccaggctggtcttgaactcctgacctcaggcgatccgc

SEQ ID NO: 470892 - DNA, 239 bp, Homo sapiens
cagtcttgagcagtgggaggcctgtctcttatcaaagccrcaggcttcggactccgaggggccaatcctggctctgtcctccccagcggaagcggctgctgatatagcctccgaggtggtgaagtgctggggtgcatatatgcaccttgagggggtgctgacataaccaagactctgccactaggagtctcttggcaggtttggacgagacccagagtggtcttggggagaagcccagg

SEQ ID NO: 470893 - DNA, 237 bp, Homo sapiens
gaaaaggcggccccagtcttgagcagtgggaggcctgtctcttatcaaagccgcaggcttcggactccgaggggccaatcctggctctgtcctccccagcggaagcggctgctgatatagcctccgaggtggtgaagtgctggggtgcatatrtgcaccttgagggggtgctgacataaccaagactctgccactaggagtctcttggcaggtttggacgagacccagagtggtctt

SEQ ID NO: 470894 - DNA, 516 bp, Homo sapiens
ctggactcaccctgggtgatggagagtttggtcccctcgatggactgccactgctgcctccctgagctccgtgtgtccagctcaactcggcagaaatacacagactggtcctgcttctgcaggttggagatcctgaggaagccgctcttctgaccctctgtccagttcagaaagagccggttcacataatccttgtgaatggaaggcggccttgtgctgtagaaggactgccygtggaagtggccccgtctccaggatattctcacgtcgggagctgtggctaactcccaggggtaatagaaggagaaggggatttccacagagccacccatggaggctgagaggtgttttggttgagtgaccccataaaggtagcttggaccagatcctgtggagccacctagaggagggagggagtgagtaggggagagaccttgaaaccacctcaagacacaaagagggtgaccccagaccctcccgcaccttcacccacaggcagtcgtgtgacaggtggct

SEQ ID NO: 470895 - DNA, 588 bp, Homo sapiens
gttctggagaaaatctcctgtttttgttctaacttaattggctttkcccatagaaagatatttgaggggaagactggaccttcagcacccctcattggaatggctttgtccatgtatcaggctggccatttggacccatggccaagttaaagctggaatgactgtgaagctaaaagctaatagctaatggtgtggacacacatgctgcagcagattaaaaagatgccttgttttgcatgatcccctaaagtaaacaagatttaattatttgtttgtgtaccttactagctttcctaaagttggatattttatcagtagtgattaggctaaaaagctgacgccaggttaatagtcctcattttagaaagatgcatttaaatatctaaatgcagaagtttgccattatcttacatgtaccaaatttgtttcttaaagatcatagtcctatttaaagtgtttttctaaaataaaataatttcttaattaaaaaaatatgaagtacattgctttaatagaactttagagaatttgaagtactagtattagttacacccatccgctcggcaatgaagagcattaacataggag

SEQ ID NO: 470896 - DNA, 570 bp, Homo sapiens
ctcccacctcaggctctcaaaatagtggaattgtgtgagccaccatgcctggccccaagaaaaggattttagagatatttataatgaatttgattttctaagagtctgatgtttcattttcagtattatattgcatcactgatctatagcttccatttttagttcttcactcatactgtcaatattcattgaacaaagagaacaggacaatgttaattaattttctctaagttttaagacagagagcctttcctkaaatctattttccaactccacaattttaggagtgtagctgcctagaacatcactttaatatctgggaaccaacttcattgcagaaaagtagaacacatttttttctcatgaaattagtgatttaaatcatacatttatgcaactattgttaaaactcatgcaaagaaatatgtttgaatgggaacttcaaatctaaaggtttggttcattcttcactggtgacctaaggtaagaatttttgtcttagataacatgagccatctgatttctttaaatctaatcaacaaaaaatgttactttgcattttcttctgtt

SEQ ID NO: 470897 - DNA, 647 bp, Homo sapiens
ctgctgccggtggatggtaccagagtccatgatctgctctgtcacttcaccttagctcagtgcagccagggacaccttgcaaggtgccagccctgggagcccctcttccgcactacacagctccctccactcctctcttatcactgggcagacgaggaggtggtacagcacatgggtttggagctagacagaaggaagaacagcctaacccttggtgcacccccatccaagctggggagctgcatccttttgagctggctgcaggaggaccctggctgagggctggtggctggccccacagcctcccccaagctcctccactgacccaggagtgcccagacgggtggcccccaaaatcccagcctggggagctaggcacctcactcttggtctgacctctccaggccaggctctcctcaccccatgccctgggccaaggtcctaccagccatgactactgcatgacaagaggtggggggtacagacctcaggtacatttgaccctgaggttaaaaggggttcaggtcaagaggtgggagaggaaaggggtagatgggaggtggaatctgtaggaaagagaaaaagcaaagtcrttcactgactgagtagcccccagggagtggagacgggtccctggggagggagca

SEQ ID NO: 470898 - DNA, 370 bp, Homo sapiens
tgcactaattattattattattattattattattattattattattgagacggagtctcattctgtcacccaggctggagtgcaatggcatgatctcgactccctgcaacctctgtctcccaggttcaagcaattctcctgcctcagcctcccgagtagctgggaccacaagtgtgccccagcacaaccagctaayttttgtatttttagttgacacagggttttgccatgttggccaggctggtctcgaactcctgacctcaggtgatctacctgcctcagcctcccagagtgctgggattacaagcatgagtcactgtgcccagccaaatttttaaatggtccactctgccttcattttatagtgaaa

SEQ ID NO: 470899 - DNA, 389 bp, Homo sapiens
aaaatacaaaaatcagccgggcgaggtggcactcgcctgtagttccagctactagggaggctgagtcgagaggatcgcttgaacctgagaggtggaggctgcagtgagctgagatggtgccactgcactccagcctgggtgacagagcaagactctctctcaaagaaaaaaaaaaagtcaagagcatgggaagtattaaaatctaacataatcaacggtctcccaycagaacagctccatttttttgctatcattatgtgttaatgtctatttgctaaacattgatatctgtactaaagtttcaagtgtaccatataacacattagtgctgacttaggtttaatatcctttgctgtacattaaacttcagtatcatacctatatatcac

SEQ ID NO: 470900 - DNA, 501 bp, Homo sapiens
cccacccaacccagggccttggaatcctgggcattctgccagcagccaatgcaatggggaaggagagagcagagarggcacatctactttctagggactattccaggaagtggtcacatctgcttgcattccatgggtgagaattagtcacatggttcatctccataccaacaaggaatgctgggagatgtagtccccagattggcattcttgtctcgctgacaactctcctttccggaagggaagcatgaacacttggtggtcacagtgggggtcgtggggagagagaacacagtgagcatgaagtctctgcccctgcctcagccttgcctggaaggcagagttcactgactcaatacctcattcacttattcattggaatgcatcctcattcattcattcattcatttgcaaaatcattcatgaacttattcattcattcgtttttttcccccaggtctcatgcacacactcatctgtgcacatgcattcatacacaca

SEQ ID NO: 470901 - DNA, 501 bp, Homo sapiens
cccacccaacccagggccttggaatcctgggcattctgccagcagccaatgcaatggggaaggagagagcagagagggcacatctactttctagggactattccaggaagtggtcacatctgcttgcattccatgggtgagaattagtcacatggttcatctccataccaacaaggaatgctgggagatgtagtccccagattggcattcttgtctcgctgacaactctcctttccggaagggaagcatgaacacttggtggtcacagtgggggtcgtggggagagagaacacagtgagcatgaagtctctgcccctgcctcagccttgcctggaargcagagttcactgactcaatacctcattcacttattcattggaatgcatcctcattcattcattcattcatttgcaaaatcattcatgaacttattcattcattcgtttttttcccccaggtctcatgcacacactcatctgtgcacatgcattcatacacaca

SEQ ID NO: 470902 - DNA, 604 bp, Homo sapiens
aggctggtgtgcagtggcgtgatcttggcctactgcaacctctgcctcccaggttcaggtgattctcctacctcagcctcctgagtagcggggattgcaggcgcccaccaccacatccggctaatttttgtatttttagtagagacagggtttcgccatgttggccaggctggtttcgcactcctgagctcaggtgatctgcctgcctcggacacccaaagtgctgggattacaggcgagagccactgcgcctggccaggcttgtgtacagtgaacttgagcttcctcagtgctgaagrcctggcttgatctgtgaccttggacaggttattgcaagccggagtgtgcacttgtgacccaggggttggcggggctgggctgagtgcggggcaggaaagagggaaccaaatctgggagaccagccccttcaccctctctgtgcccctgcaggtattcggaggaggagattcggcagaaagtggggacattccggcagatgctgatggagaaggagggagtgctcaccagggaggaccggcctgggggccacatgtgagtgcttacctgtgtggggatgagggagagggggtgcaggctcaggcag

SEQ ID NO: 470903 - DNA, 609 bp, Homo sapiens
cggtgaggcacgagatgagcccaaagaggccgtcgggaggcaagagccaggtctgtcggggctgccgcgaggcaggtggcaacgtggcctggggagaccgacgtgaggcacgagccgggcccggagaggccgctgtcacgaggagctgcgcctctccaggccgccggggagccgaaggyggggcctgagaggcctcacttcgaggagcctggggcctacaaaggctgccaggagctgggcaggagctgagccgaacgtggctgttgcgaggcaggagctgggccggcaggcgcagccgggagggagagctgggcctggagaggctggctggaaacagttctgggcctggagaggctggctggaaacacttctgggcctggagaggatggccagaggcgagagctgggcccgtggaggctgcccacaggcagaacacaagcctggcctgaggcggccacgctgaggcaagagctgggcctggcgggggtccactgtgaggaggcagaggccgtgcctcaagtccagaggcctacgacaggcaggagctgggcctggcgaggccaacttcaagacgctttgggtttgcacaggccattggttggggtgcag

SEQ ID NO: 470904 - DNA, 616 bp, Homo sapiens
ctgggactacaggtgcccaccgccacgcctggctaatttttttgtatttttagtagagatagggtttcaccgtgttagccaggatggtctagatctcctgacctcgtgatccgcccgcctcggcctcccaacagattcatatattttttaaaacactgattagtcaggcaacaatactggggaggggtctcctcattcccagtgatgcaaaccccactgcacggctccrgggttgcaagggctacagagccaaaaggctctaacttatgatttcattactttatttgtattgtgagacagggtcctgctctgtcgcccaggctggagagcagttgtgcacttatagctcactgaagcctcgaccttctgaatttaagccatcttcctgcctcagctccccactggctggtaccacagttgagtgccaccatacctggctattttttaattttttgtagagtgaggggtcttgctatgttgcccaaactggcctcaaacacctgacctcaagagatctgcccacctcagcctcctgagtagctgggactacaagtacacatcaacatgcctagctacatttcattttattaaattttgaaaaacatttttattgaga

SEQ ID NO: 470905 - DNA, 635 bp, Homo sapiens
tgggatcggtagattttctctgagactttagttgctgctgatgtgactccatgaaaccgctattacctgcaccctaagtgcaaagcccacttcttccttctgggctatttttttgaagttactgctcctagtaatgcttgcaatggctttctgctcccacagaaacctggaagaaactttgttggaaagtggggtgtgggttttgttatatccaccagaatccaggatgccaactcttgtgcccaataggacgctactgcctttaggagaaacagagggagacggagccrcgatctaaacctgagtttccgaatgccaccaactctgtactaatgagtaacgtttattgagaatttatttgtcagatgctaatgtaagcactttatacatgcaaacttacataatcctcacaaccaccccaggaggttcatattattaccctctccatttacagaggagaaaattgaggcacagagaggttaagtaacttgcccaaggtaacacatttaaaaaatggtggaaccaagtagcatatccaggcagtttcactttagactttcctttccctgagcaatcctctttcacctcttcttgataagatctagatacaaagattccactttccactctggcag

SEQ ID NO: 470906 - DNA, 623 bp, Homo sapiens
atcaagctcaggaaacaatgatgagaagttcagggttgtgtagggctctggcaaggcaagacgtcatacacaggaaaggmtcagataataaaggccttctatccctgtgaagaaatgtggattatattttgaaggcagcaggaagccactaaaggagaggagaaaagtaataaaaccctcatattgattttagaagatgaggcaacaaggaatccatggtcaagtgtagctctcagagacagtgagaactttcatttccatgaaaatgatgggagcacaattatagcaattttagacctaggacatacagcactcagtgtactttcaaatcaataagagtccaggtcaggaagaagaagggaggagtgccccaggctggtatctcgcagttcttgacctcaggtcttaactggcaactgggcagccctggggtccggggacagcttgtaacgagagtggagtgcagagcagaagaacattgtagaagacaatgacgaggtgatttatagctgcagtgagtgctcttcttctggaatgctctaacacacaggagagggccatggtcagcctgtgctgtgtcccaggccaccgctgaccaatggagaggtggacacctcactgca

SEQ ID NO: 470907 - DNA, 529 bp, Homo sapiens
ctgaaggcactgctgcgggaagatctgcttctcagctcactcctgtggttgtcggcctcaatttcctcctggctgttggccaaatactttaattcctcaccgccragcctcctcacaagctgcctggtgtgttcacaaggcggcagccggcttcccccaaagtgagtgagccaagagagggagagagacagagacagagataggaaagggagaagacacacaactgacagaagccagtttgtgcatttgttgctgttttcgttattgcttttgcttaacacaacaaagcttatttctcacgtctgccacatatatgttgtgggtggccaatgaggttctgctcatcacggttgcccagagacccaagctgatgtaagttccatctcggcataggcatccagaactgcagagccctggaaaagatgctgaaccacatgccggtttttaaaacattattattttttatgatttgaagcaattatagactcacaggaagttacaaaaatagtactgaatttttgatgttcga

SEQ ID NO: 470908 - DNA, 529 bp, Homo sapiens
ctgaaggcactgctgcgggaagatctgcttctcagctcactcctgtggttgtcggcctcaatttcctcctggctgttggccaaatactttaattcctcaccgccaagcctcctcacaagctgcctggtgtgttcacaaggcggcagccggcttcccccaaagtgagtgagccaagagagggagagagacagagacagagataggaaagggagaagacacacaactgacagaagccagtttgtgcatttgttgctgttttcgttattgcttttgcttaacacaacaaagctyatttctcacgtctgccacatatatgttgtgggtggccaatgaggttctgctcatcacggttgcccagagacccaagctgatgtaagttccatctcggcataggcatccagaactgcagagccctggaaaagatgctgaaccacatgccggtttttaaaacattattattttttatgatttgaagcaattatagactcacaggaagttacaaaaatagtactgaatttttgatgttcga

SEQ ID NO: 470909 - DNA, 627 bp, Homo sapiens
ctgaaggcactgctgcgggaagatctgcttctcagctcactcctgtggttgtcggcctcaatttcctcctggctgttggccaaatactttaattcctcaccgccaagcctcctcacaagctgcctggtgtgttcacaaggcggcagccggcttcccccaaagtgagtgagccaagagagggagagagacagagacagagataggaaagggagaagacacacaactgacagaagccagtttgtgcatttgttgctgttttcgttattgcttttgcttaacacaacaaagcttatttctcacgtctgccacatatatgttgtgggtggccaatgaggttctgctcatcacggttgcccagagacccaagctgatgtaagttccatctcggcataggcatccagaactgcagagccctggaaaagatgctgaaccacatgccggtttttaaaacattattattttttatgatttgaagyaattatagactcacaggaagttacaaaaatagtactgaatttttgatgttcgacttagaaagcaagttcttccaaatagaaaagtgcttccaagaccctgacctctgaactctgttttaaaattcagttagcttcaccaaaccatatagtt

SEQ ID NO: 470910 - DNA, 483 bp, Homo sapiens
tgaggaataatgtggtttgcgctatgacacatggatcttcggataatgtgcccacctcctttgctgcaaagtcgtctgataatagtgctgtctgaggccctgtgggcagaaaacacaaatccatacttggaatatgtatattctgtcaagttgaawctctgtccccacagggtgctaagggtttaatataacttgccaccatatgactggttggtcttctcaaagggtggtgccatattggggactgagcgctggtttctcatctgggcaggttgggtgttcggaggtggcagagttcagcgtgggtgggtgggagggcacactgttgggctcatgcacagcttctgtgtgctacaacagctcctccattcacgaatctgcagaacttgcccagggatgccaagacaggctggctgtcattttctctgtaggtgaatgtgtaatatgaacaaaaacttcccaaggaccccttttgttgtttag

SEQ ID NO: 470911 - DNA, 522 bp, Homo sapiens
cagctcctccattcacgaatctgcagaacttgcccagggatgccaagacaggctggctgtcattttctctgtaggtgaatgtgtaatatgaacaaaaacttcccaaggaccccttttgttgtttagtgtctcatctttaatggctcctttctggtgtgtatgaatgtgtaatataaagatagtcacactttgtgccaagttccacgtgtctacccatatccttctatcttgctgtccccattggtccaacctttctccttccagtcccctgaccagccagccgtttgtcattgccatgaatgcaacgatactcttattttgggcccatcttctttccacrtaaagtggaaaaccaagtgcccttcttaaagtgtttcccacaaggaggatttttcatcaccactgtccttcaaggacacccatgaatggggctgtggatgccgttgctgtccattttcagcttgctctcacataccaacctggcccatttgtaaaaacagcttggacgttttcctcttctgc

SEQ ID NO: 470912 - DNA, 592 bp, Homo sapiens
tgtttgtgttctccatgacatagtttggggcagtaaccatagttatggaagctgtcgtctccagaactccaaggctccaaccagggttctttctagtgattagaggctcaacatgcaataattcattctttattttggagaagaagttgtagaaatcccagaccaatgggcctttaatatttttctgatgtggtggacctgagtcttcctagcaaaggtgccatatctggtccagtccctgcaactggggctactatttggttgagtytgtggcatcccactgttatcttcaggacttgtttgtttgttgtagggaccagaactggtaaattaagtaaaaactgcacctttcaaatttttaagagtggctataatgtctactatttcccctaggatgtgaaattgtctttgatttgctatcttggccagggtggggtatagttttagatgtttccattggttttccccggtgcaataactcttaccacagaggccaaagcaccaacgtggggcttgtgctcattattaagaatggtgattccactgtgcatccataaaaaggaatgagatcatgtcctctgcagggacatgg

SEQ ID NO: 470913 - DNA, 592 bp, Homo sapiens
tgtttgtgttctccatgacatagtttggggcagtaaccatagttatggaagctgtcgtctccagaactccaaggctccaaccagggttctttctagtgattagaggctcaacatgcaataattcattctttattttggagaagaagttgtagaaatcccagaccaatgggcctttaatatttttctgatgtggtggacctgagtcttcctagcaaaggtgccatatctggtccagtccctgcaactggggctactatttggttgagtctgtggcatcccactgttatcttcaggacttgtttgtttgttgtagggaccagaactggtaaattaagtaaaaactgcacctttcaaatttttaagagtggctataatgtctactatttcccctaggatgtgaaattgtctttgatttgctatcttggccagggtggggtatagttttagatgtttccattggttttccccggtgcaataactcttaccacagaggccaaagcaccaacgtggggcttgtgcycattattaagaatggtgattccactgtgcatccataaaaaggaatgagatcatgtcctctgcagggacatgg

SEQ ID NO: 470914 - DNA, 576 bp, Homo sapiens
aggctacattctgctgagtaagaaaccactaccagacctcagagacttctagtgatgatgtctgatttctcactcaagttagacgtcgttcacaagccaggactctgctccatgtttcctgtgatccaggacccaggctgacaggggtgccttcatctggagcagggcaggtctcacagcacagcaggcatggcaggtgcaggctacctcataaagcttccacagacatgtctccccatttttcactggacagagcaagacactgggccactcctgggttcaagaaggtgaggtttataatccccctgcaagggggagatggacacatgccaaaggccaaacttgacctcgatgggcaagatgtacaaatttcctgtttayacagagagaagatgctgaacactcagtctgcgctagtgtatataccgcctggcatcccactgccccagagcatccttattatccctgtgctgctccatccactcatggctcttccgctgtcaggacctctatcctgggccccgggcatcaccactgggctggtagctgcactcagtatctgggctggtgagggac

SEQ ID NO: 470915 - DNA, 630 bp, Homo sapiens
gagaaaacataatccacacagaagtccagttcctaacttactttgttgggggacaatattgccagcctagaccagcactgaacagaaaaaaattcttaagcaggtgtactcaattgttagcagtacttttcttgagaagtaggactctgattttctactttatatakacttctatattgttgaaaaaattgttttacaatgggcatgtcttacttaaaaaatgaagttgaactgagtggttgcctttgattaatttataattattgaactcaattttctattttttattaccctttgtatccacaggatctgtagagggcaaaagagagggcgaggaggtaaggtagactcagtctgaataatagctaaataagtgaatctctctgagtctctgctttttgttctacacctacagggttaataatccccatttgctaggactgatgtcaggattccattgcccatgtgaaagctccttcaactcaatgaagttgatttccttccttcctgcaatgttctaacaccatttaaacatagtataaattatggctgagatttaaaaaggaacaaatattcctacatacattagtctcagtggggattctacaaaagtgctcagaaccacacttt

SEQ ID NO: 470916 - DNA, 630 bp, Homo sapiens
gagaaaacataatccacacagaagtccagttcctaacttactttgttgggggacaatattgccagcctagaccagcactgaacagaaaaaaattcttaagcaggtgtactcaattgttagcagtacttttcttgagaagtaggactctgattttctactttatatagacttctatattgttgaaaaaattgttttacaatgggcatgtcttacttaaaaaatgaagttgaactgagtggttgcctttgattaatttataattattgaactcaattttctattttttattaccctttgtatccacaggatctgtagagggcaaaagagagggcgaggaggtaaggyagactcagtctgaataatagctaaataagtgaatctctctgagtctctgctttttgttctacacctacagggttaataatccccatttgctaggactgatgtcaggattccattgcccatgtgaaagctccttcaactcaatgaagttgatttccttccttcctgcaatgttctaacaccatttaaacatagtataaattatggctgagatttaaaaaggaacaaatattcctacatacattagtctcagtggggattctacaaaagtgctcagaaccacacttt

SEQ ID NO: 470917 - DNA, 543 bp, Homo sapiens
tttagttgttctcccacggccccttggactagtcaggggaaaggattactaggcctttccagggaattccacttggcgtgacacacctcatcccacatcttcacagatgctccacaaatctcatgtgttgttcttagggagatgtgttggccaggaagygaagtaaatattgaccaaaggcttcatattcccgcaattgtttcattaatcccaaacgacagggattaacctgcttagaggcaagaattctagtgcctgcagcctttcattaagtgccctgtgatcttcagaatatcacacagcaacacaaaacacgtacaaaaaaataacactttatccatttctggctctgttggtttgactgtagcatctaaaataactgagctctgattccaaaacacttactgcagagacaaacttgaaaatgtattgacagagccacttagaaaagcactagccgtgaagtgatggtcttcggtgtggttaaaatggagataaagcaagatattccaagactgtattctatattccagatgcttgggt

SEQ ID NO: 470918 - DNA, 601 bp, Homo sapiens
tttcattcaacattaactgagtcattgctatttaccaaggtctgtaccacgcacccaggtataatgattgataagaaatagcccctgttctttgaaagcgaacacagcctagtgaagaaatcctatataaacagataaatttaataaatataataagttttcggaaggtaaaaagtatatctgtgcagaggggaagtagaggcagtagcagaagtagtacccctgcatttgaaartcgggtaacttcaggaaggaaggaatatttgactgaggtcttgaagaatggtagcaatttgctgggtgcaagtggccattcctggcaaagccaacaagtgttcagggttggaagatggtgctcatgggagggacagacatttagagtgactagagcatggggtgcacccagggatgaggctcagggggtggggccagccagtgcagggccttctaatgaacgagttcgcaaaagttcatacggtgggcctcaaggagcaatgagcaggtcctacaatgcacctgacgtgtaatgattcccacttgtgcacatcatcatccccttttttcttgcctcctgtagctcacccagacacactgtagttca

SEQ ID NO: 470919 - DNA, 601 bp, Homo sapiens
tttcattcaacattaactgagtcattgctatttaccaaggtctgtaccacgcacccaggtataatgattgataagaaatagcccctgttctttgaaagcgaacacagcctagtgaagaaatcctatataaacagataaatttaataaatataataagttttcggaaggtaaaaagtatatctgtgcagaggggaagtagaggcagtagcagaagtagtacccctgcatttgaaaatcgggtaacttcaggaaggaaggaatatttgactgaggtcttgaagaatggtagcaatttgctgggtgcaagtggccattcctggcaaagccaacaagtgttcagggttggaagatggtgctcatgggagggacagacatttagagtgrctagagcatggggtgcacccagggatgaggctcagggggtggggccagccagtgcagggccttctaatgaacgagttcgcaaaagttcatacggtgggcctcaaggagcaatgagcaggtcctacaatgcacctgacgtgtaatgattcccacttgtgcacatcatcatccccttttttcttgcctcctgtagctcacccagacacactgtagttca

SEQ ID NO: 470920 - DNA, 501 bp, Homo sapiens
gtcatttttactaaggaggatgctcttggggggaaaaaaacccccaaaacctaaagaatttaaaataaaatagtctttcgttcaaacatgcaatcaggcaaaaacattttccaccccttcaaacctgcatccccaagaggcaaaaggcttacgtgttcagacttctcctgttcttttttgtccgtctgcaaaaactgatagttttcttttgccagcttctggactagttcaattcgtccgatttcatctctttcctggagcttgcacatcacccctgccttaagagttggagaaaaagcgaagatatacttaaaaccacagtcccaggacatgacacmaccgcaaagttcaccttataataagctcatcttttccactgcctggattaaatcatggtcttggtaaaatattttgcctttcaaaaattgaagttacattattataacctaagagcaccatgccaaaagacttaaagttgagtctgcgtatcaccctacttta

SEQ ID NO: 470921 - DNA, 506 bp, Homo sapiens
tcctgtcctgtggggtatcgcggatgaggggtgtcggtgagggaagtgtggcgggtcaggacgcccgttcaccagttcgctgctttactacccgccgccttcaagctgtcgggttaaacctttccaagaaggctcccttgagctctctctctctcttcctcttcccctttgctccttccttctctccctcccgcaactgctcccggggatatgtcccactgtcgctagtgtttcagtttctcctgcaggatttccgtatgggrgtggggtgggctgggctgcagcggggcggggcgtaggagcacacatcatggggctgcagcggtggcaggagctccgtccgcagggcctgtctgacggagaatggagcggattgaaggtcgcatcttttctcttcgaactctgaaggcatctcccagccggcactgggggcgctggccccttgatttcctaaaagacaaccagtccccctgcgagacctcgctggccattcccgcagcctcccc

SEQ ID NO: 470922 - DNA, 545 bp, Homo sapiens
tgctggcccaggtgctaagcccctcacttcccggggccggctgggccggccggccagccgctccgagtgtgggaccgtggagcccacgcccacccggaactcacgctggcccgcaagcactgcgcgcagcccgggttcccgcccgtgcctctccctccacacctccctgcaagctgagggagctggctccagccttggccagcccagagaggggctcccacagtgcagcagtgggctgaagggctcstcaagtgccgccaaagtgggagcccaggcagaggaggcgccaagagcgagcgagggctatgaggactgccagcacgctgtcacctctcactacctgcttctaatatgtcttgagggcttttctcccctctttaaataagagtcttattctctatatatggttttggaggctggagttctttatcaggcatcaacaaacttttgctgtaaaaggcaaggtagtaaatatttctggttttgtgtatgacagtttctatccaactgctcaaatctgccatagcccaagagaggccacagac

SEQ ID NO: 470923 - DNA, 586 bp, Homo sapiens
tttttcttttgttgcttccagaaagggaactgcatgttagtcatcaaattctggctgaaagccacagacacccacccacattcatatccactaggtcacacgtccaggcttttgcacgtgccatgccgggttcctagaatgcccttcctctcactgggcgcaacttttttacttaaacgttttttaaaaatagaaacagactgggcacagtggctcacatctgtaatcccagcactttgggaggcygaggctggcggtgacaatcacctgaggtcaggagtttgagaccagcctggccaacatggtgaaatcccatttctactaaaagtacaaaaaattagctgggtgtggtggcacgtgcctgtagtcccagctacttgggaggctgaggcaggagaatcgcctgaacccaggaggcggaggccgcagtgagccgagatcacgccactgcactccaacctggacagcagagtgaaactctgtctcaataaaataaaataaaataaaataaataaaaatagagacaggggccaggtgtggtggctcatgcctgtaatcccagcacttgcagaggccgagctgggtg

SEQ ID NO: 470924 - DNA, 640 bp, Homo sapiens
gtgcagtggtatgaaagggaaagcgttgaaaggtacttaggagttccaagtccccgaattttggctaatttataaaaagcaggaccatcttgaccaaggtttggagaagattgccttttgtttcctgtctgagtgttggtgccagctattagtgaaagtaatgcatctctttcagatcactttgtgtgagaggattgtcctatatttataaagggcatttaacgttctcctgataaaactttagctttttatggaacagacacttaacaggaattttaaaaatttcatctacagcttgttacatctgtaatggaaaaaaagcaaactgtttctagtctctaatacatataacttgtaagtgggtttcaaagctatttataattttgaagtgattgagtacatacactttggaatcagactcaggatttgaatctggttttgccattcacttgtataactggacaaatcagtttctttggatgagccttaatcatcttgaagtggggataattctaataacctcatggaattaccactggattaaatgaaatttgtaaagccatacatagctcactgtctggcgcacagtaagtgcttaggaagtaagkttttaaaactgccacttaatgtgatttatatt

SEQ ID NO: 470925 - DNA, 509 bp, Homo sapiens
atatcaacggttatttgcctcaaaggaatcctcagtacatattgctcattttgctctttcctcataaaaaaaaaaagagtttaggtagtttactaagttgattttttaagaatatattttatcttttcgaaaatagttttccatttagacatttgttcctcattttaatttagtttgttacattttgctgaggaacttgagctcagcttttctacctcaaagttttgactacttattctgtgctaaaaacttttaattttggacattatatttggtaaaatcaaccacagcatttggaaggtctgccaggaaatttgaggtttccgtgcaacttgaatattgcataattcaacattttacccattttttcgatgtagtttccccaatcagggaaagaaatggttattgcaacattggatttttttaagcatgccaccttatgagacaatttttggatktatttaattatcatgcctggaaacacatgcttccctccttttccttttctt

SEQ ID NO: 470926 - DNA, 562 bp, Homo sapiens
ctctacgaaaacatgaccatacagcttctttaagccagtccctgatctcatttctttttactaggtggaacctaccaamtggggtctccagccactcccgctagtattcttccgcctacagaaatttgaaaactccctgggccagaactcccagagggaggagcgggctgccatctttgctgtttgagcctctggagtttttaagcttggtggtctgagagaaggacagtagcactgaaggaaaggagagggaactggttcttgtggggaaatgcagctttgtatctcaggtgatttgaaattgagaggagaatggaccttcaagcagaaaagggaaactatgttgttaatcatgtgggattggaattctggagtgccatcagggagggccagataaatggaggagacaagtatgttcctcattaaaatgacacctagctccgcttttcctcctgccccactcaagtttccaggagaagagagctgaagagagattcttcaggtactcagggatgggaaggcagaggaagggcatgctgactctttcctcccaggttttgtt

SEQ ID NO: 470927 - DNA, 526 bp, Homo sapiens
ggactacaagtgtgcaccaccatttccggctgtgtgtgtgtgtgtgtgtgtgtgtgtgtgtgtgtattttttgtagagayggggttttatcatgttggccaggctggtcttgaactcctggtctcaagtgatccacccgcctcggcctcccaaagtgctgagattagaagtgtgaggtaccacgcccggcccgtgacattatttttaagtacaaaagccatacatgtttactatacaaagtttagaaaattctcaaagattttttttaaaggaagcagatcatcactcataatcccacagcaaagatgatcattgttaacattttggcctatttccatagtctttttttctatacagattgttccttacaatggcattatgtcccctaaacccatcgtaacttgtaaataccttaagtctaaaatgtgtttagcacacctaacctaaatgtcatagcttagcctcgcctattttaagcgtgctcagaacacccacgttaattagtctacagttaggcaaaatcatc

SEQ ID NO: 470928 - DNA, 526 bp, Homo sapiens
ggactacaagtgtgcaccaccatttccggctgtgtgtgtgtgtgtgtgtgtgtgtgtgtgtgtgtattttttgtagagacggggttttatcatgttggccaggctggtcttgaactcctggtctcaagtgatccacccgcctcggcctcccaaagtgctgagattagaagtgtgaggtaccacgcccgkcccgtgacattatttttaagtacaaaagccatacatgtttactatacaaagtttagaaaattctcaaagattttttttaaaggaagcagatcatcactcataatcccacagcaaagatgatcattgttaacattttggcctatttccatagtctttttttctatacagattgttccttacaatggcattatgtcccctaaacccatcgtaacttgtaaataccttaagtctaaaatgtgtttagcacacctaacctaaatgtcatagcttagcctcgcctattttaagcgtgctcagaacacccacgttaattagtctacagttaggcaaaatcatc

SEQ ID NO: 470929 - DNA, 553 bp, Homo sapiens
ttattattcactagcaccctaggtgtgataattgaagtaaatatcttttatacaaacacaagaatgtgtgggttgtttttatttaaagtgctctggcctgaggacgagcagcaaacactgtcattcgaggtccaaagggcacctcaagaatcgccgttcccgaggtcgtcccctttgcacctgtccgcrggtcctcgggcgtgtggcttccgggcacacagaaaaccgtgtggttctaggatacatggggatctcgggcactgctctgtcaatctgcatctggttcacaggaagggcttcgccagggcctgcgttcctacttgctgttgtcaccagcactgtttgcctacccttgaaccaagcccttaccctccctggcgtccgcttccttttctgtaaaatggagacaccatctcctgtcatataggcttgctgtggggaaccaggaatggtggccagtgctggtgcggcactgggctggtggtggcagccccaatcgatggcacttgggcgaccaggactacggccagtctcctctgccgtgtggcctgca

SEQ ID NO: 470930 - DNA, 553 bp, Homo sapiens
ttattattcactagcaccctaggtgtgataattgaagtaaatatcttttatacaaacacaagaatgtgtgggttgtttttatttaaagtgctctggcctgaggacgagcagcaaacactgtcattcgaggtccaaagggcacctcaagaatcgccgttcccgaggtcgtcccctttgcacctgtccgcaggtcctcgggcgtgtggcttccgggcacacagaaaaccgtgtggttctaggatacatggggatctcgggcactgctctgtcaatctgcatcyggttcacaggaagggcttcgccagggcctgcgttcctacttgctgttgtcaccagcactgtttgcctacccttgaaccaagcccttaccctccctggcgtccgcttccttttctgtaaaatggagacaccatctcctgtcatataggcttgctgtggggaaccaggaatggtggccagtgctggtgcggcactgggctggtggtggcagccccaatcgatggcacttgggcgaccaggactacggccagtctcctctgccgtgtggcctgca

SEQ ID NO: 470931 - DNA, 327 bp, Homo sapiens
ggcctgctgagccccctgcacctctttcaggaagcctcccagagcccccgcgcygtgccctcagcaccaggggtcaggctacaaatgccccgcaaagcccagcgggactgtttcctcagccccactggtctctgccctaaagcaggcgagttctggagccaggcaggggtgaggaaggtgccagggttgtggcccctcatcgcccctctatgatctctgacacctctccgggtggcatcaggcccccatcacagcgaaggctgggtggtgggggcactgcgctcaggggggccgtcccgccctgtggcccgggggcgatttcccgca

SEQ ID NO: 470932 - DNA, 524 bp, Homo sapiens
ggaagcatagaatctgatagcagaccacagatttggtttcacccagcaatatctaggtttcaaggtccattttgggggccctcatcctctagccatccttctcaccttaatcttttctcacccggaagctaaaggcactttggcatcttaattgaaggaagctttggactggcccacagagtttggtaacaagctcaagaaggtctcttctagtggaagcctggatggaaggcactaagcttctctggccacagccccctgtcactcagttcttccctctgtctcagtcagggacagaggaaaagaatcagggaaaagaagcccctgatgttgtccccagagattgatgcagttcctcagtgaagtggaggtttctggagcttctgcgccctggagsatttgccaccttttttttctctatttatactttcctacttatcttttctaaagcatgtccatacagggtagttttatgattgagtccctgaccctccagcctcagtccagacccttatgtgagcaga

SEQ ID NO: 470933 - DNA, 588 bp, Homo sapiens
aagccaatagaatgtggattttcattacccatccgcaatcaactgagtcagaatttctaggtaataggtctccaggaatacttttaacagccttgctcccccaggtggctgtgatgccggggacaaactgatgtaggctaacctgccctgacttggttagacctgagactttcctggaattcaggctcaggggactctctccatccgggagaaccttgctctcaactgggttgcccatcagggacactggcctggagacaaattcttatgcttatttttctccccttcatttctgaaactgccatccacgtggagaccaggggtagggtggcagtggctcatgctgggttaggcgcctgaacttaattcaccttgcttttyctaccatcttctctgctgtgctaagcacctattttagaagaatttccaaaaaggtctcctaaatgctcattttaaggcgaggagaaaagctacaagaagtgcaccttttttttttcttgctgaaatcaaaacctgcattttctttttcccccactgattagaatctcagcattccaccaagacaatctccaaaaaaggaaaagcaaa

SEQ ID NO: 470934 - DNA, 471 bp, Homo sapiens
atacttaacatgtagcagattctgctgtgttttttgatgtcttgttatattaaatctcttcaaccacactatgaggtaggtgtgtctttccttctcatgctgtaaagtaaggaaatggagtcatagagaagttacatgtgcaggcctcatagctagtacatgctggaagtgcattccrcctctgggacctggaatctttattcttaaccatttcagaacatgacctctgttcagttggaatagagtagaggaatgaattgcaagaaagcacaaacctactctgagcagctaacttactatttatgttaattaaagaaattaatgcatttaggtcccttccctcctctctcctaccccctctctgcttggtggaccttttaatgatttatatacatcattttgtgttattttggtaagggttaagaaggccttgtggcatcaactcagggaggccatggtttaacaaagatc

SEQ ID NO: 470935 - DNA, 490 bp, Homo sapiens
cctctacccacctgccacaaaagctccactcctgagccatctgaaagttcctgaaggaaacagtgtagcatttgactaatcttgcataacattttcataatccacacccattgtcctaaggaaaaacctgttttcctcatccaaagggatcaggaaacaatcaaaacagaagcctgcgacagaatggcaccttcagacaactaaatcagactgaaagagacttccagcattcacggaccctcaggattttataagctctacttcrtgccagacactcgtctggaaaaaggagatgtgaagatgaacaaattgctttcctctccccctaagaacgtgcagccttttagggccacaagtgtaaaaacaactagtaacttccgtggaggaatattgaggccacagagggagaggtgatgagttatccatagggaatttgggaagccctctcccaggggataatgcctgtgatgagttttgaagcacgaatagg

SEQ ID NO: 470936 - DNA, 490 bp, Homo sapiens
cctctacccacctgccacaaaagctccactcctgagccatctgaaagttcctgaaggaaacagtgtagcatttgactaatcttgcataacattttcataatccacacccattgtcctaaggaaaaacctgttttcctcatccaaagggatcaggaaacaatcaaaacagaagcctgcgacagaatggcaccttcagacaactaaatcagactgaaagagacttccagcattcacggaccctcaggattttataagctctacttcatgccagacactcgtctggaaaaaggagatgtgaagatgaacaaattgctttcctctcccsctaagaacgtgcagccttttagggccacaagtgtaaaaacaactagtaacttccgtggaggaatattgaggccacagagggagaggtgatgagttatccatagggaatttgggaagccctctcccaggggataatgcctgtgatgagttttgaagcacgaatagg

SEQ ID NO: 470937 - DNA, 601 bp, Homo sapiens
ttttcagctgacttttttccagtcctgcttgtatacttctgaggctgtgattttggactcagtgagagtcagtgatgtaagttcaaatttgagactgaatgtgaaacctgcgcctccatgggctctggtcatttgcaataaccaggaggccacttactttgcagtaatgccaggacctcaccctagtccccagttggcacgtgacctctcagtggagagcacaccagccacacacttcctcttggttctgagtcctggcatggacacacgaattaggtcttccccacatgagaccacaaatactgcactgaaactctttgccttctcaaaaggaaacactttagcccayttcctcagtggctttcccaactccaagcatcattcccaaagacttggagctgaaactgagtccagggaagtcaccttttctgtctcaccttttttcatcaatccagcaggaaaattgtttcttcctagacacctcgagatatgtctcaagctttctcaacaaagtgagtgagcaaaatggagaatggcatggtttgattctttgtagctttcaaccagagaaggagggagagaaagaggcagaacaacagca

SEQ ID NO: 470938 - DNA, 586 bp, Homo sapiens
taccactcaagatccctggaggatatatacctcttaaagtatatggtaagaaaaagtttgttcattgatacacasgtatgatctgtaacatatcacaattccattttatcttctatgtcctcaaagttcagagttaagtttagcactcagtttactttctcttagattaggtttcctagcacataattattccttggccacctaggttgttacttgcattagacctactttacttatcttaatgattttatggttttattgtacttatgagagagtgagtagattgcttggttcgtgtgacctttaactcacccataagcaaataatacacaaactagtttggaaaattcagttgaattaaacaaatcatcaatgtgaagcaaaaagaaataggttagatgatggtattattgacagctagatacaatgcttagaataccagattagcagtgtattaattagatggccagaaatttaaattattaaaattattacattttcctcttctcattgataatcttactaattattcctgttttgtgaccaaaaccttaggtattaggaataggacacatgggaaaatcgc

SEQ ID NO: 470939 - DNA, 268 bp, Homo sapiens
actcgctgtccagggtcacttcaagtctctgctccacacattccagcccacttcaagtctctgctccacacattccagcccagcatacctcaggtgcaccagctgcggctcaaatggamccaggtatagctcaggccaccactctgaagccacagatagtaaaccgtggcagcgtccatttggtgctaactccgcacttgaataaaagatatagttggcactttgtgtttcaaatttcacactctttccactacagtatgttgctgct

SEQ ID NO: 470940 - DNA, 631 bp, Homo sapiens
ttattttattttattttgatacaaggtcttactctgtcccccaggctggagtgcagtggcaagatcatggctcactgcagcctcaacctccctgggctcaggtgatgctcctacctcagcctcccagatagctgagactacaggtgtatgccatcatgcctayctaatttttttttttttttttttgacatggagatgaggtttctctatgttgcccaagctggtctcaaactcctaggctcaagcaatcctcccaccttggcctcccaaaatgctgagattacaggcgtcagccattatgtctggccaccatttatttttgagagagatccctgaaccaacaccaaaaatgaaaaatggcccctgtttgatatttaccctttgggattgtctagtcgtgatttagccaagaggtctgtctgtagcatctacatctgctatcattcctggtcaggtacatgatccatggacccaaccttaggagtgaagttaattccgttgagtctaggtagttctgagtttccacatcatctcatgcacttttcatgagaacgccttttgcctggtatttaacagatgaggcagctgaggtgtaggtaaagagatttccccaagctctcaaagatgctca

SEQ ID NO: 470941 - DNA, 631 bp, Homo sapiens
ttattttattttattttgatacaaggtcttactctgtcccccaggctggagtgcagtggcaagatcatggctcactgcagcctcaacctccctgggctcaggtgatgctcctacctcagcctcccagatagctgagactacaggtgtatgccatcatgcctacctaatttttttttttttttttttgacatggagatgaggtttctctatgttgcccaagctggtctcaaactcctaggctcaagcaatcctcccaccttggcctcccaaaatgctgagattacaggcgtcagccattatgtctggccrccatttatttttgagagagatccctgaaccaacaccaaaaatgaaaaatggcccctgtttgatatttaccctttgggattgtctagtcgtgatttagccaagaggtctgtctgtagcatctacatctgctatcattcctggtcaggtacatgatccatggacccaaccttaggagtgaagttaattccgttgagtctaggtagttctgagtttccacatcatctcatgcacttttcatgagaacgccttttgcctggtatttaacagatgaggcagctgaggtgtaggtaaagagatttccccaagctctcaaagatgctca

SEQ ID NO: 470942 - DNA, 631 bp, Homo sapiens
ttattttattttattttgatacaaggtcttactctgtcccccaggctggagtgcagtggcaagatcatggctcactgcagcctcaacctccctgggctcaggtgatgctcctacctcagcctcccagatagctgagactacaggtgtatgccatcatgcctacctaatttttttttttttttttttgacatggagatgaggtttctctatgttgcccaagctggtctcaaactcctaggctcaagcaatcctcccaccttggcctcccaaaatgctgagattacaggcgtcagccattatgtctggccaccatttatttttgagagagatccctgaaccaacaccaaaaatgaaaaatggcccctgtttgatattyaccctttgggattgtctagtcgtgatttagccaagaggtctgtctgtagcatctacatctgctatcattcctggtcaggtacatgatccatggacccaaccttaggagtgaagttaattccgttgagtctaggtagttctgagtttccacatcatctcatgcacttttcatgagaacgccttttgcctggtatttaacagatgaggcagctgaggtgtaggtaaagagatttccccaagctctcaaagatgctca

SEQ ID NO: 470943 - DNA, 597 bp, Homo sapiens
ctcaggggcctaccttcctgagaaggaactggccgtgactggcagagccagtgagatctgattgggcaacaagataattgtgatttttttttaaatcctcctcaaacaaaagtgtttaaacaatagcatctcattgaaggcacaactgttcaaaatcwgggaagaatgttcagatgactgtatcacattgactacaacactggtcattttctgatttgttcctcaaatctgaggaaagagccagatgctctgggaacaacatgttccaggtctactctaccagggctatttggaaaagaatccctgtaatataaaatggttctgtctatctgaggtagtattattgagctttatctgtggtggtataattatggctaagttacctacataatttgtcattgttttactttctctctgtggctttgaacacatgtgccagactgtgacacttgggatttaggaatgctcagaaggccagaaaggaaactatatttagtcaaccatatattaactatattagacatctcattggctaactataatattttttgtttttctcaatgggaatacaaagttttggtcatcttattggcaaga

SEQ ID NO: 470944 - DNA, 597 bp, Homo sapiens
ctcaggggcctaccttcctgagaaggaactggccgtgactggcagagccagtgagatctgattgggcaacaagataattgtgatttttttttaaatcctcctcaaacaaaagtgtttaaacaatagcatctcattgaaggcacaactgttcaaaatcagggaagaatgttcagatgactgtatcacattgactacaacactggtcattttctgatttgttcctcaaatctgaggaaagagccagatgctctgggaacaacatgttccaggtctactctaccagggctatttggaaaagaatccctgtaatataaaatggttctgtctatctgaggtagtattattgagctttatctgtggtggtataattatggctaagttacctamataatttgtcattgttttactttctctctgtggctttgaacacatgtgccagactgtgacacttgggatttaggaatgctcagaaggccagaaaggaaactatatttagtcaaccatatattaactatattagacatctcattggctaactataatattttttgtttttctcaatgggaatacaaagttttggtcatcttattggcaaga

SEQ ID NO: 470945 - DNA, 539 bp, Homo sapiens
ggtcctttccctagccctctgcagtgctcccttccttgtaacctgagggtccctgtgwgcatgggtctgttttggagatctccattctatccattggtctatttttctaaatttttataccaatgcatactttcttagctgccataggtttataataagtcttgatgcctacctatgtaagctctccctctgaattactttaatgatgctgtggctaggattttgacatttcacaggagacttggctcaaacctcatgccccttttttgagataggattatggggttactattctttcctgggctgtgatctcagaagtaacttactcagttttccagttggtcctttccagggactcttctcacttgtgtcttattaaataaagatttgatttgagaccatggaagtccagtgttcggaatgcctgtatctgttatgttctactttttgggacaggtggacataaaggaactgaatctgaaataggtggtaaggaaaatcccctgaaatttgaaaatgggtgcctgagaggtgatttt

SEQ ID NO: 470946 - DNA, 539 bp, Homo sapiens
ggtcctttccctagccctctgcagtgctcccttccttgtaacctgagggtccctgtgagcatgggtctgttttggagatctccattctatccattggtctatttttctaaatttttataccaatgcatactttcttagctgccataggtttataataagtcttgatgcctacctatgtaagctctccctctgaattactttaatgatgctgtggctaggattttgacatttcacaggagacttggctcaaacctcatgccccttttttgagataggattatggggttactattctttcctgggctgtgatctcagaagtaacttactcagttttccagttggtcctttccagggactcttctcacttgtgtcttattaaataaagatttgatttgagaccatggaagtccagtgttcggaatgcctgtatctgttatgttctactttttgggacaggtggayataaaggaactgaatctgaaataggtggtaaggaaaatcccctgaaatttgaaaatgggtgcctgagaggtgatttt

SEQ ID NO: 470947 - DNA, 566 bp, Homo sapiens
cccttactagccaataaattattttggacaatcagacatgcctttggaaaaaatattaataagtatgctgcctggcatcatgccattcataaaagtcaactctaaacctgaatatagccgggtgcagtggctcacgcctgtaatcccagcactttgggaagccgasgcgggcagatcacaaggtcaggagttcgagaccagcctggccaacatggtgaaaccccttctctactaaaactacaaaaattagctgggtgtggtggtgggcgcctgtagttccagctactcgggaggctaaggcatgagaatcacttgaacccaggcgtcggaggttgcagtgagccaagatcgcgccattgtgctctagcctgggtgacaaagcgagactctgtctcaaaataaacaaacaaatgaaaccctgaatataaaaaatgaaagtaggtcagccacagtggctcaggcctgtacactttgggtggccaagatgggaggattgcttgagcccaggagtttgagaccagactgaacaacatgacaaaaccctgtctctacaaaaaatacaaaaa

SEQ ID NO: 470948 - DNA, 427 bp, Homo sapiens
tcttcatacttaaaaaaaaaaaaggatcacagcagtactcatgatgagaaggatcctttggctgccccttagcacctgcattaccatccatcaataactstcttccattggaaagtctctctccccgtacctcatgttttgagtcatttcatctcctgggtatgtctctctctaccttatcctaccctccccagtgctagcggagtttcaaggttcagcgccttgatgggttaatcattggtcactaggtaaaatatctcagtggcaggcccaggaaaaggtgaagtgtcctaggacaggaaaaagatgaaggaaacggaaagggaaactgactcgaatcccaccttatcatgcagagtccaaccaatatattttaaatagctgtcggtgaggaaagacgtgctgtagctttgcatccaacacccaa

SEQ ID NO: 470949 - DNA, 427 bp, Homo sapiens
tcttcatacttaaaaaaaaaaaaggatcacagcagtactcatgatgagaaggatcctttggctgccccttagcacctgcattaccatccatcaataactctcttccattgkaaagtctctctccccgtacctcatgttttgagtcatttcatctcctgggtatgtctctctctaccttatcctaccctccccagtgctagcggagtttcaaggttcagcgccttgatgggttaatcattggtcactaggtaaaatatctcagtggcaggcccaggaaaaggtgaagtgtcctaggacaggaaaaagatgaaggaaacggaaagggaaactgactcgaatcccaccttatcatgcagagtccaaccaatatattttaaatagctgtcggtgaggaaagacgtgctgtagctttgcatccaacacccaa

SEQ ID NO: 470950 - DNA, 427 bp, Homo sapiens
cacccgtcaaccaggcttcagacacagagtaaagaagcttccaggcgaccccagcccccaggcatccaaatcaccgccagcattcaggtctttccaagtaaaggccagataccacagagcaaagacaaactgttctcacaggccctgtctgaattagcaacctatagaatttgtgagttcaggccaggcayggtggcccacacctgtaattctaacactttgggaggcagacgtgggagaatcacttgagatcaggagtttgagaccagtctgggcaacatgatgaaactccatctctaccaaaaaatacaaatattagccaggtgtggtggtgtgtgcctgtagacccagctacttgtgaggctaaggtgggaggatcgcttgaggctgcagggaaccgtgatgacgccactgcactccagcctgg

SEQ ID NO: 470951 - DNA, 427 bp, Homo sapiens
cacccgtcaaccaggcttcagacacagagtaaagaagcttccaggcgaccccagcccccaggcatccaaatcaccgccagcattcaggtctttccaagtaaaggccagataccacagagcaaagacaaactgttctcacaggccctgtctgaattagcaacctatagaatttgtgagttcaggccaggcacggtggcccacacctgtaattctaacactttgggaggcagacgtgggagaatcacttgagatcaggagtttgagaccagtctgggcaacatgatgaaactccatctctaccaaaaaatacaaatattagccaggtgtggtggtgtgtgcctgtagacccagctacttgtgaggctraggtgggaggatcgcttgaggctgcagggaaccgtgatgacgccactgcactccagcctgg

SEQ ID NO: 470952 - DNA, 427 bp, Homo sapiens
cacccgtcaaccaggcttcagacacagagtaaagaagcttccaggcgaccccagcccccaggcatccaaatcaccgccagcattcaggtctttccaagtaaaggccagataccacagagcaaagacaaactgttctcacaggccctgtctgaattagcaacctatagaatttgtgagttcaggccaggcacggtggcccacacctgtaattctaacactttgggaggcagacgtgggagaatcacttgagatcaggagtttgagaccagtctgggcaacatgatgaaactccatctctaccaaaaaatacaaatattagccaggtgtggtggtgtgtgcctgtagacccagctacttgtgaggctaaggtgggaggatcgyttgaggctgcagggaaccgtgatgacgccactgcactccagcctgg

SEQ ID NO: 470953 - DNA, 546 bp, Homo sapiens
caggtctgcagaggtttggcagcctctaagccctctgcttctgcttccggagtgagagcctcaagtgctcctgttttcacagcccatcttgtgtttccatgctgcgtttgtggggcgttttctctttscatcctcaattctggcgctgattcttttcaggatacattctaaccttggaaagaagatgccaataaaaccagtgtaggggaagggcagccaatgagaggcagcaatggatgttaaatttacaattgtggtttgtctttttggctgtggttctttagataagcatgtgatttctgttcttcatgactaagaattgaatttagactttacagagttactggtttgtaaatctttgagttgtttaaattttaatgttagagttttactgtttgatcagcacattttttttctcttttgtctataggcccgaaatgtttgagacggcgattaaggagagcacctcctctaagagccctcccagtgagtgtattttctgtattttcattgctatagaacacacgctcttaggcatgcattgtg

SEQ ID NO: 470954 - DNA, 515 bp, Homo sapiens
tgaattgtgctgagctgaaatactgcgcccgtttctttccattcaacttgtcttggtttgacctagaaccacactgcacaggagaagcaccattttttgttcagactctcatctgaagctggagcttctgctaagcacttgtttgcrtgggagtggaaggggacatgtgcacccacagttgtggcgaaaagatccttgggtgtgacaaaggaggaggcgggccaaggagacccatccactgtgtccctggaccctcccaaggaatcccaggaactgcgaagcataaaccacatcttcactgtcttagagacgctgctgtccttccttcattttactcatgctaaaggctctatttttcttttctctagaactttctttctttccttttttctgagacggagtttcactctcacccaggctggagtgcaatggcgcagtctcggctcacagcaaactctgcctcctgggttcaagcgattctcctgtctcagcctcccaagtagctgggattacag

SEQ ID NO: 470955 - DNA, 587 bp, Homo sapiens
gtctatctagagtgatgatttctctctttttcctccttttgaacatcttctaggccgctgttcagtttccctcatggcattgggattrttagtaatttcatgaagggtgtgctctctaggatgatggagcggagatcactcttcaatactgccacattagaggtgtccttttgatggtgatatgcctgctaagtgggtgtgaaagtcctttaccttcttcagccacagagatgccctagttgtcactgtctctgagagggcagtgacaaagaggatcctttggattggagtggctgggaaaggcacagaatgcatctcccacatgaggacagggcgatgtggcaacatttacttcccgtgactttggatttcacccattctccattaactgggacatttaagcattttatagtgattgccctgctggtcccagaggagctggtgtcacccccctgtctctctctcagtggtttcacagaccagaagagtccttgacagtcctttcctcctcagtgctgtcccctctcctaattaatcacctcctctgtgtggggtttcaggtgaccttcgatgggccccagacccca

SEQ ID NO: 470956 - DNA, 623 bp, Homo sapiens
ctacacacaacatttactgcagcactgtcaataayatatagaaatattagaaaaacctaaaagccaaaactggggattagttaaaaatattatagtttaagaaccaatcactagaatattatagtctctaaaagcaactatttaaaaagtgattatattgatctatattggctgtgttatcatatagttctagatatttaatatatataaggtggcttggtttggagattggggatctaaaggtatataaatatattattgataatgcgtggcattatatatatatatcaaaatattaacacttatttataggcttataactcttatttatgcctttcaattccttctgagttttttgcaacgattgctttctgcgcaagggaaaaaatacaactatttcataaagacaggattcacatgtgggcaaatactcttaagctggaaacatcttttttggccactgacaactcacagagtaaacaaaaaagactaaagtgcatcatttaaaattagggtagccatataatttatcatctaaaccaggacacttttgattctgaaaggggaagctattaataattttactgggacaagtagcataatccaggacttcctaggcagac

SEQ ID NO: 470957 - DNA, 623 bp, Homo sapiens
ctacacacaacatttactgcagcactgtcaataacatatagaaatattagaaaaacctaaamgccaaaactggggattagttaaaaatattatagtttaagaaccaatcactagaatattatagtctctaaaagcaactatttaaaaagtgattatattgatctatattggctgtgttatcatatagttctagatatttaatatatataaggtggcttggtttggagattggggatctaaaggtatataaatatattattgataatgcgtggcattatatatatatatcaaaatattaacacttatttataggcttataactcttatttatgcctttcaattccttctgagttttttgcaacgattgctttctgcgcaagggaaaaaatacaactatttcataaagacaggattcacatgtgggcaaatactcttaagctggaaacatcttttttggccactgacaactcacagagtaaacaaaaaagactaaagtgcatcatttaaaattagggtagccatataatttatcatctaaaccaggacacttttgattctgaaaggggaagctattaataattttactgggacaagtagcataatccaggacttcctaggcagac

SEQ ID NO: 470958 - DNA, 305 bp, Homo sapiens
cttcctcatccattaaatgggtawgctcatacttcctgagttacccaacaggactggtgtggacccacaaagagaatttagtagacgtatctcgtaacctgcccagcatttgatatgcacaaggtgaatttagtagatgtatctcataaccttcccagcatttaatatgtatacggtgaaaccttgggggcctaagaccctcacggtgaaggccacccttctgtcctcttcttcctcacacctgctttcctccatcatgtgctctccacagggccacacattgcttctactttaacaaatctgac

SEQ ID NO: 470959 - DNA, 305 bp, Homo sapiens
cttcctcatccattaaatgggtaagctcatacttyctgagttacccaacaggactggtgtggacccacaaagagaatttagtagacgtatctcgtaacctgcccagcatttgatatgcacaaggtgaatttagtagatgtatctcataaccttcccagcatttaatatgtatacggtgaaaccttgggggcctaagaccctcacggtgaaggccacccttctgtcctcttcttcctcacacctgctttcctccatcatgtgctctccacagggccacacattgcttctactttaacaaatctgac

SEQ ID NO: 470960 - DNA, 598 bp, Homo sapiens
tttaacgaggttgaagtgcaagctggctgcaagctcaatgatgtatgctgggatcctggctcctctgtccttttgctccatcatcttcagggaattactctcatacacatggtcccaagtggcttgctattttcattgtttcagcaggcatgaagaaggaaggagaagggaaaatggtgggcttgacccttttctttaagggaacagcatggaagttgtccatatcacctccatttacatcccattgggcacaaattagtcatacggccaccctaactgcaaaggactatggaaaatgtagtttttattctgggaaaccatacactcaggataaaattaaatggctatggaagaaggagaatggatattgagagatgtgtggttgtttctgccacaacatccctgtcttgaacttttggatcaagccttgaatgtaccaataagcccaccaatatagggggtccccttcccttcccagaatcaaggagatgcccttgctaacattccagaggtactcaagagacttctgctkgtacccactttgctcatctttaagcagttgggttcgccagagcttttaaattactttctcttcttt

SEQ ID NO: 470961 - DNA, 481 bp, Homo sapiens
ctgcttctaataagccatcttggatatcctagtccccatcttcttttaataactatacctggggttacttttaggaactgcctttccccactaaatacaagctgataggactattgattaagatggcgacctgccttcttttaggccaattagatatttcctacctgaaatttaaatttctrtgtgagaaaaaaataaaagaaatgaaaaacaactggactccatttattcattctggctactgcctcccaggccctctggagtttctgggttcttgctctttccaaggcagttcctatatgtcttctgacaattctctgaactccctgacatccttccaaataatatgtttgcttttgtcagcctgagtcaatttctgttgcttgcaagccaagaatctcatctgaacagttacttacaactatgaacccgtgaaagtagcaagtgctttcaaacttcacataatctgaagactcatcta

SEQ ID NO: 470962 - DNA, 633 bp, Homo sapiens
gaaatgaagtaccgttcatgctacaatatcaatcaaccttgaaaatatgcaaagtgaaaaaaatccagtcagagaatcctatatattatatgattccatttatatgaaatgtccagaataggcaattctatagcgacagaacatagattagtagtggtttccgggggatgggggratggggggatggggaaatgtaaactgacagctaatgggtgcagggtgtcttttaggggtaataaaaatgttataaaaatttttataattgtgaaacttttagtatatctgtggatatactaaaatttttataattgtgaaactttttagtatatctgtggatatactaaaagccacctaattgtatagtttaaagggataaattttatgggaagtgaattatatctcaataaagctgttattaaaaaataaaatggaaatatattctggaaggctgtagataagctaataggaaatggaagcataataatactggggacagtctggtgtgttctggggacatctgttttttgagactgatattataatggaaaaaatacatttttgttgcttgaaacatgcagagaacaaaactaaattagtattttttaaatactgtggtccttcaatgcttcatta

SEQ ID NO: 470963 - DNA, 551 bp, Homo sapiens
caccttccccaatggcaccacctccctgttcttggtaagcagccccctcgctgcccacttaggagggtgtcccagaaggggacaccaggactagggccctctctggcttgcaggccagggctgggtacaaacaggctcccagaccctatgggtttgcgcaggctgtccatctggccacagctcccattacctacttctgtgccctccagcccggggcatcctggatcgcagactgcgcccgccaccactgcagcagcacgcccctgggtgccgtgctsgtccgctctcccataagctgcccaccgctcaatgagactgagtgtgccaaggtcagtgcctccttctccactgaggctgtaggccaggggcatcagctgtctcactggtggtggggtggaggtcctgtgtgcaggagtgcaggaagaagggctccctggagcctgtgcctgcactgccaccccaaatccatatgtctctctgcatttctttttgccctgaccacatcacaccctgcctcttcacacatcacatgaccacatgcagatgtgcac

SEQ ID NO: 470964 - DNA, 551 bp, Homo sapiens
caccttccccaatggcaccacctccctgttcttggtaagcagccccctcgctgcccacttaggagggtgtcccagaaggggacaccaggactagggccctctctggcttgcaggccagggctgggtacaaacaggctcccagaccctatgggtttgcgcaggctgtccatctggccacagctcccattacctacttctgtgccctccagcccggggcatcctggatcgcagactgcgcccgccaccactgcagcagcacgcccctgggtgccgtgctggtccgctctcccataagctgcccaccgctcaatgagactgagtgtgccaaggtcagtgcctccttctccactgaggctgtaggccaggggcatcagctgtctcactggtggtggggtggrggtcctgtgtgcaggagtgcaggaagaagggctccctggagcctgtgcctgcactgccaccccaaatccatatgtctctctgcatttctttttgccctgaccacatcacaccctgcctcttcacacatcacatgaccacatgcagatgtgcac

SEQ ID NO: 470965 - DNA, 552 bp, Homo sapiens
catggtccaggcagaggaaacccacactggttagtttccatccctgtaacagctctgtgagatrggtgaatccctggtccagtttgatagctatggaaaccaaacaaagcatcccattagaatgaagcgtcccactagagattggagtttctattcatttaggaaattgcataatcttaatgctagaagccctctcaggatgggaaaactgaagctcagagaggggtaagggtaaagtggccaacacagcttagaaataggcattagggctggggtggggaggcagcctcactctgtccccagatgcttctctgccctagcacagagtcctcaagggggccctgctggccttcctgcctcacttgctcacactgctctgtttctgccttcctgactccgcctccttccagggcattgggttaaaaggctttccctggatggggaggggcactaatgcatgggtgctaatgctggaagagagaccctccagcatgacactaactgccctgggctggcccatcctgctgccccgaagaagcctggtcttggcca

SEQ ID NO: 470966 - DNA, 290 bp, Homo sapiens
tgcgtcgttgcacgacccgttccttcgggtgcccggctgccaggagctggaaagagccgcgaccgcgaccgggccagccgccctcggagctgggggcggggcctgagcgcggaggggcggggccaggcctctgtggggcggggccgctgcgaggctggagtcgamggtgctgagtcgtcgcctcccactgaagcctgggagcaaatgggccccagtgtgcctatgggcctgaggtggcagtagctgggcttcaagctggtatttctctggaagtggtacctgaacacatg

SEQ ID NO: 470967 - DNA, 617 bp, Homo sapiens
cctcaagaatgcaggcaagacaaaaactaggccacctggtggaagttgcaaggaaggtttggttgagaagcagagccctgaactcatcctttgagcctttttttttctttttttgagtcggggtcttgctctgtgacacaggctggagtgcagtcgcataatcatagttcactgcagcctcaamttcctgggctcaagtgatcctggtgcctccgttacctgagtagctaggactataggtgtgtgccaccatgcctggttgaatttcaatttttttggtagagacagagtctcactatgttgcccaggctggtcttgaactcctggcctcaagtgatccttctgtgtcagcctcccaaagtgctgggattaggcatgagccactgagcccggcctctatcctttgagtcttgaccattccactgcccatcttcccacggtcctctgtgtttgtgggagaggtggcagttttgttttctccctttgccaaacttctttggtctctggatcaggtgactcaggtctactttctaatcctggcccgcatttgtctccctctttctataactacagatgagctataagttccacccacctgcagctaggtcccccaaagc

SEQ ID NO: 470968 - DNA, 617 bp, Homo sapiens
cctcaagaatgcaggcaagacaaaaactaggccacctggtggaagttgcaaggaaggtttggttgagaagcagagccctgaactcatcctttgagcctttttttttctttttttgagtcggggtcttgctctgtgacacaggctggagtgcagtcgcataatcatagttcactgcagcctcaacttcctgggctcaagtgatcctggtgcctccgttacctsagtagctaggactataggtgtgtgccaccatgcctggttgaatttcaatttttttggtagagacagagtctcactatgttgcccaggctggtcttgaactcctggcctcaagtgatccttctgtgtcagcctcccaaagtgctgggattaggcatgagccactgagcccggcctctatcctttgagtcttgaccattccactgcccatcttcccacggtcctctgtgtttgtgggagaggtggcagttttgttttctccctttgccaaacttctttggtctctggatcaggtgactcaggtctactttctaatcctggcccgcatttgtctccctctttctataactacagatgagctataagttccacccacctgcagctaggtcccccaaagc

SEQ ID NO: 470969 - DNA, 548 bp, Homo sapiens
cagagccctgaactcatcctttgagcctttttttttctttttttgagtcggggtcttgctctgtgacacaggctggagtgcagtcgcataatcatagttcactgcagcctcaacttcctgggctcaagtgatcctggtgcctccgttacctgagtagctaggactataggtgtgtgccaccatgcctggttgaattycaatttttttggtagagacagagtctcactatgttgcccaggctggtcttgaactcctggcctcaagtgatccttctgtgtcagcctcccaaagtgctgggattaggcatgagccactgagcccggcctctatcctttgagtcttgaccattccactgcccatcttcccacggtcctctgtgtttgtgggagaggtggcagttttgttttctccctttgccaaacttctttggtctctggatcaggtgactcaggtctactttctaatcctggcccgcatttgtctccctctttctataactacagatgagctataagttccacccacctgcagctaggtcccccaaagca

SEQ ID NO: 470970 - DNA, 548 bp, Homo sapiens
cagagccctgaactcatcctttgagcctttttttttctttttttgagtcggggtcttgctctgtgacacaggctggagtgcagtcgcataatcatagttcactgcagcctcaacttcctgggctcaagtgatcctggtgcctccgttacctgagtagctaggactataggtgtgtgccaccatgcctggttgaatttcaatttttttggtagagacagagtctcactatgttgcccaggctggtcttgaactcctggcctcaagtgatccttctgtgtcagcctcccaaagtgctgggattaggcatgagccactgagcccggcctctatcctttgagtcttgaccrttccactgcccatcttcccacggtcctctgtgtttgtgggagaggtggcagttttgttttctccctttgccaaacttctttggtctctggatcaggtgactcaggtctactttctaatcctggcccgcatttgtctccctctttctataactacagatgagctataagttccacccacctgcagctaggtcccccaaagca

SEQ ID NO: 470971 - DNA, 320 bp, Homo sapiens
gcaggaggaacccgtgtctgtgcacggcagcacggtcttcaaggagctttcggaccggttgggggctttcagctacggaggagggaagagaagctctatatatacagagcagagcaagaaacacaaaacaggcttggttactcccaggcagagctccatggggcttctcctttcactgggctcctgcctcgggttctgcctagcccctgggttccagaattaggagctgcgagaccctggtttctccaagacatgtgtagagctcagattctgctggscacggggagcaagcaggcccagccacgacagggaggcagggc

SEQ ID NO: 470972 - DNA, 599 bp, Homo sapiens
tgtccctgtgagtttcacgggactctgtacccacctggctctgtggtgaaggaagactgcaatacttggtctgtgtctgctgccgggaagcagggtgtggggcatggccgctgaggctttccacgagggctgcccatctgggagcactaatggctggcgtcggggcactcactyagtacctttgagtcccaggggagtctcattagatccaatccatgggggaaatctctaccacccattttagagatgggaagactgagggctgtgggccctgcagtttcccagcatctagctcaggcctggaggggtgacctcttgcctccttggtctctgtgttttagcacatgcacctcaggcaagtgggagtgcagcacagctgtctgcccaggtatgtctgccccccaccttgcactaggatcccttctaccagtctgataggttttggggcaaggaatctctgggggccaggcttgctgcgggtggggatgtcactcagttccattggctacgccccgacccctgtttcctcagaatcactttgcctgattaaggtctggctccagcccctgccaggaagggttttccatgaggagaagggg

SEQ ID NO: 470973 - DNA, 636 bp, Homo sapiens
agtaaacacatccgtcttttcaataggctcttatttggcacagcatttgaacacagccctcttgaaaggaataatgatggcctgagtttccacatgcctacgtgaccacatggcaaaaagatggacaacaatgtatccaagggatatatcaacaattttcagcatgagaattgttcagggaagggctcttggcagagatctgaagggaagcttttagtgtagcttccttttcaaatcctaaatcaagccaccatgctcagtctctcactttaataagcactaaatccacatgctaggtttcaaaagaaagaaaaaacctactttaactgctaaaacttccctgaaacatactcaggggaacagggcacatatggtgttgtaatttttttaaagcaagacatctgtagtattcgagaaatggctgaaatctgttggatttcagaaacttttataagctgaactccaaaatagataaattatttttattagactcagcaatggtcaatttgtgaagaaaattctacctgrgaaacgacttttcaaaagcagaactttggtagtgtatatgtttagatcttgatttcaaacagtaagtgctaagaaaattaatttccaatgcatgtgtgattgagtaca

SEQ ID NO: 470974 - DNA, 576 bp, Homo sapiens
gggatcaccccactcctatgcagcacatgggctttctaaataatctttccaccagccctagaccttagcacaaagggagcttttcttcacctcgtctaagggagtcactgttctcaggttaaagtgttggaccagattaactagcagggtccccaactgccaaactatgcacagcataatgaatgggcaacaggaaaaagtttgattctccatttctataaacaccatttctttttggcatccattctacaaattcygctaagcgtggacctctctgcagagatataactatggagcatatccacaaaacgctctatgcatagctatggaggtgtgttcattgtacccacacttccctagaacaccatgaatttaagcctttcacttctttgctatcttgatgtttcattttactttcctgtgcaagactagccctcctctcttttcctctctttcctttcctttgttttttcttagatcatgtaaaactgtaaaaataaaacaaaagagaaacacatttgcctaattttcaagtaggaaggagactagcctcaagacagggagactcccttacag

SEQ ID NO: 470975 - DNA, 581 bp, Homo sapiens
tgggagggatcaccccactcctatgcagcacatgggctttctaaataatctttccaccagccctagaccttagcacaaagggagcttttcttcacctcgtctaagggagtcactgttctcaggttaaagtgttggaccagattaactagcagggtccccaactgccaaactatgcacagcataatgaatgggcaacaggaaaaagtttgattctccatttctataaacaccatttctttttggcatccattctacaaattccgctaagcgtggacctctctgcagagatataactatggagcatatccacaaaacgctctatgcatagctatggaggtgtgttcattgtacccacacttccctagaacaccatgaatttaagcctttcacttctttgctatcttgatgtttcattttactttcctgtgcaagactagccctcctctcttttcctctctttcctttcctttgttttttcttagatcatgtaaaactgtaaaaataaaacaaaagagaaacacatttgcctmattttcaagtaggaaggagactagcctcaagacagggagactcccttacag

SEQ ID NO: 470976 - DNA, 516 bp, Homo sapiens
taaaaggcatatctcattctggggaaaattaacctcccaattttgcccagtaattgattccatctgactgaggcgtttcagcctccactgtgactgtcatttgggtagctgggaagcgaaagcctgtaattacagtcatgcaaccctgttatcagagcctggggagggctttcctctcttcctaccctgggtgatcacaggtgaggctgaccagagagggaggaaggagagaggggcaagcaggctggtggttctttctccatgggagagagacccctaaggcaaccccaaccatggagaaaaggtcagaggtcgcagggagtcctcttgagttttcatgatatgaacatgaagaggccagagcttcctgcttgctgcarattcttctctccagggagatgctttgcctagatagagctaataaagagcagggagtgtgattaacagagaattagaagaattcttctaataccatctataataggtcgttacaagctgtgtaaataattttgttat

SEQ ID NO: 470977 - DNA, 612 bp, Homo sapiens
gaaaaataatgataaccatggtattttaatcaaaaaatagcatacaaaatacatatgcatgtatatttatatatatgcatgtgtgtatatacagagagaagagagaaagaaatagatgggaagaagacaaataaaccaatttcttagcagtgcttatacaactttaataattgtatttattttttgtattttctaaatatcttacatagagaatacgtacattgtaatgttaaaaaatagttagcaatyggtttaaaagataattgaagaaaatatcactattgtatgcaattgaatacattctgcttttcaccctgaaatgtaggaactataggactatggctaaatatatacacaataagttgctaaatggacctttggatgttttgtagttaggaaaaacaatattgctactgccgctttccatgtaaaaaactccagagaagtgttaaaacacacacacacacacacacacacacacacacaactattagaaacaaacaataatatagttttcttttagaaacaaaacctgtgtttagaatccaaaagcaatgtaatcactctggaaactattatcataagtaatttcatatcgattagttcatgctc

SEQ ID NO: 470978 - DNA, 543 bp, Homo sapiens
aacaatacagtggctcctcaaaaagtcaaaaatagaaccaccacatgatccagcaaatccaatcctgggcttatcaaaaattactgaaagcagggtaccaaagaggcacttgtacytccatgttcatagtagcatcactcacaataaccaaatggttgaaacaatccaaatgtccaccaatggatgaatgaacaaagaaaatgtggtacatacatgcaatggaatactatgcagcctcaacaaggaagaaaattctgacacatgccacaacatgagtaaactctgagaacaccatgctaagtgaaaaagctagtcacaaaaaggcaaactgcatgattctattcatatgaggtaaccagagcaattttctaatactagatattttatacattgaaatttgtcatatacaatttgcatgttattaaacaggtaaccaatgcaatgagaggtatttaaactatacatctttcatttttcaccattcattctttatggcatcacgtagacaccgttaaaaacatgatgatagggaagttaccactc

SEQ ID NO: 470979 - DNA, 516 bp, Homo sapiens
gaatgttaatgttagcacaagcaattgagatctggtgttatttgttgccagagcaaaagctactggtatggctgacaatattcactggggtcctrtgctggatcacgctgttctatatactagataaggattatgttgttcaattctcacagaagccttttggaatggaagctattagtatccccatcttactgaggcacagagaggccacataattggtccagggtccctaactagcatgtggtagcaccaggacttgaatcctcgtagcataaaatgatgggaagaactggcttttacaatggagcatgttatactcacatcagtctcaggatgtgggtgggacagaggctccccactcaatgttgttgaaaaggaaacaggtccagagaataatacatcatgaactttaacatcagtgtatggtgtagtttggggtctcctctcctcctccttttcttctcaatctgttttcaacgttgcagtaatgagtctgttaaaacctaagtcagatca

SEQ ID NO: 470980 - DNA, 516 bp, Homo sapiens
gaatgttaatgttagcacaagcaattgagatctggtgttatttgttgccagagcaaaagctactggtatggctgacaatattcactggggtcctatgctggatcacgctgttctatatactagataaggattatgttgttcaattctcacagaagccttttggaatggaagctattagtatccccatcttactgaggcacagagaggccacataattggtccagggtccctaactagcatgtggtagcaccaggacttgaatcctcgtagcataaaatgatgggaagaactggcttttacaatggagcatgttatactcacatcagtctcaggatgtgggtgggacagaggctccccactcaatgttgttgaaaaggaaacaggtccasagaataatacatcatgaactttaacatcagtgtatggtgtagtttggggtctcctctcctcctccttttcttctcaatctgttttcaacgttgcagtaatgagtctgttaaaacctaagtcagatca

SEQ ID NO: 470981 - DNA, 516 bp, Homo sapiens
gaatgttaatgttagcacaagcaattgagatctggtgttatttgttgccagagcaaaagctactggtatggctgacaatattcactggggtcctatgctggatcacgctgttctatatactagataaggattatgttgttcaattctcacagaagccttttggaatggaagctattagtatccccatcttactgaggcacagagaggccacataattggtccagggtccctaactagcatgtggtagcaccaggacttgaatcctcgtagcataaaatgatgggaagaactggcttttacaatggagcatgttatactcacatcagtctcaggatgtgggtgggacagaggctccccactcaatgttgttgaaaaggaaacaggtccagagaatawtacatcatgaactttaacatcagtgtatggtgtagtttggggtctcctctcctcctccttttcttctcaatctgttttcaacgttgcagtaatgagtctgttaaaacctaagtcagatca

SEQ ID NO: 470982 - DNA, 458 bp, Homo sapiens
ggggatttcatggtttgaatttgcccctggtgccaaaggaggcagcagcactggctttcttgtgtcttgcctggatgggaggcagaagaggaggagggagtcggggaaggtggggtttgaaagtctcatggggctaatgtgaacaatggagtcagactcttgatcacacctgtgcctgtttgcccctcagcttctgagccctggctgagaaacctggtattagagagagatttgaaacaccagcttcagcctctgggctctcaagttgaatgtggtctgatgctaggtaggatatctcagggccctgatagttcttcttgggagaggaaaggggcatcagtgggtctgggaagagggagactggaggatgaggggccatggcacccttgtgcccaatataatgcctcctgtctgtggggttgkgggggaggtggcgggcatctgtgaagggtcatggt

SEQ ID NO: 470983 - DNA, 577 bp, Homo sapiens
atatacaaatgtttaacatggaaaccacatgaacagtatgaatagaaaaccaacataatttgtttataatagamaataattatgaaaatagagacaaaaagaaaacagaaatgagcctgatgcctccttcctattcattgtaaagggagaacagtgtctgttaaggaggagaggaattaaaggttgctgggtattcccccagcagccatcgccagttttcttcagatattaggtggcagcgtttgcctatcctctagtccagggcatagatcatgattgttctgtcatgccagttatggtggttctattattttgtggctgtcaatggtgttggatgcatcgtttgacccactgagacatacttagaagcagtcttctggcatcttccaaaaaaaatttctctctgataaaagtaaaagtaatgcaaaaaaacaaaacaaaacaaagcaaaatcaaaaaacccattcctatcccttttactcccttttacttttgggggctgcactatgagggtgtgatgtccggatatgtggcagccatattgttaccatgaggtacaaccctgcacattaaagtc

SEQ ID NO: 470984 - DNA, 637 bp, Homo sapiens
ctgtcctgcctgggatgtgaatcattcctttttccagcagatccaggctgtgtacactgcctgccaggtagtcacrtactaactgactcagttgtcagatggaaaacacatagtttgtgtagggttcagctctatctacagtttcaaacaaccactgggggtcttggaacgtatcccccgaggataatgaggggcagcttctgtattagtctgttctcaagctgctgataaagacatacctgagactgggtaatttataaagaaaaagaggtttaatggactcacagttccatgtgactggagaggcctcacaatcatggtggaaggcaaaaggcacttcttacatggcagctggcaaagagagagaattcgagccaagtgaaaggggttcccgtttatgaaaccgtcagagctcgtgagacttactaccacgagaacggtatgggggaaactggtcccatgattcaattacctcccaccaggtccctctcacaacacgtgggaattatgggagctacaattcaaggtgggatttgggtggggacacagccaaaccatatcaaccactttgttatggtagccacaggaatctaatacagaattttcattcgctggtgccaaggggtgttcggaagca

SEQ ID NO: 470985 - DNA, 483 bp, Homo sapiens
gtggtgatgatatcaaggtgtatgcatatgtccacctcatcaagacgtatacattaaatatgtgcaattgcttgtatatcaattatacctcaataaagcttaaaaaagaattcatatgttcaagagactattgaatgtgccaagyacttggagcaacaaaagcagggattataacttcaatggagcaatgtagacaacttcacagagaacataagcatcctgcttctaagcttgtgcttcagtgaacttggctccttgggcgtggggtcatgtcctcagagaccatctctccctatcagttagaggcctccctcttgaccttgaccatagcctatagatgtacaaggtgtgcagctcacagagactcctggtaaaggggtgcgggggcctggcacgtagccctcgctctgcccaccaagccttgcatcctggcaggagcagaggaagggactcctctgaatgcacacaaaggtgtcctgtgga

SEQ ID NO: 470986 - DNA, 550 bp, Homo sapiens
atgaaaggcaattgtgttctctagcaggtctctttctaaggcagataatagaatgtaaatggaatgtaagaragtattctcatcctgtgctgtgggagaaacagaggagggctggggagtggagatgtgaacgtgaaagtggctgcttctatagttcagtacgtcaaagacccatattatggggtattgtaatctgagccccaatacactcaatagactctagaaaatattcattcattaagtacatttttaattagagagaactttaaaagttacttttaaatgctttcttgtatttacatcaatgtatctgcaattgtataaactattagatgagattatcaatcgtcttcaagttaaagtgctatttatcaaatactttcttttacaaaatgtcatttttcctgaaaattgaatccatttgttttgatagccggcttgttctcaccaaatccattaaattatttgctggatatagctaaataaaaaataatttaggactgctcaaatatcagactatctcaagggtgacatattattggagagaaca

SEQ ID NO: 470987 - DNA, 662 bp, Homo sapiens
ataattctctttgaaatttgaatgaacccaacttgtgacaaaattcatccaggtgcagttacatttttcccaggtcttctatctgtcatagataatcaaattttagggaaagatgaaaggcaattgtgttctctagcaggtctctttctaaggcagataatagaatgtaaatggaatgtaagaaagtattctcatcctgtgctgtgggagaaacagaggagggctggggagtggagatgtgaacgtgaaagtggctgcttctatagttcagtacgtcaaagacccatattatggggtattgtaatctgagccccaatacactcaatagactctagaaaatattcattcattaagtacatttttaattagagagaactttaaaagttacttttaaatgctttcttgtatttacatcaatgtatctgcaattgtataaactattagatgagattatcaatcgtcttcaagttaaagtgctatttatcaaatactttcttttacaaaatgtcatttttcctgaaaattgaatccatttgttttgatagccrgcttgttctcaccaaatccattaaattatttgctggatatagctaaataaaaaataatttaggactgctcaaatatcagactatctcaagggtgacatattattggagagaaca

SEQ ID NO: 470988 - DNA, 534 bp, Homo sapiens
ttaaatcccatactttttcataaaaaagaaaagctaattatagaattaatataaaaatgtgagagtcaataaaaaatcagataattataaagaaaaggaacaacaatgagtaatactaccttaatggactttaaggcatgttataaagagtagtgaagcaggatatttccctgaccccttcgcgggactcatgaccaagggtgcctcctttacttagcccactgctctcaactccttgtgagatggagtgcgtgagagaatgaggcgagagataaagagtgcaggagcgctggagccagcaggatcaaactccactcacttggacccattgccttccacctctcatgggaggaagcgcacaagtgagcgggcgcagaagccagagcaagtgcttttgggcgctrgcaggagcgaactctgtgcaggccacatggcagtgtccaggtggggtgcctgcgacttccaaagccccagagggtgtggtacagtacttttttttaagcagacggcttacgagttaacagcttggtgggc

SEQ ID NO: 470989 - DNA, 537 bp, Homo sapiens
aaatacagatgaagctttgcttgcttgcccaccgctcacctcctgctgtgcggcctggttcctaataggccatagactgttactggtctgtggcccagggattgggacccctggtctaatctaagatacttgctactttctatgtacaatagtaaataactggcaagccaccgtttgaacttataataaagccataacaatggaaacagtgttaggcataaaaaccaatgaaatagcttgaatacttttacaagagaccsacataaaaataggtaattgatgtgtctgaagattcctacaatttgtgaaaaataattgtttactaaagttgaggttattgggaaaatactacattcagattttttaggatagatttaaaatttccaaatggattaaattcctaaatgtgacaagaaaaacttttaacctttagaggaaagaaaaaagaatgcttttaccatggcagagtacggacacaaaaatacaaattacaaaagaaatgtctaccaattactatctttaattaaaaaaagattt

SEQ ID NO: 470990 - DNA, 619 bp, Homo sapiens
cttttaggacctagagctacccataaaaaaaggcttctttcacatgcaatagccttctcctaggatagaacaaaaactttgatttatttttttcttctgctttctgtcttttgaatttaagtttatgaaagaaaataataatttaaagaaatagttkaacgtgagctgaagaatatgagttacctttctttctatagacacatgaagaaaattgcataaaaagtaatagcatttctgattttatcagagaaaaagattatttgcctagatataaaataataaggctggatgcaatggctcacgcctgtaatctcagcactttgggaggccgaggtaggtggattgcttgagctcatgagttcgagaccaccctgggcaacatggcaaaaccttgtatctacaaaaaatacaaaaattagccagttgtggtggcatttgcctgtagtcccaggtactcagaaagctaaggcaggataattgcttgagcccaggaggcagaggttgcagtgagtcgagatcatgccattgcactccagcctgggtgacaggtgaaaccctgtctcaaaaagaaaaaaaagaaaaaaaagcaataaaactcaattcagggaagctttgtgtt

SEQ ID NO: 470991 - DNA, 619 bp, Homo sapiens
cttttaggacctagagctacccataaaaaaaggcttctttcacatgcaatagccttctcctaggatagaacaaaaactttgatttatttttttcttctgctttctgtcttttgaatttaagtttatgaaagaaaataataatttaaagaaatagttgaacgtgagctgaagaatatgagttacctttctttctatagacacatgaagaaaattgcataaaaagtaatagcatttctgattttatcagagaaaaagattatttgcctagatataaaataataaggctggrtgcaatggctcacgcctgtaatctcagcactttgggaggccgaggtaggtggattgcttgagctcatgagttcgagaccaccctgggcaacatggcaaaaccttgtatctacaaaaaatacaaaaattagccagttgtggtggcatttgcctgtagtcccaggtactcagaaagctaaggcaggataattgcttgagcccaggaggcagaggttgcagtgagtcgagatcatgccattgcactccagcctgggtgacaggtgaaaccctgtctcaaaaagaaaaaaaagaaaaaaaagcaataaaactcaattcagggaagctttgtgtt

SEQ ID NO: 470992 - DNA, 551 bp, Homo sapiens
aattctcagaaaggatctctgtcattaaatgacacagaactataattttatgtttcagagagttatgtcatgtattgtagatagcacctaatttgaaactccttcagagaagctgacttccctattaaaaaaaaaatctctagcctttcwatctatctatctatctatctattattattattattattattttgagatggagtctcgctctgtcgcccaggctggagttcagtggagcattctcggctcactgcaagctctgtctcccaggttcacgccattctcctgcctcagcctctcgagtagctgggattacaggctcccacaaccatgcccggctaattttttgtatttttagtagagatggggtttcaccttgttagccaggatggtctcgatctcctgacctcgtgatctgcccgcctcgacctctcaaagcgctgggattacaggcgtgagtcaccgcgcccggccttctaacccttattgaagtagcaagataggaccctgtatacagagtgcctaaacctagtaacttgaatgactagata

SEQ ID NO: 470993 - DNA, 551 bp, Homo sapiens
aattctcagaaaggatctctgtcattaaatgacacagaactataattttatgtttcagagagttatgtcatgtattgtagatagcacctaatttgaaactccttcagagaagctgacttccctattaaaaaaaaaatctctagcctttcaatctatctatctatctatctattattattattattattattttgagatggagtctcgctctgtcgcccaggctggagttcagtggagcattctcggctcactgcaagctctgtctcccaggttcaygccattctcctgcctcagcctctcgagtagctgggattacaggctcccacaaccatgcccggctaattttttgtatttttagtagagatggggtttcaccttgttagccaggatggtctcgatctcctgacctcgtgatctgcccgcctcgacctctcaaagcgctgggattacaggcgtgagtcaccgcgcccggccttctaacccttattgaagtagcaagataggaccctgtatacagagtgcctaaacctagtaacttgaatgactagata

SEQ ID NO: 470994 - DNA, 551 bp, Homo sapiens
aattctcagaaaggatctctgtcattaaatgacacagaactataattttatgtttcagagagttatgtcatgtattgtagatagcacctaatttgaaactccttcagagaagctgacttccctattaaaaaaaaaatctctagcctttcaatctatctatctatctatctattattattattattattattttgagatggagtctcgctctgtcgcccaggctggagttcagtggagcattctcggctcactgcaagctctgtctcccaggttcacgccattctcctgcctcagcctctcgagtagctgggattacagkctcccacaaccatgcccggctaattttttgtatttttagtagagatggggtttcaccttgttagccaggatggtctcgatctcctgacctcgtgatctgcccgcctcgacctctcaaagcgctgggattacaggcgtgagtcaccgcgcccggccttctaacccttattgaagtagcaagataggaccctgtatacagagtgcctaaacctagtaacttgaatgactagata

SEQ ID NO: 470995 - DNA, 576 bp, Homo sapiens
gctgcatagaagaaaaggcatttgaacttgaaagataaatagcatttgaaatgagaacatgtggggagtaggcattctaagcaaaagagacaaggttttaaacgtttacacaattctgcaggatatttggaacaatccagattagctgggatgtgtgcttatgaaagaaggaaaccaaagagtgggaagaggaagatggtactgaaaaggtaatttagactacattgcagatggccttggattctaagccaaggaacacggagttcatatagttagtgtgcactgaatgtcctcaggtttatttttaatttactagttaacaaatatttgttaagtgtctgctttgtgccaggccctggccttagtaagcttggagtactttaataaagmagtcagacatctctgctcttgtgaaacagagacaggcaatagatcatctacataataagtgacgtgtttatgatacaaattaacgtattatttcaatcataattatattaagcacaatatattttatagtatgttggaagaaatcagttctatggataaatatgtagcagtgcatggagtatcagg

SEQ ID NO: 470996 - DNA, 654 bp, Homo sapiens
aacttgatggaaaaggatcttttattttcttcccttttcccccatgcccagcctggttactgagaccaagtacattgcctggtgtctatcatgtaattttcttgtatgggatgtataaaaaaagaaattactccaacatttttacattttcctcacaaagaaaggctcaaatctcttagttctgctttaattatctgccttatgacaagtccacagattccccaaataactgtctcaaattagattaagattttaattccacgttggaagattgagtcaaaatgcctctggcgatttcagggtcccttcttgctctattctgaagacagctcctacgacactaattcaaggatcagtggctggattcgagaaaaaatggaaaacggttgttgcaagggtgtcaactgcttggaatgctgccggcaaccgggttctgaggttggtaaccagtgcttgtgagcagtgatgtgcttgcacttcggggaaatatctccaaaggagccacctcatctgtgttgggattgagytgcatctagaacagactccttggccactttcttctgtatggaaccatgataggccaaaacgtggatggctttgcaggatctgggccacactttgttgttgttgttgttgttgtttgtttgtttgttt

SEQ ID NO: 470997 - DNA, 654 bp, Homo sapiens
aacttgatggaaaaggatcttttattttcttcccttttcccccatgcccagcctggttactgagaccaagtacattgcctggtgtctatcatgtaattttcttgtatgggatgtataaaaaaagaaattactccaacatttttacattttcctcacaaagaaaggctcaaatctcttagttctgctttaattatctgccttatgacaagtccacagattccccaaataactgtctcaaattagattaagattttaattccacgttggaagattgagtcaaaatgcctctggcgatttcagggtcccttcttgctctattctgaagacagctcctacgacactaattcaaggatcagtggctggattcgagaaaaaatggaaaacggttgttgcaagggtgtcaactgcttggaatgctgccggcaaccgggttctgaggttggtaaccagtgcttgtgagcagtgatgtgcttgcacttcggggaaatatctccaaaggagccacctcatctgtgttgggattgagttgcatctagaacagrctccttggccactttcttctgtatggaaccatgataggccaaaacgtggatggctttgcaggatctgggccacactttgttgttgttgttgttgttgtttgtttgtttgttt

SEQ ID NO: 470998 - DNA, 654 bp, Homo sapiens
aacttgatggaaaaggatcttttattttcttcccttttcccccatgcccagcctggttactgagaccaagtacattgcctggtgtctatcatgtaattttcttgtatgggatgtataaaaaaagaaattactccaacatttttacattttcctcacaaagaaaggctcaaatctcttagttctgctttaattatctgccttatgacaagtccacagattccccaaataactgtctcaaattagattaagattttaattccacgttggaagattgagtcaaaatgcctctggcgatttcagggtcccttcttgctctattctgaagacagctcctacgacactaattcaaggatcagtggctggattcgagaaaaaatggaaaacggttgttgcaagggtgtcaactgcttggaatgctgccggcaaccgggttctgaggttggtaaccagtgcttgtgagcagtgatgtgcttgcacttcggggaaatatctccaaaggagccacctcatctgtgttgggattgagttgcatctagaacagactccttggccactttcttctktatggaaccatgataggccaaaacgtggatggctttgcaggatctgggccacactttgttgttgttgttgttgttgtttgtttgtttgttt

SEQ ID NO: 470999 - DNA, 617 bp, Homo sapiens
cagattactctcattaagctgatttttaaaaatctcagacagagcagagcaattcaccagcaccatcatcaagtgagctacaaatctatcttttaccagagcaaggagacacttaagatcaattcaagagaatagctttcagtgttcacagaaggggtactcacattcatttgtcacatatttcaggccctcatacaccccttttaaattgtctaactcctatcccagtttctttttatagtctaaaaacaaggaatcacccaagtaagatactccttcagagcactgctgaaaatggatcaaacgtggagrtcccccagatccctgttctcaagtgttaaaaatattttatattagcacatagaatacccttagatatattctgttatgttctaaagagtttgtgtttccccctttttgatgatgtcttcaatttcttctgagacctttcctgtatagtcatttggttctattgcttttaacttctcttgatactccagcggcaaaccattttcttttgcacccatgcaaataatctggaaatggttaaaacaaacagacaaaaaaaccctttcagttaggaatataatttaacgtaccataccacagctttattt

SEQ ID NO: 471000 - DNA, 617 bp, Homo sapiens
cagattactctcattaagctgatttttaaaaatctcagacagagcagagcaattcaccagcaccatcatcaagtgagctacaaatctatcttttaccagagcaaggagacacttaagatcaattcaagagaatagctttcagtgttcacagaaggggtactcacattcatttgtcacatatttcaggccctcatacaccccttttaaattgtctaactcctatcccagtttctttttatagtctaaaaacaaggaatcacccaagtaagatactccttcagagcactgctgaaaatggatcaaacgtggagatcccccagatccctgttctcaagtgttaaaaatattttatattagcacatagaatacccttagatatattctgttatgttctaaagagtttgtgtttccccctttttgatgatgtcttcaatttcttctgagacctttcctgtatagtcatttggttctattgcttttaacttctcttgatactccagcggcaaaccattttcttttgcacccatgcaaataatctggaaatggttaaaacaaacaracaaaaaaaccctttcagttaggaatataatttaacgtaccataccacagctttattt

SEQ ID NO: 471001 - DNA, 530 bp, Homo sapiens
ggggtcattccctaaacctgtcacatctgtataaatcctatcattaawctctccttaatatgtaaactacacttactatagctaatttaataaatggaggtgttctcaacatcttcctccaaaagcaaaaaacaaaagcagctttcgtcagttaccttgtgtgaatgtcacctgcttcctgccagatcctgactgatgtgctgtgttaggcacctggttgcaaaaaaatcagaggtggtctggttgccatgagcatgtggtataagacaacatctggacaagagctggacttgaaagctgttcacgagcctaagtttagaaaacgcttctgccaccaaccgtcatttcccatgcctctctcagaccagaatggccacatcttcctgtgctgcttttggctctgttctctccatgcccattacctgccccaaatctgcagcccaaatgccagcagagcaccagtgtctggccagcttccacctcaggtcctggtgggtatggcgcagtggacaccacacccacctccaccc

SEQ ID NO: 471002 - DNA, 536 bp, Homo sapiens
ctgcctgtgatatgaagcaggaggcagatgcgataagaggtgtcagggcgggcccgggaacttttgaacttaaggggtgggagggccaggaaggcatcagggaggaggtttcgtaggagcctgaatgtggagacactgcagagggaaggggcagagggactgtgtgagcaagcacaggctaggaggaggtgrgggccgtggtacgggagttgttgggtatggtcaggctgggggtgcatgggaggagggtggtgagggctcaggattcgggccaggggctgcatccgggggaaggggtctggattcccagagcctgtgatttcagcccgctgggctcaggcagagggcaaagctaccctcttcggggtcttctcccagccctgctaattccaggcctgactgctcaagaagtgtttctacctgcagcatcaggggcctgactgaagccctaagttctcccctttatcccgtttttctgggcttcagtttccccagtcatagagtgagaggcctcttcatgccaccagttctcccgg

SEQ ID NO: 471003 - DNA, 536 bp, Homo sapiens
ctgcctgtgatatgaagcaggaggcagatgcgataagaggtgtcagggcgggcccgggaacttttgaacttaaggggtgggagggccaggaaggcatcagggaggaggtttcgtaggagcctgaatgtggagacactgcagagggaaggggcagagggactgtgtgagcaagcacaggctaggaggaggtgagggccrtggtacgggagttgttgggtatggtcaggctgggggtgcatgggaggagggtggtgagggctcaggattcgggccaggggctgcatccgggggaaggggtctggattcccagagcctgtgatttcagcccgctgggctcaggcagagggcaaagctaccctcttcggggtcttctcccagccctgctaattccaggcctgactgctcaagaagtgtttctacctgcagcatcaggggcctgactgaagccctaagttctcccctttatcccgtttttctgggcttcagtttccccagtcatagagtgagaggcctcttcatgccaccagttctcccgg

SEQ ID NO: 471004 - DNA, 536 bp, Homo sapiens
ctgcctgtgatatgaagcaggaggcagatgcgataagaggtgtcagggcgggcccgggaacttttgaacttaaggggtgggagggccaggaaggcatcagggaggaggtttcgtaggagcctgaatgtggagacactgcagagggaaggggcagagggactgtgtgagcaagcacaggctaggaggaggtgagggccgtggtrcgggagttgttgggtatggtcaggctgggggtgcatgggaggagggtggtgagggctcaggattcgggccaggggctgcatccgggggaaggggtctggattcccagagcctgtgatttcagcccgctgggctcaggcagagggcaaagctaccctcttcggggtcttctcccagccctgctaattccaggcctgactgctcaagaagtgtttctacctgcagcatcaggggcctgactgaagccctaagttctcccctttatcccgtttttctgggcttcagtttccccagtcatagagtgagaggcctcttcatgccaccagttctcccgg

SEQ ID NO: 471005 - DNA, 536 bp, Homo sapiens
ctgcctgtgatatgaagcaggaggcagatgcgataagaggtgtcagggcgggcccgggaacttttgaacttaaggggtgggagggccaggaaggcatcagggaggaggtttcgtaggagcctgaatgtggagacactgcagagggaaggggcagagggactgtgtgagcaagcacaggctaggaggaggtgagggccgtggtacgggagttgttgggtatggtcaggctgggggtgcatgggaggagggtggtgagggctcaggattcgggccaggggctgcatccgggggaaggggtctggattcccagagcctgtgatttcagcccgctgggctcaggcagagggcaaagctaccctcttcggggtcttctcccagccctgctaattccrggcctgactgctcaagaagtgtttctacctgcagcatcaggggcctgactgaagccctaagttctcccctttatcccgtttttctgggcttcagtttccccagtcatagagtgagaggcctcttcatgccaccagttctcccgg

SEQ ID NO: 471006 - DNA, 507 bp, Homo sapiens
gcaagaggccctccttccaggggatgcactggtccactttttatgctcttaagaaactatacatcagtaacatcttgcttatgtgaagaaaactttgggttcagttcatcttgcagaaagaattactcaaggagaacaagagcaggtcaggcctgcagaaccctgcagttttgaaaatacccagtagagggcattgttaaaacagtctgwcgggaaaatagaagtttaacagactagagaaaagaaagggttgttttgtcatcaggaccaactcatttccctctagtctgcagatatgagtaattctaagtctatgggatttctcagccgtttttaattccatcgttcacttgccttggttcgacctgaatttctcctgtccagccagagtctcctctgtccttggcagtgagagaagcgactgtcacttctggctgtgtgtgatcagcgaaatggagcgttgtgatacaccagatacaggttccagccactgtgccagaagagagg

SEQ ID NO: 471007 - DNA, 623 bp, Homo sapiens
tcaggtcatatggcaattgcatgtttagttttataagaacctgtgaaactttaccagagtggctgtaccgttttactcaagcaattttaaaaagaaagatatgaatttatgctttctgggctcttacttatctcagaatgtctgtcttttgccttcacacgtatgataaattggctgggaaaatatactcgtttcacattagtttttcctcaaaattatatagaatttattctaacactttctgatagtctatgcttcaaagaaatctgtttctagcttaatttttgttcctttgcaggcaatgagtttgtcttgttttgatatttataagatgctttctttcctttgcttttaaaatcacggggtatataagaaaaacagttggcctttgttttagctcagaaaaaaaaaaaacctaaactatgtttttgatcattgaatctgttgttctgggctctaccattctttgtctgccatatttattacctacccgctcatcattttcttatatttgttctttctttttgcattctctgagagcatctcaagtttttcccttgcatcagtgatttayttttccacagtgtcaattcagctttggagcaccttcatctggatttaaa

SEQ ID NO: 471008 - DNA, 522 bp, Homo sapiens
ttaacaacacggagcttttaacgtttccaggggaggaaatgaataaacaggcatttgggatgaagtccactgagtccgcgggactggctgaaaggtgaattcagttggaagaagttttgacatacaatgcagacatctcttgacccagttttgaatcagagttctcagtaaacaaagtcaggaaattagaatttctgggtcaattccacatttcataagcaacgtcaaaagaaatatttattttgtgggaaggttacctggtttaggtggaataagtcagacggaaaagcaaaattagttacccagatgatgggtgttctttattgattttaaattcagtaaaattgccatcagaaattctcaattataacatttatgttttatctagtattttaactataaatggcttgtacatatttgagagtcttttatcctatggaatacttgaaaccatgctgcatttaatttaaytttttttagaaaatcaaatatcaccagctatctgctttccatttgcctttt

SEQ ID NO: 471009 - DNA, 629 bp, Homo sapiens
taagggtgtccaaaggtcagggcacaaagtgaacattcagggaaatggaagtgtgagtggattatagagaggaatggctggagaagaagggcttatactggatttgactttcaaaataatttggatttcataacaaagagaatgagaaaccattacagaatttgggatagaaaaagtgataagttttgaatctgaaaaagatgattggcagtagtatggaaaatgaatcaaatcacagggctgtgagaatctaaagcaagaagacagaaacacagaccagaaatgataagcgcatcatgtgaggcaggcatagggccatggccagacttctacattttactgaaaaggagatccatgaagagagaaaggaactttgtaattaaggtattgtcatactgcatgtatcacacaatgttcaagaactttcatcaagggcatgatgagaaaaactggctctggaagatggtttcaggttacaaggaaatctaaaagataccaataaatattttgatacacaaaagtaagataaactaaaagaatctgagaagtcttragataccggcatacaaaataaatgaacattaatgttaatgatctttcatgttaaattcttatataactttttgttt

SEQ ID NO: 471010 - DNA, 596 bp, Homo sapiens
ctgtgagatacagtaagttcaagatgtcagaggccaggccgcccccsctgctcgggcagcacacaacgcacatcctgaaggaggtcctgagatacgatgacagggccatcggggagctgctcagcgctggagtggtggaccaacatgaaactcactgacaaaggaaaagggctcttcctcataacctcgatccgaatacactggcaaaggcaacactttgcttggacccttctccccagttctgataccactaaaaagaagatttagagtaactccagatttcttacatggcatctccagaatggctctggtattaatgaatctagtgccttttaaatgtatcccacgttttgttccctaccatcttttttttcagatgatgatttcattatggatttgtgggatttttaaaaataaagttttaatttttttcctggaaaaatgcactccttattctacttacattaatgtcctaaacgtttgccccttaccccccatgccctcaccagaccccccgccccgtccatacaggcctgaaaaagagcagctctcttgatactttctacttgtacataaaatctgcatttaaatttgtg

SEQ ID NO: 471011 - DNA, 596 bp, Homo sapiens
ctgtgagatacagtaagttcaagatgtcagaggccaggccgcccccgctgctcgggcagcacacaacgcacatcctgaaggaggtcctgagatacgatgacagggccatcggggagctgctcagcgctggagtggtggaccaacatgaaactcactgacaaaggaaaagggctcttcctcataacctcgatccgaatacactggcaaaggcaacactttgcttggacccttctccccagttctgataccactaaraagaagatttagagtaactccagatttcttacatggcatctccagaatggctctggtattaatgaatctagtgccttttaaatgtatcccacgttttgttccctaccatcttttttttcagatgatgatttcattatggatttgtgggatttttaaaaataaagttttaatttttttcctggaaaaatgcactccttattctacttacattaatgtcctaaacgtttgccccttaccccccatgccctcaccagaccccccgccccgtccatacaggcctgaaaaagagcagctctcttgatactttctacttgtacataaaatctgcatttaaatttgtg

SEQ ID NO: 471012 - DNA, 596 bp, Homo sapiens
ctgtgagatacagtaagttcaagatgtcagaggccaggccgcccccgctgctcgggcagcacacaacgcacatcctgaaggaggtcctgagatacgatgacagggccatcggggagctgctcagcgctggagtggtggaccaacatgaaactcactgacaaaggaaaagggctcttcctcataacctcgatccgaatacactggcaaaggcaacactttgcttggacccttctccccagttctgataccactaaaaagaagatttagagtaactccagatttcttacatggcatctccagaatggctctggtattaatgaatctagtgccttttaaatgtatcccacgttttgttccctaccatcttttttttcagatgatgatttcattatggatttgtgggatttttaaaaataaagwtttaatttttttcctggaaaaatgcactccttattctacttacattaatgtcctaaacgtttgccccttaccccccatgccctcaccagaccccccgccccgtccatacaggcctgaaaaagagcagctctcttgatactttctacttgtacataaaatctgcatttaaatttgtg

SEQ ID NO: 471013 - DNA, 596 bp, Homo sapiens
ctgtgagatacagtaagttcaagatgtcagaggccaggccgcccccgctgctcgggcagcacacaacgcacatcctgaaggaggtcctgagatacgatgacagggccatcggggagctgctcagcgctggagtggtggaccaacatgaaactcactgacaaaggaaaagggctcttcctcataacctcgatccgaatacactggcaaaggcaacactttgcttggacccttctccccagttctgataccactaaaaagaagatttagagtaactccagatttcttacatggcatctccagaatggctctggtattaatgaatctagtgccttttaaatgtatcccacgttttgttccctaccatcttttttttcagatgatgatttcattatggatttgtgggatttttaaaaataaagttttaatttttttcctggaaaaatgcactccttattctacttacattaatgtcctaaacgtttgccccttaccccccatgccctcaccagaccccccgccccrtccatacaggcctgaaaaagagcagctctcttgatactttctacttgtacataaaatctgcatttaaatttgtg

SEQ ID NO: 471014 - DNA, 682 bp, Homo sapiens
ataaaatctgcatttaaatttgtgttagggagtcaaagcaataagcagaatgacagtctctgtgattgattttatacagaataacttaattctgagctcttgaaccctttgttagtctctaatttaaaccatagactttgcggatgtccattataaaactgagctccattctcccctgtgggggtaaatatttgctttatgttgtatttctctggtgattttatgctatgtggcagaaagtcaatattcccagtgcatttagagatgtaggtatctgtctgcacaggtaggtgagaagtggttttacacttggtaccttattttgagccaagtgaaaatgcaacagggtttttaaatgaattaaacaggttcttaaatgactatccaggtgttaaataatttatacatcatgacagataaaagaatgacaggaagacattgctttgtaatctgagcatccactgttgaagactagatcatgccttagcattgagtatttcaatggatataaagtataaaaaacacctgtgtccagtaggtgagaaatgattaggacgtatgttccwggataaattgttgctcaagactgctaagcccaggtatagtctggggaatcagatgacctcaactcctggctgttaggcacatctattttaatgtcattacacaccaaatggtaatt

SEQ ID NO: 471015 - DNA, 682 bp, Homo sapiens
ataaaatctgcatttaaatttgtgttagggagtcaaagcaataagcagaatgacagtctctgtgattgattttatacagaataacttaattctgagctcttgaaccctttgttagtctctaatttaaaccatagactttgcggatgtccattataaaactgagctccattctcccctgtgggggtaaatatttgctttatgttgtatttctctggtgattttatgctatgtggcagaaagtcaatattcccagtgcatttagagatgtaggtatctgtctgcacaggtaggtgagaagtggttttacacttggtaccttattttgagccaagtgaaaatgcaacagggtttttaaatgaattaaacaggttcttaaatgactatccaggtgttaaataatttatacatcatgacagataaaagaatgacaggaagacattgctttgtaatctgagcatccactgttgaagactagatcatgccttagcattgagtatttcaatggatataaagtataaaaaacacctgtgtccagtaggtgagaaatgattaggacgtatgttccaggataaaytgttgctcaagactgctaagcccaggtatagtctggggaatcagatgacctcaactcctggctgttaggcacatctattttaatgtcattacacaccaaatggtaatt

SEQ ID NO: 471016 - DNA, 630 bp, Homo sapiens
tgaaacttgtcaatctgtttaccaaatatgtgtctattataatatccaaatgcctawagcagattcagaaaatatgggaaaacatattaattccaatcaacactattatattacaagtataaattatgtccacatgacctgcatggtttatttataaaatatatattttaagtgactaatatgtacaacattaatttgtatattagaagtttttgacatctctagcatgcctgtattttcttaaataaactgtgtgcatgtatggataagcaacacatattacactcatatataaatacatgtggatttttatacttttataaaatcccccagtggggattcagaatgtctttagagaagacttttaaagtcaattttttttaatatattttatttatttttttttagaaatggggctgtgttttatacttttataaaatcctccagtggggatccagaatgtctttagaggagatttttaaagtcatattgttttatacattttttatttttttttagaaacagggtcatgctctgtcacccaggctggagtgtagtggcacaatcatagctcactgcagcctcaaactcctgggctcaagcgatcctcccacatcagaccccgagcag

SEQ ID NO: 471017 - DNA, 630 bp, Homo sapiens
tgaaacttgtcaatctgtttaccaaatatgtgtctattataatatccaaatgcctaaagcagattcagaaaatatgggaaaacatattaattccaatcaacactattatattacaagtataaattatgtccacatgacctgcatggtttatttataaaatatatattttaagtgactaatatgtacaacattaatttgtatattagaagtttttgacatctctagcatgcctgtattttcttaaataaactgtgtgcatgtatggataagcaacacatattacactcatatataaatacatgtggatttttatacttttataaaatcccccagtggggattcagaatgtctttagagaagacttttaaagtcaattttttttwatatattttatttatttttttttagaaatggggctgtgttttatacttttataaaatcctccagtggggatccagaatgtctttagaggagatttttaaagtcatattgttttatacattttttatttttttttagaaacagggtcatgctctgtcacccaggctggagtgtagtggcacaatcatagctcactgcagcctcaaactcctgggctcaagcgatcctcccacatcagaccccgagcag

SEQ ID NO: 471018 - DNA, 637 bp, Homo sapiens
acaaaaaaggtgtcaattactgaggagcaaatgtgtagacctgtacaacctcaagtgttctctcccataaatacagaatccttttatggtgatttaataaaatctgtccaggcagatgtgagaagaaatagcctttaaatcgcatatctagtttgaggcatgtattatgttttatactctctgatttctggtagatagttctctctttcttattgctatgccatttattagcaatttatctgttttgtaaatttatcaagatgctagaatccctcagcatggtacacatgaaaacgtagcaaccagtcattgycagctctcatggtatgtttcccgctgtcgaacttctgtccccagagacgcttgtcatcacctgctgtctactccaaatgccaagttgttttcttcacttggtggctttgggcagagggggagaaatggctcatcacaaagaccagcagcaccttgggcttcaaaggtgggggttacacctgcacctggggctagggagaaaggggcaagcttaacattcatctcactttctggggtggtaccaaacgttgctgctggtggttcaagaactcatcccatttcacctccttttggtcttttccaaggcttcccacaccttccttgt

SEQ ID NO: 471019 - DNA, 558 bp, Homo sapiens
atcacacttccttgctttgtgtcagtgtgacaaatccgtcattgcctttttcattaatcattccattggttgagtgactcaggctgtcacagagaagacaattatagaattatttttatggaaaacaggcactgaaayattgtaataaaatttcagttattttcactctccttgttgagatagtttttttttttttggcaagatcagactcatttattcttcttgaatcatttatttctcaatttaatgattctctgaccgccattaagtacttcaaaagacaaccaggtaataaatcaagtgtgttttattttacctcatttgccttttcctgtatatattttatagaaccccatatttcaggagaagaatttaggtgtgactgccttatggattagaaatcaactaaatggtcccttaggcttataacagtgattctgtaattttatgaactattgcttcttttgttctgagttctaatgaaaacagcaacaacaaccagaactcttggtcccgtggcttctctgacctccccatggtgttcgccagtgtgggcag

SEQ ID NO: 471020 - DNA, 563 bp, Homo sapiens
ctatcacacttccttgctttgtgtcagtgtgacaaatccgtcattgcctttttcattaatcattccattggttgagtgactcaggctgtcacagagaagacaattatagaattatttttatggaaaacaggcactgaaatattgtaataaaatttcagttattttcrctctccttgttgagatagtttttttttttttggcaagatcagactcatttattcttcttgaatcatttatttctcaatttaatgattctctgaccgccattaagtacttcaaaagacaaccaggtaataaatcaagtgtgttttattttacctcatttgccttttcctgtatatattttatagaaccccatatttcaggagaagaatttaggtgtgactgccttatggattagaaatcaactaaatggtcccttaggcttataacagtgattctgtaattttatgaactattgcttcttttgttctgagttctaatgaaaacagcaacaacaaccagaactcttggtcccgtggcttctctgacctccccatggtgttcgccagtgtgggcagcag

SEQ ID NO: 471021 - DNA, 589 bp, Homo sapiens
ataatttttgtaaaaagagggtttttagtgtattctttatatcaggaaattcagacactttcatgattattattattgattataaacaattttattatttattaataagctgattttgttttytctctaaatgattgttgcttgaatatgtggaatctctctgagaagtcatgtaaatatgaattcatgggctcaaataactctttgagtagggctagttctgtgtatatattgctttttcaacagtgaagtttaagagatatcacagtgctcaaaatcctgccctgtcctaaaataccacctattggagtcaatcctttgagttaccccaaagaggcaagaagatctctaaaaagtcacatacacggactgagaagggggatagaaccagccaatttatcttcatggattgatttatcagagaagaggtaatcaacagaaccaagatatcagggtgaccacactgcacagcagagggaagaagagaatgcacatgacaggtaaggtgctggaaggacctttagaatggcctgaggcatactgactttctgacagaaggaagctataagttcaggtggtgtccagagta

SEQ ID NO: 471022 - DNA, 589 bp, Homo sapiens
ataatttttgtaaaaagagggtttttagtgtattctttatatcaggaaattcagacactttcatgattattattattgattataaacaattttattatttattaataagctgattttgttttttctctaaatgattgttgcttgaatatgtggaatctctctgagaagtcrtgtaaatatgaattcatgggctcaaataactctttgagtagggctagttctgtgtatatattgctttttcaacagtgaagtttaagagatatcacagtgctcaaaatcctgccctgtcctaaaataccacctattggagtcaatcctttgagttaccccaaagaggcaagaagatctctaaaaagtcacatacacggactgagaagggggatagaaccagccaatttatcttcatggattgatttatcagagaagaggtaatcaacagaaccaagatatcagggtgaccacactgcacagcagagggaagaagagaatgcacatgacaggtaaggtgctggaaggacctttagaatggcctgaggcatactgactttctgacagaaggaagctataagttcaggtggtgtccagagta

SEQ ID NO: 471023 - DNA, 663 bp, Homo sapiens
accatttcttcaccctgtcattgtggagcacataatccaaaattttattgaaatcaagagatgttttccttgctattatattgggagcagaatacgattcctttgaacacttccaaagttcatttttgtttctcagtgactgctttcaagttttcaaacaagaaaggattttgtttttctctggctaaagcttatttttacccagccttggttttctttcctttcctttaaaaatcctcagcacatctaagtacactaaatatttatgaatgtaatttatgagctttggccgtttactccttgccaaaactaaaaagtatgtctgtgtgtggcctgaaaaatcccagctatgacaaaaccaaaacagagaaatragcaactacttcacataaaaaaagagaaaaagaggtcaaacttcacaaaagtccagaaattactcacttgacatattcagactggcacaaaggaaaataaataatattacatctcctccaagaaccttgtcctgtatgtcctgcctcagatgtcctgcagtaaacatttattgagagcatcaggagggaaaatgtcccaggcatctgaaagacagaggcctgcagcttgctgggcagctagggcccagggtgctgcccacctcagccctgtcccccaaagcctgtgtca

SEQ ID NO: 471024 - DNA, 663 bp, Homo sapiens
accatttcttcaccctgtcattgtggagcacataatccaaaattttattgaaatcaagagatgttttccttgctattatattgggagcagaatacgattcctttgaacacttccaaagttcatttttgtttctcagtgactgctttcaagttttcaaacaagaaaggattttgtttttctctggctaaagcttatttttacccagccttggttttctttcctttcctttaaaaatcctcagcacatctaagtacactaaatatttatgaatgtaatttatgagctttggccgtttactccttgccaaaactaaaaagtatgtctgtgtgtggcctgaaaaatcccagctatgacaaaaccaaaacagagaaataagcaactacttcacataaaaaaagrgaaaaagaggtcaaacttcacaaaagtccagaaattactcacttgacatattcagactggcacaaaggaaaataaataatattacatctcctccaagaaccttgtcctgtatgtcctgcctcagatgtcctgcagtaaacatttattgagagcatcaggagggaaaatgtcccaggcatctgaaagacagaggcctgcagcttgctgggcagctagggcccagggtgctgcccacctcagccctgtcccccaaagcctgtgtca

SEQ ID NO: 471025 - DNA, 455 bp, Homo sapiens
cagctcttgtggttgccccagaggttgcagatggaaggagcccaccgctcctgcagggcttagcacgtggctggtcactgcctcggtggggtcgatcaggccccctctctctgccattctgggagaagtatctatcatggttctttccacactgattttattcaggagtttctactttaatcctcacgtctttgccctcttgttttgcctgtaaagaacttctccgtaaggcctggttttccctcctttttcaaygtgagcctcagcatcttctgctctttgctgccccaccaaatctccctctgtggcatcaacctgccaccacacacattgtcagaggtggcattgggcaacgcaacttcagagttccttgtcctgccgatctctgagaatccatggggcacattccacaggacactggagatgtgtcttgaggagggggagatgctgtgtgc

SEQ ID NO: 471026 - DNA, 455 bp, Homo sapiens
cagctcttgtggttgccccagaggttgcagatggaaggagcccaccgctcctgcagggcttagcacgtggctggtcactgcctcggtggggtcgatcaggccccctctctctgccattctgggagaagtatctatcatggttctttccacactgattttattcaggagtttctactttaatcctcacgtctttgccctcttgttttgcctgtaaagaacttctccgtaaggcctggttttccctcctttttcaacgtgagcctcagcatcttctgctctttgctgccccaccaaatctccctctgtggcaycaacctgccaccacacacattgtcagaggtggcattgggcaacgcaacttcagagttccttgtcctgccgatctctgagaatccatggggcacattccacaggacactggagatgtgtcttgaggagggggagatgctgtgtgc

SEQ ID NO: 471027 - DNA, 455 bp, Homo sapiens
cagctcttgtggttgccccagaggttgcagatggaaggagcccaccgctcctgcagggcttagcacgtggctggtcactgcctcggtggggtcgatcaggccccctctctctgccattctgggagaagtatctatcatggttctttccacactgattttattcaggagtttctactttaatcctcacgtctttgccctcttgttttgcctgtaaagaacttctccgtaaggcctggttttccctcctttttcaacgtgagcctcagcatcttctgctctttgctgccccaccaaatctccctctgtggcatcaacctgccaycacacacattgtcagaggtggcattgggcaacgcaacttcagagttccttgtcctgccgatctctgagaatccatggggcacattccacaggacactggagatgtgtcttgaggagggggagatgctgtgtgc

SEQ ID NO: 471028 - DNA, 455 bp, Homo sapiens
cagctcttgtggttgccccagaggttgcagatggaaggagcccaccgctcctgcagggcttagcacgtggctggtcactgcctcggtggggtcgatcaggccccctctctctgccattctgggagaagtatctatcatggttctttccacactgattttattcaggagtttctactttaatcctcacgtctttgccctcttgttttgcctgtaaagaacttctccgtaaggcctggttttccctcctttttcaacgtgagcctcagcatcttctgctctttgctgccccaccaaatctccctctgtggcatcaacctgccaccacacacattgtcagaggtggcattgggcaacgcaacttcagagttccttgtcctgcygatctctgagaatccatggggcacattccacaggacactggagatgtgtcttgaggagggggagatgctgtgtgc

SEQ ID NO: 471029 - DNA, 623 bp, Homo sapiens
atttttgtagagatcttgatatatcatactgcattctaataaaattttcaatactggcagtaacgtagattataatactaatgtttcccacgggatcccatgatcataactcctttggtaaatgtcctagagttaaggtgaatgcaccaaagagctgtaactcactgacatttaatattggctaatgcaatatgaaaaattcggcagcaaatacaggctgtagagaaacactccttcaagatttggagtccatgtcactcaaaaaatgttttctcctcatattctgagattaatgcagttctgacactttcctcacagatacacgatgatttaggaaagacaacaagaaagtcatggagataacagatgaatgggaccttcaagcagtaacattgtgacaagaaatgaaacttgaactctttgaacagaatttttccaggaaagccctttcaaactcttgaaagggaaacatcaaagtctgaagggcagataygaaaaaagtttcccctcttacaccaaagtgacacaaattcaatctgacacacatttatagtgaattttgtgtgccaacaaagataaaaaggaaaaggatacgtggttgtcctcaaggaacttattacaat

SEQ ID NO: 471030 - DNA, 608 bp, Homo sapiens
ggggctccttgcagaatttgcagaaaggtcaagagtcacatgccccaacccgttctctaaaagcatctcagaaagacccggtggaaaggtcatcttaagacagtgacagggcacagcttgtkgggggaagagaggagaggacagaagaatttcttttttaagtagcagaaagtacatctgtttcttgctcagcttagactttcaagtctgatttttatttcgatggcatttccttggcttttccaattcatgtctaaatcacaaaatgtgtccattgtgcacttctgggcttgcgtacatgtgccacagagcacaacaccgcaaatgcattttctcacttcattaaacattgctttaaaatggcatccaaatgtccgctctcacaatcgcgtctaggggagattgtgttactttttcccccacagtgggaacagaaggaacagctaagtcacaagctgtgatgtttaatatttttcaatttcacacgtccaactctgaaagctgattgtagggacagcctggtcagccatgccactgcgtgcaagggctctggttgtcttggggaggcttccctttagccttgcaattctctgatctacactgcaaca

SEQ ID NO: 471031 - DNA, 575 bp, Homo sapiens
gaaatgctattttatcagagcaaatcaagatgattgaacttaaaaattttttcagcagcttttagagaaaatgtcatatgaaaacaaaataatcctatgttagcccagttctcctagaaaacagagctgaagcaggaattccatcccagtgctttctatgggaggtgcaatcccagagcaattaaagtgaaagaaagagaagtgaagcagggaaggataaaaagcaatgcaaagtgatgcatgaatatgctggccattacttcacaatgggcctaaagagacgcaggaktccactgaggaaggaaggagagggaattggtcctccaggttccctcccatctcctgtttgccattgatcaaaacacataccacagggaattatgtccctacacttccaggttgcaccatctggcccctctgacagagccgatgccctgccgagtgtcatttcatcaagtttgggagaatgtgggagaacccgggagctcaggtgtgttaaccaaatggcatcaggctgtagaaagacatgggtccccacagagtttcaacacagcaggagctgagtagggtgagca

SEQ ID NO: 471032 - DNA, 575 bp, Homo sapiens
gaaatgctattttatcagagcaaatcaagatgattgaacttaaaaattttttcagcagcttttagagaaaatgtcatatgaaaacaaaataatcctatgttagcccagttctcctagaaaacagagctgaagcaggaattccatcccagtgctttctatgggaggtgcaatcccagagcaattaaagtgaaagaaagagaagtgaagcagggaaggataaaaagcaatgcaaagtgatgcatgaatatgctggccattacttcacaatgggcctaaagagacgcaggagtccactgaggaaggaaggagagggaattggtcctccaggttccctcccatctcctgtttgccattgatcaaaacacataccacagggaattatgtccctacacttccaggttgcascatctggcccctctgacagagccgatgccctgccgagtgtcatttcatcaagtttgggagaatgtgggagaacccgggagctcaggtgtgttaaccaaatggcatcaggctgtagaaagacatgggtccccacagagtttcaacacagcaggagctgagtagggtgagca

SEQ ID NO: 471033 - DNA, 653 bp, Homo sapiens
gtccacatcttgctgaagccaactatacccgtattttcatcttctctgaaaacgtttctctgcaacagttggctccaccttctactgtcagcttcttagagctcctaccaagtaggcacaatgacagcccttttccctctataagagctgttgtcatctggttcatagcacaaatagagaaccatttaggagaagataaacaacatattacctaaaagmcaaacaatgcagactgaagagggtctcatcaaatagcctctttgtctgcagggcctatcacaggtgtcaatttgatcatcttcatcctctctttccatgttcattgccacaacttgttcagctccaaccttactcatgggtatgcctctctccttgccctcctttaacctaatattcatataccttgaggtgtcaatgcacagtaaatgacaccttcatgcctctctttcttgttgctttcctgtatgaactgaaattccctccgctgtcactggaaagtctcaggttcttgttaggtacactttcccccttatatcatccctctcacagttttggtcaccgccctattttgatgatggatcataggccccctcatcagcatggaaatcatttcttggggaattaggcaatacttgctctgagtggataaaaac

SEQ ID NO: 471034 - DNA, 600 bp, Homo sapiens
aaattttgttatccacctcggaagccttagctaaatgctaagaaaacaggaaaagatggatttggcgtcatgctacatgtttgctgagttaactgattccagcagccccaccctcatggagcactcggcatggtggggagaacaatctagggtgccctgaacttctctcagaggagtgagtagaaggagctgggaacacagagcttggaatgcgaggcagtgaagacctcagacaaagacacccgaggctcttctagttgattcagggatgcatcatttgcatgatttccacataaatttgaatgttgaagtcaagaggtggtaactccacagatgtacaatataaaatgaagctaactaatttgtaccacctacaaggattttaaatccaagggcttgacacgtgtgaaaggcagtcaatctcactgctatggaatgagagcagcctggagccctgtgagagctagtaaaacaactcattatatatgttgtatgcacacactcttaatacacagtttggttactttgagtcaagggagtcggcatmggtaatgtttgcttttatttcctttgattatgaataaaagcagtagcagcaaa

SEQ ID NO: 471035 - DNA, 515 bp, Homo sapiens
gctggtcagtgggccccaaggctctagaggtggggtttcccagcatcctcgaggtccttggggtcactgatgtgctgcctatcacccaggaacacagaccttccacatctgccccccagatgtgccctgtggatcaaaccacaggccctgcctggtgccagtcacctgcaacatcctgtttagatcatgaacaaatgagcaacgtgggagaaaaggcttctcaaagaaagcccaccacccactgaagcttaccatcattctttttgcctcacgcagaaaggaggtgtttcctctaaaaaaaaaaatgtcccttggggacctgaaagtcagagccaagtgttttaatattccagataattaatttctggaaaaaacataacttagaatgattatcattgctttctcaggaaacattatctttctttgcagaggcaaagtggactccaactcaacccaattgcagccaaagtgagttcattctggcccttaygctgaaaagagggtcctcaagagag

SEQ ID NO: 471036 - DNA, 282 bp, Homo sapiens
tgtttggacctgggaggcggagtttgcagtaagccgagattgtaccactgcactccagcctgggagacagagtgagactctgtatcaaaaaaaaaaaatgataaataaatarccttcaaaaaataaagataaatctttttccttattagaaacttaggctgggcacagtggctcatgactgtcctcccagcacttcgggaggctgaggaggacagatcacttgagtccaggagttcaagatcagcctggcaacatggcgagagcccgtctctacaaaacata

SEQ ID NO: 471037 - DNA, 500 bp, Homo sapiens
gttcaaaaagcaaatattgctatatgcgtgatgttttaccttaatacgagttsaaaggtggctatttatattaaagttatccacgggaagagttttccttcaagattatttcagtacaagctatgtaaggaacaccgttttgtgtctttgaataaagagtggaaagtgccagccacatccttttaataagattagtgtatattggctgataatttcataaaaattttgtcaaattagtgttcctgaagcatagttctgataatattacccacactgtccaagattacctagtggttcccaggaatgctcagagtcaagatcaaattcttttcttagactgcccttcaaaggtttctaaaacttagtcttaacctcaatctgtgttctcaatatttttcccaagacttccaaactctactccttcttctattcttgctcatgttgttcacgctctctgatattctccttccctattggtagatgtcaaaacttttactcaa

SEQ ID NO: 471038 - DNA, 605 bp, Homo sapiens
tctgcataacttgtcttctgttgaattattttccaatactaaacactgttgtgatgggttctgccagcctatggtcaaatgtacaaatcctaggttacacattccctttcttggcctgaaaaatcttggtgagtttaggatacatccgaaagaagctggattccaaatagtgcccaaaatataaatttaaaactcaaactacactggcctctttcgtgctatttacagtcactggtctcagaggaggcaggggctcaaaagatcctcactgtagaagctttctttggtttctcccttctttgaaatcctgtagctttaaaacatctttagaatttgttttgtcacttaccaaacaatgcattgctgtttttagttttaktaaattataggtgtgtgtgtacttattagtagagtgaatgcctaatattttcttaaggataattatgaaatattattatctcttcatgaaagtagctaacattaattttttagtctaggaacttcacaatgtctacatcatcttttttcgtcatcctcactttctaaatcacatattttattatcatcctgttctgtctgaggcataatatgctaaggctgcgcag

SEQ ID NO: 471039 - DNA, 625 bp, Homo sapiens
attctatcttccttggtttcattccttgttctctaaataaaatattaggtttacatagaacacgaagcatccttagaaatttttatatgttcaactaccacttttaatttaaataaaatgttagctgttcaaaaagcaaatattgctatatgcgtgatgttttaccttaatacgagttgaaaggtggctatttatattaaagttatccacgggaagagttttccttcaagattatttcagtacaagmtatgtaaggaacaccgttttgtgtctttgaataaagagtggaaagtgccagccacatccttttaataagattagtgtatattggctgataatttcataaaaattttgtcaaattagtgttcctgaagcatagttctgataatattacccacactgtccaagattacctagtggttcccaggaatgctcagagtcaagatcaaattcttttcttagactgcccttcaaaggtttctaaaacttagtcttaacctcaatctgtgttctcaatatttttcccaagacttccaaactctactccttcttctattcttgctcatgttgttcacgctctctgatattctccttccctattggtagatgtcaaaacttttactca

SEQ ID NO: 471040 - DNA, 502 bp, Homo sapiens
gacagccatccattcctggggcccctgtcccacaatttccaattcaaattgacacaggaaaagtcataaccatggttctgctgtatgctttccatgtgaagataattctaaaatcctaccacggcaaggacgccaytgacgtttttattcgagggagaaatactctacaatgtttgattttatgtacctctaagtaggtaggttcctggagctgcagaagaattgtcctatacctcactttaaattaagatttaattgtgacaggcgacaagggtcacgtgtctgtccttaaaggtgtctgtccacctttaagatttaattcagtgccttgggtgtgttgtttttcatatttgtggaccaaagtgattgccctgagtactggagaaagcagaatggctataccgtagttcatcaaatagctgtcagcctaaatatgccccaaatagtgttttcttactgaggcttcattttggcctaaatcttgttccaagaccccagtctt

SEQ ID NO: 471041 - DNA, 525 bp, Homo sapiens
gtggattactggggaaactagcagagatactatcagtaggatactgattgagattcaaatagcagagaatccaggtarcagttgcttaaatgagattaaaatgtcactttctttcatgtaataataagcaattcattgttgatatagtagatcctgacgtgatgaatgcgggctgtctcctgatttccattctgccatatctcaagggtagaaaaagcaggaaggaggaaagtaggaagaaagggcccttctgaaagatgcatattccactttcatatagcagtggtaagaaactagtcccacatctaagctggttttaagggaggtcatgagctcagttaaaaatcgagctgaggctgggcgcaatggctcacacctgtaatcccagcactttgggagactgaggcaggaggatagcttgaactcaggattcaagactagcctgggcaacagagtgagacccttgtctctacaaaaattttaaaaattagccgagtgtggttgtgcatgcctctgtaatcccag

SEQ ID NO: 471042 - DNA, 516 bp, Homo sapiens
tgatctagcagacatcctttgcctttgtcaggcccagtattctaccagtatttacccagatcttggacaatggtctcacgtgggtgagcagcttttgatctttgcttatcctggaagagakcttccagtaatatttagttccttcacatttctgtgcatgtacagatagaagacgcctgtaatttatattattattgttgttgttgttattattttggcaggagaaaagcttgtgtaattctctacaccagcagttgtcaaattactgcccgatcagggccaaatctagtctgtaacatatttgtttatagccagtaatctaaaaatagttttacatttttaaaggattgtaaaggcaagcaaaccactaaacaaagaatatgcaacagatgaaatatgtctcataaaccctaatatatttagtatccggtcctttacagaaaaggtttactggccccagtctatgtcttaattgaaatgctaacattctctgtttcattatttttcattctgaaa

SEQ ID NO: 471043 - DNA, 631 bp, Homo sapiens
aatgctgtagccttgactgtgtagacccaataacaaaactcccaagaagacacagcccaaggtgaatgggaattgatcataaaaagatgctgggacctctgcacagtatccagctcggcagtccccagcctttttggcaccagggaccaatttcatgggagacaatttctgcacgaaccagggatgggggatggtttcgtgatgattccagtgcattacatttattatgcactttttacttctataattgttacattgtactacagaatgaaataattatacaactcaccataatgtagaatcttttcctacaactagacggtcccatctatgggtgatgggagacagtgacagatcatcaggcgttagagtctcatgaggaacgcacaacctagatccctcacctgcgcagttcacagtggggtttgtgctcctgtgagaatctaatgtggctgctgatctgacaggaggcagagctcaggcagtaatgtgaccgatagggagrgctgtaaatacagattaagcttcgctcgctcacccaccactcacctcctgctgtccagcctggttcccaaaacagactggtaccagtctgtggccctggggtttgggacccctgatctagttcttc

SEQ ID NO: 471044 - DNA, 515 bp, Homo sapiens
agctggaaccatcagaatttcatttatgagaatttaaaattagctcgcaaaggctctaatcagcatttgagagaagcgaaggctcttttgaggagattaaaaaaaaaaaaaaaacaatgaacaaaatgaagcagagaagagagtatataaggccccagaaacagaaatagagaaaattgattctttgtgccacaggttacttcctggggggcccatgagatacctgcgtccacattgttttctttttcctatcgtagtagaatatgttyccattttgcatgcctcggagggtcacctgctcattcttcaagacaagacaactcaataggatagaatggccatgttttcatttactgaaaccaaattttaacaaggatgtagaaatactataatatacaaaggatttttagcttttctaacctctattatcatagctcctttagttactttctttttaggaaaggcaagaagaaaaggtagattttcatgagaaaatttcaaaattagatctttcc

SEQ ID NO: 471045 - DNA, 594 bp, Homo sapiens
tgctttgaaatgtaaccattagggcggcaaagaaatcaacatgcaaatgtcacccrtacatgaatttgagatgaagtctacatttgtcactgcaaacttagagcttgttggtattttttcctcccaaagcagtaagattttaaaaagcaaataaaaacaactgtaaatagatgagtgctgaatttagttcaactggaattctttaactacttatgcattttgttcacaataagcacagagaactaacatatacatgttaaggttacatggaaagactgaaaagagatgaaataaaaataatgagaagtggagaatgatattatgatacattaggtttaggcaagtaacagaaggatcgagagactccacattggtggtttcaaatattttatcaatttctatcatgaaaatgagctaatttcttgggaaaactaacgtacattttcaaagaaggttgcacaactacctgaggtgatagtgacctgagagagatggacaagttataattttaattttacagataacctaaaataaaaatttacaaactatgaaatattaattgggttcatttacaaaattcaaatagttgcaaat

SEQ ID NO: 471046 - DNA, 630 bp, Homo sapiens
tgcaaaaggacagactccacttaaattaggtacttaaaatagtcamattcatagggacagaaagtagaatggtggttgccagcagaagaggaattgtcctagagcaggcacagagtttcagttttgcaggatgaaagggctctgtggatgaagagtggtcatggtagcccaacaatgtgaatgtacttaaggccaatgtgcacttaaaaatggttaacatggggcaggcgccatcgctcacgcctgtaatcccaacactttgggaggctgaggcaggcagatcacaaggttaagagatcgagaccatcctggccaacatggtgaaacccaaactctactaaaaatacaaaaattagccaggtgtggtggtgcacacctgtagtcccagctactcgggaggctgaggcaggagaaccttttgaacccaagaggcagaggttgcaacaagccgagattgtgtgactgcactccagcctggggacagagcgggactccatctcaaaaaaaaaaaaaggttaacatggtaaattttatgttacatgtactatacaccttaattttaaaagttttgagaaattgtctttaaaatagaataaattaggacatttttatttgaaatatttttagaag

SEQ ID NO: 471047 - DNA, 619 bp, Homo sapiens
tctggggcagagcctgggacctgaagggatccgatgctgttagctcaaagaccacactggacttgcggttacggagagctaagacctgccgggaggcaggaagcctggtcctgattcccagcccagtgctctctgcagcccctggcagggttccctagtacctgaaatgtgttataatcaacatgtagtctcaccagatcattacattggtgtaatgcctcgaccaagcagtcccagccatcccagggaaccttgctgatgcgttggaaagagctttctggtacagggcagaactgatttgccctgggatgttccctccctcctctgcctacgatgggtagagacctactgatctatttcctgaatgtctatcataaggcgatatgttcttagctatttgtctttgccttatcttcaaaaattaagagaaaggtatgcctgactgcctccatttaataagaagacagatggrcagctagaggatgggaggataggaaggcagtcacaggtatggttgaggttagggcaggcttccattcatccaagcatcatggacaaattctccagaacttggattcaaagtccttacttggagagcccattttgttctcttccactc

SEQ ID NO: 471048 - DNA, 371 bp, Homo sapiens
catgccactgcactccagcctgggcgacagagcaaggctctgtctcaaaaaaaaattgtaaatttaaaaaaaagttgggtggtgtgtccttgcggattgatggcagaaaacagaatctggagagcagcaaagctgagttctagatttttcatttggataaatgtgggaagaattaggtcagtcttattttacttagttttaaaagawtgagtgaggagggcaatgcagttaggaaagaaaacatgaaaggaatgccttgtcctgctcggctggaccctcaagacacccacagtacttttcatgcttgaagattatgatgaaggaggtgagtaataattatagctaccatttattgagtactactgtgtacc

SEQ ID NO: 471049 - DNA, 521 bp, Homo sapiens
cgtcaagtgctgcaagagcatggagacttcaaatttattmatcggattctgcgacagggagctcactgtggactttgacaagagcagtgttattgggtggcagaagaaaatgcctaattggcatgaatttcagataaatggttggaggaaacagagagggagtatagaaacatttcagtgagcattactgtaaaaaaaaaaagtgatcaggggcgcaaatgagattgtgggaagaggtgtgaacaaggtaatcaaacatttaattgtttttagagtagagaaataattatattttacaagcagatgaaaattattcagaagagaggggttatttgatgttagaggagaaaggggggaattgctgaagcacatgaccttaaatggcaatgtctaccattgtgtgtgtatggaggcaggtttgaaatgggagcaagcttctacgtcctgggacaggagatgcatgagaattcatggatacatgagaatccatggatgcatgagattttaatgcaccagatgca

SEQ ID NO: 471050 - DNA, 640 bp, Homo sapiens
ctttttcatcttaccaaactaaaactcyatactcatgaaataacaacttctcatttccccctccctcagcccccggcaaccaccagtctactttcggtttttatgaatttgactgtagaaataacctttttgcaggataagacttttttttttttttgcaagaaatccctaaaggtggatattataagcataaataatttaaaagtgtgaaacatttgactctgtgtctctagaggcctaaggatctcaatatgcctacttatagggactcttgtaaagaaaatcaatgtaattattaattgattccccccattccacaaccatcattctaatttccttctctatgaattcgagtactctgagaacctcatacaaatggaatcataggatatttatcctgttgtgtctgccttatttctcttagcatgctttacctcttaaagccgatttttaattttattattattattttcactctgagttgttgaactgaaggttggcaggatggtatcatcctcagtctcttggtctcttgagttggataactacatatatgaacccatgattttataactgtttatccattggaaaggccccttgaacctaacagatgcctgacagtttctgttttgtaattaaa

SEQ ID NO: 471051 - DNA, 516 bp, Homo sapiens
gaccttcctgctttacgtttaaatgtgtctttctcacagaaaccaacaggaaaggttagaccaattaagctggaacaaatgacacaagagatcttgctaaaattaaaatccatgtaataaatggggctttgtttcacctcgttgatcttcatttttgaaatgggaatagcagtttggcagctcattttgaaaatcaatgtaagtcatacatatatacttgatgaaagcggtcacttcaaattcatggaaatcacagagaaagaatatgccaattagaaattcagaaagtcatttttggcttttagtgataaaatggactcaaaataaaacctttctggaggtctgattcagtatttacaactcatgctaacatgtcagaagttatwcttgcattttcttaatagtaggagtgagaagaacagtaacagcaatcagggggtggataataacacataatgagattaggctcattggtgtctgtgatacttaattttatgtgtcagcttgactggggtc

SEQ ID NO: 471052 - DNA, 621 bp, Homo sapiens
aggcctacgcacattagggaagaaaatcatctttacttggtctaccaattcaaatgttaatctcatcaagaaataccttcacatacacacatgccaatcatctttactcagtctaacaattcaaatgttaatctcatccagaaataccttcatacacacacgcgtacgcacacatgtgcacacacacacacagaataatgtttggccaaatgtctggacacctcatggcctagtcaagctgacatataaaatcaaaactgtcacagtccccctataaattgatgtataataatataaaaacatttttgttgtggacaaaaaaataayatatttcttcacaactgtacaaaaatgtcattaaagattttttatggtatccaagaaatggaaataatctaaatgcatatcgtgtatgaatttaaaaaagtattttatccatgcaatagaatattgctcagcaataaaaaaggaatagcctgtttattttattctaaaaataaaagtaattacttttgctctaacctaatatttatgcaaaaacctgggtgaaactcaaaaaatggtgaggagtaaaagaagtcaaacacagagcaccaaacatgtaattccatataattaaaa

SEQ ID NO: 471053 - DNA, 504 bp, Homo sapiens
actgactgtcttattcttctagggctgctataacaaattatgaccacaaacttggtgtattaaaaccacagaaacttattctttyacagttctgggggctggaagtccaaaacaggtgttggtgttggtggggccatgctccctctgaagcctctggggaagactcctttctcgcctcttcctaacttctcatggcttatggctgcatctttctcatctctgcctttgtcttcacatggtcttctaccctgtgtgtgtctctgtgagcctctcctcttcttataagaatatcagtcactggtataacccaccctaattcactatgacctcatctcaactaattactatctccaaatataaatcctaaatccaaataagttcacagtttgaggttttgagtggacattaattttgggggtacactatttaacccaccacagtgactgagctaagactgtaagttaggactaactcaaggccatgttctttatactacacaaaact

SEQ ID NO: 471054 - DNA, 504 bp, Homo sapiens
actgactgtcttattcttctagggctgctataacaaattatgaccacaaacttggtgtattaaaaccacagaaacttattctttcacagttctgggggctggaaktccaaaacaggtgttggtgttggtggggccatgctccctctgaagcctctggggaagactcctttctcgcctcttcctaacttctcatggcttatggctgcatctttctcatctctgcctttgtcttcacatggtcttctaccctgtgtgtgtctctgtgagcctctcctcttcttataagaatatcagtcactggtataacccaccctaattcactatgacctcatctcaactaattactatctccaaatataaatcctaaatccaaataagttcacagtttgaggttttgagtggacattaattttgggggtacactatttaacccaccacagtgactgagctaagactgtaagttaggactaactcaaggccatgttctttatactacacaaaact

SEQ ID NO: 471055 - DNA, 570 bp, Homo sapiens
ctggatagaggagtatggagttcaggaggcaggtcccgcctggagataaaaattcaaagccaagccttctctctytgcactcaacaaaacctcacttaaacaggcttgtcaggtcatggaatacggtactagaactctttgttggggaaaatgccagtcaaccttacccgtcagaacgctgcctttaagatcagagatctctttccttcagcctaatccacccctctccctgttttctcccctagccccactaggctagaagctccctggcttctcccacatcaggatccccaacaaacccattcccaggtggataagagcccaggcagttccctagaccacgttcactacttcctagctacccaagagcaggacatcgcagacaccggcctcctggaatattccctccgctcctcacatttacaggaaggactcaggtaagcctcggcgccagttcagtcggcccggggccactaaataccaatgggatccagtgggttctacgtggtgagtggggggcggataagagagatgcgacaccccccgggcctgccccccccacgccggggc

SEQ ID NO: 471056 - DNA, 245 bp, Homo sapiens
gacctggcttgatggctctaatggtaaaaatgtaagtgtggtactcatgctcatggaacttatcgctaagtgggaccaccatatctttccagtctgtcccttccttatcctacttcctgcctcctcatcacttcctcacttacctaattcttttcttcttctcctttgctttcctcaccctcctctaggccattccctytcccttttggaaggcagggggaagagacctcaggcacagggacggt

SEQ ID NO: 471057 - DNA, 245 bp, Homo sapiens
gacctggcttgatggctctaatggtaaaaatgtaagtgtggtactcatgctcatggaacttatcgctaagtgggaccaccatatctttccagtctgtcccttccttatcctacttcctgcctcctcatcacttcctcacttacctaattcttttcttcttctcctttgctttcctcaccctcctctaggccattccctctyccttttggaaggcagggggaagagacctcaggcacagggacggt

SEQ ID NO: 471058 - DNA, 575 bp, Homo sapiens
gcaggagagaagccacaggaagcatgtccagaaatggaggggtgagagcatagtgggtgattactgctaagaaagaccctcgaccctgagctgtcggactctgcagatgaggggctacagaaaaatctctctgggacaggggtgggcagatgggggagagaaggcaatgcagcaggactgccagaggacaccaaagcccagagctaagaccaaggtagcaagtgtgccgcaaaagggtggtttcttaaaatacttaggatgkgtcttatttatttacttatttttatacttgctcattccaaaaaggatgatggagctaacaaagatacatactttagaagaaaagaaaataggtaaggaaatgaagataaatgaaaaataatattcagaaaagaaataaggctgaaataaagttagagcacaataggacatactgtcattcactaggcatttcctcaaggtgccacatatttgacacggcttcctatctgctcaatagacagggaagcttgaggagctacaaggtccagagtgtccgtggggaaaggcaaacctgccgctgagttggaagacaa

SEQ ID NO: 471059 - DNA, 634 bp, Homo sapiens
ctcaagctggcacaggctggaggatcctcctgtcagcctcccctcagccaggaccagaggaagcatcaccaggcggatcaacagaacagccagggagttcaagccatagacaggatcccacaaggcaagggtggaagcaggaaggtggtgcaacttcaacctgggaagcacatcagaatcacaggaagagcttaaaaaaaaaaaaaaaaaaaaaaacaggccaggtgcggtggctcacgcctgtaatccccacctttcaggaggccaagacaggaagatcacttaagcccaggagttcaagaccagcctgggmaacttggtggaaccgaaactctacaaaaaatacaaaaatcagtcagatgtagttgcatgcacctgtggtcccagctactcaggaggctgaggcaggaggatggcttgagcccaggaggtggaggttgccatgagccgagaccatgcccctgcactccagcctgggcaacagagcgaggccctgtttcaaaacaaacaaacaagacagatgtccaggccacacccagaccaattaaaatagaattgacagcggaaagacccaggcaatggtgggttttaaccttctcaagtagtcgcaatctgcagccgggcttgggaacca

SEQ ID NO: 471060 - DNA, 634 bp, Homo sapiens
ctcaagctggcacaggctggaggatcctcctgtcagcctcccctcagccaggaccagaggaagcatcaccaggcggatcaacagaacagccagggagttcaagccatagacaggatcccacaaggcaagggtggaagcaggaaggtggtgcaacttcaacctgggaagcacatcagaatcacaggaagagcttaaaaaaaaaaaaaaaaaaaaaaacaggccaggtgcggtggctcacgcctgtaatccccacctttcaggaggccaagacaggaagatcacttaagcccaggagttcaagaccagcctgggcaacttggtggaaccgaaactctacaaaaaatacaaaaatcagtcagatgtagttgcatgcacctgtggtcccagctactcaggaggctgaggcaggaggatggcttgagcccaggaggtggaggttgccatgagccgagaccatgcccctgcactccagcctgggcaacagagcgaggccctgtttcaaaacaaacaaacaagacagatgtccaggccacacccagaccaattaaaatagaattgacagyggaaagacccaggcaatggtgggttttaaccttctcaagtagtcgcaatctgcagccgggcttgggaacca

SEQ ID NO: 471061 - DNA, 603 bp, Homo sapiens
tcacctgtaatcccagctactcaggaggctgaggcggaagaatcgtttgaatcctggagtcagagtttgcagtgagctgagattgcgccactgcactccagcctttgagacattttccatctcaaaaaaaattaaaaactccagtattaacatataaaatgtaggtaaagacagccccagtgaaccacaccacctgatagttstatcttcccccaattaatccaactggctgtatgactcgcttcaaccaacaggaggaggcagaattgatgttggaactgttccatgcctccactttaaggaggcttggcagtttgcactctggcactcttgggaagcctaagccactatataagaattatggttatcctgctagtggggttcttgctacataaaaagaccacgtaagaagccactttgtgaggaagaggcctaagatgggtgggagggagaagatgccccactgttccaatattccagttgaacccagtcatccctaccaaggcactagccatgtgaatgagctgtcatggacattctagtttaagtgggctaccagatgactgcagtaccagcagaacatccatgggacaaaagaaccat

SEQ ID NO: 471062 - DNA, 603 bp, Homo sapiens
tcacctgtaatcccagctactcaggaggctgaggcggaagaatcgtttgaatcctggagtcagagtttgcagtgagctgagattgcgccactgcactccagcctttgagacattttccatctcaaaaaaaattaaaaactccagtattaacatataaaatgtaggtaaagacagccccagtgaaccacaccacctgatagttgtatcttcccccaattaatccaactggctgtatgactcgcttcaaccaacaggaggaggcagaattgatgttggaactgttccatgcctccactttaaggaggcttggcagtttgcactctggcactcttgggaagcctaagccactatataagaattatggttatcctgctagtggggttcttgctacataaaaagaccacgtaagaagccactttgtgaggaagaggcctaagatgggtgggagggagaagatgccccactgttccaatattccagttgaacccagtcatccytaccaaggcactagccatgtgaatgagctgtcatggacattctagtttaagtgggctaccagatgactgcagtaccagcagaacatccatgggacaaaagaaccat

SEQ ID NO: 471063 - DNA, 594 bp, Homo sapiens
acaattctttcctttctttcttgataaattaaagatgcttcatggggatttttaaatgtcagatcctataacaggcaaatgstgtattgcacacagttatttttttaaaggcaaaagtttgtagctttttcaaaaagagtttaaagtgtaaatactcttttttattcattgtattcccatagagatgcttctgttatgtcaaaattgtgaacatttgccctttgtggataaagttctcttgatgtttcctcaaggggtgaagagggtaacgagaagttatatgtctgtaggtgttttttaaaacaagctatattgaatgcatgtatccaaatggtactgcagcaccggagaagggaacactatggaaaaaaattttcctgtttgtaaataggaatctggcacccaccctcaccaaaggtgcattttaatctttcccacataactgcctctgttctccttggatatgaactaatttaccttacctaatacaaagaagcttatcaactataaagatagacccagaggatttggatttctttgctccttttccatcctactgttagacacttattgccagttttccagttaggagca

SEQ ID NO: 471064 - DNA, 594 bp, Homo sapiens
acaattctttcctttctttcttgataaattaaagatgcttcatggggatttttaaatgtcagatcctataacaggcaaatgctgtattgcacacagttatttttttaraggcaaaagtttgtagctttttcaaaaagagtttaaagtgtaaatactcttttttattcattgtattcccatagagatgcttctgttatgtcaaaattgtgaacatttgccctttgtggataaagttctcttgatgtttcctcaaggggtgaagagggtaacgagaagttatatgtctgtaggtgttttttaaaacaagctatattgaatgcatgtatccaaatggtactgcagcaccggagaagggaacactatggaaaaaaattttcctgtttgtaaataggaatctggcacccaccctcaccaaaggtgcattttaatctttcccacataactgcctctgttctccttggatatgaactaatttaccttacctaatacaaagaagcttatcaactataaagatagacccagaggatttggatttctttgctccttttccatcctactgttagacacttattgccagttttccagttaggagca

SEQ ID NO: 471065 - DNA, 594 bp, Homo sapiens
acaattctttcctttctttcttgataaattaaagatgcttcatggggatttttaaatgtcagatcctataacaggcaaatgctgtattgcacacagttatttttttaaaggcaaaagtttgtagctttttcaaaaagagtttaaagtgtaaatactsttttttattcattgtattcccatagagatgcttctgttatgtcaaaattgtgaacatttgccctttgtggataaagttctcttgatgtttcctcaaggggtgaagagggtaacgagaagttatatgtctgtaggtgttttttaaaacaagctatattgaatgcatgtatccaaatggtactgcagcaccggagaagggaacactatggaaaaaaattttcctgtttgtaaataggaatctggcacccaccctcaccaaaggtgcattttaatctttcccacataactgcctctgttctccttggatatgaactaatttaccttacctaatacaaagaagcttatcaactataaagatagacccagaggatttggatttctttgctccttttccatcctactgttagacacttattgccagttttccagttaggagca

SEQ ID NO: 471066 - DNA, 620 bp, Homo sapiens
ctgctttgactccaggtagcatggaaaagagatggaaatggacatcaaagcacttctggtgccatgcactgaatgttagcttttcttatttcccacaatcccctatgaagtgaagaaactattttcatctctattttataaatgagaaaactaatgccctgaaaataggagtgagtttctttaggtcatacagctagtgggttaaaattctatcctcagttgctctggctccatagtccctgctttttccgtggtatcatgctgcttccttaaagggctaagttagccttgttaggaggctctcccaaactgtctgataagttggcatagaactacacctgtttgattgtaaatcttccctaactggaaatcaaagcctcacctgtgacctgcttgaactgacctccctcaaagacgtggaacctaacattttggaggtcataccatagcagatcctgcttcagcctttcattgamctacaaaccttgagtatgacttcatctttcaaatgtgttttttagccttctcgctaaggggctgccagggattcagttgtgccaacaattaccagcatccaggcagcgaccctcctgtaatcactgcccactatgtccccagta

SEQ ID NO: 471067 - DNA, 497 bp, Homo sapiens
ctgcagttacaaaacccccttcttggttggtttatgttatgtttaaaagcacaaatctttagtaaaaagaagtccttttctgaccaattctgcaggccaactacaatgtattttattgaagtacttaaagttcttattacacacacacacacaaacagtttttcttcaatagcattgagtggcaagtgaataggatccatttaggataatatacttaactgggttaaagatcagcacatttagttgaaatagggatttgcatattgacattgggtgggaccaaggctaaatacttatagcaatgtgtacaaagaagaggggaggtacaggaaggaaatgagacaggaaagtgcccagagattatggctaaacttagttaagggctggaatgagatgagctgttcagacrtgccggagaggttgtgcttctaaatataggtgaaccctgaagcctgagttaaagcaaagtgatggattaaaccagagagaattcagta

SEQ ID NO: 471068 - DNA, 578 bp, Homo sapiens
gctgtcccccaaaagggattaaaacttgttcttaccttaaataatttaatcacctgaattatgtgctttattgcttatttgaaatatggcagtaaattagaaagtagatgctttaattgtagctttatgcctttgggataagaataattggaagtctgtgaatgtttggtttggggactggggagccaagggtagaagctatattggtatatctgtctctcactgaactttgaaatcccagtaatgtcttatatatggtgggaacacaagaaatatttgttggatgcatttacttggaagggaaatgttaattgttttgctgtagtacatcatcttgtagtcagcatttctgggttcgatttttgcatgaaaacatgtgtttatgtgtgcctagtccctaaataccatgaagatttacattgccttatgcaactggatattttccaaatgtagactgttctttgttagctctatatgaggtcagaaaagaaaaayaataataaaggaaacaaaattgcttttcttgtccaggactttttttatgaagacatggagtccttgacgcagatgcttagggc

SEQ ID NO: 471069 - DNA, 323 bp, Homo sapiens
gtacctgacacttgatgcatttctgttgaacaactgagtgaacaaatgaattctagtatcggggaagtcggttattggttctagattttgtaaacatggtgcatctcaccagcaaagaacrgaagagaattggggaaatacatagctattctttatcttttgctgagatacttcctccaaatttcttttcactgagtattggggccaattttctaatttcaaactctatttactacagcagagggcaggaggatggcaagttctagacatttaaatgagcaaataattaagcttttctgcaggcttgtagtttaagcacttga

SEQ ID NO: 471070 - DNA, 655 bp, Homo sapiens
tggtctatttctggactctattctgtctactgatctttcaccaatactgtattgtcctgattaccacagtaagacttgaagtgaagtagtgtaagctctctaacttctactttccaaagtctagattctttgtgttttcatataaattttagaatcagctattgatttctttttttaagcctgctgaaattttaattaggattgcatgaatctatagatcaatcttgaaagaatgaggatcttcacttaaggccaggagttcaagaccaacctgggcaacaactcaaaacctcatctctgcaaaaataaaacataaaaattaaaaacaggtctggcaaggtggctcacacctgtaatctcaacactttgggaggccaaggtgggaggactgtttgacaacaggagttcaggaccagcctaggcaacaatgtaaaaccctgtctttataaaaattttttttttaaattggctgggcatgcctgtaatcccagatacttaggaggctgaggcaggaggattgcttaarctggggaggttgaggctgcagtaagctgtgatcctgccactgtactccagcctggatgacagagccagactctggctcaaaaaaaaaaaaaaaaaaaaaaatgggggctgttttaacaatattaagtgt

SEQ ID NO: 471071 - DNA, 572 bp, Homo sapiens
tgaacaaagtttggcaggttacttataatatcccttctgactgagaagccctgacatcatttaactcttggatgaccttccttgtagcttcaatgaacagattgatgcccaatgtgataggcctcccattaattaaaagactgatgttcaaggagataaggacaagggttgtgcacatgttattccttgggaaaatggtgagaagagagggaaatggggagaattgagggcagaaattacagaagtaaagtaaataatacttgtgaagaatattggttatctcttggtttcaaaactttttagcttgctatgtgtgtttctgtaacatttcctagttggatgggtatcagttcacaaagtggaatgatatattgatagcattcagctctattgcccctttgggagtaagaagagggcagggaggtattgtattaaaaacayagaagaagagaattgggaagagaggaaaagtataggggaggcttggattggccttacagttccctctgtacatgccgtcctgtagcacactgaggagttcataggacactctcagtagtgaagttactctt

SEQ ID NO: 471072 - DNA, 542 bp, Homo sapiens
tccaaggaactgtttgacctaatcctgtattgcccaatatgatagccactagtcatatstatctatttgcatttaaattaattataattaaataacattaaaagtccaattcttcactaacaccatctacatttcaaatcctcaatagtcacatgtgactactgtattggataatacagaatatttcaatcattgcagaaagttttattgggcaatgcctctctaacttgttttatccactcctgagcacttgtcatcaccaagttttatttgttaactcatttattttattctcctctaaaatctataaaggtgagacacttagtactttcttttctcatttatgtattccaagtggttagaagagcacctgacactaattagaagctaatttgctgaattaagtttttaaaaagacttgtatgactagaggacagaagattgtagagtgatcatccctgttgtctagggtgttgtccatcagaatttttatttttgaaaattttttgagttagactattttgaatgttcaaatatacaag

SEQ ID NO: 471073 - DNA, 542 bp, Homo sapiens
tccaaggaactgtttgacctaatcctgtattgcccaatatgatagccactagtcatatctatctatttgcatttaaattaattataattaaataacattaaaagtccaattcttcactaacaccatctacatttcaaatcctcaatagtcacatgtgactactgtattggataatacagaatatttcaatcattgcagaaagttttattgggcaatgcctctctaacttgttttatccactcctgagcacttgtcatcaccaagttttatttgttwactcatttattttattctcctctaaaatctataaaggtgagacacttagtactttcttttctcatttatgtattccaagtggttagaagagcacctgacactaattagaagctaatttgctgaattaagtttttaaaaagacttgtatgactagaggacagaagattgtagagtgatcatccctgttgtctagggtgttgtccatcagaatttttatttttgaaaattttttgagttagactattttgaatgttcaaatatacaag

SEQ ID NO: 471074 - DNA, 542 bp, Homo sapiens
tccaaggaactgtttgacctaatcctgtattgcccaatatgatagccactagtcatatctatctatttgcatttaaattaattataattaaataacattaaaagtccaattcttcactaacaccatctacatttcaaatcctcaatagtcacatgtgactactgtattggataatacagaatatttcaatcattgcagaaagttttattgggcaatgcctctctaacttgttttatccactcctgagcacttgtcatcaccaagttttatttgttaactcatttattttattctcctctaaaatctataaaggtgagacacttagtactttcttttytcatttatgtattccaagtggttagaagagcacctgacactaattagaagctaatttgctgaattaagtttttaaaaagacttgtatgactagaggacagaagattgtagagtgatcatccctgttgtctagggtgttgtccatcagaatttttatttttgaaaattttttgagttagactattttgaatgttcaaatatacaag

SEQ ID NO: 471075 - DNA, 542 bp, Homo sapiens
tccaaggaactgtttgacctaatcctgtattgcccaatatgatagccactagtcatatctatctatttgcatttaaattaattataattaaataacattaaaagtccaattcttcactaacaccatctacatttcaaatcctcaatagtcacatgtgactactgtattggataatacagaatatttcaatcattgcagaaagttttattgggcaatgcctctctaacttgttttatccactcctgagcacttgtcatcaccaagttttatttgttaactcatttattttattctcctctaaaatctataaaggtgagacacttagtactttcttttctcatttatgtattccaagtggttagaagagcacctgacactaattagaagctaatttgctgaattaagtttttaaaaagacttgtatgactagaggacakaagattgtagagtgatcatccctgttgtctagggtgttgtccatcagaatttttatttttgaaaattttttgagttagactattttgaatgttcaaatatacaag

SEQ ID NO: 471076 - DNA, 616 bp, Homo sapiens
tatttctttttatctatgtctgtaaaatggtaaactccttgaaactatttccactgcagtctttgtacataaaacaataatttaacacttgctataattgctttaaaaatatgtgcacacacacgcgttggtcatttaattcttatttacccttaggtcaatcaagtaattggtataataactttaaaggtaaatcaaatcttattaacgctttctaagtactttaaaaatcttaagtcaatgagtatttgtgtgaagtactactactgggaagaaatgcagaaacattttaatatctggttcctgaaaaaggtttttcacttatttagagtctcaggaaactctgctggttttgattcttccaggaaataagactgtctgcagaaactgctagaggagtttaatatggtttggactgtgagttatcgatacattaatagctacagttcaaataataaactacccagaaactataacacgcaaggactatcttggatattaggatgcaagcctgyccggcctgcaggctgctcacagatttgctggggaaaaccatccacgtccccactgggaatgaacctgctgtgcagggaggtatgccctgcgctgaaatacc

SEQ ID NO: 471077 - DNA, 616 bp, Homo sapiens
tatttctttttatctatgtctgtaaaatggtaaactccttgaaactatttccactgcagtctttgtacataaaacaataatttaacacttgctataattgctttaaaaatatgtgcacacacacgcgttggtcatttaattcttatttacccttaggtcaatcaagtaattggtataataactttaaaggtaaatcaaatcttattaacgctttctaagtactttaaaaatcttaagtcaatgagtatttgtgtgaagtactactactgggaagaaatgcagaaacattttaatatctggttcctgaaaaaggtttttcacttatttagagtctcaggaaactctgctggttttgattcttccaggaaataagactgtctgcagaaactgctagaggagtttaatatggtttggactgtgagttatcgatacattaatagctacagttcaaataataaactacccagaaactataacacgcaaggactatcttggatattaggatgcaagcctgtycggcctgcaggctgctcacagatttgctggggaaaaccatccacgtccccactgggaatgaacctgctgtgcagggaggtatgccctgcgctgaaatacc

SEQ ID NO: 471078 - DNA, 547 bp, Homo sapiens
ctttcctgccaggccccacccacctcaccaaggccccacctccttccctgcccagtccctccccttctctgccaggccccgcccacctcaccaagcccccacctccttccctgcacagcgcctccctttctctgccaggtcttccccaccacaccaaagccctacctctttctctgcctagccctaccccaaccctgcttggccccacccctggcttgctctgtattagtctagctcttccccttccatgcctggcccaacctatctcaccaggcccctccccttcctggatccacccacctcacctggcttatccttttctgcccagccccactcctagctcagttggccccacccttgtcctactcctttcctgtatagccccgccccttcagtcccacccaaatcatgaggcccctcccctgtcatgccacacacccacctcacygggccccgcctccttccctgcctggtcccgccccttttctggacacacccacctcaccaggccacacctccctccctgcccagcactccctaccactca

SEQ ID NO: 471079 - DNA, 614 bp, Homo sapiens
acaagccaaggaacattaagatccaccagaaggtagaataggctaaggagattctccctaaaactcaggaggaagtatagtcccgctgacacccctatttsagacttttggcctctaaaactgtgaaacaatacgtttctgttgttttaagccactaaatttatggcaatttgtcttggcatcccttggaaacaaatacactcctatcgcagcttccttccccatcccacgtaaccccctcacatccatcatgctattgtattgaaagcacttagcacagtaggtggcacattttttttttcttaaatcaatgataacttagatataagctctaaaagcacaaggaccttttctatcgtgacttctcttcatcctcaatgcctagcacactgaaggggctcaaaatgtagctttcaagtcagcaaatgaattaaggatgtttcctttaagatggaatgtaagtttgactttcacccaacaaattctcccaatacgctatgagataattaaacatatttatatagatcatcaatagggctcttggggtttgttcacttatccattcaatagctatccaatagccttctataatcctggccctattcaaggtgcta

SEQ ID NO: 471080 - DNA, 614 bp, Homo sapiens
acaagccaaggaacattaagatccaccagaaggtagaataggctaaggagattctccctaaaactcaggaggaagtatagtcccgctgacacccctatttcagacttttggcctctaaaactgtgaaacaatacgtttctgytgttttaagccactaaatttatggcaatttgtcttggcatcccttggaaacaaatacactcctatcgcagcttccttccccatcccacgtaaccccctcacatccatcatgctattgtattgaaagcacttagcacagtaggtggcacattttttttttcttaaatcaatgataacttagatataagctctaaaagcacaaggaccttttctatcgtgacttctcttcatcctcaatgcctagcacactgaaggggctcaaaatgtagctttcaagtcagcaaatgaattaaggatgtttcctttaagatggaatgtaagtttgactttcacccaacaaattctcccaatacgctatgagataattaaacatatttatatagatcatcaatagggctcttggggtttgttcacttatccattcaatagctatccaatagccttctataatcctggccctattcaaggtgcta

SEQ ID NO: 471081 - DNA, 428 bp, Homo sapiens
caatcctgcccccaacaaaattcctttcagttcaagaactgattctcagcaacagcaaacttaaatgctacccaaatttgatgtcttgtttgggtttctttgttatacatgtttgattgtgtggctgaaggtgacgcagagaggcacaaacagcaaggaatgagagccaaagccaggcttgggcagaggcccagggagactgtgtgtctccttcaggagcaatcacacccacccccaggactctgagcatctctaaaatccacaggccttctgcaccctgcacgccctccagggctgttccacagagatcctctcccacaccccagggcccctgctagtgatgctggcctcatcaagtacatggaacaagccagatacagactctaatgagcacawgttgggcacagtaaagccaagagtcagaaact

SEQ ID NO: 471082 - DNA, 476 bp, Homo sapiens
ataaaatctgcacccaggtcaattgatctatgtaagaatacacgcagaaaatcaatcatctcccagccacctcagttcacagtgtggtataagctcacccatcctggtgttacaaatttccatcagatttcagacaacttcaggacaactaaaaaacagcaaacatttcttccagtgcccacttccatgagtaaacttcaggttttgagtaaacttcaggtttttcaaggcaaaatgtcatatttattacagtatctatgcatttcttaacaatgaccatgtgcaaaactatgctacccttttccttgggttcttattttttattatttattatcatatttattactttattttgaatttttaaaaggaaaagtctcactgtgttccctaagctggagtgcagtgataagatcttagctcactgcagcctcaagctcctgggctcaagggmtcctcccacttcaacctctcaagca

SEQ ID NO: 471083 - DNA, 614 bp, Homo sapiens
tttggaacacgaattatctatctgtggtaggtgttgtcgttgttgctattatcatccccatttgacagttgagaaaatggagttgcagaaaggttaagcagtttctcagtgtcacacagctagtaagtggcggtgccaacatagaagtccacttcctcaagtgttcatgcttttaaaaatggaaacaaaactctaacaaccgtcaaacagcaacgattgtcagaacctagaaaaggcctcttaaatttgcagtgttaaccaagcctgatgtggttccctagatcccctggctgccaccgctctgtgaagcaaaggaaaaactaattccttgctagcrtaacacttctattgagcattcctggacacaactcccccaggttctgaagagcctagggttgctatttgtttagttccccatggctgcttttcacattttctggatctttctcttgattctagcattataagtctacctcttccctgatcactcacttttctacctcctggagagcactgaccacgggatcacctcaccattttatttaacccattaggactcaatgccaggcaaaacctataccacagcctgcattgtattcaccatctcaggctcg

SEQ ID NO: 471084 - DNA, 526 bp, Homo sapiens
cctccttcctccctcatgggtcagcacagtgcttgaaggtatgacctccccaccccctcaggcacatttgccaagagacttctccggacgccagtgctgggaacccaggcacttgtcatggacatcagagtctgtttctgaaactgtggtgccgcctctgctgcccccgttgtcccccagcatctattggccatgcagggcaycaaaatcttgtgctgatgtggttgctcagagctctccaacactgaactcaatattccatctttatttcctggtgactggacatttccaaaggaaaattgtgccaaataatctggatgcctgcctttccccctgaataaagcattggagtattgaatagacgtaatctgtccacactgtaaagtgctcacagaaacaaaagatccttactggtttgtgaaatctcttgtaggaatcacagctatctggttctaagaatttcctgatgtactgaactagactggaccagaatcctacccagcaatgtttcccagcctgtaaacct

SEQ ID NO: 471085 - DNA, 636 bp, Homo sapiens
cccatgcacaggcaagtttaaaaacattatgctggaaagccttaggatagcaagagataagagtttaactgcagaatactgggaggtcctcactactgggcatcccagaactcttttctatgatgtgatttaagacacttctgccattaaaagtcattgagttgcacaacatgtgagtgcacgtaacgccattaactgtccacttaaaaagggtttcagatggtaaattttctgttacgtcttaccacaatttttaaaaattatgtgatgctaagaccagtcccccctctggctgccttcctgacaactatttactgctaacagagctaagcagatgcctgtattgagggggggctccttccttcccactagaacattcacctggtggccaagtggctcagcaccctggagaagaagctggaggagcacagtgagaacagccacccagagttcagggtcttcatgagtgcagagccagcaccctcccctgagggccacatcatcccccagggcatcctggagaactccattaagatcaccaatgagccccccacrggcatgcatgccaacctgcacaaggccctggacaacttcactcaggtacggccccgggagggaggcaaaaacagcagcaca

SEQ ID NO: 471086 - DNA, 599 bp, Homo sapiens
aggctcagcttccctccaaccagccacagttccatcatccttcactcgttctccagttcccctgtctggagcctccccttcaatgtctgtccatttctgtcttaggttctgggctggtgatgtgaatgacttctcattagactcagcctgagaacagtggcatttccaaagtctgcctttgggagacctcaggcgtcctagttacgtctgtggggcctccactcttgctcaaatcagaagcacatctgtatcaaattcagcacacagctcactggcagtgggagcagacagatggaattctgaaggtctgcttgagtttcctaagaaattcagattttaaaagacgggtcagtaaccactggcctctgggaccttcagtgacatatcctggtttcagacagccagcacttggaggctggatgagtactctggaaagtaaagaaagacactatatacaaccttcaaaggtcattgtgtccagtccsctttgttttatccatggccacaacagtcttggtaggaagtcacggtgtaacttctatcaggaggctgctcttgctcttcctggaagaactccagccagcactgagccagtccta

SEQ ID NO: 471087 - DNA, 539 bp, Homo sapiens
tgcagggaggaggctcagcttccctccaaccagccacagttccatcatccttcactcgttctccagttcccctgtctggagcctccccttcaatgtctgtccatttctgtcttaggttctgggctggtgatgtgaatgacttctcattagactcagcctgagaacagtggcatttccaaagtctgcctttgggagacctcaggcgtcctagttacgtctgtggggcctccactcttgctcaaatcagaagcacatctgtatcaaattcagcacacagctcactggcagtgggagcagacagatggaattctgaaggtctgcttgagtttcctaagaaattcagattttaaaagacgggtcagtaaccactggcctctgggaccttcagtgacatatcctggtttcagacagccagcacttggaggctggatgagtactctggaaagtaaagaaagacactatatacaaccttcaaaggtcattgtgtccagtccgctttgtkttatccatggccacaacagtcttggtaggaagtcacg

SEQ ID NO: 471088 - DNA, 514 bp, Homo sapiens
tgtccatcaccccagagtgggtatgacctggtttatctgtcttacccatcattgctttttatatttcctacctcgtctctacctaggacgaagtctttcatatttggagaaatcccaataatctggcaataagcatcttccgtcaaaggtatattgttcctggacactgttacagatatrctctgtcctgctcagaaccaatatctccaatgctcttctgatgcaagcgcgagactgagactgcaaaaggcctgtaatcccagctacttgggagggtgaggcaggagaatcacttgaaccagggagatacaggttgcagtgagctgagatcatgccactgcactccagtctgggtgactgagtgagactctgtctcaaaaaaaaaaaaaaaaaaaaaaaaaaaaaaaaaaaaaatatatatatatatatatatatatatatacacatacatacacacatacatccaagaatataagacaatataatgcataaattatgcatttatataaatatg

SEQ ID NO: 471089 - DNA, 514 bp, Homo sapiens
tgtccatcaccccagagtgggtatgacctggtttatctgtcttacccatcattgctttttatatttcctacctcgtctctacctaggacgaagtctttcatatttggagaaatcccaataatctggcaataagcatcttccgtcaaaggtatattgttcctggacactgttacagatatgctctgtcctgctcagaaccaatatctccaatgctcttctgatgcaagcgcgagactgagactgcaaaaggcctgtaatcccagctacttgggagggtgaggcaggagaatcacttgaaccagggagatacaggttgcagtgagctgagatcatgccactgcactccagtctgggtgactgagygagactctgtctcaaaaaaaaaaaaaaaaaaaaaaaaaaaaaaaaaaaaaatatatatatatatatatatatatatatacacatacatacacacatacatccaagaatataagacaatataatgcataaattatgcatttatataaatatg

SEQ ID NO: 471090 - DNA, 514 bp, Homo sapiens
tgtccatcaccccagagtgggtatgacctggtttatctgtcttacccatcattgctttttatatttcctacctcgtctctacctaggacgaagtctttcatatttggagaaatcccaataatctggcaataagcatcttccgtcaaaggtatattgttcctggacactgttacagatatgctctgtcctgctcagaaccaatatctccaatgctcttctgatgcaagcgcgagactgagactgcaaaaggcctgtaatcccagctacttgggagggtgaggcaggagaatcacttgaaccagggagatacaggttgcagtgagctgagatcatgccactgcactccagtctgggtgactgagtgagactctgtctcaaaaaaaaaaaaaaaaaaaaaaaaaaaaaaaaaaaawatatatatatatatatatatatatatatacacatacatacacacatacatccaagaatataagacaatataatgcataaattatgcatttatataaatatg

SEQ ID NO: 471091 - DNA, 570 bp, Homo sapiens
cttgcactggcagacaaagagtcttgttcttcatatttagacataaacacttgcatttcagactaggagacttgtagttagcagatagccatctgcttttgttaggtcctacctggttccccaaatccttgcctctcttctaccaattggtcaatctggctatcctggccacaggtattattaactctggtctttggatgaggacttaaaggagcatcagtcagcccttgtgaagttgacagaactcgcctttgtaggtggtcaggttctgaccctgggcactggtttgatggctcctttattcacccagcgaacattaactgagcacctattacatggcaggtcacatgcagtgttagagctataacagtgaacaaaaacatggatgttgtcaccatgasacgggctgcctcctccagcaaatgagaagctgatgtaaagcaactggtcacaaaattaattatataattatggcacaaggtgatgtaaaatgtcacaaaaagatgccttccctgctccaactggttgtttgcctgtccctacccccatcagtgcccaattatagaaggc

SEQ ID NO: 471092 - DNA, 575 bp, Homo sapiens
gactgggctttggtactgtgattagcatagctgggatttaccaagcgcttcctctagccaggtgcttcacctgcagctcacagcaaggggcctggataggttcactgacttgccacagacaatcactagggrtggcagagcaagaatttgaacccaggcactgtctccagagccccacactcaaatccaacttgaaaacatatttcacaaacttttcataagagcaaccagaaccattactttatacgtgtatctggaggaaagggttcctaagcagactgctacccacacataggctgccttctccttgtcattcattgattcattcacttgttccttcgtatctattaagtacctatggtgtggccagcaaagttaggtactataaaattataagacacattctgacttcttaagaagccttaggccttctagaggccttatgcctgcagtggtggctcatgcctgtgaccccagcactttggaaggataaggtggacggattacttgagtccaggagtttgggcaacatagcaagaccctgtctctacaaaacaataacaacaacaacgaaa

SEQ ID NO: 471093 - DNA, 575 bp, Homo sapiens
gactgggctttggtactgtgattagcatagctgggatttaccaagcgcttcctctagccaggtgcttcacctgcagctcacagcaaggggcctggataggttcactgacttgccacagacaatcactagggatggcagagcaagaatttgaacccaggcactgtctccagagccccacactcaaatccaacttgaaaacatatttcacaaacttttcataagagcaaccagaaccattactttatacgtgtatctggaggaaagggttcctaagcagactgctacccacacataggctgccttctccttgtcattcattgattcattcacttgttccttcrtatctattaagtacctatggtgtggccagcaaagttaggtactataaaattataagacacattctgacttcttaagaagccttaggccttctagaggccttatgcctgcagtggtggctcatgcctgtgaccccagcactttggaaggataaggtggacggattacttgagtccaggagtttgggcaacatagcaagaccctgtctctacaaaacaataacaacaacaacgaaa

SEQ ID NO: 471094 - DNA, 575 bp, Homo sapiens
gactgggctttggtactgtgattagcatagctgggatttaccaagcgcttcctctagccaggtgcttcacctgcagctcacagcaaggggcctggataggttcactgacttgccacagacaatcactagggatggcagagcaagaatttgaacccaggcactgtctccagagccccacactcaaatccaacttgaaaacatatttcacaaacttttcataagagcaaccagaaccattactttatacgtgtatctggaggaaagggttcctaagcagactgctacccacacataggctgccttctccttgtcattcattgattcattcacttgttccttcgtatctattaagtacctatggtgtggccagcaaagttaggtactataaaattataagacacattctgacttcttaagaagccttaggccttctrgaggccttatgcctgcagtggtggctcatgcctgtgaccccagcactttggaaggataaggtggacggattacttgagtccaggagtttgggcaacatagcaagaccctgtctctacaaaacaataacaacaacaacgaaa

SEQ ID NO: 471095 - DNA, 647 bp, Homo sapiens
atgtaatttagtaaagagtctggattgaatttagaattgtctaattctagaacataagctcttgtcactacactatgctgtcaaccaagaccacaytaggcaacattctgccaatgtagtttatcctggatgtctgcagcctcccttttcttggttgtcttcacttggctccttttgaatgctaaggccttccagcattttcttctccacccaccccctcagtaaagaatttgtcctaagtcttttgcacctgaaaaaggcttccatttactatcactttgtttctttatgaactaccagttgtgtccaaacattgtgtatggtgctgatggcaccaagaataagctgctgcctcattctcctcctgtggtagagacaagtcttggattgtccctcaagtctcaaaccccaaggggtagcattttcttccttttcataatgagaagccagagccaggaatattttttcccctttgtcattgtgtctttctacctgtgggaaaccacttgaaacttctgggtagagcatcaggaaatgacctcacagatgaactgcaactacggactaaaaacaatggcactcgaaaacaattcaggattagacctgaagatactgagtaagttcggtggaaaactgcagtggaggaa

SEQ ID NO: 471096 - DNA, 597 bp, Homo sapiens
tattagggagttatgatatgcaacttaccagggcagaaggtcaacaaatgccacttatgccaagatctgacagatagacagcattttagataatggaggtagaatgtgcaaaagtcctgcakgatgaggaaatgtggtgtagccaggggaaaaaggaagtaccagagctggagcttagagagtgaaagaggaacaaaaaatgaagccagggaagtaaatggaagacagatcacagaggacttcataaaccatcctgtatagtcaggataggctaggttatgccgtggcaataaacggcaccaaagtctcagtggcttaacaaagaaaatgttattcctcacctaaattccatgttcagtgcagagtgatgaggggctctgctcacatagtcactcaggaacccaaactaatagggctgggccatctggtagctgcatcatctggaacatgtgggcttcctagtttccacagtagggacgcatgaaaaagagtgagttgtatcaccaactaaatgcctcgtttcagaagtgacacttgtcactcccactcacagcccattagcctgaaccagtcacatagcctgatgtgatgtcaagt

SEQ ID NO: 471097 - DNA, 571 bp, Homo sapiens
tgtgtcaggtctttctacgtagctgctctgtttgctgtgggcctgggttgtggcattcattggttctgcttggctgtcttttctgtctgtgcaggtcagcacttatcaccccgcacctgtctctccaggacattccacagccgtggtcagtctgcctggctcccagcaacacctctcagcgaacatgtgagtaaaaggctcatcccttcacccaagtcctggcacaaaggggtcatctttaccatgtacagtggtgatctagcatcaccattcccaaaacatcccawccagagacaataggtcgccttcctttaccacttccaagtgaaataatggtgaaaaacagaaattagggccaggcgcagtggctcacacctgtaatcccagcacttcagtaagctgaggcaggaggattgcttgaacccaggagttccaaacctgcctgagcaacatagtgagacctcatctctacaaaaaaaatttaaaaattagccaggaatggttgtgcacatatattttcctagctacttaggaggctgaggcaggaggatgggttgagcccaggagtttg

SEQ ID NO: 471098 - DNA, 622 bp, Homo sapiens
aagatggagttgcctttaaatgagatagtgactgctccataaaacgagcatgttttggggtatggagggaagtaaaagcttagttcacagcagactaagcctgagatgtctcttaataatccaagtaaaggtgttggtaagcagttgaatacatgagtttagcatttaagagagagctccagccttgagatgctatttaaagccctgaaacgagatgagatcatcatggtgggatgagttgtatccagagaatgacaacragccagaagctgaaatcttcaaggagtgagaggagagacttggagagtaaatgctgactgcaggaaggtggagtggtgggtagtcaagtctgataatatgagtcaaagctgggaagtattgaggagtgtgggaaatggcctagaactgacagtgaggagcaaggaggatgcctaccctaattcatgaacggtttcttccatggctttaaaatgaattccccagggcccatccccacgactagggcatttgcttatacatcaggccttagtcctaaatcctggttataccatcaaagactcaatagaataagggtgaccatatgctttatcatccaaattaggacacttttgggcaggtatca

SEQ ID NO: 471099 - DNA, 465 bp, Homo sapiens
aagaaattctaacagaagggcctgcccaggactgtggtgctaaaaggagactgacacagactagtcttggaagtagaacacagtctaagctgagtcctgaaggaaaagagagagtcagatacacaaagtggtgggaaaaagggtatttcaagcaggaaaagatcttcagcatttgggtttaaacgtagcaatggacccaaattcacttaatacttagaggaatttattcctttgtggaacattccagagatcccaggtagaaccccagcccctcaagtctgaaggtgaaaattccatcctgtgagagcatcacccctcaamtaaggttcagacagtacctaggaagagtgcccctttgccctgtggtcagactctggcatcttggtgctatgaaaagtgctaagagtaggatttgattgggggaaaatgggagacatctgagaggggaaggcgggtcatgcccag

SEQ ID NO: 471100 - DNA, 654 bp, Homo sapiens
gtaatcccagctactcaggaggctgagacaggagaattgcttgaaggcaagatggcgccactgcactccagcctgggtgacagagccaagactctgtctcaaaaaataaacaaacaagaaaactcacctctagatctgctttatatggctggactggaatagcaaattcagacaaatgataaagtcatcaacagggaaatgtgtaaagaaagaagaacagtagagacagtaggggggaaatcatttattttcataccatttcagtaaaaacttaggaaaaagcaattgttccactgagaggtttgagaggagggtgttggggagtaaggaggaggagttatcttgctgtcaaaccagggtgtccttagtcattgggactgcacagatttcatagacttgggaggtcctcatcttgagttcccgggccacctggcagatggaaaaagcccaacagcagtgcaccgccagccagtcttcacacagygtgccctagggcaagaccagaatctgttctgttgtagtcacacaggctcatttttcttccccagggtcctgtacaatgttacctcctggcccttcaaccacagcttccaaggttcaccaacatccttaagccaatgcccagggacactaagttgcataagtgccaagcag

SEQ ID NO: 471101 - DNA, 610 bp, Homo sapiens
atcgcttgaacctgggaggtggaggttgcagtgagtcaagatctcgtcactgcactccagtctgggtgacagaacgagactccatttcataaataaataataaaggataaagtccagatcttgcacaacacaacaataatttcagaggtaagcaacactgtgatccctattttaaaaatgagagaatgaggcaaagtggttttggctaaaagctgggggccatgggcaaggaatgctatgaaggcttgttctcctgttctataagtgagtcaaggtgaagccacagacrgggatgaggctctgctcaaggttacatgagcaactgctggcaaagccacaggaactaaggcattctccctcctgtctccaagctttccccttcactcagtgccaccttttggctgcgggccagcattggagggcttgcaggccttgcccttctcagacgtcctagagacatgtaccccctgttcctcctacttcacatcagattccacacactgtcagatgtctttctggaaaccattaaggataggaattcagtctccaagacctcagccacacccacctgcacaggtccctcatcaccttcatgagacggagtgagaag

SEQ ID NO: 471102 - DNA, 540 bp, Homo sapiens
ggaccaaggtcccagtccacatgcatgcctgctgccaggaagggcaagagtgagaaggaaggtcagaggyactgagaagccatgtctggggcacacagaccccacaggaggatggagacccacacgctacttttaccttccagcaggtgttagatgtcacttccccttagggggcccttccatgactcctggatgagaagacagccaaagcacctgtgggaagactcactgcacctggaattatttctgtaatgtggggtaggggttgggacatgtctgtccgattgtttgctgtggtgcctggcacgtactagcacatagtctacccacagtaaatgtttgttaattgaattataaatgcaaaacatataaaagacacttttattttctcttattaccttgagagaaaaacctgggaagaacactccaaattaacagtgaaaaccatcctacttcttgtgccccgagttaagtagatgagtccattataaatgctttaaatgggtagagaagttctggactaaattggggctcctacag

SEQ ID NO: 471103 - DNA, 604 bp, Homo sapiens
gacaaatagcatacgtaagacagatatggtctctgtcttcgtgacacttgtctctaccacatttggcaatgtctgggttaatgtcttgttaatggtggaaagacgtagggtgatgcaacaaagagtaaggagagtgtgtggagaggagagaggtggcctggccctttagacagagtgttcaacaaagagttctctgaggtggtggcataagaattgagtgttaaagaatgagattggagggtggggaatctctgagaaagagtgaacaggatggaaagggcatgcctgagaaaccagagaaggcaaggtggttgcagcagagcaaagaaagaggagaggggcaccaggtactgccagaaagttaggtgggcacctgatcatccagtaaaccctgtctggattggattataagagaggaggtctttcaaggtgctgagctgggaggggatgtgatttgatttagagtgtacaaagacrggggatttccttactgtccagggacatttccccaccagggggagcacctggaacgcacccgctgggtcctttctgctggccagttttcattactaaatccaggctccaggcaacgaagccagggctg

SEQ ID NO: 471104 - DNA, 538 bp, Homo sapiens
cagctgctgccttccacctccaggtcctggagtcctctccccaaccacaagtgggtgtgctgtgcctgttttctctgcctaaggctgtgtcttcggtttcccatgcaggggtgtgtgtgcatgcatgyatgtgtgtgtgtgtgtgtgtgtgtgtgtgtttgtgtgtgtgaatgaatgtgcgtgtgtatagaggttgtcccagactcctcccctctccacccaccacttattctctgggctggctctctggctttctggaatggatgagtttctttccctgccagatagggatggcccaaggtggcctcatttgacttctctggacagggcttcgggcccatccctcattccatgactttctctcctggctttgaaaagagttctgagcataatattccaggcatctcttctaagagcataacactgaattatgctttcaagcacagaggtattttcctctctttttttccagacatgagttctggggcactcgtggctattgctaattcttaatgccctggcaccatagaaacaagtt

SEQ ID NO: 471105 - DNA, 619 bp, Homo sapiens
ggccagagctccagctgctgccttccacctccaggtcctggagtcctctccccaaccacaagtgggtgtgctgtgcctgttttctctgcctaaggctgtgtcttcggtttcccatgcaggggtgtgtgtgcatgcatgcrtgtgtgtgtgtgtgtgtgtgtgtgtgtgtttgtgtgtgtgaatgaatgtgcgtgtgtatagaggttgtcccagactcctcccctctccacccaccacttattctctgggctggctctctggctttctggaatggatgagtttctttccctgccagatagggatggcccaaggtggcctcatttgacttctctggacagggcttcgggcccatccctcattccatgactttctctcctggctttgaaaagagttctgagcataatattccaggcatctcttctaagagcataacactgaattatgctttcaagcacagaggtattttcctctctttttttccagacatgagttctggggcactcgtggctattgctaattcttaatgccctggcaccatagaaacaagttatgttctaggctgtgcaagcagagacctggcctgcaggggcttctctggagggtagggggttttgagccc

SEQ ID NO: 471106 - DNA, 643 bp, Homo sapiens
ccttccttttccttgtcattaaactggtgtttttgctgtccttactgttcccacctcccacctggccatcacattgccatcagcacacctttgcttttatagtaatcactaaaggagatgtcccttcctgtaaccagtgctacctttccttcccaggccaccttacatatctcctcctccttcatgacctggctgatcctcaaggatcttttattgatgcttgacattctggaaggtgcataaaaaggaaaagagatacacaatgctgaaatggagagaggtgaggggttttacaaccattttacagataagaaaatggaggttcagaaaagtgaagtcatttcctgagtttatacacatagcgatgaaactagaattcaaatccaagtgaacctaactctcaagctcttgctctaaccatgacacaatactgcctgctttcttgastcactctttttgagatgcagaaccattctaaacttttgcactctaacaaaaatggtacttatgaatcctgtgatcaatgtcagggaaccataatactctgtaaaccaagctgagaaaacaataggttactaagtaagagaatgaataaataaatgtgtcaatgtgcacaactgcaatttctagcctgaatttgtat

SEQ ID NO: 471107 - DNA, 494 bp, Homo sapiens
attttgcctgggtgcctcacttaagattttctcataggaggcccacccagggcaaatctatctcaggccttcctgaagggccatgtgacaaactcaagggggtaggaggcacagaagcctgtgacagacaggaccccagcatctgaaaccaggtgcgaggagattcttgaatgacctgctaaagtcaaacaagtcatccccgtgcctacctccctacatgcatatcttcctatgctcctsgtgagaaactggtgagcaatggatggctgaagaccaagagagaggagcagagagtagaagccagccacacactgaagagcggtccctccacagaggggtcagtggcctctgcaggtgcagccagggagatttctggagctcggctggctatctgctttaggaacactcttagtgcagttacaaagttatatcatcaatgtgcagagcaagggaaggctcacagagcaagtgtcagaactcaaaaagcctcttgg

SEQ ID NO: 471108 - DNA, 622 bp, Homo sapiens
ggaaggctcacagagcaagtgtcagaactcaaaaagcctcttgggatggtctggttcatggtacaactcagtgaagccctgggtttggggggtgggatggtgtgagtasagactgatctcttcagtcacataactagttgcctacaacctccttaagagaaggaagatctaatagcctctctcagatgccaaatcagatgctctattcccttgtaaatctggaagttcttactcatgtctaactatgatctcacttgatttccctgaagaccctcttctcttttctctttttctttggacgaattacactcagagattcgggctgcaacttgaaggttgtgtgtgtataattccatcctgggggtgagatatgtcctggagccctgccctggggaaatttagccagcctttgatttgcaggacacttaccaagctgacttccagcttgtcaccttggagagactttagccgcaccagggccccgatgcctccgctaaccaggatttcatcaccaatgtggtatttcaggatgttggcaagttccttggcatctcctgcaggttgcgggaaaaggagatagagttaatcccaagaatggtaattagcctggtcaaggagggcc

SEQ ID NO: 471109 - DNA, 622 bp, Homo sapiens
ggaaggctcacagagcaagtgtcagaactcaaaaagcctcttgggatggtctggttcatggtacaactcagtgaagccctgggtttggggggtgggatggtgtgagtacagactgatctcttcagtcacrtaactagttgcctacaacctccttaagagaaggaagatctaatagcctctctcagatgccaaatcagatgctctattcccttgtaaatctggaagttcttactcatgtctaactatgatctcacttgatttccctgaagaccctcttctcttttctctttttctttggacgaattacactcagagattcgggctgcaacttgaaggttgtgtgtgtataattccatcctgggggtgagatatgtcctggagccctgccctggggaaatttagccagcctttgatttgcaggacacttaccaagctgacttccagcttgtcaccttggagagactttagccgcaccagggccccgatgcctccgctaaccaggatttcatcaccaatgtggtatttcaggatgttggcaagttccttggcatctcctgcaggttgcgggaaaaggagatagagttaatcccaagaatggtaattagcctggtcaaggagggcc

SEQ ID NO: 471110 - DNA, 539 bp, Homo sapiens
tggcttcagatccataaggaagtcagaggtcttgacaacttgcctcatgcaggcagctttgtctcactgatcatctaaaaataaaagtagagacaatcactgcttctgcttctccccctcccctgcagtgttgggagcctgggtgctcactcagcagatccaggcaaggctgctggaaggatgttctccctggccagggacaaacaagtgattgcattcagatgggccccagccaccagcagggcccagcaggtagaagatgttctaggctgggcagagggtgctgtcgttttttcgcaaggccaggaaatggccttctagactggcaattgaagggctcatggagtgatggctattttttccttcacaagagargtctggttaaaacaggaaacgccattcgcagtggacagacatcagggcaccatgctttctccgtttccttcacaatccaactgggctcaccaaggccagaatgggggctgacacttggacactgtccatctatgaaggaatattttgtcacctttcaagggcag

SEQ ID NO: 471111 - DNA, 592 bp, Homo sapiens
gcaaagtaaaaccgcattaaatttggctcgcttgcttgcttgctttttctttcttcttyctttctttctaacagcttgattgagacatgatttacatatcataatattcatccattttaagtgtgcaattccatgttttttaatttttttacagagttgtgtattggctatttcttcttggaaatagggccactggggaaactcttgaccccaaggcccctctccccactttgaacacgaaccagtaaatagcagagcaaattctggttcacccccaaaatagtttttattcatttcattgtgccattaacagcttacttcctgtgttttgattctgagctgttcagaagccacgttcttagaagccacattgcttagtttttacaccatcaagagatttcttttgtgttagaggtgttttttgtttgttagtggtttatttagagtctccagctccttgttttatctgctgggctaattagatttgaaatgaacctttgtagcatgacagactgtacagaaatatttggtattcagagctaagcttaaacattcatagcattcttacttttgaaactagcagaaaggaaga

SEQ ID NO: 471112 - DNA, 517 bp, Homo sapiens
ttgcaattccctctggtattccaaggccagtgaaatcacagcctccagtaagggtgctaaacccgaatatattcactgctaagctgtatttttaacccttttcacccaccaatttcaatgttctctttaataggttagctatggcagacctcatcagaatcaagttatgggaaggcaagctggaaaacctcacaggggggatttcatgaagagaaaagcctgggtgtttttcatctgaattcttgtcctcatctcccttaccacccccaacaaatacaagcagcgggaaactaacagtgataatcagtaatctaataaactcagccagcctcaagttctgttgttgttttccttaaaacaaacaaaacgaaacaaaaataagcattctgcccagaattgagagagagagagagagagagaraaaagctctctcctaaaatcccacaagtttgctgccagtgattcagtacatacctgaccaaaaaaaaaaaaaaaaaaatgttgcttaactggtttg

SEQ ID NO: 471113 - DNA, 618 bp, Homo sapiens
tattcaaaatgctgggaccagaagtgttttggatttcagatttttttcagtttctgggatatttgcatatacataatgagatatcttggggatgagacctaagtctaaacatgaaattcattcatgtttcatatacactttatacacatagcctgacattaacttcatataatattttaaataattttgcacatgaaacaaagttgtgtatattgaactatcagaatgcagagtgtcaggtatgaaattttccacttgtggcatcatgtcagcaatgaaaaagtttcctattttggaacattttgtattttgtattttcagattgggatgctcaacccatatataaataaatatatgtaaacacacacacatacacacacacacatatatgattattgttaatagaacattagactggaagggaatgaccatagcacattaatcccctcattttccaaatgaagaaatttagggccacagaaatgaaatgactagcccacagggacacagccagttaattgaatttcaaaatcaatctgcagagatatatatatakagagagagagatatatagatatagatatatagggtgtgtgtgtgcctcctgagttccatgaa

SEQ ID NO: 471114 - DNA, 583 bp, Homo sapiens
taatgcgtgtggctccaggcccgcttgcagctggaatgtcggctgggcacttatctgcagtcccctccctcccctacctcctcagagtggactccttcaccgcggctccagcaggtcacttctgtcattgccattccctgtgtgcagaatcaaaccaagtgcggcagttcctgtgacaacaagctggctagaccaggggccagaaagcaaccctctcattctgcctttcctgaatcttagctaggaagcatttttaatggtttttgctaacagcagttaggctgaattaaaaaaaaattaagataaggtaattaggcaggtgagaggaaaaggcctaactctgaggctgagaggaaaatggacacaagtaaaatcccattataatgattacctttatagacagagggctttgtaaaatgaagttatttcctgtgcacagaagcagctgggccgcagagtcctgactaccctgacagaacaaccacaaagagcactctctgggctgggcccaygctttgcggcacagcactctctgtagcaagcactggactgaaagccgttggcactgtgacggggagaaaag

SEQ ID NO: 471115 - DNA, 609 bp, Homo sapiens
ctttgactactatggctctggttttctttcacagatcccatctctctttagtttctttcctacgagaacaatcattttctcctctggggacgcacagggtctcactccttaaccaagaccaacatcatgggtattattctcatcacctggtttcttggagctgcgggctcttcctggggagcagggagcatgcgcagctttgctggtctcgaaacccctagcaaccaccgccaagcactcaggaaaaagaaaaacccttctcagttttacaactgagatttgtcagttagcacgtcttaacctacgacattaaaaaaaaaaaaaaaaaaaaaaaargataaaaggtcctcttttatgaaaggatgcccatcagttatcagggactctgctctgtaccctcaccgtgctgaatggggttgcccaagccgctccttggcctcagctgcttggagctggatccttagctcctgctctgttccttggggaaggaagtgcgataataagggaaatgagggacccaagaaccggtgggatggaagctgagggcttatttcagtctccgcattccgtggaccagttgctcaatctttccattccaggaaagatttc

SEQ ID NO: 471116 - DNA, 270 bp, Homo sapiens
gagatttcactgtccatgagtcctgccactagtctgccttctcacacttaccaaacccaggcagatgtgccatgggcactggaaggaaaacatccctcgggtcccgcccagttgttccggctttawcacagtgactgctgacaaagcctttacttcacaaagcaacaaagcacacagcagccaaaaaatccagtgaaatcaggtaagtaaactgatacaaacatgccacgaggaaattcccaagacacaactctagaagcctccaaaaat

SEQ ID NO: 471117 - DNA, 522 bp, Homo sapiens
tgcccaacagccagtgcattttgtcttttgacattgggggctgtgaggctgtcattaattatgtgcgtctcgaagtgccttcatgttggagcaggttcagagaccagatggcaccatcagcacaacccagggcctggaaggagccccttcctgccccgtctctttcctctacccctctgagagctcagccaggacacccgctcacctctcccaaggcccagctartgtatgatttttgaagacgataaccatattttttcatataaccatttcccttccattgacattcgcgagcatgtaccaaaacacctagaggacactaaataaacactccatgcgcgctcacacacacacacacacacacacacttgcacagaaatggtagtgacctgctccctttcaaacactagttattgaaattgtactccgggcctagactttttcttctgctgattcactttcttgtaaaggtttcatcaagaagaaagtaaatgccttagctttttaatttaatttcatatt

SEQ ID NO: 471118 - DNA, 541 bp, Homo sapiens
gccagtgcattttgtcttttgacattgggggctgtgaggctgtcattaattatgtgcgtctcgaagtgccttcatgttggagcaggttcagagaccagatggcaccatcagcacaacccagggcctggaaggagccccttcctgccccgtctctttcctctacccctctgagagctcagccaggacacccgctcacctctcccaaggcccagctaatgtatgatttttgaagacgataaccatattttttcatataaccatttcccttccattgacattcgcgagcatgtaccaaaacacctagaggacactaaataaacactccatgcgcgctcacacacacacacacacacacacacttgcacagaaatggtagtgacctgctccctttcaaacactagttattgaaattgtactcygggcctagactttttcttctgctgattcactttcttgtaaaggtttcatcaagaagaaagtaaatgccttagctttttaatttaatttcatattctgcaataaacaacttcctttctttcta

SEQ ID NO: 471119 - DNA, 528 bp, Homo sapiens
caatgatggtttggctgctaagtgtaagctagctagatgtaggctaaaacttttgggcaaatacatactggattttcaagacatcacttaaagaccagtgacatctctgatcagtttctaaaaatgaagtatcttttcatcttttcatacaatgttccttatactatcaggcaagtgatcccatacaacatacaaaagtgtcctttgtaactatcccatcccaaccattttgacaatatgtatatcttcccacatattccttgatggaagtataactgaaatcacaattcttttatggtagaagcattctggtttaaaaaactgaggttaaattaaacatatcattatgtgatattgctataygtttaaccaactgcccctgtattactatatggctactcaattgccactatattgctatctggttacccaactgttataaatcaacagagaggcacggggagagcattctgtagagcagtgacagtgctggtaacccttctgtcaagacctggctaaaacaaggga

SEQ ID NO: 471120 - DNA, 618 bp, Homo sapiens
accttatctcaaaaaaacaaaaacaaaaacaaaaacaaaaaacaaaacacaagactttaaatattagcagggcatggcagcatacttgtagtctcacctactcaagaggctgaggtgggaggatcaayggagccctggaagtcaaggctacagcaaacagtgattgcaccactgcactctagcttgagaaacagaactctaagacactgtctcaaaaaaaaaaaaaaaattcaaattgaaacaaaaattaggattttgacaaaaattttttctattttctactttatctggattccataacacatcaaggtctactttacattattagaaaaaaaaatagtttccaaatgaatagcactcagttaaacaaaggttgagtgaggtctttcttattcattccactgtctattcatttttgaataggtgttctatggcagtgtttacaaagacaaaatgccttaagaagcaaagtgcttccccactcttgggactccaaatgtgttctgatgaatcagaccagaatcaaacggcgcttccctcaatagcagatttgagtctggacattttctaactgtccctaattcccaacttgatactacaattcttcatcaagttcat

SEQ ID NO: 471121 - DNA, 618 bp, Homo sapiens
accttatctcaaaaaaacaaaaacaaaaacaaaaacaaaaaacaaaacacaagactttaaatattagcagggcatggcagcatacttgtagtctcacctactcaagaggctgaggtgggaggatcaacggagccctggaagtcaaggctacagcaaacagtgattgcaccactgcactctagcttgagaaacagaactctaagacmctgtctcaaaaaaaaaaaaaaaattcaaattgaaacaaaaattaggattttgacaaaaattttttctattttctactttatctggattccataacacatcaaggtctactttacattattagaaaaaaaaatagtttccaaatgaatagcactcagttaaacaaaggttgagtgaggtctttcttattcattccactgtctattcatttttgaataggtgttctatggcagtgtttacaaagacaaaatgccttaagaagcaaagtgcttccccactcttgggactccaaatgtgttctgatgaatcagaccagaatcaaacggcgcttccctcaatagcagatttgagtctggacattttctaactgtccctaattcccaacttgatactacaattcttcatcaagttcat

SEQ ID NO: 471122 - DNA, 618 bp, Homo sapiens
accttatctcaaaaaaacaaaaacaaaaacaaaaacaaaaaacaaaacacaagactttaaatattagcagggcatggcagcatacttgtagtctcacctactcaagaggctgaggtgggaggatcaacggagccctggaagtcaaggctacagcaaacagtgattgcaccactgcactctagcttgagaaacagaactctaagacactgtctcaaaaaaaaaaaaaaaattcaarttgaaacaaaaattaggattttgacaaaaattttttctattttctactttatctggattccataacacatcaaggtctactttacattattagaaaaaaaaatagtttccaaatgaatagcactcagttaaacaaaggttgagtgaggtctttcttattcattccactgtctattcatttttgaataggtgttctatggcagtgtttacaaagacaaaatgccttaagaagcaaagtgcttccccactcttgggactccaaatgtgttctgatgaatcagaccagaatcaaacggcgcttccctcaatagcagatttgagtctggacattttctaactgtccctaattcccaacttgatactacaattcttcatcaagttcat

SEQ ID NO: 471123 - DNA, 618 bp, Homo sapiens
accttatctcaaaaaaacaaaaacaaaaacaaaaacaaaaaacaaaacacaagactttaaatattagcagggcatggcagcatacttgtagtctcacctactcaagaggctgaggtgggaggatcaacggagccctggaagtcaaggctacagcaaacagtgattgcaccactgcactctagcttgagaaacagaactctaagacactgtctcaaaaaaaaaaaaaaaattcaaattgaaacaaaaattaggattttgacaaaaattttttctattttctactttatctggattccataacacatcaaggtctactttacattattagaaaaaaaaatagtttccaaatgaatagcactcagttaaacaaaggttgagtgaggtctttcttattcattccactgtctattcatttttgaataggtgttctatggcagtgtttacaaagacaaaatgccttaagaagcaaagtgcttccccactcttgggactccaaatgtgttctgatgaatcagaccagaatcaaacggcgcttccctcaatagcagatttgagtctggacattttctaactgyccctaattcccaacttgatactacaattcttcatcaagttcat

SEQ ID NO: 471124 - DNA, 552 bp, Homo sapiens
aaaattaatcctgttaaaccatacaatttgatgaggcaggcagatcgcttgagcctagcagtttcagactagtctaggcaacaaggtgagaccccgtctctacaaaaaaatacaaaacttagttgggcatggtggcacgcacctggagtcccagccactcgcgaggctgatgcaggaggatcagggccacaggtgtgcaccctacactcagctaatttttaacttttttagagatagggtctcactatgttgcccagactggtctcgaactcctggccacaaggggtcctcccaccttagcctsccaaacaaagtgctgggattataggcatgagccactgtaccctgccaagagtcattactttgtgtgctccctttagatcggcagtcctcaacctttttggcaccagggaccggtttcgtggaagataatttttccacagaccagcggggtggggatggtttgaggatgaaatggttccacctcagatcatcaggcattagattatcataaagggtgcgcagcctagacccctcacatgtgcagttcac

SEQ ID NO: 471125 - DNA, 576 bp, Homo sapiens
gaaacaagtcaggggagataaattaaatccacttgtgttcctagcagaaattttactgataatcagaatagtaataagtattgaaataaagcaaaaacaagtggatgggccaggtgcagtggctcattcctgtaatcctagcactttgggaggccaaggcgggcagatcacttgaggccaggagtttgagaccagcttggccaatgtggcaaaaccccgtctttactaaaaatgcaaaaattagcygggtgtggtggcccacgtctgtagtcccagcaatgtcccgggagactaaggcaagaggattgcttgaacccaggaggcggacgtggcagtgaaccaagatggcatcactacactccagctagggtgacagagcaagactctgtctcaaaaaaaaaaaaagtggatgttgccaaaaggggagcggggggagcaagaagtctgtgtcaaaatatatcctatttttgataaatctccaaacaagtatgcaaatactcctgtcagtaggctcaatcaacggtctatcttgacaccccgaagctaatgcagagaaaaaatgcccaagaatgactg

SEQ ID NO: 471126 - DNA, 523 bp, Homo sapiens
gagtgcactgaggcctggccgtgctgcagtggcctctcaagtcacatgcayggtgtgagttgaaacctcatttacaaacgcaggtgtggacgaaagtttgccaagaacatttttaaaatagtgcattaaatattatttatcttgactactgacttttttgacattcccttaaattttgcatgctagtaccagccccattaattctaacactcttgggaagctgtaaagggttttaagcaagaggatcacattattagttttcccttttaaaatatactgagaaattcgcttggaataatattgacaagatagcttttaaaatacaggagtaatgaagaccttccatgcaaaatgagcaaaggagagcaaaccattgagaaaagaaacatattgctagtgatgaaagggaactctatttctacctgatacccagtagtggtttgacaaatttactagatgggacagcctacatctctaatcgtaagaaatcacaggggttttgaaaggcctcatgtaggattga

SEQ ID NO: 471127 - DNA, 659 bp, Homo sapiens
atgcaatcagatcctacaactgctcccactgactcatttaagctgggacacatgtattcggcatcrgcatctgtttaaatagcacttattgccatagtagctaggcacttggacaagcctgctatttttgcaagaaaatgaaaaaaaaaatgtagatgaagtaaatagaggtcggtactaaggcctgtagtaatcatcttccttggcaggcagagcaggagggttagaatcaggtcaaattgtccccagtaaaaggcgtcagtcatctggaatgtttttattatcccagacagaaataggtcacctcagcacactcaaagttggccaattagaccgaagttcttgtgcagtaagaaataaaggaagtagatgcttagcagaagacctctcccctcccaaaggaggcaaaacaaaattcctggagaagataaacacatcaaagcctcagatgctaaaagttacctccctcaagggcaatttgcaggctcctgttaaggtgcttggtggtgtactatacagaacttacgcaaactcggctgtattccatctgcgttaatgcccagcaaaatacacttagaaataacataggtcaggatagcagacagattttgtctacattgagaaggattcatggactcagtttagtgagagagaaatgg

SEQ ID NO: 471128 - DNA, 510 bp, Homo sapiens
taggaatcccagcatgccccatcccacctggggcaggcactcatatgcagattaggcatgcatttcagccacaaaaaggggcaaaggagattaacttgcacaatacagaaaaagacctttgctcacaatttttggaataatctgttccaatgcgggggctcactggtctattttcacctttcaaagcagcttcttacttttccagagaaaatcttgggccagatttctgtttyatgattttctggttatttttatgattgagatattcttagttttcgccaggtcagaaatatgtgctggatcccacatgacaaaacgtcgtgcataaatgtctagaaaccgtcagtaaggatatttacaaacccaaggcggggactttccccaagatcagataacatcagttctttctggatctatgagggcactgccacaagtgcaggactattctaagtctgaaagtttgaactatttatagaaattaggaagacctttcccctttaaaaagttatg

SEQ ID NO: 471129 - DNA, 591 bp, Homo sapiens
ctcagcaaactcaaggagcaaaatcccatttccccctttctgtagagaccccctaaagcacatagggaagtatgccccatgtcatctcccccaatgaggggtgggaggagggaagatgtatcactttcttgggttccacaaatgtagttctccaaaactcaggcttttcccctctccctcaaaaactgcttcaaagcaatgcacttacatcactgttatgaaaccccaaaacaaattttgccttacttcaactaaggggtggactggaaaaatcacagggactcagggccacctatgagatttgccacttggaatttattgtctttgttttcaatggagaactccctccagaggattccatgtccttycaataagctctgagatggagagaagcctggtggtgaacttggggagcaaggtaggggatctcttggtgatagttcacagcatcaagagacaggctcattctcccaagccacatgggctgagagtgggggaccagcactgcccataatctaggtcagtttcctcaatcccttcccctctcttcctccctttctctctccctccccactaggccgtgctgctgta

SEQ ID NO: 471130 - DNA, 537 bp, Homo sapiens
actgagaataaagtttctctgaaatgatcaaatagtttaaagaaaaaacagaatatgatctccaaatgcaacctctgttgatgactgtcttacttgcccacttgagagataaataaaaatgtaaaagcaatgcacaaaaacatttacaccctcttgcatatgagataggatagaaacaagtggggggatgctggataactgaaaaaatagcaytgagcatgtagatgctcggaaaaacaggctctacactggtacaacctcaaaaggttatacaacttaggttaatagagatttcctctgaaaatctgactattttcaacaataatggtatgtgtgaaattattataaaggtgctagtttccagtttaaagaaatgctcaattggccaggcatggtggctcatgtctgtaatcccaacattttgggaggtcaaggcaagagaattgcttgaggccaggagttcaagaccagcctgagcaacagagctagaccctgtctctacccacccctacaaaaaatcagctaggtatggtggca

SEQ ID NO: 471131 - DNA, 610 bp, Homo sapiens
ccaaaataattatggaaaataaagactacttttacttttgatatcaacttaaaatggtatttatgatgatsatcttctattttctaggtacgtattattatacagaagttattgaagtgtctaacaggctctttatgaaaacatactcagaatattcacatgtggtcttcacacatttgtaagtttcagcaaagatgaaatatgtcaaattttaaatttgattgtattttctattgtagttgaagtgttgagagtaactgagctgccagtgataacgtacagagaaagaaaagcccagggcctgggcctgggcatgagtatagactgtatttaagcaactgtagctaagaataaagttcataaaggaagtagaagagagtattcagagaggaaggaggaaatacaaaacagggctgcacagttctggaagctaagagaagggagactttctacagctagggcttggttgacgtaggacagaggaaatttgaaatggccaggacccaggatccacacatagtcacatgatgaatcaccgaaggtttgaaggaaaattaatgtcatttagcatggaggcctggtgacaggggctggcagtagggatcaggga

SEQ ID NO: 471132 - DNA, 580 bp, Homo sapiens
gtggggtctggtgtttcttcctaactgtagggactgttctctttccagggtgcctcactgcttttatcctcaagtgatttactttaaatcatttaaagcagatcaactttgtatccaagtggctgattttaaaaatgacccatcacttatcgtatctgctgcagctcccccaacccctcctcaagcccaggtagcatcagtggactcctctttggttggctttctccactactccacacctccctccacctattgggaaggtggccttccttgaaggtatcatgtcatcgaagtactgcttccattaagtcataagtctacttagagttgcctttgttcagaacaaaatagtcaatttttgtgcacartataaaacgagagaaggcctcgaccaaaactatctccatagaaatttcatcaatagaaatttgctcctttggctttacaagccacttaaagctgtttaatttgcctgaaagggttaacacttgttgccactatttagcttaaactgaacctttttttcaatagttttccttctaccagtaagctgaaatcagctttcttgagtaaatgtaag

SEQ ID NO: 471133 - DNA, 674 bp, Homo sapiens
tcatttcaaagagagatgttattctgccagttaccagttagttcctacccaacttttaaaacccacttaggtcttcttaaactgttcaaatgtaaatagtagagcattaggatcaggaaaagtatagaaatatatccaagcagaggagtttgctcgttttcagaagaataaaatatgattatcattgttgtacatatatatcttgttggacacactttttttaatacctatttcatacatcagaggaaatgatatttgatttgcaaaaaaacacacccatatgtcaatgaaaatgaaaattcagagtcacaaatttggtcaaagagatacagtagtcagtgcttttaaagattttaaaagtggtcttcaagcaaaatctgacacaaaaactaaaaatgtggagctgctttgatggtgatcatggttgcggggtggcagggggattgagagaagacctaattgccacctccagtaatggcagctaagtcaycccttcagagagctgaatcctcttcagattgtcacttgaaaactgtattaatccaaccttttcatttaacagaaaaggaatctgaggcatagggtttaagtgacatcaccagaaattcccaggtaatttgtggcagagacttcttaaatcctacattcctcattaacagactaggagttcttgc

SEQ ID NO: 471134 - DNA, 496 bp, Homo sapiens
tttacggataaatgttaactgtagagttctttatggatcaatattgggatgactcagttatcaatttctttaacaacatatgcaatgggagcccattgtgggggcaagtgagagataagacaataaatcagatagcatgtgctgtgtgagtaggcacaaaagaagatgggatatgagcatttctaagttaaacctgctgaagagcacaactgctcacaacttaataatttaggaatggaaccatcagaaagtgaagaggcacgtaaaaggaacagaagcacaggcatcagtacagtactgtttgacaaaacatatcacaattaattgtcatgatgtttgaaaagcctactattattaattctgaaaattaataatgtacatwttaaactatctgagggttgtaaaaaggtataccatgaaaataaattctcttgctaccccaatcctgtattcccgtttactttctcaaagataaccatggttacagttttttttt

SEQ ID NO: 471135 - DNA, 610 bp, Homo sapiens
ccctcagagtcaccaaccccaatgccaggctgcgcagcaaagaaaatgaatacacagctcatgtgcatattttatttatgyttaaataaaaccattaaaactgccaaaaatttagccaagtatggtgacacgtgcctgtagccctagctacccgggaggctgaggcgtgaagattgctggagcccaggagtttgaaggctgcagtgagctatgattgtgccactgcactccagcatgagtgatacagtgagatcccatctctaaaaataaattaaaataagataaaatcataacaaataaacacaccttaaaatgtgaattatttcttcatcatctgtattaggattctcttaaaaggacagaactaataggatataataggagatatacatatatattatatatatataggagtttattaagtattaacttacatgatcacaaggtcccacaataggctgtctgcaagctgaggagcaacgagagacagtctgagtcccaaaactgaagaacttggagtctgatgttcgagggcaggaagcatcagcacgggagaaagacgtgggctgagaagctaggccagtctctccttttcacgtttttctgcctg

SEQ ID NO: 471136 - DNA, 610 bp, Homo sapiens
ccctcagagtcaccaaccccaatgccaggctgcgcagcaaagaaaatgaatacacagctcatgtgcatattttatttatgcttaaataaaaccattaaaactgccaaaaatttagccaagtatggtgacacgtgcctgtagccctagctacccgggaggctgaggcgtgaagattgctggagcccaggagtttgaaggctgcagtgagctatgattgtgccactgcactccagcatgagtgatacastgagatcccatctctaaaaataaattaaaataagataaaatcataacaaataaacacaccttaaaatgtgaattatttcttcatcatctgtattaggattctcttaaaaggacagaactaataggatataataggagatatacatatatattatatatatataggagtttattaagtattaacttacatgatcacaaggtcccacaataggctgtctgcaagctgaggagcaacgagagacagtctgagtcccaaaactgaagaacttggagtctgatgttcgagggcaggaagcatcagcacgggagaaagacgtgggctgagaagctaggccagtctctccttttcacgtttttctgcctg

SEQ ID NO: 471137 - DNA, 603 bp, Homo sapiens
gctatgacgaggcagaactggaagacccagatatctctgaagaatccttgtatgagaagaatagatcccaaaaaggccacgagaatagccaggatgacagctaacacattttccaggatctcacgatttctacggacagaaaaacttatgggtaagtatatcwtaagtataagaaattaaccaaatggaaaaaagggaagggaagacataaatatgaagttcatggtatgccaagatgtctttttggtactgagtttgaacaaggttttagatcatactgaaaacaaactagtttcatgtggacataacatgaattcttatatacaaataaaacatgctacagtgaattgtggagtttcaattacataatatagttttaaatttctattttaaaaatgttactctccttaatatttgcttttctattctatttgttgcaaaatagttaaccaacttggatggcaaataaaatatgtatacaaagaatcacattatgtttaaaaaacaaaatctcaaaatagtttctagaaaattaaatttaaaacatttgttatatggcaaaatagtaacaaaattctggcactaattgatttcgcttccccc

SEQ ID NO: 471138 - DNA, 603 bp, Homo sapiens
gctatgacgaggcagaactggaagacccagatatctctgaagaatccttgtatgagaagaatagatcccaaaaaggccacgagaatagccaggatgacagctaacacattttccaggatctcacgatttctacggacagaaaaacttatgggtaagtatatcttaagtataagaaattaaccaaatggaaaaaagggaagggaagacataaatatgaagttcatggtatgccaagatgtctttttggtactgagtttgaacaaggttttagatcatrctgaaaacaaactagtttcatgtggacataacatgaattcttatatacaaataaaacatgctacagtgaattgtggagtttcaattacataatatagttttaaatttctattttaaaaatgttactctccttaatatttgcttttctattctatttgttgcaaaatagttaaccaacttggatggcaaataaaatatgtatacaaagaatcacattatgtttaaaaaacaaaatctcaaaatagtttctagaaaattaaatttaaaacatttgttatatggcaaaatagtaacaaaattctggcactaattgatttcgcttccccc

SEQ ID NO: 471139 - DNA, 571 bp, Homo sapiens
gccctgtgtaaaaccaagagaaataatcatagtgaaactttgtaaggattttatggtttgcccaacactttttatatatatcatctcttttaattttcacatcagccctgcgaggtatatattgatattatgatgaacctgccagygtgctcaggatagtatctgattaagggcatggccttaggagtagaccgatggcatctgaatcccagctcagccactcattagctgtgtgacctttgctgtgttaattaacctctctaagccttagccttctcatgtatgggaagagaacaccaccaatcctacaaggctgatctgaggatttgacgaaattgtatgtatagccatcaacacaatgtctggcccatagcaagcaggtcattcactggttgaaggaaagacatttgcaaaggacaaacagatagtaaacaaactcccttaggtgaagtagtatttggagtctcctctttttctcttgtttaggttttattttattttcttcgaatggaaatagtggttagtgcaggtgctctgcttactcatattgtgcctatgaagagttgcatga

SEQ ID NO: 471140 - DNA, 571 bp, Homo sapiens
gccctgtgtaaaaccaagagaaataatcatagtgaaactttgtaaggattttatggtttgcccaacactttttatatatatcatctcttttaattttcacatcagccctgcgaggtatatattgatattatgatgaacctgccagtgtgctcaggatagtatctgattaagggcatggccttaggagtagaccgatggcatctgaatcccagctcagccactcattagctgtgtgacctttgctgtgttaattaacctctctaagccttagccttctcatgtatgggaagagaacaccaccaatcctacaaggctgatctgaggatttgacgaaattgtatgtatagccatcaacacaatgtctggcccatagcaagcasgtcattcactggttgaaggaaagacatttgcaaaggacaaacagatagtaaacaaactcccttaggtgaagtagtatttggagtctcctctttttctcttgtttaggttttattttattttcttcgaatggaaatagtggttagtgcaggtgctctgcttactcatattgtgcctatgaagagttgcatga

SEQ ID NO: 471141 - DNA, 598 bp, Homo sapiens
gtgctggaaagtaatccccactgtaacactattaggaggttgggcatttaaaaggtgattgagtaatgagggctctgccctcatgaatggattaatctcagttggcttttttgtagaaagtgactagctgattctaaatttcacatgtaattgcaaatgactcagaataacaaaataatcttgaaaaagaacaaagttggaagagtcacacttcctgatttctaaacattactgtgagaaacgggaaagttcttcaaagattgtaaaaagtcgcaatttcttactataagattgctatccactgttagtatacatatatatgtgtatatatatatgtgtatacatatgtgtatatatatgtgtatatatgtgtatatatatgtgtatatatatgtgtatatatatttatatgtgtgtatgtgtatatatgtatatatatatgtatatatgtatatatgtatatatatgtatatatgtatatatatgtatatatatgtatatatatgtgtgtgtgtgtgtgtgtatatatatatatatatatatrtgtatatatatgtacatatattccaaatcagctgtcctagcttgctccggcatg

SEQ ID NO: 471142 - DNA, 625 bp, Homo sapiens
aacaggtaaagtagcatgaggattttaatgtataaattggaaggctatgcacacaattttttttcctttccacctgagactccagtaaaatgatggtgaaggaataaactcgtatcctaaatgaattgggaaagagatcattggtaggtaaggggtttcaatgaatttcttacagatgaaaagagaatgtaagacatttcatgaagaaacagtgtgaaacaaagcatctcagaatatgcaggaggaaactgcagcaaaggagaaagccaatggccccaggaagctccagaaggcttcaggaccaggccccagttggcagttataaaggagggcaggggtaagaaggagggtcctaaaagaaaggagttaactcaaagtggacccctctcacttcctctttttaaccctattgccaagaaatacattgtaggaagcccggcatttccttcaggtcaaaaattacaggacacttctctaaagatactgaaygtactcccaggggccaaataggactcctagagttggtaaaatccttgagagtaaagccttccctttatgcaattgggaaatcccagtttagaggctgactttctacagtttatctaaaagagcattgggcctacag

SEQ ID NO: 471143 - DNA, 625 bp, Homo sapiens
aacaggtaaagtagcatgaggattttaatgtataaattggaaggctatgcacacaattttttttcctttccacctgagactccagtaaaatgatggtgaaggaataaactcgtatcctaaatgaattgggaaagagatcattggtaggtaaggggtttcaatgaatttcttacagatgaaaagagaatgtaagacatttcatgaagaaacagtgtgaaacaaagcatctcagaatatgcaggaggaaactgcagcaaaggagaaagccaatggccccaggaagctccagaaggcttcaggaccaggccccagttggcagttataaaggagggcaggggtaagaaggagggtcctaaaagaaaggagttaactcaaagtggacccctctcacttcctctttttaaccctattgccaagaaatacattgtaggaagcccggcatttccttcaggtcaaaaattacaggacacttctctaaagatactgaatgtactcccaggggccaaataggactcctagagttggtaaaatccttgagagtaaagccytccctttatgcaattgggaaatcccagtttagaggctgactttctacagtttatctaaaagagcattgggcctacag

SEQ ID NO: 471144 - DNA, 636 bp, Homo sapiens
tactgcacagcacagtgactatagttaataataatatatatttcaaaatagctaaaagaggattttagatgttcttgccaacaaggaatgataaatattcgaggtgatgaatatgctaattcacctgacgtgatcattctacagtgtatacatgtattgaaacaacacattttacaccataaatatgtgtaattcttgtcaattaaaaataaaacaaaacttaaaaatataaacaaaaatcaatttttaaaaagatgcctatttgaatatatgtctgatgtccctcgccagtaaagaaattttaaaacaaacygaaaacataaactcacatggacaagaggagagaacagctataaaatatttgaagctagaaagcagaagtgtgagtggtaactggattagcagatctgataaagctgaaccttaagtcatctatagagaaagtgaagaaccaacttgatttattccacagagtcctcaaagggctcagaactgggcagcattgggcacctccagaactgtggatgaaagggtactcaaaaaagaacaggaagtgaaatccattgagaagtgattagattcccgagttcccttctttactccatactcctggtgactgcccttttcccaccctct

SEQ ID NO: 471145 - DNA, 636 bp, Homo sapiens
tactgcacagcacagtgactatagttaataataatatatatttcaaaatagctaaaagaggattttagatgttcttgccaacaaggaatgataaatattcgaggtgatgaatatgctaattcacctgacgtgatcattctacagtgtatacatgtattgaaacaacacattttacaccataaatatgtgtaattcttgtcaattaaaaataaaacaaaacttaaaaatataaacaaaaatcaatttttaaaaagatgcctatttgaatatatgtctgatgtccctcgccagtaaagaaattttaaaacaaaccgaaaacataaactcacatggacaagaggagagaacagctataaaatatttgaagctagaaagcagaagtgtgagtggtaactggattagcagatctgataaagctgaaccttaagtcatctatagagaaagtgaagaaccaacttgatttattccacagagtcctcaaagggctcagaactgggcagcaytgggcacctccagaactgtggatgaaagggtactcaaaaaagaacaggaagtgaaatccattgagaagtgattagattcccgagttcccttctttactccatactcctggtgactgcccttttcccaccctct

SEQ ID NO: 471146 - DNA, 598 bp, Homo sapiens
aacaaagatcccagagtgacatctgatgacgtacagggcacctgggtcagactgaagcagtatcctcaagggacagccacaatgaggaacatcatcactgtgtccatcactgttgwaccatcattttaacctgatcagactgttggagcatgtactccattaaaacaaggtattaaactaaaaagaggaagatatcaaagaaacagagaatccaactcaaagaaaaaggcaaataaataaataaataaataaataaaataaaataaaataaaaaaatcccaaggatggcagcaaaaaggaatcagtcccagaaagacaggtatacagcagcctggcaagcctagagaaaaaccagcctagataggagaaggcaaatcttcatgagagatgtttctaacagaaattaaaaacaaaaaaagaacagttagattgcttgatgttgttggctttatagaaaagtgtttgggagactttcagaagttgcaagataaattagcaataagtacagaaaattaagtaaataaaaagaaggcaattattaactacagatgaaacaaaaggtaagaaaggaaacataatcatagtgcacgacaatgct

SEQ ID NO: 471147 - DNA, 542 bp, Homo sapiens
tgtgaataatatttgtccaggcataatgatataaacagataatattaatctgaccaaaaaccataatcaaattgcatggggaggaggggggacaggaagcagacggatagagatgatgctgtaagagaactagatcctcatctarcataacaggaagtcagtagataatatctcaaattgataaagtaaaagataacagaatatacatgttgtttagaaatatgaagatatgtaaacccaggaaaaaagcagttgaaagtggaagactctagagaggggaacaggtaggggtggggaaggatgggacagggaatcatgttttgttacaagtatattagctcaatttgatgtttggaactgtgtgcactgaaaaaaaaaaactaatttgaaaaatcaattaatttctcttagcaagaggtgtctcatggctgccctgactcaaacgtaaggcttagaaaataatgacaatcttgcccctccccaaaaaacccagcctcttatttttgtgtagctgtgtatttcttaaagtatgttattatttc

SEQ ID NO: 471148 - DNA, 542 bp, Homo sapiens
tgtgaataatatttgtccaggcataatgatataaacagataatattaatctgaccaaaaaccataatcaaattgcatggggaggaggggggacaggaagcagacggatagagatgatgctgtaagagaactagatcctcatctagcataacaggaagtcagtagataatatctcaaattgataaagtaaaagataacagaatatacatgttgtttagaaatatgaagatatgtaaacccaggaaaaaagcagttgaaagtggaagactctagagaggggaacaggtaggggtgggraaggatgggacagggaatcatgttttgttacaagtatattagctcaatttgatgtttggaactgtgtgcactgaaaaaaaaaaactaatttgaaaaatcaattaatttctcttagcaagaggtgtctcatggctgccctgactcaaacgtaaggcttagaaaataatgacaatcttgcccctccccaaaaaacccagcctcttatttttgtgtagctgtgtatttcttaaagtatgttattatttc

SEQ ID NO: 471149 - DNA, 542 bp, Homo sapiens
tgtgaataatatttgtccaggcataatgatataaacagataatattaatctgaccaaaaaccataatcaaattgcatggggaggaggggggacaggaagcagacggatagagatgatgctgtaagagaactagatcctcatctagcataacaggaagtcagtagataatatctcaaattgataaagtaaaagataacagaatatacatgttgtttagaaatatgaagatatgtaaacccaggaaaaaagcagttgaaagtggaagactctagagaggggaacaggtaggggtggggaaggatgggacagggaatcatgttttgttacaagtatattagctcaatttgatgtttggaactgtgtgcactgaaaaaaaaaaactaatttgaaaaatcaattaatttctcttagcaagaggtgtctcatggctgccctgactcaaacgtaaggcttrgaaaataatgacaatcttgcccctccccaaaaaacccagcctcttatttttgtgtagctgtgtatttcttaaagtatgttattatttc

SEQ ID NO: 471150 - DNA, 592 bp, Homo sapiens
gggataagttatcaatacaatttttaaaaatctattgtcagtgagctctgtgaccaagagggcagaacctaagagttactacaagggtagtttaattcaacttcttgaccctccagctatataagggagggctcccaagtgggtatcagacacggcctttatcataaaatgaagctacagctacacagaattcttccagcctcctctccctgttccttcttamacttcaggagagaaaggtacaagagagcactgggtgggacgaggggggcttttaattgtccagcatccacctctggtgaaaatgtgtagcaagcagctcactcccatccctggctttatctttgttgccagcactgttacaacctgacattttatggtatgtatgtctgtttgttttctgtctccttgggaccaagtcaggtgtgtgaggtggaggggagtgtttttggttcaccgtattctcattgcccagaacagtgcctgacacatagacaagctatcagcaaacacttgctgaaagaattgtttcttttcaagccaaacctgccaggcagttccgcagagacatccagggggcatgaactacaga

SEQ ID NO: 471151 - DNA, 592 bp, Homo sapiens
gggataagttatcaatacaatttttaaaaatctattgtcagtgagctctgtgaccaagagggcagaacctaagagttactacaagggtagtttaattcaacttcttgaccctccagctatataagggagggctcccaagtgggtatcagacacggcctttatcataaaatgaagctacagctacacagaattcttccagcctcctctccctgttccttcttacacttcaggagagaaaggtacaagagagcactgggtgggacgaggggggcttttaattgtccagcatccacctctggtgaaaatgtgtagcaagcagctcactcccatccctggctttatctttgttgccagcactgttacaacctgacattttatggtatgtatgtctgtttgttttctgtctccttgggaccaagtcaggtgtgtgaggtggaggggagtgtttttggttcaccgtattctcattgcccagaacagtgcctgacacatagacaagctmtcagcaaacacttgctgaaagaattgtttcttttcaagccaaacctgccaggcagttccgcagagacatccagggggcatgaactacaga

SEQ ID NO: 471152 - DNA, 638 bp, Homo sapiens
tcattctttctctttacctcctaccactttctcactgttgatagtggacagtctagccagaatacatatttcacacgtcagcttaaatcactcctgtagcrtgacatccccaactcacaccatcaaaatgactcccctgtcataaaccctgcactctctctttatgacacttgttacacctgtattcaaagtttatcttttctggcagggcacagtagcacatgcctgtaatcccagcactttgggaagccgaggtgggaggatcacttaaggccaggagttcgaacccagcccgggcaacgtagtgagaccccatctctaccaaaaaaatttaaaaaattggtggggtgtggtggcacatgcctatagtcctagctacttgggaggctccagcaggagggtcacttgaacacaggggtttgagggtgcagtgagctatgatcccatcactgcactccagcttgggcaacagagtgagaccctgtggcttaaaaataaaaaattatcttagaataaaaatttcatgacagcatggaccatgcatatgtgcatcaccactatattaacaatgctcgttccttgcatagtgtaggtgctcaataaaatatcagttgaagaagtgaataatattttagtat

SEQ ID NO: 471153 - DNA, 638 bp, Homo sapiens
tcattctttctctttacctcctaccactttctcactgttgatagtggacagtctagccagaatacatatttcacacgtcagcttaaatcactcctgtagcgtgacatccccaactcacaccatcaaaatgactcccctgtcataaaccctgcactctctctttatgacacttgttacacctgtattcaaagtttatcttttctggcagggcacagtagcacatgcctgtaatcccagcactttgggaagccgaggtgggaggatcacttaaggccaggagttcgaacccagcccgggcaaygtagtgagaccccatctctaccaaaaaaatttaaaaaattggtggggtgtggtggcacatgcctatagtcctagctacttgggaggctccagcaggagggtcacttgaacacaggggtttgagggtgcagtgagctatgatcccatcactgcactccagcttgggcaacagagtgagaccctgtggcttaaaaataaaaaattatcttagaataaaaatttcatgacagcatggaccatgcatatgtgcatcaccactatattaacaatgctcgttccttgcatagtgtaggtgctcaataaaatatcagttgaagaagtgaataatattttagtat

SEQ ID NO: 471154 - DNA, 613 bp, Homo sapiens
cagaaaaaccgaataactgccccaagtccatgcagctcaggagcaggggctgagaagaacgcaggctcctggtccccaggcccccagrccttccttcccacacatcagcccagtccccactggatggcagagccaactgatgtgaccttcctctcttctcttcctcagagccccctggaaaaacaaacagctcatgagaatgccggccccagttctgccattaactcatgatgtggccttaggccccccatctccaaaatgggctgtggagggagagatgcccagcccatctcttaggtcctttcttgctaacactctatgactctgtcggtcacacagtccatttagtcaacagatgacttactgagcacctgctgtgtgccgggcactgtccatttagtcaacagatgacttactgagtacctgctgtgtgccgggcactgttctagatactcagcacacatcagaacagagcagaccaaagccctgccttcaggacccgttcattgcagatgaggggacagacaacagacagcagtgagagtgtggtgtgtggtgtggcaggtggtgagtgcaaagggaaaaaggacgagatgacaggacgagaccagga

SEQ ID NO: 471155 - DNA, 613 bp, Homo sapiens
cagaaaaaccgaataactgccccaagtccatgcagctcaggagcaggggctgagaagaacgcaggctcctggtccccaggcccccaggccttccttcccacacatcagcccagtccccactggatggcagagccaactgatgtgaccttcctctcttctcytcctcagagccccctggaaaaacaaacagctcatgagaatgccggccccagttctgccattaactcatgatgtggccttaggccccccatctccaaaatgggctgtggagggagagatgcccagcccatctcttaggtcctttcttgctaacactctatgactctgtcggtcacacagtccatttagtcaacagatgacttactgagcacctgctgtgtgccgggcactgtccatttagtcaacagatgacttactgagtacctgctgtgtgccgggcactgttctagatactcagcacacatcagaacagagcagaccaaagccctgccttcaggacccgttcattgcagatgaggggacagacaacagacagcagtgagagtgtggtgtgtggtgtggcaggtggtgagtgcaaagggaaaaaggacgagatgacaggacgagaccagga

SEQ ID NO: 471156 - DNA, 613 bp, Homo sapiens
cagaaaaaccgaataactgccccaagtccatgcagctcaggagcaggggctgagaagaacgcaggctcctggtccccaggcccccaggccttccttcccacacatcagcccagtccccactggatggcagagccaactgatgtgaccttcctctcttctcttcctcagagccccctggaaaaacaaacagctcatgagaatgccggccccagttctgccattaactcatgatgtggccttaggccccccatctccaaaatgggctgtggagggagagatgcccagcccatctcttaggtcctttcttgctaacactctatgactctgtcggtcacacagtccatttagtcaacagatgacttactgagcacctgctgtgtgccgggcactgtccatttagtcaacagatgacttactgagyacctgctgtgtgccgggcactgttctagatactcagcacacatcagaacagagcagaccaaagccctgccttcaggacccgttcattgcagatgaggggacagacaacagacagcagtgagagtgtggtgtgtggtgtggcaggtggtgagtgcaaagggaaaaaggacgagatgacaggacgagaccagga

SEQ ID NO: 471157 - DNA, 236 bp, Homo sapiens
ccaggattctgactccagggcacagtaccacaccytgctggtgtccctggatgtcatgatgctcatagtgtcatgttgccttggcattcattttttaaggtgtaagtttatttgcctcaaatcagaggcagggcttggtcaccatggcagttttcaatactgtatctggttcaagtggctccagttggtgtccagagatcaaatcttagaggcatctctcctgcttggtgtgctgg

SEQ ID NO: 471158 - DNA, 500 bp, Homo sapiens
ctgctacagaatatattcaaccattcatgtggacaattattgattcatctgatcatgtttttgacaatatctctgggacatctttttgggtagaacggttgggaaaagagagtaacctccgttggaagatatgttttcacatctagttttastaaataggtttaaatgtttactctagtattaaatgttactttcccagtacagccgtcttaaacaatgcaatttgtcttcatgcacacacatgtgtatgcacacacttatccacatcaaccattatttacctgtataagtagagaggaacgttgatggagaaaatttcaaacagaagaaaattcaaaagttgttcatgcttataaagtacatatgctttggtgctgggtttgccttccaaattatgttaatattgaagtgaatttgcgttctccaggcatgtaccagctatagagtgagacaggagaggcttggtgagggacagagaggaggaaaaagtggtgttcaaa

SEQ ID NO: 471159 - DNA, 435 bp, Homo sapiens
agcaacaaatctttatctgcattttctaatccttaaatgcccaggggtggaatctgctgggttcagctcatcttttgttcacttggtgaattgaattgcttgcctgagggtcgggggcgatctacttagctatcatttgtgtggtgggcacagactacctgmctgtctagtgcagggggctgtgggtgaagattcttccgaaagggagagtaggtggacttgtacttggatgtctagtaaggctccatgttttcccaactgcccttgaatttctcagaaacacttggaaaataagctctatcctgctccatgttattttggttgggttttgccctgaaggaaagattccctgcacatggtcctaaggaatgtcaagtacattctttagacactcatttagtaggcagtgttacataaatgcaggaccaaaaaatg

SEQ ID NO: 471160 - DNA, 435 bp, Homo sapiens
agcaacaaatctttatctgcattttctaatccttaaatgcccaggggtggaatctgctgggttcagctcatcttttgttcacttggtgaattgaattgcttgcctgagggtcgggggcgatctacttagctatcatttgtgtggtgggcacagactacctgactgtctagtgcagggggctgtgggtgaagattcttccgaaagggagagtaggtggacttgtacttggatgtctagtaaggctccatgttttcccaactgcscttgaatttctcagaaacacttggaaaataagctctatcctgctccatgttattttggttgggttttgccctgaaggaaagattccctgcacatggtcctaaggaatgtcaagtacattctttagacactcatttagtaggcagtgttacataaatgcaggaccaaaaaatg

SEQ ID NO: 471161 - DNA, 585 bp, Homo sapiens
agagatgattgacgatttgtttctggggtggagattaggaagacacaggccaggtatagagggtattgaggagcataggacagagatggggtaacctttcaggatcttgttgctcaccttgatgtggtgttgtcagggcctggagcaatctttgctttggttcttagaaacctcggttcatgttttagcaggaaagggaaggacagactgcttcctgcctgccagattgcttccaagcccctatgcatgtctctttggaagaccttgccattgctgttaaaaatatgcttaggggctttgttttgaatggaaactgctactttacgcagtcaaaccacaaaacacaatccagaaaatcccatcttccatttgccatggctcaagagggaggaggaagcacgaggtgtgcctgtctgtgctgccctggctggcagtgtccctgaggaccagctcttgcagacttagccaggtacctgtgggctcagctttgctaggactgtcccaggtgtgggcccttctctccacacccctccccagacctcrtttatccctttctctaaccacaggctacaccaagccctatta

SEQ ID NO: 471162 - DNA, 582 bp, Homo sapiens
ggaactctggcctgtctatctctttctcctccaggatgggtttccttggctcagaagaacttacggctccctggccctcccctgtctgttagcagagccctcctcatgggggctccctggcacaccctctttgcacctgatttttcagccatctttcatgactactgtacaacaactaatgcctttgtattctcacctataaaatggtgtaaacatccaactcattttgttcctcggggtgaaatgagatagtccaagtctcagtctattgcttaatgcaaagcaagcatggaaaatccgggaggaggccatgttcatagagcttgttgcagaatatgtgctgggagcccagcaccttgcaaaaaccatgtgaaattatccacatcttcaactctgcgaacgtcccctgcaggacaccagggttcactaatattcgctaaagacagcccttcagtataagctgttattggtgagtgtattcacttccwgggagggcttaaacagcagtaccataaactggggcgcttaagcagaaatttatcatctcccaattctggaggcttgaagtggaaaatgaagtgt

SEQ ID NO: 471163 - DNA, 559 bp, Homo sapiens
accaagggttcctggaggacagggagcatctctcactctacagcagtgcctcacaactggggatgaatttgccctctgagggacattgggcaatgtctagagatatttgggttgtcacatttttgaagggaggtgctactggcatctcgtggttaggggccagggttactgttaaatatcttagaatgcacaggatggccccataacatggaatgatccacccaaaatgtcaatcatgccgtgattgagaaccttgctctacatccctatgcccaacacaggcaaataaaggggcacttggtaaacatttgttgaactggaaaaaagaaaagtgtgtttagggaatggagaaaagtttggagtcattkgtgagaagggtgtaatggtagaagatggtgcaagaatataaattagaattgaattgcaggcatgcaaggtttgacatacaggagttttaatttattctaaaggagggacattttactttagaagagtgacatcattaggtgtgcattggagggttacactgactgtataataaagagatttgagtagggag

SEQ ID NO: 471164 - DNA, 579 bp, Homo sapiens
aaacaccctatttccaaacaaggtcatattctgaagtactggaagttaagacctcagtatatcttgctgggagtgacacaatgcaacccacaacaagacccaatttgaattccatcacccatgaccaatttgattcccatatggatctttcctttaatctgattccttttcatgtgtccagagtcaagagcaaaaggctttacatttcatgtggagggattccctaggtctttyggaaacagcttgtgctcccctcacattcacaatctcttcaagctgtcttcttcaccttcttaaagcagaccgattcactttcaaaaggagggtgctgggttgtccccagtaactctagctaggccaggtcagaacgtctgaaaggcactgtgggaaatttccagtgaacgccatccaatcactgaagcagtgaagaggggaatggggatgtggcaggaagcaggaggaacctggcacccaccgtgggggttgggctgggtgggaggcggggctccgtcatcttctctcagcccaggctcctcctcgtttgctcgtgctttttcccacctgcacatcacacatctg

SEQ ID NO: 471165 - DNA, 250 bp, Homo sapiens
gaaaacatttgactgggaatgaacagctgggcgaaggaaggatttattgtcccaacagctgcatgttctggagtgaacctcctgaggactggcagagggggcrtggttgcaggggatgggtagaggaagcagatttcctgatcgtccctatctgtgtgagaaggcgtcatacccatggccagacaaagggacatttacttgaactgacattcatgacacacgggccccataagggcgtgtgtggccaaaa

SEQ ID NO: 471166 - DNA, 629 bp, Homo sapiens
gaggctgggaaatgtagtccctagctggccgtcagttctgagcttgatctgtgtacccatgaaggggagtgcaggtttgcttgacagccatctttgccacctttgtttcaccaggagatataaagacagagtctcagaaagccccccttaggcatagtagaggataatattgaaagcggtatgacaaatgttgtaattgttttttaataaaatgtttaattagagtgcaccagatgttgcagaactttctccttagttcagctaaaaccaggctcttgtcacatggccaggaaagatgaggctcgcagacacatagaagggtgaggaaaatgaaatttattgggcaaaaaggaaaaaaaaaacaaaactctcagtaaagcgagatagagtcctgctagcaggtttcctgcctcacagattgaatcccaggtcaccacacaggaacaggycaggccaggccaggccaggccaggccaggcccattcccatctcaaatggcatgaactttccgaggctccaccccatcctcccagtgtgcaggtaagcattattcacaaagaatcagtccagaaagggcaggcttcatccaggaccagaagtccagtttttcagtcgtcaggctgttttag

SEQ ID NO: 471167 - DNA, 629 bp, Homo sapiens
gaggctgggaaatgtagtccctagctggccgtcagttctgagcttgatctgtgtacccatgaaggggagtgcaggtttgcttgacagccatctttgccacctttgtttcaccaggagatataaagacagagtctcagaaagccccccttaggcatagtagaggataatattgaaagcggtatgacaaatgttgtaattgttttttaataaaatgtttaattagagtgcaccagatgttgcagaactttctccttagttcagctaaaaccaggctcttgtcacatggccaggaaagatgaggctcgcagacacatagaagggtgaggaaaatgaaatttattgggcaaaaaggaaaaaaaaaacaaaactctcagtaaagcgagatagagtcctgctagcaggtttcctgcctcacagattgaatcccaggtcaccacacaggaacaggtcaggccaggccaggccaggccaggccaggcccattcccatctcaaatggcatgaactttccgaggctccaccccatcctcccagtgtgcaggtaagcattattcacaaagaatcagtccrgaaagggcaggcttcatccaggaccagaagtccagtttttcagtcgtcaggctgttttag

SEQ ID NO: 471168 - DNA, 462 bp, Homo sapiens
attctggaagttcctcaccatcgctgcatttggaccagatgatgtgagagtctcaggtattcctcgcctaatgggtgtttgctgttggaaagctcacgtatacttccacttaaaaagtttgttgtgtaaatccaagatctttctcagagagaacagtatcagcaggagaaagctatcctcaagattggagctcattcgttcactcattgaatttattgcgcattttttctgggcactacaactaggaagattaagagatggccacattcttcaaggaagtcacagactgggaagggagagaaatgttattaaataattacaaaatagtgtcatgccagcagtgtgctaaggaagatggtgggataaagcagggagaaggccaggtttcctcctgggctctgggaaggcaggatctcaacagtgtrcgctccaaaggccttgactgttgtgcgctacactgtt

SEQ ID NO: 471169 - DNA, 564 bp, Homo sapiens
ttggtaaagagacaatctgaaaccaaatttcctaaagtttcctaatttttcttatctgcattactctcgtatttttccttcaaaattaagcctttattggaattatcatccatcttgctaagacaaatttcttttcctttgcttttagaattttatattttaaatcaaataatttaaattaaataaatattttatttgtcaaagttgcatatacagatattttaagtcttcaagcaattctataagacttctgatttttaaaaagcagaccctcatcaccacccagcccctggaagccctttctttttatccagagaaaaatacactgattttagctgattactttgtttaacccccaaatctctaaatactttaagatgcctcttgattctttactttagtaattttttcttgattttttttaaaaaatgagagtttaactctttttttkgtctataattctaaccctactgcacataccacttcctgcttttcttccattcttctaacggaacaatcttgtgtttagattagtgtgaagtgtttacattattaattctatgt

SEQ ID NO: 471170 - DNA, 564 bp, Homo sapiens
ttggtaaagagacaatctgaaaccaaatttcctaaagtttcctaatttttcttatctgcattactctcgtatttttccttcaaaattaagcctttattggaattatcatccatcttgctaagacaaatttcttttcctttgcttttagaattttatattttaaatcaaataatttaaattaaataaatattttatttgtcaaagttgcatatacagatattttaagtcttcaagcaattctataagacttctgatttttaaaaagcagaccctcatcaccacccagcccctggaagccctttctttttatccagagaaaaatacactgattttagctgattactttgtttaacccccaaatctctaaatactttaagatgcctcttgattctttactttagtaattttttcttgattttttttaaaaaatgagagtttaactcttttttttgtctataattctaaccctactgyacataccacttcctgcttttcttccattcttctaacggaacaatcttgtgtttagattagtgtgaagtgtttacattattaattctatgt

SEQ ID NO: 471171 - DNA, 648 bp, Homo sapiens
cccaaaataaaaacagtgttaaatttcctcatcaaatataactacaacaatccataaagcatgcaggtcatgactttggcattggccctggagtactctatagccatgtaccggattcacagaaaayaagccatccttcattttctggtgcatagatgaacagagtcatgaggagtatttttcatagtgaagtgttctttagaagttaaatgaatttgggaaataatgcacctatctttatttatgtgtccttataaatatctttattatttgaagtaatataaattattttggctctatctatgcaacagtatggctgatattgggaaagacttaggagcttgactatagctcaccagcagtgatacatgataatatgttaaaaaaaaaaataagcatctaatgcagaagatctctcatgaagaaaaactatggtggatgtcaaaaaatagatgacaaatgaaaaatctgtagatctccaaaaagtaagaaataatagcattgcattattttcatataccaagctatctgatttgctaaatgttaaaattacagcttgtttacaactatacttatcaaatgaaatcaggtgataggtaacatacactttggaattagtactcataaagctctctgttataacaaatt

SEQ ID NO: 471172 - DNA, 605 bp, Homo sapiens
taccagtttttgcctggctcttgttttgacaaaaacacatttaagatctttgtgttaaacttacagataattttaaatgtttaataagattaacggggcttctcccagtgatacaacagaaggggcaggtttcagagctctgaaccctctaatcacgtaaggttgttttcatagccttcatgccagatgctctttttggactggctaagcccaatatagtatgtatataataaggatccattatgtcatcctcaaaatactaaacattgtccagaaaaagagcctaaacataaatctgtattatactcattatcaatagattctccaaacatattycatcttataaactaggccttgtatttttttaaagcacattaattactataagccttctaggaaagtatcaaagaagagaataattagtgactttcaggtttgctgtgtgaagctaggaatcacagcctatgatcccccagttaacactcacttggaatggataagcttcaaataacaaacagccactactttgggtcactttcctttgtatgactgggtgggaagcacgtctttgatctctaacacagacccaactgcagaacccaaat

SEQ ID NO: 471173 - DNA, 605 bp, Homo sapiens
taccagtttttgcctggctcttgttttgacaaaaacacatttaagatctttgtgttaaacttacagataattttaaatgtttaataagattaacggggcttctcccagtgatacaacagaaggggcaggtttcagagctctgaaccctctaatcacgtaaggttgttttcatagccttcatgccagatgctctttttggactggctaagcccaatatagtatgtatataataaggatccattatgtcatcctcaaaatactaaacattgtccagaaaaagagcctaaacataaatctgtattatactcattatcaatagattctccaaacatatttcatcttataaactaggccttgtatttttttaaagcacattaattactataagccttctaggaaagtatcaaagaagagaataattagtgactttcaggtttgctgtgtgaagctaggaatcacagcctatgatcccccarttaacactcacttggaatggataagcttcaaataacaaacagccactactttgggtcactttcctttgtatgactgggtgggaagcacgtctttgatctctaacacagacccaactgcagaacccaaat

SEQ ID NO: 471174 - DNA, 546 bp, Homo sapiens
atgaaattgtatctgaagaccaggtgtatttatgtctctttagccatcataatgtgatccgaggctatgatgttcaaaatattgtcgagctgagtgcatatttctgaaaaagagcagatttagctatcttcatatgacagcctacgggaggactataataaagaaragaaattagttttattctgtgtaagtctagaaggcagaagacacagaaagcaagcgcatactaactcagcaaagggaaaccttttctaatcactagaggtggctaaaagtgaaacattccccttcagaggtactaagttctaacaccagtagcattcaagcaggggtgaatgagcttcattattgcaagatgtaagtaaaagttttatattatactggagactgggctaaatcactggtttccaaacgttgttactcagtccagcgcattgcattagagtttagttaaaaagtaaatactgaatcctccccttcaaggactgacccacacctttgtaggtgagactagggaaattggcattgaacacatacccctggtga

SEQ ID NO: 471175 - DNA, 502 bp, Homo sapiens
aaggagccaagtgatttatcaacttgaaagatcacaaggtgattaaaacagggccaatgatactcttttcaactccatcagggaagagtgagtgacaagtaatgatgggcgttaggtgaccagaatcggggacttcattacagcctgataagaatcttgccacacatgtgggagattctgggctccatgtccttataccactctgtagagtaggaaagcactagatagatttatcagcrcaaaacagaggagaataaagtatattgctgaggatgtgagggctcatattgaaatataagtattgagagtgctgactgccagaatgtggatttatgggaaataaagccctaaaatactttttccaacaaaaaaatagacctcttggaaacagcttttcctctctatgtacttagctcccattgagcttaaattgctcttagtattgtgataatgacaattcaatattacagggtatggaagatgaaccaaataaattaaccag

SEQ ID NO: 471176 - DNA, 506 bp, Homo sapiens
gggattgtcccttctccacagagttctggctccacagacagcactgaactgttcccagccaagtcctgccagtgggacagcccttttgattatttgacagcttatctttttaagtccttgtttcttttttggtgtggtctactgggccagacacggtgaagtctcctactcttttttaatctaaatattgggcccaagaaaaagtcatrctttgcctagttgcaaagactgtgtttccagactcctgatgaatattatctcttcagaaggcctgttctcttctaccctcagtgttttcttccatctctgtgacgttttatcctccatcatctgcctccattattccccgtatatcctcttgatgcttcttttagctcattctttcctttgctggttctttatattgccatcatccttgttcatgtctttattgaatctcacctgggttattgcagtaaaacccaactgatctccctgccttgtgtctcccctaatccctttttcac

SEQ ID NO: 471177 - DNA, 568 bp, Homo sapiens
ctcagaggtgctgctcagctagtcctccctgagggtgggccctgcagatgagggctggaccaggaacctgcagttgcacacttctctatgactgagtggctaagctcagtaggggactgttaaaggcataagaagctggcttccaccttgggtccactatgtgttctaaaatttaacactgtttataatgaagctattattttgatctctgtcttgttcctatatttatttcttagtgactcagaacacaaagagaatggtatcataaataacaccctagaatcctaacaaatgtaaaactaatttgttggctggtttcccaaattaatataacatatggggagctacatttaaaaagctttaaggaaaagaggaaaactacccagaggtacaaaatctgagactgggaatggggagtggatctttcagcagccggayagacttgcagagacccgttctgttgcgaggcggacacgagttccatcctaacagtgccgtagcttcctgtgagaactaaggaactgggcctggctccccttatgtgtaaaacgaggaggctgtaccaaac

SEQ ID NO: 471178 - DNA, 594 bp, Homo sapiens
gtaggcactgccctataccaggttctctgctgggagctgagccctgcctccttagagcttgccacccagaggaagagggtgctcccagtgactctctgaaagatataaagcctgggaagccactgacctttggtctgagcagtagaaaagacactatccctcaaactggcatcatcccaattgtccatagtctgcctgttagtatttttttattgtttttccaaatkgtcttccttccttccttttgcttttcctttcctctctctgtccttctccctctctccccttctgtgttccctcctctctgtctctctttctccttccttctctctctcaatctgtcttgcttttgctcctttcaaaaatggtaaaagaagtgagaagatgttaaattcttaatgtgttaagcacaggcatggctattgtcataaaatatgacttcttcctgcccctccacaaataataaaaagcataaaattatacattcataagatttttcaagaaatgaggtgatttctggtaaacctgagcagcagagacaggatacagactgagctttattactcagtggcccacctctgcttgctcagactc

SEQ ID NO: 471179 - DNA, 597 bp, Homo sapiens
ctggtaggcactgccctataccaggttctctgctgggagctgagccctgcctccttagagcttgccacccagaggaagagggtgctcccagtgactctctgaaagatataaagcctgggaagccactgacctttggtctgagcagtagaaaagacactatccctcaaactggcatcatcccaattgtccatagtctgcctgttagtatttttttattgtttttccaaattgtcttccttccttccttttgcttttcctttcctctctctgtccttctccctctctccccttctgtgttccctcctctctgtctctctttctccttccttctctctctcaatctstcttgcttttgctcctttcaaaaatggtaaaagaagtgagaagatgttaaattcttaatgtgttaagcacaggcatggctattgtcataaaatatgacttcttcctgcccctccacaaataataaaaagcataaaattatacattcataagatttttcaagaaatgaggtgatttctggtaaacctgagcagcagagacaggatacagactgagctttattactcagtggcccacctctgcttgctcagactc

SEQ ID NO: 471180 - DNA, 638 bp, Homo sapiens
aattaggtttttctctaccctgttatttaaaaatcacccaaatgctatcaacaccccttctccctgccttacttcctatttttatagcacttgtcactttctaatatcccttagaatttagttgcttatgctgtatcattttccttccatcagaatattcacaagagagatctttgtttttttaactagcacattcacataaatgtatttgataaacagcagccctgtttgttcccacagccacacaaagtgtttgatgaaaactggcctatttgctttcctgaaataattggattactgagaaaatggaatgtaattaatgtatgcacatatcttagaacgtatgtcyagcacatggttactgcacaataaaagttaactgtcatctctgtattattataaaacgggtcttctctcttctaaatagagaaactaaatttagtccagagtcagatgggaaacgcatgccagcccagcccctctctatcattgcactgcctctgcctgtcttccctgcatccaaccaaacagcatcctccagttgcagaaggaaatccgcaaaacgtgcatgttcacgggtgcaagtgttgccacttccgtgcagcatttgcagagcaaggctgcctatgcctacccca

SEQ ID NO: 471181 - DNA, 638 bp, Homo sapiens
aattaggtttttctctaccctgttatttaaaaatcacccaaatgctatcaacaccccttctccctgccttacttcctatttttatagcacttgtcactttctaatatcccttagaatttagttgcttatgctgtatcattttccttccatcagaatattcacaagagagatctttgtttttttaactagcacattcacataaatgtatttgataaacagcagccctgtttgttcccacagccacacaaagtgtttgatgaaaactggcctatttgctttcctgaaataattggattactgagaaaatggaatgtaattaatgtatgcacatatcttagaacgtatgtccagcacatggttactgcacaataaaagttaactgtcatctctgtattattataaaacgggtcttctctcttctaaatagagaaactaaatttagtccagagtcagatgggaaacgcatgccagcccagcccctctctatcattgcactgcctctgcctgtcttccctgcatccaaccaaacagcatcctccagttgcaraaggaaatccgcaaaacgtgcatgttcacgggtgcaagtgttgccacttccgtgcagcatttgcagagcaaggctgcctatgcctacccca

SEQ ID NO: 471182 - DNA, 535 bp, Homo sapiens
aattttgtattttttgtacagatgaggtcttgctctgttgcccaggatggtctcaaactcctggcctcaagcaatcctcctgcctgggcctcccaaagtgatgggattacaggcatgaaccactgtgctcaaagagtgggggtgtatttctatttataaaataaatattctaatgtcaacgccatttcayggcataggttagtgagttgcatctctggtttaagtttaacaaagggtaaaatacggcagaaggtttgtggagcataattttcccaatttgctggcctggagttgctgtgggaaaccatggagaaatcataagtacttcctaacttagagtgctgcctgtcttagggttcctctgatctcttgtggccaagatgtgcagtaacttagaaacaacagaggagttgtcacgacttttaagaaaaatgacggtagatataaaaatatctattagacctgcttttaagtgtttttgtaatgtggctttattaagctataattcacataacataaaacgtatcctttaaaa

SEQ ID NO: 471183 - DNA, 657 bp, Homo sapiens
ctgccacaccttaagtgactcgctgtccattggaactgcacaaggtcttgggatccctggggaggggtccactggcccatccaggaggagccatggaagagcaagcattcagcttgaagaaaggctgagaattcacccaactgaacaagggaaagggcattttatgaatagggtacagcatacttaaaggcacaagagcaagacagagtgtgaactgggagaaaatgatgagggagatgggaggcagagtgygtgttgagtgcagttatcaagactcttttggttgcaagtgacagagacccaactcatgttgggttgcattttttaaaaattaattattattattattacttttgagatggagtcttgctctgtcgtccaggctggagtgcagcggtgtgatctcagctcactgcaagctctgcctcccaagtttaagcaattctttgcttcagcctcccaagtagctgggattacaggcgcacaccaccacacccagctaatttttgtatttttagtagagatgggggtttcaccatcttggccaggctagtcttgaactcctgaccttgtgatccactcaccttggcctcccaaagtgctgggattacaggtgtgagccactgcgcctggccgggttgcattttattgaaaagg

SEQ ID NO: 471184 - DNA, 646 bp, Homo sapiens
gttctatggacaggtgggtgggtttcactatctaggggtcaagcagctcattttataatctcaggaacccttgccgcctatttcatggttcgcactaagaattgactaaaaaggaacccatgrttataccttttacacccagtgtctccgggtggcttcttccatcctctcacactctctctcctcggaactcctaagtcctttccacatgagccatgccagtcatgagtattatagcttctggagcttgtctccttagggactttggtataacagaccccaatttctgtttttaataggggtaggtcagtacaggcaattcctttcctcaaactcattctggagcctggagaattctcaggtattccatgaagctcagaatcaaagctggccaccccagctttaggacccacctggcaactgacttctcctctgagtagagccctcaggtcccctgtctccatcaaggcctcaggggctgcagcacagggagaacttacaagctaacaacagctccatgcacgcggctgaaggaagccgtgggtaacagtggggatggcgatgtgttggaagcagcacagctttcctgcgggaatgggtgtccagttgcaagaagggacattctcccgggacaactggtcttgca

SEQ ID NO: 471185 - DNA, 535 bp, Homo sapiens
ggaacccatgattataccttttacacccagtgtctccgggtggcttcttccatcctctcacactctctctcctcggaactcctaagtcctttccacatgagccatgccagtcatgagtattatagcttctggagcttgtctccttagggactttggtataacagaccccaatttctgtttttaataggggtaggtcagtacaggcaattcctttcctcaaactcattctggagcctggagaattctcaggtattccatgaagctcagaatcaaagctggccaccccagctttaggacccacctggcaactgacttctcctctgagtagagccctcaggtcccctgtctccatcaaggcctcaggggctgcagcacagggagaacttacaagctaacaacagctccatgcacgcggctgaaggaagccgtgkgtaacagtggggatggcgatgtgttggaagcagcacagctttcctgcgggaatgggtgtccagttgcaagaagggacattctcccgggacaactggtcttgcag

SEQ ID NO: 471186 - DNA, 516 bp, Homo sapiens
tgcaggttttcctcctttgctgtttttctttctgctgaagttgaaaatcccaataaactgcctttcycaagctcttattagattcttggtcagtttagtttctgaggctcaagaagccactggccattcatggtggaagacacaagcaagctctttaggggctctttaataagggaactgattccattcatgagaattttgtgacctaatcaccttctaaactctccattattgcattggtgattaggtttcaacatacaaatttctcagaacacaaaatttcagaccatagcatgggtggactccccctaaaaagtcagaagttaaaattcctggtatggtttggctgtgttcccactccaatctgatcttaaattgtagttcccctaatccccatgtgttgaaggagggacccagtgggaggtaatttaattgtaggggcagttaccttcatgctgttcttctgatattgagtgagttctcacgagatctgacggctttataaaggcttttccc

SEQ ID NO: 471187 - DNA, 516 bp, Homo sapiens
tgcaggttttcctcctttgctgtttttctttctgctgaagttgaaaatcccaataaactgcctttctcaagctcttattagattcttggtcagtttagtttctgaggctcaagaagccactggccattcatggtggaagacacaagcaagctctttaggggctctttaataagggaactgattccattcatgagrattttgtgacctaatcaccttctaaactctccattattgcattggtgattaggtttcaacatacaaatttctcagaacacaaaatttcagaccatagcatgggtggactccccctaaaaagtcagaagttaaaattcctggtatggtttggctgtgttcccactccaatctgatcttaaattgtagttcccctaatccccatgtgttgaaggagggacccagtgggaggtaatttaattgtaggggcagttaccttcatgctgttcttctgatattgagtgagttctcacgagatctgacggctttataaaggcttttccc

SEQ ID NO: 471188 - DNA, 516 bp, Homo sapiens
tgcaggttttcctcctttgctgtttttctttctgctgaagttgaaaatcccaataaactgcctttctcaagctcttattagattcttggtcagtttagtttctgaggctcaagaagccactggccattcatggtggaagacacaagcaagctctttaggggctctttaataagggaactgattccattcatgagaattttgtgacctaatcaccttctaaactctccattattgcattggtgattaggtttcaacatacaaatttctcagaacacaaaatttcagaccatagcatgggtggactccccctaaaaagtcagaagttaaaattcctggtatggtttsgctgtgttcccactccaatctgatcttaaattgtagttcccctaatccccatgtgttgaaggagggacccagtgggaggtaatttaattgtaggggcagttaccttcatgctgttcttctgatattgagtgagttctcacgagatctgacggctttataaaggcttttccc

SEQ ID NO: 471189 - DNA, 691 bp, Homo sapiens
tcgtggggctgggcacaggggaatttttccagagctgagcctgacgtctgctctgaagaatgcttagaaggttcccagacaccagagccagatgtcccccaccaccggtcaggacctccttgaggtgcacaagcacggtctcctctgagttcaccccagcccaccccygcacccactaattctgcttttcctgccccttgctccgtaaaagtatcaaatactttctccttggtatctcaaggaggtttctgagataggtagaagtcttgagacggaggctggccatccattcagccctgagcgtgctgagttctgtgtttctctgaatagaggtgtggaacctgaggggccagcaggcctctctgaaggcctccatggagcaaacggagccacctcgggaaagagtttaatggaatatttttgtacccgatgtttacagatgctgttgggaagttatcaataaaaagacaccattactaaaaagggaaaagtacacctagctgtggcttcttcagtccttaagccaagcaacccaaaaggagggcaagtgctggatgtggggctgggggccctgctggagggaggtgcagacaatcaggcactacagggctagaaagagatgtggcccttttttggaaccccccctggtgggagctataacaacccaagttcccgtcaccagctaggtctt

SEQ ID NO: 471190 - DNA, 574 bp, Homo sapiens
catagatttgtgttggaatttttaaacagatggcaaacgggtactctaattttggtgacagaaataagtgtcataatgtcttgtggaaacaatctccagacagataaaatattaaaaacacatacaggctgggcgtggtggcacacgtctgcaatcctagcactttgggaggctgaggcaagtaaattgcttgagcccaggagttcgagaccagcctggacaacgtggtgaaactccatctctacaaaagaaatacaaaaattagcctagcatggtggtgcacaccagtagttccagctacttgggagactgaggtgggaggatcaccggagccaaggaggttgaggcagcagtgagctgagatcatgctactgcattccagtagtagcatggacagaggcttgcacgacagagtgaggctctgtctcaaagaaaaaacaaacaaacaacaaaactccaaaaaccaggaagccagcagatattcctcgccacagtgtttctcaatckcagcactattgatattctgggctagatcactctctttgataaagtctatcctatacactgtgagttg

SEQ ID NO: 471191 - DNA, 540 bp, Homo sapiens
tatccaactttactaattaatgtttaatatgtgtcttgtggcttacaacacagacacatgcacattggcctggggctgcagattattcaaggaagcatgctcagtgctcatcagtaaatgcctggagtgttgggtgcattcttgtgtctcacaatttagaagcagcagtgatagaactgagtgaatatagaatgtcagtggaagaggagttgttgacaaaggaactcattccaccttctaaggagtatagaaaactcgtaagggtgaagacaggaataaaccttttgtctaagaaatgactagtggtttcatggaagagtgttgaaaattgatcgattccttcaaaataactaatcatagacgttatagggaaggcaattttgactcagatttttcaatctctaatgctgggagctgtccaacaatagagttgattgcaccattgtaactgcccartgggttcaccttgcctgctgcctagacagagctgctttatcaagacaggagaattgcaatagagtttaaattcatgtagagcca

SEQ ID NO: 471192 - DNA, 624 bp, Homo sapiens
tcaggtgctgtccagttcaaagaccaacgagctgagcccttggcacatcccacggtgctttccacgtggccgcstggctgaggggagccgggccgctgagccgcatgcaggctgagggcctgggagctcacccagctcatgagagcaaagcccggtccccctcaccccaatgggggctctgaggggttttttctgttttttttttttctttttttatttgagacagagtttcactcttgttgcccaggctggagtacaatggtgtgatcttggctcaccacaacctccgcctcccaagctcaagtgtgattctcctgtctcagcctcccaagtagctgggattacaggcacgagccaccacgccaagctaattttatatttttagtagagacagggtttctccatgttggccaggctgatctcgaactcccgacctcaggtgatctgcccacctcggcctcccaaagtgcggggattacaggagtgagccaccacgcccagcctctttttcttttttttctgagatggagtctcactctatcgtccaagttggagtgcagtggtatgatctctgctcactgcaaactccacctcccaggttgaagtgattctcctgcctcagct

SEQ ID NO: 471193 - DNA, 624 bp, Homo sapiens
tcaggtgctgtccagttcaaagaccaacgagctgagcccttggcacatcccacggtgctttccacgtggccgcctggctgaggggagccgggccgctgagccgcatgcaggctgagggcctgggagctcacccagctcatgagagcaaagcccggtccccctcaccccaatgggggctctgaggggttttttctgttttttttttttctttttttatttgagacagagtttcactcttgttgcccaggctggagtacaatggtgtgatcttggctcaccacaacctccgcctcccaagctcaagtgtgattctcctgtctcagcctcccaagtagctgggattacaggcacgagccaccacgccargctaattttatatttttagtagagacagggtttctccatgttggccaggctgatctcgaactcccgacctcaggtgatctgcccacctcggcctcccaaagtgcggggattacaggagtgagccaccacgcccagcctctttttcttttttttctgagatggagtctcactctatcgtccaagttggagtgcagtggtatgatctctgctcactgcaaactccacctcccaggttgaagtgattctcctgcctcagct

SEQ ID NO: 471194 - DNA, 468 bp, Homo sapiens
gggaccactcagcacagagtgggccacatggtggatgcccagcaggccacccggggtccccacatccctccgcctgtctcactgccacgtggacaaatcagccaccagccagtccaagaactcctaaggcagtggttcccagcaggtgactctgcccctccaggggacactgggcgatgtaygcagcatctgtggttgccacgacttgcagatatctaggcatggagtgggtggaggccgggtacgctgctcagtgccctgcagtgccccaacacccccaccccaagaacaatccagcctgatgtccacagtgccacggctgggccagagcacacccagggctggcgtcgccgctcctgccctctggtcttcctggctctccaaagctcaacgcaagtgagcatcacccagaagctggttacaagggcagaactcacccccacccacatgcccctccaggacccacat

SEQ ID NO: 471195 - DNA, 468 bp, Homo sapiens
gggaccactcagcacagagtgggccacatggtggatgcccagcaggccacccggggtccccacatccctccgcctgtctcactgccacgtggacaaatcagccaccagccagtccaagaactcctaaggcagtggttcccagcaggtgactctgcccctccaggggacactgggcgatgtatgcagcatctgtggttgccacgacttgcagakatctaggcatggagtgggtggaggccgggtacgctgctcagtgccctgcagtgccccaacacccccaccccaagaacaatccagcctgatgtccacagtgccacggctgggccagagcacacccagggctggcgtcgccgctcctgccctctggtcttcctggctctccaaagctcaacgcaagtgagcatcacccagaagctggttacaagggcagaactcacccccacccacatgcccctccaggacccacat

SEQ ID NO: 471196 - DNA, 226 bp, Homo sapiens
accacaccctgcttgtgtccctggatgtcatgatgctcatagtgtcatgttgccttggcattcattttttaaggtgtaagtttatttgcctcaaatcagaggcagggcttggtcaccatggcagttttcaatactgtatctggttcaagtggctccagttggtggccagagataaaatcttagaggyatctctcctgcttggtgtgctgggctcacctctctccag

SEQ ID NO: 471197 - DNA, 585 bp, Homo sapiens
ccgccatccagaattttgccttactcattttactttcttcatagttcgacaccttaaatgtatattactaatagtagctttgcatttttggctgatttaaaaattgatataaatgaaataatgctgtagagatgctttttggtattaagtggatatactgttattcttaaagatgtttgaaatgaatatacctttctaaatatctttttaaaataatacattaaatgatactgctttagaattcatgaactgcatctcatgagaatatgtagagatgacgtgggcaggtaaagtaaaacttcaggttgaatatcctatgataatttaaaaatgacaaaatagtgtggtgaataatagagcttgagcactttaaggcaccrtagggaccccttcaatgtaatgatgacagtgctgaggtgcagagaagttaggtaatcagcccaagccactactctaaggacagaccctatctacttttcctaatttgtcagaagactgcctatgatactactaataaaaagtcctatgaaattggtattgtcattattttacaaataaaataatcttcaatttttgtttcctcta

SEQ ID NO: 471198 - DNA, 505 bp, Homo sapiens
ctgcagcctaaaagatctgagctggggcctgctgtggatttcaagaggtccccatccttaataaacagtgttgaccccacatggtagctgagatggatttctccaaccagcttcccaatccaccaaccttagatatgcccacctcatgatgttctcatttgtgcagagataaatgccatagtgtttaacccttcaatctgttctgttcattgtgtgggactgattgagaaaagaagggctttgctagcagggaccaccaactttatgtgcctcagagtggacagcaggatggtagagagtagctctaagtctagtttggcctgttttgcaatgctacgcaacgtctcttagggaaaactgtagggcattgtgagactgatcttgtgacctgratgtcaggatctctgtgagccctaagctcaccctcatgagggagtagttggtgtgacaacctccagtgcttctagaaacagcataagttgagtccctttttcccagaggatgt

SEQ ID NO: 471199 - DNA, 575 bp, Homo sapiens
atgtacctcctgcaggctccctagcgtctggggtccactgtggggcggcctgtggcaggcccaccaggaaccatgcttgcacaggcaaagcaccttgcttgtggttgtgtggggggctccctcaggtgtgggagatgtgggccccattctcccaggagccatggctggtgacatgcagtcaggtccatcctgacgggcactggagtgcgggggacccaatggggacatgagggatccagcacygtggaccagggccaggttcatttggttcgctcaggaaacatgtacacagcgccttctgcataggggctagggatgcaggtgggcagggcagccacagcccctgcgctcaggaagctggcgaggcaggctgcagacgggcactgccacacctcactgaggagggaatggcagagccaccctcaaagggcctgtgctgtgggggtgctgggcgcttcctgaacgccgggctcttggatttctgcagtgggggttctccgggcgtttgggaaggggaaggacctgatggaaggggtagtttatatttaactctggtgctgaagcaagggtcgcac

SEQ ID NO: 471200 - DNA, 575 bp, Homo sapiens
atgtacctcctgcaggctccctagcgtctggggtccactgtggggcggcctgtggcaggcccaccaggaaccatgcttgcacaggcaaagcaccttgcttgtggttgtgtggggggctccctcaggtgtgggagatgtgggccccattctcccaggagccatggctggtgacatgcagtcaggtccatcctgacgggcactggagtgcgggggacccaatggggacatgagggatccagcactgtggaccagggccaggttcattyggttcgctcaggaaacatgtacacagcgccttctgcataggggctagggatgcaggtgggcagggcagccacagcccctgcgctcaggaagctggcgaggcaggctgcagacgggcactgccacacctcactgaggagggaatggcagagccaccctcaaagggcctgtgctgtgggggtgctgggcgcttcctgaacgccgggctcttggatttctgcagtgggggttctccgggcgtttgggaaggggaaggacctgatggaaggggtagtttatatttaactctggtgctgaagcaagggtcgcac

SEQ ID NO: 471201 - DNA, 590 bp, Homo sapiens
gagtgtacctgaggatgtacctcctgcaggctccctagcgtctggggtccactgtggggcggcctgtggcaggcccaccaggaaccatgcttgcacaggcaaagcaccttgcttgtggttgtgtggggggctccctcaggtgtgggagatgtgggccccattctcccaggagccatggctggtgacatgcagtcaggtccatcctgacgggcactggagtgcgggggacccaatggggacatgagggatccagcactgtggaccagggccaggttcatttggttcgctcaggaaacatgtacacagcgccttctgcataggggctagggatgcaggtgggcagggcagccacagcccctgcgctcaggaagctggcgaggcaggctgcagaygggcactgccacacctcactgaggagggaatggcagagccaccctcaaagggcctgtgctgtgggggtgctgggcgcttcctgaacgccgggctcttggatttctgcagtgggggttctccgggcgtttgggaaggggaaggacctgatggaaggggtagtttatatttaactctggtgctgaagcaagggtcgcaca

SEQ ID NO: 471202 - DNA, 513 bp, Homo sapiens
ctggctctcagaagcttctttctgagtcctgcctgtggcctgggctgccctgggctggccagcacggggcagtgggggcacactctggagggagccaggggcgagtcacttccctctcccggcctcagtttccccatcggtcacgtgggaaggctgtccctccccctgtaggattgtggaaggattaaatgagctgaggccagtgcggcagacagcggggagggagccctcttgtcccctgtggctgcccttcctgctggctgctttgcaccgaaaagctgcggagtaaccctgggcggtggtgctccctggatggcgtccacatggggaccccaaggcctgggaggctccaggagggacggtgctggcccaggtttctgtccctgtctgacctcggagttggtgttctgggtaccgcacygtccggtggcccaggctccgttttctcttctgtcaaactgtgtggtcaccctgatgtttcaggggccctgcagggacggagtggggtggggg

SEQ ID NO: 471203 - DNA, 513 bp, Homo sapiens
ctggctctcagaagcttctttctgagtcctgcctgtggcctgggctgccctgggctggccagcacggggcagtgggggcacactctggagggagccaggggcgagtcacttccctctcccggcctcagtttccccatcggtcacgtgggaaggctgtccctccccctgtaggattgtggaaggattaaatgagctgaggccagtgcggcagacagcggggagggagccctcttgtcccctgtggctgcccttcctgctggctgctttgcaccgaaaagctgcggagtaaccctgggcggtggtgctccctggatggcgtccacatggggaccccaaggcctgggaggctccaggagggacggtgctggcccaggtttctgtccctgtctgacctcggagttggtgttctgggtaccgcaccgtccggyggcccaggctccgttttctcttctgtcaaactgtgtggtcaccctgatgtttcaggggccctgcagggacggagtggggtggggg

SEQ ID NO: 471204 - DNA, 511 bp, Homo sapiens
caggccccaccacaagtcagcagtacagctggcctgtccctcagcatgcccctgcacacctgcggccactgtggcctgtccctcagcgtgcccctgcacacctgccrccactgtggcctgtccctcagcgtgcccctgcacacctgcggccactgtgccctgtccctcagcgtgcccctgcacacctgcagacactgtgacacatcactgcagacgcagtagttcagatgacacggctgtatcagcttctggttctggggtcagagtccaaacagtccacagggctccattccttctggaggctctgggggacaactcgtttcctgcctttcccagtgtccagaggcacctgtgtgccttgcctcggggccccttcctccccattcacagccacagcgcagcctctctgactctcagcctcccgcctcctctcatgaggtcacccaggatcacctgccattttaagatcctcaagcccacctgcacatcccttttctgccatgaggggaca

SEQ ID NO: 471205 - DNA, 511 bp, Homo sapiens
caggccccaccacaagtcagcagtacagctggcctgtccctcagcatgcccctgcacacctgcggccactgtggcctgtccctcagcgtgcccctgcacacctgccgccactgtggcctgtccctcagcgtgcccctgcacacctgcggccactgtgccctgtccctcagcgtgcccctgcacacctgcagacactgtgacacatcactgcagacgcagtagttcagatgacacggctgtatcagcttctggttctggggtcagagtccaaacagtccacagggctccattccttctggaggctctgggggacaactcgtttcctgcctttcccagtgtccagaggcacctgtgtsccttgcctcggggccccttcctccccattcacagccacagcgcagcctctctgactctcagcctcccgcctcctctcatgaggtcacccaggatcacctgccattttaagatcctcaagcccacctgcacatcccttttctgccatgaggggaca

SEQ ID NO: 471206 - DNA, 561 bp, Homo sapiens
agtcccagggctggagaaaaactcaccagccagcccttcctggaaccccatgtgcaaggaaactagcttacttttcagcaggagcctttgagtctcaaattcaagtgagttagccctggtcactgcaaccccagcacwgccagagggaactcggcttggagggagggatgcctcttccactctccagcacactgcaaacccccattcacagcacaggatgaaggcctcactccggagctcagggagatggcagtgtcctgaatgagatcacaggacaggacaaagagaaagaatgtgggtccagctccctttcccattgggaagtgtctttgcttcccaactagaatctgtaggctgcctggagctcccctccccatcactccctggcaccagccatgctcacttcatggggatacgaaatgtctcagtggtgtgcaccttagtttctagcaccgttaaggacccagatcaaatcccttttcctccatgaagctaggctatgggaggcctctctgagctccatttggacttgctaaggtgtctcatgctgcctcaaccacc

SEQ ID NO: 471207 - DNA, 561 bp, Homo sapiens
agtcccagggctggagaaaaactcaccagccagcccttcctggaaccccatgtgcaaggaaactagcttacttttcagcaggagcctttgagtctcaaattcaagtgagttagccctggtcactgcaaccccagcactgccagagggaactcggcttggagggagggatgcctcttccactctccagcacactgcaaacccccattcacagcacaggatgaaggcctcactccggagctcagggrgatggcagtgtcctgaatgagatcacaggacaggacaaagagaaagaatgtgggtccagctccctttcccattgggaagtgtctttgcttcccaactagaatctgtaggctgcctggagctcccctccccatcactccctggcaccagccatgctcacttcatggggatacgaaatgtctcagtggtgtgcaccttagtttctagcaccgttaaggacccagatcaaatcccttttcctccatgaagctaggctatgggaggcctctctgagctccatttggacttgctaaggtgtctcatgctgcctcaaccacc

SEQ ID NO: 471208 - DNA, 541 bp, Homo sapiens
ccagcctcaaccacagacatcctgaaaataaagaaacttactcgctgtctggtataatcaagaaccccaccccatcacyccttcaggacaaatatctgaaccccacttccaggaagttttaaggccatggcagaacaaaaccaccaccatagtcctgctaagtcagtgagtgcagctgagctcacaccacacctgagagacctgaagtcctgttctttttggaagcatgacttggagggatgccttggttgtccctgttgggggttcagagggtcctgcgtgtcacccgtactgagagagtgaggcctttcctctttggaggaccctccttgacttggaggaagcctcagcagaaaaattgccaagagtgaagcttttcactcagctcaagttttcaagagcggccactcaccccacattcaggagatgtagcagagagagtggcactgaccgaagtctcactcagctaagtggggcctcaagggggccaagagacacttacattctggaaaggcacagaccaaagggccaggctgggcca

SEQ ID NO: 471209 - DNA, 541 bp, Homo sapiens
ccagcctcaaccacagacatcctgaaaataaagaaacttactcgctgtctggtataatcaagaaccccaccccatcaccccttcaggacaaatatctgaaccccacttccaggaagttttaaggccatggcagaacaaaaccaccaccatagwcctgctaagtcagtgagtgcagctgagctcacaccacacctgagagacctgaagtcctgttctttttggaagcatgacttggagggatgccttggttgtccctgttgggggttcagagggtcctgcgtgtcacccgtactgagagagtgaggcctttcctctttggaggaccctccttgacttggaggaagcctcagcagaaaaattgccaagagtgaagcttttcactcagctcaagttttcaagagcggccactcaccccacattcaggagatgtagcagagagagtggcactgaccgaagtctcactcagctaagtggggcctcaagggggccaagagacacttacattctggaaaggcacagaccaaagggccaggctgggcca

SEQ ID NO: 471210 - DNA, 629 bp, Homo sapiens
ttcctgctccccgaatacagaacctcctacctcaccacggcccagttgggctttttctagaagacagcggaggtttggaggtcctactctcccacctggcctggcagaaatcccagaacagaactacagaatgcaaytggggcagggagtggggagaaaatccagcactgcttcctttttcaaatcaattatggccagactgactcatcttctctcatagaccagaaagtcccacatcttgttgtttcttaatcatatggaaacctaaatatagacatatctgcagaaggacaagctgagaaaaccagtatccttgttctcccaggggaaagctcgattctcactcttttctcctgggttttagttttgggactgtgttcccagtagtgcacagagcatgcgcctgttggggcaatggcagcaactcagacctacttccaggtctgctgctgcgcctgggtccccatcacataccgcttgatcttgcctctggaaagacctccatcttccatcccaccgtgagagcaatatgatgagaaggaagccaggcacctcagtcacatctcagcagagggcctttgtgaatggaaccctcactgatgtctggccttgagcagacacccaaggct

SEQ ID NO: 471211 - DNA, 629 bp, Homo sapiens
ttcctgctccccgaatacagaacctcctacctcaccacggcccagttgggctttttctagaagacagcggaggtttggaggtcctactctcccacctggcctggcagaaatcccagaacagaactacagaatgcaattggggcagggagtggggagaaaatccagcactgcttcctttttcaaatcaattatggccagactgactcatcttctctcatagaccagaaagtcccacatcttgttgtttcttaatcatatggaaacctaaatatagacatatctgcagaaggacaagctgagaaaaccagtatccttgttctcccaggggaaagctcgattctcactcttttctcctgggttttagttttgggactgtgtycccagtagtgcacagagcatgcgcctgttggggcaatggcagcaactcagacctacttccaggtctgctgctgcgcctgggtccccatcacataccgcttgatcttgcctctggaaagacctccatcttccatcccaccgtgagagcaatatgatgagaaggaagccaggcacctcagtcacatctcagcagagggcctttgtgaatggaaccctcactgatgtctggccttgagcagacacccaaggct

SEQ ID NO: 471212 - DNA, 629 bp, Homo sapiens
ttcctgctccccgaatacagaacctcctacctcaccacggcccagttgggctttttctagaagacagcggaggtttggaggtcctactctcccacctggcctggcagaaatcccagaacagaactacagaatgcaattggggcagggagtggggagaaaatccagcactgcttcctttttcaaatcaattatggccagactgactcatcttctctcatagaccagaaagtcccacatcttgttgtttcttaatcatatggaaacctaaatatagacatatctgcagaaggacaagctgagaaaaccagtatccttgttctcccaggggaaagctcgattctcactcttttctcctgggttttagttttgggactgtgttcccagtagtgcacagagcatgcgcctgttggggcaatggcagcaactcagacctacttccaggtctgctgctgcgcctgggtccccatcacataccgcttgatcttgcctctggaaagacctccatcttccatcccaccrtgagagcaatatgatgagaaggaagccaggcacctcagtcacatctcagcagagggcctttgtgaatggaaccctcactgatgtctggccttgagcagacacccaaggct

SEQ ID NO: 471213 - DNA, 645 bp, Homo sapiens
ccttcctgctccccgaatacagaacctcctacctcaccacggcccagttgggctttttctagaagacagcggaggtttggaggtcctactctcccacctggcctggcagaaatcccagaacagaactacagaatgcaattggggcagggagtggggagaaaatccagcactgcttcctttttcaaatcaattatggccagactgactcatcttctctcatagaccagaaagtcccacatcttgttgtttcttaatcatatggaaacctaaatatagacatatctgcagaaggacaagctgagaaaaccagtatccttgttctcccaggggaaagctcgattctcactcttttctcctgggttttagttttgggactgtgttcccagtagtgcacagagcatgcgcctgttggggcaatggcagcaactcagacctacttccaggtctgctgctgcgcctgggtccccatcacataccgcttgatcttgcctctggaaagacctccatcttccatcccaccgtgagagcartatgatgagaaggaagccaggcacctcagtcacatctcagcagagggcctttgtgaatggaaccctcactgatgtctggccttgagcagacacccaaggctgcaggctccagaga

SEQ ID NO: 471214 - DNA, 293 bp, Homo sapiens
actgaaaatgttgttgaaaatgaagacagttaattttcctttgagtgcagccttggcagaattttttttgatgtttatggacactcttctatttattgtcatttttcaatagtttgcaactgaaattctgacctccttttgagttattaaattgctcaatttttctgaagtgaaagaattatatattacaagtgtaatgtcaatatgtgaatttctacaaagcytgcctgcctaaggacaggtggcctgggtaaagagtcaaattggtagaaccaacaaagaataataaaaag

SEQ ID NO: 471215 - DNA, 293 bp, Homo sapiens
actgaaaatgttgttgaaaatgaagacagttaattttcctttgagtgcagccttggcagaattttttttgatgtttatggacactcttctatttattgtcatttttcaatagtttgcaactgaaattctgacctccttttgagttattaaattgctcaatttttctgaagtgaaagaattatatattacaagtgtaatgtcaatatgtgaatttctacaaagcttgcctgyctaaggacaggtggcctgggtaaagagtcaaattggtagaaccaacaaagaataataaaaag

SEQ ID NO: 471216 - DNA, 586 bp, Homo sapiens
gctggttttcattatgcatcagattatgatacacaacaaaaagaaaatggtcaaaatgaatacaaagggagttctgctaatactctagtttgttcttgggggtgtcaaggtgaagaatccatactgttctgtagaccactgtaaacttaatccatttcatcatatacaggagtaaaattcagcagtattttgttaatctttgctgcccttatttactgtgggagaggcgctttggtttttcctcttcttcctttggtatagcactaatgtattttatatgtctttaatctcagttccagttctgtcaatatttgagcttatcttaaaccgaagaactccaaaggagagtcaaagaaagtaaattctcaccccggaaggcaaatracaattatttcattaaacattcaaatcacaaagaacaccttggaccagttcttgatataaataagaggctgcagacttttccaaatccctgcccgtgggatgaacactttaaaggtcccaagatttctaataatggggctaaatttcccaaaatgtgtttttctgctaaaaaatccagtaacaaggaactgtacaaattcta

SEQ ID NO: 471217 - DNA, 586 bp, Homo sapiens
gctggttttcattatgcatcagattatgatacacaacaaaaagaaaatggtcaaaatgaatacaaagggagttctgctaatactctagtttgttcttgggggtgtcaaggtgaagaatccatactgttctgtagaccactgtaaacttaatccatttcatcatatacaggagtaaaattcagcagtattttgttaatctttgctgcccttatttactgtgggagaggcgctttggtttttcctcttcttcctttggtatagcactaatgtattttatatgtctttaatctcagttccagttctgtcaatatttgagcttatcttaaaccgaagaactccaaaggagagtcaaagaaagtaaattctcaccccggaaggcaaataacaattatttcattaaacattcaaatcacaaagaacaccttggaccagttcttgatataaataagaggctgcagacttttccaaatccctgcccgtgkgatgaacactttaaaggtcccaagatttctaataatggggctaaatttcccaaaatgtgtttttctgctaaaaaatccagtaacaaggaactgtacaaattcta

SEQ ID NO: 471218 - DNA, 570 bp, Homo sapiens
ccacttatttatctacgaatatttattaaccatgtataatattccaagctctgtgctgggtgctaggagacaatggtgagtaaaagagggaaggcttttctactcatgaagtttacactcaagataaaacctcctaaagaagtaaagagacctactatttgatagcacaacacggtgactatagtcaagaataacttaattctaygttaaaaaaaaacttgagtgtaactggattgtttacaactcaaaggataaatgcttaaaaggatggataccctattctccatgatgtgcttatttcactttttatgcctgtatcaaaacatctcatgtaccccgtaaatagatatacctactatgcaaccacaaaatttaaaaataaaaaaagcaaagagaacccatgatgccagactgaaataaaaacagtaaagcagaggatatttttaaattgctctaagatttctaacataaaatagtaggaaaagcgtggcttcatttaaatgaaggaattgggaaataataatattatgataagaaatacattccccccagtttgggtaagacggggtt

SEQ ID NO: 471219 - DNA, 616 bp, Homo sapiens
gcatccaacagtgctctcttttattggttctagttctggataaaattkagttacctttggcagatctagcattgctgcaataggaaggaaaggagagaggaccagaaaagattccaagtgcaaaatgtgcccttaggtgtaggcccaaggtggctatgaatcctatccctgaagtcatggaaattactaagatagtcccctccttttattaaaaaaaaagataatttcttcaaacaactccaaactgtatacacattttataatgatgatttatttcaaaatcttaaatactgactgaatattcaagtagggaattaagtcctatctttgacattttctttatgtgttatctttggtgatgctaagtgttcgatttcaatttggccagtttcaataaactttctagtcaattttgggacacatgtgattcaaagttgtactttaaaatagtaaaccttgtaggcaggtataaaacatttaaccatctaatttacttaatcctattattgttatttcatgtggttagtgttcagtaacacttagaacattttttaaaaatgaattgattatacaattatttcatatattatgtacgtgagcccagaagttctcatca

SEQ ID NO: 471220 - DNA, 616 bp, Homo sapiens
gcatccaacagtgctctcttttattggttctagttctggataaaatttagttacctttggcagatctagcattgctgcaataggaaggaaaggagagaggaccagaaaagattccaagtgcaaaatgtgcccttaggtgtaggcccaaggtggctatgaatcctatccctgaagtcatggaaattactaagatagtcccctccttttattaaaaaaaaagataatttcttcaaacaactccaaactgtatacacattttataatgatgatttatttcaaaatcttaaatactgactgaatattcaagtagggaattaagtcctatctttgacattttctttatgtgttatctttggtgatgctaagtgttcgatttcaatttggccagtttcaataaactttctagtcaattttgggacacatgtgattcaaagttgtactttaaaatagtaaaccttgtaggcaggtataaaacatttaaccatctaatttacttaatcctattattgttatttcatgtggttagtgttcagtaacacttagaacattttttaaaaatgaattgattatayaattatttcatatattatgtacgtgagcccagaagttctcatca

SEQ ID NO: 471221 - DNA, 537 bp, Homo sapiens
caatatggtcaaataaagcaaaacaaaacttttgaattttacaatagaaatttatgtgatcgaactatgtatgacctataaaaaaattcactttatacaggatgatattttatccattcatgaatgggcatttcttgtaaattcagtcaatattcacacattcagcaaatgttcattgagcacgtactatgagctaccattctgggttatgggatacattagtgaaaacaaatgccaaagatttacatcctcatgaaaataaccaatgaccatgaacaagcaaggtatatcccaataatttaaactagacttatagtaaaaacttagtatcacaygtcatatgaataagtaaaaagaaaaatctctctatatatgtctaaggtaattaatactttgaaaaacctacttgacatatggaataataaaatagattcatatattacaaatacatacatacatatatcacacatatgagacatacacacattattattttttccttaagataattccctgaagtctatttgtcttgggtca

SEQ ID NO: 471222 - DNA, 566 bp, Homo sapiens
tgtccttggctgttaggatatttcgtgctttgtcacgaagcccttggtgtttgtatatctcttgcttgtagaattagctcaattgctcgtggtaaggtggagacagataaaaacattcaagcacccgaggtggcarggaaagggctggatcgggacgcctcatcagtgggaaagtgggccccgccacgttgcccccttaaaaacatgaggatgtcactcaaaaatctggttcctgtactaagaacagctaacatttaccatgtgctgagctttgctctaaacactttgtaagcaatatttcgttcaatgctcagaatgattcaagtcggtgcttaccatgatttccccattttgcatatgaagaaactgaggcattcagagttcagtaaccaggatttgaactcagagggagcctgattccaaagctcaagactctgcatgcagggctatttatagggttatgactttcacaccgtgtaagcagggagaagtagaaagagaagaactataaatggctcgttgatgctggagatgaaatggcatgcttcttttaaagtctgcaacct

SEQ ID NO: 471223 - DNA, 564 bp, Homo sapiens
tccttggctgttaggatatttcgtgctttgtcacgaagcccttggtgtttgtatatctcttgcttgtagaattagctcaattgctcgtggtaaggtggagacagataaaaacattcaagcacccgaggtggcaaggaaagggctggatcgggacgcctcaycagtgggaaagtgggccccgccacgttgcccccttaaaaacatgaggatgtcactcaaaaatctggttcctgtactaagaacagctaacatttaccatgtgctgagctttgctctaaacactttgtaagcaatatttcgttcaatgctcagaatgattcaagtcggtgcttaccatgatttccccattttgcatatgaagaaactgaggcattcagagttcagtaaccaggatttgaactcagagggagcctgattccaaagctcaagactctgcatgcagggctatttatagggttatgactttcacaccgtgtaagcagggagaagtagaaagagaagaactataaatggctcgttgatgctggagatgaaatggcatgcttcttttaaagtctgcaacct

SEQ ID NO: 471224 - DNA, 564 bp, Homo sapiens
tccttggctgttaggatatttcgtgctttgtcacgaagcccttggtgtttgtatatctcttgcttgtagaattagctcaattgctcgtggtaaggtggagacagataaaaacattcaagcacccgaggtggcaaggaaagggctggatcgggacgcctcatcagtgggaaagtgggccccgccacgttgcccccttaaaaacatgaggatgtcactcaaaaatctggttcctgtactaagaacagctaacatttaccatgtgctgagctttgctctaaacactttgtaagcaatatttcgttcaatgctcagaatgattcaagtyggtgcttaccatgatttccccattttgcatatgaagaaactgaggcattcagagttcagtaaccaggatttgaactcagagggagcctgattccaaagctcaagactctgcatgcagggctatttatagggttatgactttcacaccgtgtaagcagggagaagtagaaagagaagaactataaatggctcgttgatgctggagatgaaatggcatgcttcttttaaagtctgcaacct

SEQ ID NO: 471225 - DNA, 503 bp, Homo sapiens
ttttttgctaaaattagctagagtctatttctgctgctgcayccagagaaccctaactgattatgggggaaccagcaaatttcagctatgtgtcatacagaccaagtctcaaaatgttatgtctttaaaattagtagcaatggcctaaaaggctattagcatatcattttccaatggcagactagtttatcctagaaaatgagatctgacatcacgtcccttccagaacattaaagataagagatttctcacatttaaaaccaggagtcaaggcaactggaaacatatttgtacttagactttttagggccccaaagttaaaataaaataccattctaagaaattctgactacagttgtctactttgagccctggaagctttttttttctctctctcttcaataaaatacacgtttattttaagaaatttggaagttaaaaaaaagcataagcagcagaaatcaaatcactcataatcctgcccagagataacattttatgct

SEQ ID NO: 471226 - DNA, 503 bp, Homo sapiens
ttgctaacccagtaatcggtgggttagtacactctgttatctctcacatatatacagcagaacaggcagtaaggcctgggcttccataaaactctaatgaaaaactttgctctgagacccattcaatgtgcacagcgctctttgggggacgagtttgggtccgcccagccctgctgggctaacaggaagcccatggcagggcctgtgttggtctggcaggtstaactcacagtaagggaaatagaagggaaggaacaaagcagtccaaagccaaatttggaattggttctgattttcctctaatgtcctattgattgggtcacggctcttagaaggcctactacaaggcagggcaatgtctcagagataccttcaaggaaaagatcctcactgactttggcagctttggcccagacaaaaatgtctgcagcaccagtgctcctagaggctgctgcagcctcagcctccagttcccaggctccccaccactggctaatgcctag

SEQ ID NO: 471227 - DNA, 503 bp, Homo sapiens
ttgctaacccagtaatcggtgggttagtacactctgttatctctcacatatatacagcagaacaggcagtaaggcctgggcttccataaaactctaatgaaaaactttgctctgagacccattcaatgtgcacagcgctctttgggggacgagtttgggtccgcccagccctgctgggctaacaggaagcccatggcagggcctgtgttggtctggcaggtctwactcacagtaagggaaatagaagggaaggaacaaagcagtccaaagccaaatttggaattggttctgattttcctctaatgtcctattgattgggtcacggctcttagaaggcctactacaaggcagggcaatgtctcagagataccttcaaggaaaagatcctcactgactttggcagctttggcccagacaaaaatgtctgcagcaccagtgctcctagaggctgctgcagcctcagcctccagttcccaggctccccaccactggctaatgcctag

SEQ ID NO: 471228 - DNA, 481 bp, Homo sapiens
taccaagaatctttcaaaaacatgcgctcaccacatggcagctaattctactggaaacagcgggcgagactaggaaataattcacacaatccccagcctagccctctcttaaggcagtataagcctcagggtcatagctgtgctgaagagaaatcaatatcacatggtgtagtgtgtgcgtcttatcccaagcttcccaaagcaattactacaggagagtgcacatgtgcacacacatgcacacacacaaaacctgtgccctttgcaaactacctggtttcttgtctgttttkcaagaggaagaaagggtgctagattggatctttgttttcctgacattttcttcttggtaaataccccgtggctcataaatatgacaccatggcttaaaacagaccctgaggaaaaaaagggaagagtagtctgagccagaagaggcgaatgctaacactggtgatacctcactgacttccctctaatg

SEQ ID NO: 471229 - DNA, 587 bp, Homo sapiens
cagaaaaagctcagccccattcttcatctcattacaaactctaaacctcattctttgctttcaatgaggccagacagcccaggcataatggacataataaaaggayagcgccataatctatgcacataggtagctctatgagtggtttatacatgaagcctcaatgcagttatcttccactgcctgtttctgtatctgtttctccctccttcaacacataagtaacatcatatccaaaatgaagatagttagaattgaggcatattaaataagagcctctaggcatgctcaacaaatgtctgttgaatgaattaattgaatgagggaatgagtgaataaaagcagtgttatcaagagcaagtatgcaagatgctggggtaattttctgcaatagtctctatgatatatatgctgaatggggcacaaatgcttaatatatgttagtcatcatcatcatcaacagtgcctggtattttcatttagaaatgactctattaccattaaagtctagatgtccacaattaccattattatttaacgttctgggagttccagccaatgcaatcagacaagcaataatagcagct

SEQ ID NO: 471230 - DNA, 498 bp, Homo sapiens
agccagtacaacagggagctctgcagttggagtaactcttcagagatgcccgcagttgaggtaagagggctgagcttttgtaatctcagggtaaagcagttccctgtagccatggacaattctcaacgatgaccatgactgtgagccctcacagctatgaacgatattcctaggagctaggaaacgggtgtgtgggccttgaaaagggcatctggtacagcccaccatgatctaacacaatcctatattctggttaactggctttccagttactggcctggaatgagtatgagctataaagacaaattttgtcaaggtttgattaagcctgtgtgactgcgtgactcctttgttgtaagtacagaatttaaaacagcattaagaggaraaacagtctgataggcaggggtagacccagtcctttgacaagagatatttccaaggccaatacagaaagaggacagcagacttctaaaattatcagattcaaaagagtgt

SEQ ID NO: 471231 - DNA, 538 bp, Homo sapiens
tgattcaccagtctccggacaggcagcagcagcagcaggggcgcctgtgaacccgagtataataaaattctagtataacagtgtgttgaatgtttattttggcgatgctgccctctcaaatccccctttcaactaatattttaaaatgtggaaagacattaaaatggagataaattcaaggytctttctgaaagtgagtgtctcttatgctgagaattctgaactctgtcctctctgctccattcaaattctcttcattttcataattagcatggcaggaaagttcaagctactacctgccttttggcaactagcaatttaactctgaagtaacagagaaaatggaggtcaaatacccttttataaccactcttttttcattgctgacatttataattggtcctacggaaaaaacaatggaattaactggaatttatcattggtccttcataaagtgtaatataactaagagcttaggttctggaatcaagcagcgattcaacggaatccccagccagcacattactggagcaaagcg

SEQ ID NO: 471232 - DNA, 197 bp, Homo sapiens
ctgaaagggagaaatggtgccataacttcttcttgtctcagatggtaccgtggatgatttaattcattcttaatttttaacgggcatgtcaatcacctgaggacttattaaaatgcggatttggctacagtaggtctggagtggtacctgagcatctscatttctaacaagctcccagaaggtgtggacactgtgga

SEQ ID NO: 471233 - DNA, 628 bp, Homo sapiens
tctagctacattgaaaatgtggaggaaaaagaactggctaaagctatgccagagaaaacaaaacaaaacaaaacaagaaacagaaacaaaaaagccagtgttccttttctgagaattakatagaccacctctatcatcactcaataatcagagttgattcaacattcttgagcagtgagaataaggcaattgtcttaagtactaatgagcatttgaatctaaagacttcatctagaaatgagtttagggaattttctcagttgcttaatggccagtcaattctatgcaacacccattaagtgatgtcaaggctccaaagaaaagacttaatatcaagctcataaatgccttttgggtttctaggtcagatgaagagttgaaagcacgtgcaccaatcagagcccctcctttcttcatgatgtctgagtgtgaaggttgtgaacaggccactgtaaatttgtgtaccatttctttgtcttagttagaaatttctttccatgaagactgggttgacatccttttatactctacttaaaaaaaaaacaaaaggaaatttcctaaatatgtagcttattgctctgaaaaataacatttaagtatttgcaaaattacctggggtgtaatgtca

SEQ ID NO: 471234 - DNA, 660 bp, Homo sapiens
taaaaaatggcttctggagagaacttttagatctctccatggttttgattctgattaggaatctagtgctgagacttgacatcgtagtggcttaaacaacagaagcttctttttccttctaaaacaaaagcagtctagcagtaggtagactagagatcacattgtatgagagaagcawcagaagcatggcttctcccatttgatctttctgctctttcatctttatagagtgaggcttccatccttatgctcatttcacacctcacactccaaggggattgtaggagttctagccattgggtcatccctctaggcaggaaatagaagaaagtttgagaaggtgactatctttccctcttttaggagtctttctcaaaaatcccacatacaaatttcaaattacatcttaccagccactcttagcaataagaaagtttgcaaataaagtcttctggctgggcacattgccacgtggattaaatttggggttctattacttagaaagaatgggataatggatattggataagctacttgaagtattaaccacaattagctaatcaggtactcactcccagtggcaggacttccaatataaattcattaaaataacatcctcattgctgtgtgtggtctgggatcattaacaaataattggat

SEQ ID NO: 471235 - DNA, 660 bp, Homo sapiens
taaaaaatggcttctggagagaacttttagatctctccatggttttgattctgattaggaatctagtgctgagacttgacatcgtagtggcttaaacaacagaagcttctttttccttctaaaacaaaagcagtctagcagtaggtagactagagatcacattgtatgagagaagcaacagaagcatggcttctcccatttgatctttctgctctttcatctttatagagtgaggcttccatccttatgctcatttcacacctcacactccaaggggattgtaggagttctagccattgggtcatccctctmggcaggaaatagaagaaagtttgagaaggtgactatctttccctcttttaggagtctttctcaaaaatcccacatacaaatttcaaattacatcttaccagccactcttagcaataagaaagtttgcaaataaagtcttctggctgggcacattgccacgtggattaaatttggggttctattacttagaaagaatgggataatggatattggataagctacttgaagtattaaccacaattagctaatcaggtactcactcccagtggcaggacttccaatataaattcattaaaataacatcctcattgctgtgtgtggtctgggatcattaacaaataattggat

SEQ ID NO: 471236 - DNA, 660 bp, Homo sapiens
taaaaaatggcttctggagagaacttttagatctctccatggttttgattctgattaggaatctagtgctgagacttgacatcgtagtggcttaaacaacagaagcttctttttccttctaaaacaaaagcagtctagcagtaggtagactagagatcacattgtatgagagaagcaacagaagcatggcttctcccatttgatctttctgctctttcatctttatagagtgaggcttccatccttatgctcatttcacacctcacactccaaggggattgtaggagttctagccattgggtcatccctctaggcaggaaatagaagaaagtttgagaaggtgactatctttccctcttttaggagtctttctcaaaaatcccacatacaaatttcaaattacatcttaccagccactcttagcaataagaaagtttgcaaataaagtcttctggctgggcacattgccacgtggattaaatttggggttctaktacttagaaagaatgggataatggatattggataagctacttgaagtattaaccacaattagctaatcaggtactcactcccagtggcaggacttccaatataaattcattaaaataacatcctcattgctgtgtgtggtctgggatcattaacaaataattggat

SEQ ID NO: 471237 - DNA, 629 bp, Homo sapiens
ctgcctcttacagaaacacattacattgctttccagttgttcacaagaaatgtaaaactttaataatatatacatatatataatacataaaatcttaataataacttgactccctaaattccatttattttttcatgtttagtcactgtgctgcaatagttctcaccattttaaatctcattccctacaaaaagataagtaggaatatgtaaatccscacttgagtaacaatgaagcagtttataccaaaagtagtgccaacaacgtataaataatgattcatggccataaagtatgatttttgtaataagacgtaaaagtagaaataatttttctttgttttccctggaaatcctattgttgggcagattatgttaacctagcagttcacttcctagaaaaaccagcctatttcacaccaggcttccttcctttcccctgttgatctatggaggatctgaaaaccagaaaggtaaaggtgaatcatcaatgaccaatggaaataatttttttaaatgtccttttagaattagcacatattgacgtcattacacaaggccaaaacttacatgcactaggtgacttatccttgtatatgtggttcattatcctatagaaaatttttactc

SEQ ID NO: 471238 - DNA, 589 bp, Homo sapiens
tacatgtccatgcatacatacacttgtgtgtctgtgtgtgtaggtaayagtgctatgaaaatctggttaatatctggggttacagttattcttccatggagttttgatacaagtgagatagtctagactctcatactaagatatttcttaaatatgacttcactcttacctaacaagccaaaagaatatttctgagtgttaggcatatggggatttccagttacccactggaccttcatgaacaacaccatgctgaatcttgtagaaggggaaagcaagtatcctaaggcttccacctatgctaatttcccccaaaataccacctgcacctccagtaatcatggctctcttgccgtagggtttggattcttttcccaaaataaaagacacccaacccttcatagaatttttagtcatttcattcctaaagagatgattcatcagtacaaaattaggcaaacatatagcaaaaaatactgttgcaaatacacaaatgctcatatgtgtcattttgagaaccatactgttcatgaaccacttttgaatggcattgttacatgcccttctcgttgtctgcagagcttgtagc

SEQ ID NO: 471239 - DNA, 628 bp, Homo sapiens
ctgccaacttcataattctgggttcctggaggagtagctgaaatctagaagtagggttatgggtgactgtgtggtactctcacctggcaccggaascgaatttcaattgatgtgataaaggtcatgaatttgcacagcagtcatctcaactgaaaatccaatgcaatgatttgtgctgactggcctctggaagatctaacatagagtctcattaaagttctgtttactcagctttaaagtcctttcttacctaagtccatggggtttcaatgttcatatcatggcaacacacaggaaagcaatttatatctaatcattttatccatgcataatatatattatgccatatgatattaatcattttaacaacaataacaacaacagtaacaaaaacaatcaacctcaaaggatgtcatcctggaaaaagcctttagtgcatttagtccaaatttattttttcttagaaaaggaaattgccatccaagagattgtgaaacttgctggattcactcatctggttaatgaccgagaagtggtgtctagatcacaggcctcctaattctaagtttagaggtatttcttccatctcatgtcaccttttcatcacctttgagaaacatgctaattc

SEQ ID NO: 471240 - DNA, 616 bp, Homo sapiens
ggctcaactcttcatgtttcaacaagtctttcacagacacgtcaagagacattstcttaccattacatattaaatctattttcaaagatcacatcaatggaaaaggttgtaaaattagggcaagttgaatagtaacaaagaaatacttacctagctctgtttgtcttaactcttcctcctaatgctttcaggaaatacccagggagtatgtcaggtgaactaaccacaggttttccccactacttgtcatgatgtttcttctattgcacttatttctctctctgactccatcaatgatgtgtttgttactctgtaccctaatttccagtaattctaccacccaacactacccaagagatatatcttcttatgattttccacttcaaacattatctctgctttagctgccatgaatattttgtgatctaatacagggcacattcacttaactttcagttaacctttattctgtattaaagctacaatacaatgaggctttggtttttcgatgtcttataggtattttatcaaactagtattttcattttttactaccactttattaaaaattactcttaccgtatataaacccatagagtcaagaccatatataaaa

SEQ ID NO: 471241 - DNA, 523 bp, Homo sapiens
cagtcctgttcatgtagtaaaatgaatgtatacctttctgtttctttcaccataaacagtactgacacctacccatcaagtttagatacraaacagttagttcaacttaaatattacccctatttcagttgcatctttttaacctgtgaatacaaagagaaatatgtcctctgtgtgtgtgtgtgtgtgtgtgtgtgtgtgtgtgtgtgtgtgtgtgtttaattgctacctgcaaggacccgttttctcttaaagcttttcacgttatttcctagtcaggttgcttttttgtccagtatgttttttggctgaattttgaaccagaagagaggcttcattcttatttttatccatctttaacatttattgctgttgctattgttattctttctcatcagggcaaaaacaaaactttgagttttgaggaaaagggagaatgttgaagtccattaacaagtatttattggcctcttactctatgtagaaatctgaatgaaaacttctacatggatatgagaaaaat

SEQ ID NO: 471242 - DNA, 523 bp, Homo sapiens
cagtcctgttcatgtagtaaaatgaatgtatacctttctgtttctttcaccataaacagtactgacacctacccatcaagtttagatacaaaacagttagttcaacttaaatattacccctatttcagttgcatctttttaacctgtgaatacaaagagaaatatgtcctctgtgtgtgtgtgtgtgtgtgtgtgtgtgtgtgtgtgtgtgtgtgtgtttaattgctacctgcaaggacccgttttctcttaaagcttttcacgttatttcctagtcaggttgcttttttgtccagtatgttttttggctgaaytttgaaccagaagagaggcttcattcttatttttatccatctttaacatttattgctgttgctattgttattctttctcatcagggcaaaaacaaaactttgagttttgaggaaaagggagaatgttgaagtccattaacaagtatttattggcctcttactctatgtagaaatctgaatgaaaacttctacatggatatgagaaaaat

SEQ ID NO: 471243 - DNA, 523 bp, Homo sapiens
cagtcctgttcatgtagtaaaatgaatgtatacctttctgtttctttcaccataaacagtactgacacctacccatcaagtttagatacaaaacagttagttcaacttaaatattacccctatttcagttgcatctttttaacctgtgaatacaaagagaaatatgtcctctgtgtgtgtgtgtgtgtgtgtgtgtgtgtgtgtgtgtgtgtgtgtgtttaattgctacctgcaaggacccgttttctcttaaagcttttcacgttatttcctagtcaggttgcttttttgtccagtatgttttttggctgaattttgaaccagaagagaggcttcattcttatttttatccatctttaacatttattgctgttgctattgttattctttctcatcagggcaaaaacaaaactttgagttttgaggaaaagggagaatgttgaagtccattaacaagtatttattggcctcttactmtatgtagaaatctgaatgaaaacttctacatggatatgagaaaaat

SEQ ID NO: 471244 - DNA, 380 bp, Homo sapiens
tccctcaaatccatcataaagcactggcaaacaatagtgtgtttctcaggtggggattgatgccaactccctgccctttatttctcttaagagtagtgaaarcttttaggttttaggttttgaattgcctatgaaaagggcattggaaatgtaaacataaacgtttttgcagaagcccagttggtccaggaagcctttaatttgctgacactgacactagcctattggtggctgaacctgcagaaagtagatattatcctttaaaatgtcatggtgcagactggctgacagttttttgtcagtcaatccaatcacctaaatcacttctttgtatctgatcctgggaaaaaaaaatagtagtaagcgaattacagaggatg

SEQ ID NO: 471245 - DNA, 380 bp, Homo sapiens
tccctcaaatccatcataaagcactggcaaacaatagtgtgtttctcaggtggggattgatgccaactccctgccctttatttctcttaagagtagtgaaaacttttaggttttaggttttgaattgccyatgaaaagggcattggaaatgtaaacataaacgtttttgcagaagcccagttggtccaggaagcctttaatttgctgacactgacactagcctattggtggctgaacctgcagaaagtagatattatcctttaaaatgtcatggtgcagactggctgacagttttttgtcagtcaatccaatcacctaaatcacttctttgtatctgatcctgggaaaaaaaaatagtagtaagcgaattacagaggatg

SEQ ID NO: 471246 - DNA, 506 bp, Homo sapiens
atgttaaagtaaaaattcttgtttcctttaattattcatttgtttactgttccttggtctacatttttattttcagctaccacctgcctactctccccatcctgcctgtcctccacttctgtcaaatcactgttttgctgtcactgttacatggtataggagtagagtctgtatacagttctatagcacagagtttagcctaggaggtgctttttttgctttctttgctacatttttatacattatatatacacattttatacattatctataaatatatatttaccattactgataatttctaagagtataagycataatttatgttatgctttatatttttcatgctgctgcttcttttgtttcttccttttacaatatgatatcttttttcctagctctgttgtgtgctttgtacactctgtgcaaaaattttacttgctatttttcattttattaggttgatgtaaaagtaatggtaaaaaccacaatttcttttttcctag

SEQ ID NO: 471247 - DNA, 610 bp, Homo sapiens
tctgttacccaagctagagtgcaatggccatagctcactgcagcctccaccaccctggctcaagcaatactcctgcatcagcctctcaagtagctgggaccccaagtgcaggccaccacactcagctactttttgtattttttttagagacagggtctcactatgttgctcaggctggtctcaaactcttgggcccaagtgatcctcctgcctcgacctctcaagcattgggattacaggtgggaaccactacccttggccctctctctgatttctaagatgagtcaaggccattttccatgcttgcttcaagtcttgttcttgatgtagacaggacttgggaatgatttgaccacatttccctttactctttcagcccactgagcaatagctacaccagaagtagcagcaaatgagagcttagatttttcaaggcttattaaagagcaggcctgtgcaagtgctatgcctgcattttccaaactcacagtaaccctrtgagcttaccgatcctcattatgcaaattaggaagctgaggactagacaggagactagcgggtttaagttacttgcctgagactgcacagcagagctacgagtcaaatccag

SEQ ID NO: 471248 - DNA, 435 bp, Homo sapiens
ttggactggcttgggtgatttagttaatgttccctgcacttactcctcttccgtatatacacaaaatgggtaggaagttccccagtagaatwggtaaacagatgtacaacagtcttccaggattattttataataaagtatttgagtagaacccaattctgtggacaatagtagtcttttcatctcttaggacatttaatgagattgccagaaaactacaactcctcccacctctacctgttggtatcacttgattgctgaattacctatataaatagttctcaaatgtgcaccatctaggggcttgttagtaatgcaaatgctggggcctcatcccagacctactgtgttagaaaccttaggggtgaggcccagcaatctgtacattaagccatctaagtgatttttatgtatgctaaagcttgagaaccactg

SEQ ID NO: 471249 - DNA, 614 bp, Homo sapiens
agtacttttcctttgtctcagcctgtacagcactattaacaatcctgtctctatttgaaatgttatatcatgatattttgcattaattttgagctttaaaatatcaccttaaaatagtatttatcttgaatgctactttgttgttgttttttgtgcctctttaacttttacatcctaggcatctgtcttacttgcctcacactagctctggcctaacctagagggaatttcactttcatctatgccaaagcttctttttatttcttcaasaaagaaatgatcactgaaattgaaactgaaattgagacacctctggtttttaaattatcttaagtctagagcaccagttcttatattttttttcgtcaggaggaagagaacacatgatttcagtctacagataaggaaactgagacctaatggctcaaagttaaaactaagtttcttagtgctgcatgggacatactagatcagaagcttctctagatacaaccttgaagaaaataaaattataaagtatgcttcagggaaaaacacctggccaaataatttagattgaaagaatacgtttttgggaagagcaagtacttttgaatgagagagagaacttgaat

SEQ ID NO: 471250 - DNA, 614 bp, Homo sapiens
agtacttttcctttgtctcagcctgtacagcactattaacaatcctgtctctatttgaaatgttatatcatgatattttgcattaattttgagctttaaaatatcaccttaaaatagtatttatcttgaatgctactttgttgttgttttttgtgcctctttaacttttacatcctaggcatctgtcttacttgcctcacactagctctggcctaacctagagggaatttcactttcatctatgccaaagcttctttttatttcttcaacaaagraatgatcactgaaattgaaactgaaattgagacacctctggtttttaaattatcttaagtctagagcaccagttcttatattttttttcgtcaggaggaagagaacacatgatttcagtctacagataaggaaactgagacctaatggctcaaagttaaaactaagtttcttagtgctgcatgggacatactagatcagaagcttctctagatacaaccttgaagaaaataaaattataaagtatgcttcagggaaaaacacctggccaaataatttagattgaaagaatacgtttttgggaagagcaagtacttttgaatgagagagagaacttgaat

SEQ ID NO: 471251 - DNA, 546 bp, Homo sapiens
aacaacaaatggaaatcataagcagattcgtaggggaaaactaaactgattcttaagcagactttatacacaaagttcataagtttctaaayactttctggaattccatcatgctacaactggatttgattctaattttcgcatccaaaggctgacattggcttcatcaagaccgtcaacctcattcaggcatcctgttttattcatacagatattccctggccaaccacattacataagcatcagcaaatgataggataatttaattaacttactttcagttcattcattaacttcatgcctgtccatttacatctacctaaagagattcaggtttcaacctgtagtcaggtaaggacgtttatgtcaaatacatcatctttaacacctttgatgttaaccttgattccaagttatctcttaaagcatctctcttaaggcatcataaaaatctacatctacatctttatggtattctcagttagggttcggatcccaaatcggcagaagaatgacaccagagtcctttcagattgcaaaattgcc

SEQ ID NO: 471252 - DNA, 385 bp, Homo sapiens
gataggataatttaattaacttactttcagttcattcattaacttcatgcctgtccatttacatctacctaaagagattcaggtttcaacytgtagtcaggtaaggacgtttatgtcaaatacatcatctttaacacctttgatgttaaccttgattccaagttatctcttaaagcatctctcttaaggcatcataaaaatctacatctacatctttatggtattctcagttagggttcggatcccaaatcggcagaagaatgacaccagagtcctttcagattgcaaaattgccggtgtgtcaaatacttaactttgaccacagcgagttcacaaaattgttatcacgtcaagtaatcttctagctactgagttgttttttttt

SEQ ID NO: 471253 - DNA, 546 bp, Homo sapiens
aacaacaaatggaaatcataagcagattcgtaggggaaaactaaactgattcttaagcagactttatacacaaagttcataagtttctaaatactttctggaattccatcatgctacaactggatttgattctaattttcgcatccaaaggctgacattggcttcatcaagaccgtcaacctcattcaggcatcctgttttattcatacagatattccctggccaaccacattacataagcatcagcaaatgataggataatttaattaacttactttcagttcattcattaacttcatgcctgtccatttacatctacctaaagagattcaggtttcaacctgtagtcaggtaaggacgtttatgtcaaatacatcatctttaacacctttgatgttaaccttgattccaagttmtctcttaaagcatctctcttaaggcatcataaaaatctacatctacatctttatggtattctcagttagggttcggatcccaaatcggcagaagaatgacaccagagtcctttcagattgcaaaattgcc

SEQ ID NO: 471254 - DNA, 359 bp, Homo sapiens
tctaccatgtattgatggcttactgtttgccaggcactgttcaagacactattcattccttgttatttaatttaatgaatttgttgcttggatttctagtattgaatttggatacccgttttgttcctcaccaattcatccagtgggggaagttgaaatgttctgaacaaagataagaaattcatatagtaacagcttatcatatgctgcaagaaagtgataacatttcacataatctccccctttgtcacaccaaatttcataacgaagacttgtaaccttacagacaaggtaccactgttatattaatcagtccaarttaacaccacttggcaatcatctctgaatgagttaatttt

SEQ ID NO: 471255 - DNA, 647 bp, Homo sapiens
cctggacagcattatgaactaaagaagtatttttaaatgggaaaatattcatcctgagtcatagcttcctctagtggagctatgctgtattacatggatataaagtataaagttcctttgaaaataattcgggtttcttaacaaggctggcaagcaaaatcacctggggcattttcaaaactacagaattcagactccaccctggtcctgcaaaactccactaatctagggagggctctggaatctgtataataggtaactaaactgtagcatacaagctggccattgaaaaccagtaaatcctaacctgcacatgaatatcactttcaattttgtaagaccacttaaaaatttgttttaatagtctgtagtcatttctaaatgtgacagaagaaatttactttgataatttatacaaagtttacttaaattgcaggacctatgttgaaaaaatctttgtgcataaactatatcaatrtcctccttaacaaagcgactggtatatggtagacagtaaatgttgactgagtgattgtttaaacttcatcttgtgtgtatgtaatgattttaagattattacctacttgaaaagattactctaaaatgtacaagaaataatcatggaaagttaattacatgatgcttag

SEQ ID NO: 471256 - DNA, 647 bp, Homo sapiens
cctggacagcattatgaactaaagaagtatttttaaatgggaaaatattcatcctgagtcatagcttcctctagtggagctatgctgtattacatggatataaagtataaagttcctttgaaaataattcgggtttcttaacaaggctggcaagcaaaatcacctggggcattttcaaaactacagaattcagactccaccctggtcctgcaaaactccactaatctagggagggctctggaatctgtataataggtaactaaactgtagcatacaagctggccattgaaaaccagtaaatcctaacctgcacatgaatatcactttcaattttgtaagaccacttaaaaatttgttttaatagtctgtagtcatttctaaatgtgacagaagaaatttactttgataatttatacaaagtttacttaaattgcaggacctatgttgaaaaaatctttgtgcataaactatatcaatatcctccttaacaaagcgactggtatatggtagacagtaaatgttgactgagtgattgtttaaacttcatcttgtgtgtatgtaatgattttaagattattacctacttgaaaagattactctaaaatgtacargaaataatcatggaaagttaattacatgatgcttag

SEQ ID NO: 471257 - DNA, 476 bp, Homo sapiens
ctggagctgggtctcagtcagggcatctgactcaagctcaggctgtgccatttccctgcggaggaygtgccagggagacgttgactccagatccctctcctgcctcctgttgcctggagagcagcctccagaccctgtgctctggccgtgccctctcagcccttatgcaccctcacctccaggcttcacaccagctcttcctggctgcagagctgcccggcacccccagcctggcctctgccatgtccgctcctggtggtggtccctggcccctcgcagccctcagtccacctctcaggattttctggctggcagggcgatggactctgttagtgtttgttgaatgaccgtctggtttggtcgtggtttcatactctgcctgttcagtgacttgctgctcacagatgccagctgtctgtgtcccaaggggactgggtaccgtagggaaaagcctgtcctcactattggaaagactg

SEQ ID NO: 471258 - DNA, 515 bp, Homo sapiens
tgtacaggaagcatggtgctggcatctgctcggcttctggtgaagccgcagggagctttcagtcatggcggaaggtgaagggggaacaggcacgccrcaatgcaaaaacaggaatgagagagcgagagagtgagcgagcgtgagtagtgttgggagggaggtgccacacacttctaaatgaccagatctcatgagaactcactatcatgaagacagacccaagctgtgagggatccactcgaggatccaaacacttcccacggggccccactttcagcactggggattacaattcaacatgaggcatggggcagggacacagatccaaatggttctcacccaccatagtggaagacgattgtctggtgcttgtagcagcctcttcacgcagtctgtgccaagctgagtgccagcgcttgggtggtgggatgtggggtggagctgccgggggaccaccctgggtgctggggatggtattcttatagacaggtagctggaccgttcccaggtctggt

SEQ ID NO: 471259 - DNA, 515 bp, Homo sapiens
tgtacaggaagcatggtgctggcatctgctcggcttctggtgaagccgcagggagctttcagtcatggcggaaggtgaagggggaacaggcacgccgcaatgcaaaaacaggaatgagagagcgagagagtgagcgagcgtgagtagtgttgggagggaggtgccacacacttctaaatgaccagatctcatgagaactcactatcatgaagacagacccaagctgtgagggatccactcgaggatccaaacacttcccacggggccccactttcagcactggggattacaattcaacatgaggcatggggcagggacacagatccaaayggttctcacccaccatagtggaagacgattgtctggtgcttgtagcagcctcttcacgcagtctgtgccaagctgagtgccagcgcttgggtggtgggatgtggggtggagctgccgggggaccaccctgggtgctggggatggtattcttatagacaggtagctggaccgttcccaggtctggt

SEQ ID NO: 471260 - DNA, 400 bp, Homo sapiens
ggaggtggtgaaagcaggacgtgcgtccaggcctgtgggtctccagagctctgtgggatgtgtttgcaggtggctcctgggtccctgygggacacgttgtgtggctgccgtctcggctttggccttgcttctctgcctcagcagagaccctgggtcatggatcctgcctggtgctgttttgcctgtttgaagccccaggcatcctcctcgatgctgacttaaggtagagccggctgagaagtccacagaggggagcccctgagggccgtggatgcagatggagctcttcatgttggggtctgccctggcctcccctgcctcccctctgtgcatcggctttcccagaagtgcattccagcctgggctgtgatcgccgcagtttgttttgaagatcccacct

SEQ ID NO: 471261 - DNA, 137 bp, Homo sapiens
gagcatccacacaaggaaaggctttcwggccactcatcaccaacttagtgacggcacaacaaccacgctccaaccaaagctgggggaactgaaggcccatgtgagaacctgccctcagcccagcagaggcagccagc

SEQ ID NO: 471262 - DNA, 137 bp, Homo sapiens
gagcatccacacaaggaaaggctttcaggccactcatcaccaacttagtgayggcacaacaaccacgctccaaccaaagctgggggaactgaaggcccatgtgagaacctgccctcagcccagcagaggcagccagc

SEQ ID NO: 471263 - DNA, 230 bp, Homo sapiens
aagagaaacaaaccaaccaaccaaacaaaaaaaaaaactctgccaccaacacaaacagagaataaaaaaagaagactcccsagttcattttacaaggttaaaataaaaataaccttgatatcaaaacccaacaaggcaagtgcaagaaaaaatatttacaggccatcattattcaacgtggatcagcaattatttttaagaagtactggccaggtgtggtgctcatgcct

SEQ ID NO: 471264 - DNA, 230 bp, Homo sapiens
aagagaaacaaaccaaccaaccaaacaaaaaaaaaaactctgccaccaacacaaacagagaataaaaaaagaagactccccagttcattttacaaggttaaaataaaaataaccttgatatcaaaacccaacaaggcaagtgcaagaraaaatatttacaggccatcattattcaacgtggatcagcaattatttttaagaagtactggccaggtgtggtgctcatgcct

SEQ ID NO: 471265 - DNA, 230 bp, Homo sapiens
aagagaaacaaaccaaccaaccaaacaaaaaaaaaaactctgccaccaacacaaacagagaataaaaaaagaagactccccagttcattttacaaggttaaaataaaaataaccttgatatcaaaacccaacaaggcaagtgcaagaaaaaatatttacaggccatcattattcaacgtggatcagcaattatttttaagawgtactggccaggtgtggtgctcatgcct

SEQ ID NO: 471266 - DNA, 207 bp, Homo sapiens
tgtgcagttttcaacttgaggttgtcagaatgtaatattacacattatattacacacatctacagaatccaaattgtgatgttcctggagtattggaacaatacctatgactttttgtttctattgatttttaactcttctaataaccacttctttaagaaaagtcatacatyatcactttggtgtatcagaaacaaattccttacg

SEQ ID NO: 471267 - DNA, 458 bp, Homo sapiens
gccacatgtgtctaatttgacttgtactggacacatgatcgaagrtctggtcagtgacgtgtgtctctcctcacagctaatcaggttcacctttatgaggatcttaactagttatgtgggtaggcaattgttcattgctgcagagagtataagctaaaaaattcctaagccccctcaaccgactggacagatcccctcttggccaaggagaccccacagcaaacttaagaactgggttcccagccatgatggaatgggaggcaaaacatgtctccttataccccacccttttgtggtttagacacaacaactcatcagcattcatgttaaagtagggatcatcagactgacaatagaatatcaaattataaacagtacctaaggccatgccatgcaagggttaagtcatgcaggctacacctaaataataaactatgttctaactgccacaagggttt

SEQ ID NO: 471268 - DNA, 640 bp, Homo sapiens
gtgcaaagaccccaaggcaggaatgagcttggttattttgtggctctctattgttcggtacaggataactctcatgaggtgttaaagataagtttctttgtcctaaaaagactccagaaaggaagttgacttttagtgctggtaggggagtgaaggggtctaaatgcaatggtgaacttggggattttaaagacctctgactgcattcctcaggaaagccaaggggcttgtggagttgctggtttgcctctgctatcaggctgtgagcatcctaggaccacccaagtctgtgccatttcagttctgtctcctaaatctatgtctacttgttgaacaatgagctagggttaaagtactaaaccaagaggcagcagaaatggattacaaatgggcttgggctataatcccaaaagacacaatcctgaatgccgtaaatctgatggttgaaacmctgaacatcacaatcctgaaagatcaaaatcccaaaaacatgattcttaaaaaattaatttaaaaaattatttaaaagatatttatcaggccgtgcacagtggctcatgcctgtaatcccagcattttgggaggccaaggcggtggatcatgaggttaggagttggagaccagcctggccaacatggtg

SEQ ID NO: 471269 - DNA, 584 bp, Homo sapiens
agaacaacaggactctatggcaaagactactagaccatggtatcactaggggcaactagctggggaggcaacaggggtattacttggcttataaaaccaaaatagaccaggagcagattatcagaatgctggtgttggctgccaagtggaatataataatcacacatctggttttccaaactgaaccgttctcagatccagaatcgtgtgattgatagagatgctggatccttttgcagaaaatcttataatgcctcaataaatttatagtagtaatttccccaatccttctccaaaagaatctatactgcagaaaataaaatacctgtacagtgtgcattacactatgcactacagagatgaaagtagccaaatatttcaagtgctgttgaatccagagtttgagatgatgctaataccagagaaaccagaacaccatcatgatgccctggttagggtgggtatgcgaaarccaggtgataaatagagtcttggcccacgttgatattatgaatgtccaatgagtctgccaactcacactgtgataatttcatggtctctgagtgcttaattagtttggatgc

SEQ ID NO: 471270 - DNA, 537 bp, Homo sapiens
tcctcctcttgtctcctgttttcagatgctctggtctgaccctttcatggggcaagctccctagtactgtaggtttcatgtggaaaaggtaatgatttattgtgatggtagttgaaaagtaaggctaacctcggccgggcatggtggctcatgcttgtaatcccagcactttgggagggtgagacgggtggatcacctgaggtcaggagttcgagatcagcctggccaacatggtgaaaccctgtctccactaaaaatacaaaaattagccaggcgggtggtgcacgcctgtaatcccagctacttggaaggctgagtcaggagaatcgcttgaacctgggaggcagaggttgcagtgagccaagatcgcagcattgcactcccgcctgggcaacagagccagactccattycaaggaaaaaaaaaaaaaaagtaaggctaacctccatgtgaggttttctcacagacagagccatggtgccattattatctccattccagagtttgaacaaagcacaaggataaagtcaggaggga

SEQ ID NO: 471271 - DNA, 554 bp, Homo sapiens
ctgctttcagcaaccccagcagcactcctctgccccagtgctgcatcattgtwtggctgccaaggccagaccaccattcccctcttctcccagtagcatcagggtcctgagacatacagggaagtactttgtctcctaccccactcagggaaattttgagagtaaacacccatcccacatccctctgccagccattgctggacatgcctgtaggctcttttccacacatcagaagccaggaggaggttgaatcaaatagaaagaacagacacatgtgaccatgcggcctcttcgcctcttcgcagcagtgttattgactaaagcctggctctcttctttttctttagtcctcattccttgagtgagttcagcccctcttacaacttcaaaactaaagagtcactctctaggtgactccagatgggccctctggcttgtattctgacttcaaatgacacatccatttgatgggcttgaaggtggacatgaagaatctgcaggaattcttttcatactctttctaagagtctagttccttggatcaagggaaactc

SEQ ID NO: 471272 - DNA, 610 bp, Homo sapiens
ctgctttcagcaaccccagcagcactcctctgccccagtgctgcatcattgtttggctgccaaggccagaccaccattcccctcttctcccagtagcatcagggtcctgagacatacagggaagtactttgtctcctaccccactcagggaaattttgagagtaaacacccatcccacatccctctgccagccattgctggacatgcctgtaggctcttttccacacatcagragccaggaggaggttgaatcaaatagaaagaacagacacatgtgaccatgcggcctcttcgcctcttcgcagcagtgttattgactaaagcctggctctcttctttttctttagtcctcattccttgagtgagttcagcccctcttacaacttcaaaactaaagagtcactctctaggtgactccagatgggccctctggcttgtattctgacttcaaatgacacatccatttgatgggcttgaaggtggacatgaagaatctgcaggaattcttttcatactctttctaagagtctagttccttggatcaagggaaactctgcttgtacattttctaaagtttacatcttagagcctccaaaaatacatattttct

SEQ ID NO: 471273 - DNA, 225 bp, Homo sapiens
acacaccatcacgccttgcctgctaacattatgcaaccatgggaggcaaggaattcgtgtgtgtgtatgtgtgtgcacayacacacatgcatacataggaacaggaaaagggtgtagaggaggagcacacctaccctgggctcagaaacattaaagttatctagaaaatctctagccacaatagtgagtaaaacctgaaaacttcaaacgtggctcttacatcaa

SEQ ID NO: 471274 - DNA, 225 bp, Homo sapiens
acacaccatcacgccttgcctgctaacattatgcaaccatgggaggcaaggaattcgtgtgtgtgtatgtgtgtgcacatacacacatgcatacataggaacaggaaamgggtgtagaggaggagcacacctaccctgggctcagaaacattaaagttatctagaaaatctctagccacaatagtgagtaaaacctgaaaacttcaaacgtggctcttacatcaa

SEQ ID NO: 471275 - DNA, 423 bp, Homo sapiens
actcttcctgctaccaccagttggaaaatgactcatctactctatgttatctcaagctgacaaaatagtttcaaaacattactatcttttaactttcattaaatttatttttaaatatatggatttatttattttctagagataaggtatcactatgttgcccaggctggtctcgagcttctgagctcaagtgatcctcctgccttggcttctaaaagtgttgggattataggcatgagccaccaggcctggtcctttcaacagaaaagttctrcctatgtctccttagctgtgtctcctcgaaccacagaacagaaaattaaaaacacccaagaattcgtgattgaatacatatgtcccagaagatgctgcagtgagtctcttggacagaccaagatcagctacttctgttctaaatcgggc

SEQ ID NO: 471276 - DNA, 541 bp, Homo sapiens
aagctggggggcagctcactctttctcagaacaatgtccggagaacctttgcagggaagctggttcaargtgccccaaagttgtggcctgacaacctttctttaacatgctcctcctgggcctggctctgatcgacaacaaaggagcgcatcatttttgctcccggcttctgcttctcctgatctttgattcaaatcccagcatagggtctttttgctaaatggggtctttttaaataaaagatgcattgttagagaagctaggagggtttcatttctgtaatggggtctttagtcaaacacagagcagaccttctcaaggagaggggacaaagctatcagtggtcaggccccacaggctggggagagacagagagagacaaaaattctaatccaagtgggtgacagccaggaggggagggaaaccttgctggttttattcatgagagttttcactagtgaccaatagttagaagcaataaagaagggtgtcaggtctgaagggacatcaaattcagtgactttaaagttcccttctagta

SEQ ID NO: 471277 - DNA, 435 bp, Homo sapiens
tgcagtggagccgccaccaaaatgcagattttcgtgaaaacccttacggggaagacaaccaccctcaaggttgaaccgttggatacgatagaaaatgtaaaggccgagatccaggataaggaaggaattcctcctgatcagcaaagaccgatctttgctggcaagcaactggaagatggatgtactttgtctggctacaatattcaaaaagagtctactcttcattttgtgttgagactgcgtggtggtgctaagtaaaggaagaagaagtcttacaccactcccaagaagaataagcacawgagaaagaaggttaagctggctgtcctgaaatatcataaggtggttgagaatggaaaaattagttgccttcgtcgtgggtgcccttctgatgaatgtggtgttggagtgtttacagcaagccactttgacgga

SEQ ID NO: 471278 - DNA, 550 bp, Homo sapiens
ttatttgttgctgcatacaaaattaccccaaaacttaagcatctktctctctcttttttcttttttggagacaagatcttgttctgttgcccaggctggaatgaagtggcatgatcaaatctcactgcagccttgacctcctgggctcaagtgatcctcctaccacagtctctcgagtagctgggaccacaggtgcatgcaaccacgcctggctaatttaaaaagaatttttattttttagagatgggatctcactatgttggccaggctagtcttaaactcctgagctcaagtgatccatctgccttggtctcctaaactgcttgggctataggcatgaaccaccgtgcccagccaaaatacaacatctttaaacaattatttgttatctcacagtagttcagaaatttggcagtaccttatctgggtagctctagtgtctctcaagaggttgttacccaagctgtcactgggtctgtgagtcacctttatttgcattattcacagtattacacttatcttaaaatcaattattgctataggataaggg

SEQ ID NO: 471279 - DNA, 615 bp, Homo sapiens
agccagccaccaagagaagtgttcaactagggaagaatttaacgtcacattagaaatgaaagctctgtaaaaacataaagcccccgggcatggcggcttttctcacccaaaccctctgctcaccctgcctgccctgcctgagacctgttctttgtgcccaggtgttgatgcccagcaaacctcaccttagctcttgcatttggatgcaaggagcattttttaaatttagaaacaactggctgtcctagcaggaagggatctacctgtgtggtgcagagggctggccctcaaggaggcctggatgtgcccagagcctcctgggaatgtgctttgtggccggtggagcaacccrctctctgtgcctttacagagaggaggaggcaggggctgcctgccctggggccaggtcatggagctggcacttactcttccagctttatccagttaatccagccctgctcgggaggtggcacagcaaaagcacagggggacaaacgtgtcaggatggaggtgatttcacgctctcagaacaagctggtggtaggggatctgcctcggtgccgggttggatatcagtgctatttatgttgctgctgtcgctgctgtgagagggac

SEQ ID NO: 471280 - DNA, 621 bp, Homo sapiens
gctgccagccagccaccaagagaagtgttcaactagggaagaatttaacgtcacattagaaatgaaagctctgtaaaaacataaagcccccgggcatggcggcttttctcacccaaaccctctgctcaccctgcctgccctgcctgagacctgttctttgtgcccaggtgttgatgcccagcaaacctcaccttagctcttgcatttggatgcaaggagcattttttaaatttagaaacaactggctgtcctagcaggaagggatctacctgtgtggtgcagagggctggccctcaaggaggcctggatgtgcccagagcctcctgggaatgtgctttgtggccggtggagcaacccgctctctgtgcctttacagagaggaggaggcaggggctgcctgccctggggccaggtcatggagctggcacttactcttccagctttatccagttaatccagccctgctcgggaggtggcacagcaaaagcacagggggacaaaygtgtcaggatggaggtgatttcacgctctcagaacaagctggtggtaggggatctgcctcggtgccgggttggatatcagtgctatttatgttgctgctgtcgctgctgtgagagggac

SEQ ID NO: 471281 - DNA, 525 bp, Homo sapiens
tgctgttagtttgagatacattctttatcatattagctgtcattctattcctagtattttaagagttgtatttaaaatggatattgagttttattgcatgctgcattttttagttgacttaccaatgtgatatattatagtattaaatttcccagcattgaatagtccttgaattcattggctgtgtcttacctaactgtgaatccaatggattcaattttatttcatttttcttttttcatctgtgtacatatataagattattctaagacttttttggtgacatctttgtcaagataatgctaattttattaaataamtttttaactttaatgttcttctgtattttgaaaaaaattatctaaagttgaaatttatatttttctagaaagttacaattaagattttcaaatttcttagcataccactatgaatagcattcattctcttatgctattatgtttccttattaatttttgctcttttttatttctaaatttccagaggtaaattaattaaattttg

SEQ ID NO: 471282 - DNA, 304 bp, Homo sapiens
cattatccagtccaagacactcaaggaaatcaagactccagaggctgtaagagatcttccaggttatgttgctaaacctsccacacacatattgtggctattcttatacagagatcaccttcaggggaaagaaagaaaaaagctctagaaaacaggaagcaggaagggtggggagaggcagaggctggggtggggtgggcactgtggaagcactcccccactgggaaccccagcaaactggggaaggattcaacaagaacagaagagaaagacatctgcaaacagcgccagatagccacctctc

SEQ ID NO: 471283 - DNA, 304 bp, Homo sapiens
cattatccagtccaagacactcaaggaaatcaagactccagaggctgtaagagatcttccaggttatgttgctaaacctcccacacacatattgtggctattcttatacagagatcaccttcaggggaaagaaagaaaaaagctcyagaaaacaggaagcaggaagggtggggagaggcagaggctggggtggggtgggcactgtggaagcactcccccactgggaaccccagcaaactggggaaggattcaacaagaacagaagagaaagacatctgcaaacagcgccagatagccacctctc

SEQ ID NO: 471284 - DNA, 621 bp, Homo sapiens
tgttctttgttccttgtgcttatcaccatctgatacatatgtttacttgtttatgtgtcaatgagcaatctcctccccagttgattgtaagctgagagcagggactttgtttcactcattgctgcctacctagtgcctaaaagagtacccaagatatgatagataataaatatctactgagtcaacgactgatggactgattgactgactgaattatttctatgctaggcaaaatctacttggtatcttcacaaatagtgatttcagttttggaatatttgatttgtaacattatcttcttgaacttactaaattgcaggatcattcacctattaaatccactgctggatttagatattagaccctgtcttctgtttataaggaaatttgtatttttactcttattgaggtgggtygggcccaaagactgggaaagtacacatcaagttatcaaaaaagaacttcacttttttatttctttaattaagaaataatttttataaggggaggccagaattcattcatattttcccttgtttgaaaatattaaattatccatccagaattcttcctctttctcttcctattcttcctctctctccttcctttttgagatctcag

SEQ ID NO: 471285 - DNA, 581 bp, Homo sapiens
aattaaactatggactttgggagataatgatttctcaatgtaggttcattgattgyatcagataatgtaccatcttgttgccgggtgttgataatggaggaagctattacatatgtaggggcaggggatatgtgggaactttctgtacctatgctcaatttttctgtgaacctaaaactgctctaaaaaataagtctatttaaaaaaaaacatgagcttgagatttaataaaataactactattaatatttaaaaaagaaataggtcagacactgtgcctcacacctgtaatcccagcactttgggaggctgaggtgggaggattgcttgagctcaggagttcaagaccaacctggccaacctagtgagacccccatctcaatttaaaaagtttttaaaataaaaatataaacatgaaatagaagggaagatggatggatacaaaaggatttatgatataatatttgaggttgaattaggaggacttggaattgattgaatggaatttggagttggggaacctgactgaggggatattggtcttcaattcatagtgatcatttttgatcaatggctgttgt

SEQ ID NO: 471286 - DNA, 646 bp, Homo sapiens
ttaccaacaaatttatggtgtgggtcatcagaatttttttcaccttccagggtgattttacccaagttgattacacaacaggtgaagtcttacttttagagttaactttgccctttacataaggaattgtccatatcactgtctccaacagtttgtcaatatcttttttttttggtagccctacctttgatcccaaaacatctattggtctggacatctcatcctagtacaaatcaatctaaacttacctgtttcatgcctaccttcattttcagactggagggagtgttctctgccattgcttgttctgaaggagacctggccaaagctagttacatctaactgtttagttcatatggctcttggaaatcattgctcatccaccatttagtcctaagtattgacgctattgccattattcttatgagattaggaatcctagtgtttgatctcttccattgtcacatgcctatgattattcctcacatgtagtcctgtactgttcatgttgaagtattcccagttctagttctgtgagtttgtccaaatttcttgatggkgataaaaaataaaattacaaagtttcttttgatagccatctgtcctgcttgagaaatagtatctgaacaccctctcagactatcac

SEQ ID NO: 471287 - DNA, 614 bp, Homo sapiens
taaagctagtggaggcttggtttcayaggctcaattaagggacctaatgcaaactgttgtatctcataacccatggttcccagaagaaggtatgctagatgtagagctctgggaacaagtgggagaaatcttaaacagcatcatgtgcaagggcaacgggtcccagtaacatctttaacattatgggctttagttagggtggctttggtcccgttatacacagaagagcctaaaaaggggagggaagaggaaccatcacctaccttactgcctccttatccctcagccccactatcatcgggccaaaataacaaagaggagacagaggttttgcctgagccccctcttccaatagataggaaaaaagataagggatacactacagctatgggaccctgtcttaggcaagcagcattagaaggggagctcttagcctgcctggcagtatatagtattaggccttaattttgggctttacactatagttcagttttccattaaagggttttctctctcaactttgaaatgcatcatctgagggttctgacctctgtttaccaatttcatagcctcatctagcacccccatgcaattaatttaaaaattacaacaca

SEQ ID NO: 471288 - DNA, 534 bp, Homo sapiens
actgttgtatctcataacccatggttcccagaagaaggtatgctagatgtagagctctgggaacaagtgggagaaatcttaaacagcatcatgtgcaagggcaacgggtcccagtaacatctttaacattatgggctttagttagggtggctttggtcccgttatacacagaagagcctaaaaaggggagggaagaggaaccatcacctaccttactgcctccttatccctcagccccactatcaycgggccaaaataacaaagaggagacagaggttttgcctgagccccctcttccaatagataggaaaaaagataagggatacactacagctatgggaccctgtcttaggcaagcagcattagaaggggagctcttagcctgcctggcagtatatagtattaggccttaattttgggctttacactatagttcagttttccattaaagggttttctctctcaactttgaaatgcatcatctgagggttctgacctctgtttaccaatttcatagcctcatctagcaccccc

SEQ ID NO: 471289 - DNA, 484 bp, Homo sapiens
gttttccctctgcaaacgttgcagagaataggatgtgtcctaagaatgatgtgagatgggaaatctgaagcacaaagcagaaagctctggacaggtgtgctttcagagagaaaaaaaaaaaaaaagaaaaccattgctgatacataccttcttgtcactaggcagacttagcttcttatgtaacttctgttcaaatatatctacttgctacagcgaagaggctgagccaaatgattttgtgagtccctagtcttttgaggtttctgacattgactttgcagataatgatattgccaacacatatctctttctttattcacaacttgcatttattttggtattttcgttgcttattccttgggctgtgtattccaaaacagtatttggggtttgaagtcttgctttgtatcacctgagatatattttgargtagtgagtagaaaataagtaacacaaggtctgcctgaggctggaagaagtggga

SEQ ID NO: 471290 - DNA, 357 bp, Homo sapiens
aaatttcttaattttggctgggtgcaatagctcacacctgtaatcccagcactttggggggccaaggcgagtggatcacctgatgtcagttgaccagcctggccaacatggtgaaaccccttctctactaaaaatacaaaaatttgctgtaatcccagctactcgggaggctgatgcaggagaatcacttgaacccaggaagcggaggttgcagtgagccaagattgtgtgccatygtactccagcctaggcaacaaaagtgaaactccatcccaaaaaaaaaaaaaaaaaggaaaatttcttaattttaacatctaatacaggatatatcaatagatataatccacataaataaaa

SEQ ID NO: 471291 - DNA, 449 bp, Homo sapiens
ttatagcgccactcacactcatacccgttctcccggagattcctctcctcgcagctctgggctgtgtagacaggagacaaggctgtggccacaacaggcaaagcctccaggactgcagacccatgtggtgatggcctgcgccatctggagataatgttggggaactaggggactatgggcgtcaccaatattagagacttctggattgttgaagcacctaaaccagaatctattggttctgaattcatttctttttttaatttttgtagagatggggtcttgctatgttgcccaggctggtcttgaactcctgggctcaaggaatcctctggcctcagcctcccaaaacacaggtatcacaggtgtgagtcactgtgcctggcccagttttctacataaaarcattaagttgcttatgtccaaagaaggaagattctatagacatgaat

SEQ ID NO: 471292 - DNA, 638 bp, Homo sapiens
gcatactgttcaaaaactacctattgggttttacaaggtatcttggcaatttctccacttaggtaattggagagctttctcatgattcttgtgattctaatttattacactgtatgagtgttgccataatttatttaactcttgtcatattgacagatatttagtctgttttctgtacttttgctgttacacaggaatcttttctgcttccacctcaacagcactttaccaaagattgtctgtctttttgytccacatttaaaggaaacctagtctctgcattactatgggggatttacttggatacactcaggaatagaaagatggtttaatatttttgaaaggcattaatgtaacttgttgaaacaaacgtttaacatttgataaaatccaatattgattcctgatttaaaataaatcttcacttagagtcgatgggcatttcttctacttgaaaaggagtatcttctttaaaccaaagtatgtacaacagtttttgtttgtttgtttatttttgttttttcctgagatggagtcttgctctgttgcccagtatggagtgcagtggcgcgatctcggctcactgcaaactccgcctcctgggttcatgccaatctcctgcctcagcctcccaagca

SEQ ID NO: 471293 - DNA, 638 bp, Homo sapiens
catactgttcaaaaactacctattgggttttacaaggtatcttggcaatttctccacttaggtaattggagagctttctcatgattcttgtgattctaatttattacactgtatgagtgttgccataatttatttaactcttgtcatattgacagatatttagtctgttttctgtacttttgctgttacacaggaatcttttctgcttccacctcaacagcactttaccaaagattgtctgtctttttgttccacatttaaaggaaacctagtctctgcattactatgggggatttacttggatacactcaggaatagaaagatggtttaatatttttgaaaggcattaatgtaacttgttgaaacaaacgtttaacatttgataaaatccaatattgattcctgatttaaaataaatcttcacttagagtcgatgggcatttcttctacttgaaaagsagtatcttctttaaaccaaagtatgtacaacagtttttgtttgtttgtttatttttgttttttcctgagatggagtcttgctctgttgcccagtatggagtgcagtggcgcgatctcggctcactgcaaactccgcctcctgggttcatgccaatctcctgcctcagcctcccaagcag

SEQ ID NO: 471294 - DNA, 596 bp, Homo sapiens
tcaggtggcagggagagggggttttaggttagcagctaacattgtctgctacaaaacccacttcattcattttctctttacctggaagtcaagtctttctcacatttctcccaagcctttcaacaagaagttctccagaagatgcatcatcgtctcactcctggctggaatcatacttccagatgtctacaatcacctgatttgctttaatacccttttgtgatatctrgtctctgttataatacattctgcattccaaaaaaaaatcaggtgatttctgtacattctgtacattatgtaaatttgttcacttgtattttaatgtcctctacatggaaaaagaggacaatagtggtttgaacagtggcctctcaaaaaatgtccacctcctcatccctagaacctgtgaatgtgaccttatttagaaaaaagagtctttgctgatgtaattatttcaaggatcttgatatttcaatcacacgagattatccaaatgagaccaaaatctaataacaagtgagatttgtcaaatgtccttataagagacaggcagaagagaagactggcacagagaagatagtcttattaagatggag

SEQ ID NO: 471295 - DNA, 617 bp, Homo sapiens
aaccttttgtttgtgttaagacattgagatttggggacttatttgttaccatagagtagtcccttagtaaaagttgcaaattgcttattcagtttatttccaaatrtggagttattattgtgacagggaaatttttcaatagttctaagtaactattgctaatatgagaagagcacttttgaatatagaaatgatatacctctgcacttatttccttccatttatggtagaaattctgtgacaaataaagaatatgtcgattcctcagattggtcctcttcttttgaagtattgaattttttgtgtttgcctatcttgcctgcatagggaaaagggggaggatctaggtttatcacactgggagtgttggaataagttccttcaaagattaagtcttatctttctagctcagatggagggatagggagatttaaataacatagtgacataggctttgtggtaggcagaataacggcccctcaaagatgtccacatcctaatcccaggaaccagtgaatgtgttaggctaaatggcaaaggggaattaagcttgcagatggaattaatactgctaatcatccgaccttaaaatagagagattatcctggattatccag

SEQ ID NO: 471296 - DNA, 453 bp, Homo sapiens
ggtctgagtcttctctagatcttttcaaacaatactgaatatggcaaagaggaagaagaagtaggaagagtaaaagtaaaatgggagaacaatttttaagaaaggaaatgaacagaggcattaagcacatgtgttctttttttgaaaaagatgttttagtccactaaaatgtttccaaaacaggatctaaaaagaaaaagcagaaaggacttaaattttatatatgtatgtgtgtatatatatatttatatatagtatatatatttatttatatatgtatatgtatatatattttatatgtaaatgtgcatgtgtataggtatgtgtttatatgtaaatatatatatttatattttatataaatmtatcagcttttaattaagctgacttctaacagtaggactctttttaaaaattttttcaagtaatttattaccagattttagctgagag

SEQ ID NO: 471297 - DNA, 650 bp, Homo sapiens
atttagtatgagggatttttaagcaaggtatataccctgttttagcctcaatttcttctccaataaaataaaagtttttgtataagttagggtgtcttcgttgtgaaaaaaaagtagttaattttatatgaatatccaaggtcatakaattgattcaaaagctaaggaatcaagtttgagaaataataaggaacaaagcaagacactgcaaggaacttggcagcatcagctacagaaaaagacccattatagagcaaagtgagcattgactggggaagatgaatcctgaccattacttttacctttgcgttctttgttcactcttccaagttccagcatatgattggccaagcttggggtaggtggccttttcactggatgtaccaggtcagaaagcaggcaaatcttggagatggtgccccagagaccccttttatctcccactgcagaatagacacctaaatttccagtcccactaagacagtacatagcaggggaagaggtaatgcctcgaacagaaattgggatgccgttgggaaaggataatccatgcttcccagaccaaaaatcaaaagaaagtgttctcttttagattaagcaaaattgtatatgcagcctaaatacaaaaagcacaggaaagcacagcagct

SEQ ID NO: 471298 - DNA, 650 bp, Homo sapiens
atttagtatgagggatttttaagcaaggtatataccctgttttagcctcaatttcttctccaataaaataaaagtttttgtataagttagggtgtcttcgttgtgaaaaaaaagtagttaattttatatgaatatccaaggtcatataattgattcaaaagctaaggaatcaagtttgagaaataataaggaacaaagcaagacactgcaaggaacttggcagcatcagctacagaaaaagacccattatagagcaaagtgagcattgactgggraagatgaatcctgaccattacttttacctttgcgttctttgttcactcttccaagttccagcatatgattggccaagcttggggtaggtggccttttcactggatgtaccaggtcagaaagcaggcaaatcttggagatggtgccccagagaccccttttatctcccactgcagaatagacacctaaatttccagtcccactaagacagtacatagcaggggaagaggtaatgcctcgaacagaaattgggatgccgttgggaaaggataatccatgcttcccagaccaaaaatcaaaagaaagtgttctcttttagattaagcaaaattgtatatgcagcctaaatacaaaaagcacaggaaagcacagcagct

SEQ ID NO: 471299 - DNA, 503 bp, Homo sapiens
cgcaaagaaaggagactctgggttcaaatcccagctctgctaccacagctgtgtggctatgggcaagtggcttaacctctctgggcctccattkcctgatctggaggcggacagtaacagggtgcagaacaggcactggacggggctttggggcctttcaggcacacgcacttcctggtccccttgtgtttagatggggccatgtgtgtctaggtgcagtgatgtgctgtgtgtggaagcagtgtggtcactttctggtcagtgttggactctctagcctctcaaccctgggcttggcgaccagtaacattttgaatggcagctactctgtgagcctgggtccctgggtaactatgaggcaaacagcttccctgctgaatgtaaaaaacccttcccatcaatttaagtcactgagatgtgggggctgtttgttactgcagcttcacttgatctatcctgactgctgcattcctgggctgggtgctggctcaaggggaaacaca

SEQ ID NO: 471300 - DNA, 518 bp, Homo sapiens
cctgtgtgacctgaccctctgtggaccttcatttccttgtytataaatgcaggaagcggggaacataaaggtctgcaacactgaatgccttccatggaggatgcagccccaccaaagggcacttgagctctctctcagtttgtgccgccaaatgacactcttctgtgggtgaaattccgccagcagcccccagctacctcggaagctttccactcctgacgctgatctcaacggaaaccttcctccaaaagcagcattttcagggctggggtgatcactgctgcggcaggggccccaccatgtgacagagaggcccacggtgggcgtggggtctacggagcagttatagctcctgtccctccagccacatctttattctgagttcagcccaaccttttccatgaagtttctataaagttcttctgtcaccaggacagaagtttctgtgtttgacctggggcagatgaatcaggcaggaggactgaggaagacatcagggttctccagccaccttatgg

SEQ ID NO: 471301 - DNA, 603 bp, Homo sapiens
ctgcctgtgtgacctgaccctctgtggaccttcatttccttgtctataaatgcaggaagcggggaacataaaggtctgcaacactgaatgccttccatggaggatgcagccccaccaaagggcacttgagctctctctcagtttgtgccgccaaatgacactcttctgtgggtgaaattccgccagcagcccccagctacctcggaagctttccactcctgacgctgatctcaacggaaaccttcctccaaaagcagcattttcagggctggggtgatcactgctgcggcaggggccccaccatgtgacagagaggcccacggtgggcgtggggtctacggagcagttatagctcctgtccctccagccacatctttattctgagttcagcccaaccttttccatgaagtttctataaagttcttctgtcaccaggacagaagtttctgtgttkgacctggggcagatgaatcaggcaggaggactgaggaagacatcagggttctccagccaccttatgggggctcctgtgaaacaggaatggggatcaacatgtccccccacctcctaccctggattgataagggaatcacctctggttgt

SEQ ID NO: 471302 - DNA, 439 bp, Homo sapiens
caagctgaaagtcggccgccaccgtccagcgtggatcccaggacaccgtgaacggactwcagaagttgactttcgcgtttttaaggagtggggtgcagggaaacaatcctccgccggccctgcgggctgatgccgaccctcacctgctcccgccacgtggagaggtagagagaagccccgggccaagcagcattgagccctggtcccttctatttaaatatgaaatattttgcatacacttttctagatgtacttaatatacacaatgttttaatgtttgtgatttttttgttttgccaaaaaaatacaatcaatcagaaattcatctgtttttttttttttttttttcacataactgttgacttttacaaaatactggaaggagaggctctcagcttaaatcagggagtccctgaatggggaaaacattttcatcttg

SEQ ID NO: 471303 - DNA, 532 bp, Homo sapiens
cccacaggttctgagggagtactagggccagctctgggagaggtctcttcctatgctgtgaaccccctgcctttcttgcagcctacaacgaataaattttctttgcaaaggcttccgtgtctctggtcagtttttctaggaggacatgagtgaggaaagtagcactccgccaccagcaaaaacaactgcttgtgtcttgcggtgtggtggggacactggtatgggtgcaaaggatggagcaagaagtcttacaagrctgggaaagtctgtcgtcttgacctgagctagggtcatttgggcaagaagtgaaggtcatggccagtgcaaggcctaccttgccttgagggtgccctgccctcaggagaggggtcctggaggttctggattgggagctagcccccacgctccttctcaacctccatcagtgtcttctcatgtaattctcacaatgaccccataagactgaattctgtcttatagactaggaaacagaggctcagagagacttaagaaataggcaaagccacacagc

SEQ ID NO: 471304 - DNA, 532 bp, Homo sapiens
cccacaggttctgagggagtactagggccagctctgggagaggtctcttcctatgctgtgaaccccctgcctttcttgcagcctacaacgaataaattttctttgcaaaggcttccgtgtctctggtcagtttttctaggaggacatgagtgaggaaagtagcactccgccaccagcaaaaacaactgcttgtgtcttgcggtgtggtggggacactggtatgggtgcaaaggatggagcaagaagtcttacaagactgggaaagtctgtcktcttgacctgagctagggtcatttgggcaagaagtgaaggtcatggccagtgcaaggcctaccttgccttgagggtgccctgccctcaggagaggggtcctggaggttctggattgggagctagcccccacgctccttctcaacctccatcagtgtcttctcatgtaattctcacaatgaccccataagactgaattctgtcttatagactaggaaacagaggctcagagagacttaagaaataggcaaagccacacagc

SEQ ID NO: 471305 - DNA, 644 bp, Homo sapiens
actgactttgtagctttgctcctaaggtagtggctaaatgcctcctctcccaagtcacatttcatgtggatttccttgctttccttatcacccagagacagaaaggagtcaggggttgggggacagtgaacagcttcctttggagtctttcattcaaattctggctctctcccttacgtaccatgtgacttgtgtcaaatctccatatcctcatctgtaaaatggatttgcaaattgatctcatctcatggacttgtgaggatgaaagaagatgctaggtttggcccagggcsagagtcataaatgtatccttgaatgacagccattattattaccagcaatcacctctaatgacaatttactgtcactatgcattttcagaaaacagtgcccctccccactcagaaaagaaaaaacaacaccgatacatctccacgtgctttaagtgcccggggtgccaggactgtggaatgatagcagcttcattctgtacgcaaataattcaaactcccagtaggtcttgtggacccccgatgtcttaaatacagacccttgaaaccttgtctctcctgggctctcagcacttaggaaggtgtgagtgtgtgggtggggggagggttgaaaggccctgtggctaattgaga

SEQ ID NO: 471306 - DNA, 504 bp, Homo sapiens
ttatcctggttacattggagaaaaagtatatatagmatcagtagaaatttgtattgcagtatacttgacttatttgagaaaggaaacaaaagacttcacatttctttctccgtatttttcttttatttcagttatctttagttatttgagacaactgattatagattctgtttttcagacctgctttcaaatatcgtcatgtatgcacccttagttcttcaaagttgttcttctaaagtcacagaagcttttgactatttgtcctttctgccccttcagactgtacaaaggctgcttaaggcagtgcaggtaagtcttcagattcccaagtaacttgccaaaactgaggtttaactgtctagtggaagtctgatgcatttttgtataaatatatatgtctaagaaattctattccactttagtctgaaacataaaatttgcattaaaagggcaagagcattgagcaagactgttttccaggtttatttcctatccataacacta

SEQ ID NO: 471307 - DNA, 587 bp, Homo sapiens
cctgcacccaccccgatgaagctccacgggagcaaatacagagcctccaggcagtgctatggtccaggctggcttcgtttttccaaggagcctttggtgagttcaattatctggtaaatatccagcgcttcacctgaaagatagtgcaaattggttaggatgccacctcaagaactgtaactgagagctcagaagtgagcaaaggagcttaatgctaaggtcaaaaggagagtgaaaggttgagaacaattgccacgaacggtaatgttacatgttaggagggtctgttttctttttatataagtgtgtcttagatatattttaaatagaaaataagctttctgatttacttgtttggtatttaaagcacagtttgtttttctgtcacctatagagtgcaagaatgcactctatagaataaatyctctttaaacatttcttctgtggttgaagtaggggacaggtacaggtagaatatttgaagctctgctgccttcatttttgaaacatcatatcacattcactctggacacagggcaccttataaactgaaattagcctagaatatagcctgagtcaagagtgga

SEQ ID NO: 471308 - DNA, 587 bp, Homo sapiens
cctgcacccaccccgatgaagctccacgggagcaaatacagagcctccaggcagtgctatggtccaggctggcttcgtttttccaaggagcctttggtgagttcaattatctggtaaatatccagcgcttcacctgaaagatagtgcaaattggttaggatgccacctcaagaactgtaactgagagctcagaagtgagcaaaggagcttaatgctaaggtcaaaaggagagtgaaaggttgagaacaattgccacgaacggtaatgttacatgttaggagggtctgttttctttttatataagtgtgtcttagatatattttaaatagaaaataagctttctgatttacttgtttggtatttaaagcacagtttgtttttctgtcacctatagagtgcaagaatgcactctatagaataaattctctttaaacatttcttctgtggttgaagtasgggacaggtacaggtagaatatttgaagctctgctgccttcatttttgaaacatcatatcacattcactctggacacagggcaccttataaactgaaattagcctagaatatagcctgagtcaagagtgga

SEQ ID NO: 471309 - DNA, 451 bp, Homo sapiens
atcaacatcagcctacatgctccagtttgccacagcgccctcctgtcaactcctgtcttccacccactccatttgctctcattccctgtaggcatctgagtttgcaacccctgtattattgatkatgcagcataatcagaattgtcaagatgctaccacttggtaacagtataccaaaagtatagctttactcccatgaggaaaaactgtttaaggctgactataaagcaaccaaatgtcacaataggacaaatcatcctggaaccaggttacacaggtgtggaaggagaggggctaggtgagagttcaagtaatgggcaggagatagaacagatgggagtactaaaggacagtaaagcaggcctcgggtcctgggtgttaaagtggatgggagagggaccctcaccagcggaggcccttggtggcagcgtacatctgctgggccttctca

SEQ ID NO: 471310 - DNA, 426 bp, Homo sapiens
cctgaaaaccatgaggtgccttcaaagtagactctgtggcccagccgcgcragtggcctccaggaccctgccgcacgatgtcattctctccttattctgaatcctgtctggctctgatgctgagaaaaaggacaaagtcggtgtgtctgtctgcgtgtgtgtgcatctgtgcctgtgtgtgtgtactgagttttggttttttttggaacctttttttctttttttaagaaaaaaatgacccttggattactaatacagagttcagccctcctttagtcactataaaacggactccatgttttcacaccactcatggtcttccaggttatagataaactttgtcctatgtgtctggtttgcgggcacagggtccctccccaggttgtctagggtcagagtagaggcaaagaactcactggtgctcag

SEQ ID NO: 471311 - DNA, 274 bp, Homo sapiens
aaaataaatgatccatttttcttctttcagagaaattgctgctcctgaaagatataagatgtaggaagaagcagcagctaatgatctcaactctaagtcccttgaaagctgccactgggggttcatattttccttcccactatgccttgcacagacattcayggagtacttctgggtgctggcccttgcttaagaaatccaaagaccagagcagatgacagacacttctagcaaatcatcgtaataaagtgagaacaatgtctttaggagaaag

SEQ ID NO: 471312 - DNA, 560 bp, Homo sapiens
tgcgccagcaccccctgggaacctataaagaatacagaggcctgggccccacaggacctggcatttttaaacacctttcatgaccactgactaggctactgttttctcagctactgggttgtacaatcacacctgaaagtatcacctcacacatgttaggaggccattatcaaaaagatgaaagataagtattggtgaggatgtggagaaaagggaaccttgtacactgttggtgggaatgtaaattcgtacagccattatkgaaaatggtatagaggctcctcaaaaaattaaaaatagaggctgggtgtggtggctcacacctgcaatcctcatactttgggagggcaaggcgggcagatcacctgaggtcaggagttcgagaccagcctggccaacatgacaaaactccgtctctactaaaaatacgaaaattagccaggcatggtgagaggcacctgtaatcccagctactcaggaggctgaggcaggagaatcacttgaaccagggaggtggaggttgcagtgagctgagatcgcaccactgcactccagcctga

SEQ ID NO: 471313 - DNA, 560 bp, Homo sapiens
tgcgccagcaccccctgggaacctataaagaatacagaggcctgggccccacaggacctggcatttttaaacacctttcatgaccactgactaggctactgttttctcagctactgggttgtacaatcacacctgaaagtatcacctcacacatgttaggaggccattatcaaaaagatgaaagataagtattggtgaggatgtggagaaaagggaaccttgtacactgttggtgggaatgtaaattcgtacagccattattgaaaatggtatagaggctcctcaaaaaattaaaaatagaggctgggtgyggtggctcacacctgcaatcctcatactttgggagggcaaggcgggcagatcacctgaggtcaggagttcgagaccagcctggccaacatgacaaaactccgtctctactaaaaatacgaaaattagccaggcatggtgagaggcacctgtaatcccagctactcaggaggctgaggcaggagaatcacttgaaccagggaggtggaggttgcagtgagctgagatcgcaccactgcactccagcctga

SEQ ID NO: 471314 - DNA, 560 bp, Homo sapiens
tgcgccagcaccccctgggaacctataaagaatacagaggcctgggccccacaggacctggcatttttaaacacctttcatgaccactgactaggctactgttttctcagctactgggttgtacaatcacacctgaaagtatcacctcacacatgttaggaggccattatcaaaaagatgaaagataagtattggtgaggatgtggagaaaagggaaccttgtacactgttggtgggaatgtaaattcgtacagccattattgaaaatggtatagaggctcctcaaaaaattaaaaatagaggctgggtgtggtggctcacacctgcaatcctcatactttgggagggcaaggcgggcagatcacctgaggtcaggagttcgagaccagcctggccaacatgacaaaactccgtctctactaaaaataygaaaattagccaggcatggtgagaggcacctgtaatcccagctactcaggaggctgaggcaggagaatcacttgaaccagggaggtggaggttgcagtgagctgagatcgcaccactgcactccagcctga

SEQ ID NO: 471315 - DNA, 651 bp, Homo sapiens
tcatggattttctcatcgtttgccccttttataaaccttcatgaacacaggcatttgctttgttttgattgccctgtggaagactctagcttaatgttctaaattatttcttctttgagcaataagaacaaaaatgatcattggaaacccccaagatatatcatatccttgtaggaaaatattagctggccaatcttgaacagtcttcaaagtaaaaattatgggaagaatggatgaaacaaagatcagatgctggcgtgtgtacatgtgggtgcactgtgtgtttatgtgtgcccagcattcatgcatgtacttcatgtgggtgcactgtgtgtttatgtgtgcctagcattcatgcatgtacttaactaaaagtgccctttgcaattaggagaaaggcaggaacggtggagctacttactgttcttggatgattcagactcatcagggggtagctgggtgtttagatagataagtgctccctgctaagatcttaccaaagcaaacgattctaacttggcattcaggaaaatcaataagtgraataaagaaactgaatttctggaaattatcttcaattgaatcgcgtgatgttggctgagctactcaggtcccgcaagcaaaaacttaggaacagaaagtttttatcag

SEQ ID NO: 471316 - DNA, 685 bp, Homo sapiens
tattgcaagagtgggttcctaataaaagaatgagataagttggacatcttcttcccttcttctctcctgatttcctccagttctgtcttccacaatggaatgacaagcaagaagattttcagtagatgctagtgctttgatattgaacttcacagcctctagaactgtgaaaaataaatttctcttattcataaattatccaatctgggatatactgttataacatgaaacagcgaaagacaaagggtttcrtaagtggaaaaactatatatacctatgcatgtgtgtatgtataacagcatatatatatatatatatatatatatatatagtagcactctatcagcataacactaaacactatatatgtataagtatatatatacatatacagacatgcatcacttaacaatggggatacattctgataaatatgtcattaggcaatttcttcactgtgcaaacatcatagagtgtacttacacaaacctagatggtatagcctactacatgcctaggctatatggtctagcctattgctcctaggctacaaacctgttacgtgcatgttacgatactgaatactggaggcaattgtaacacaatgggaaatattcatgtatgtaaacatctaaacgtagaaacagtacggtaaaaatatgatataaaagatttaaaaatgtca

SEQ ID NO: 471317 - DNA, 509 bp, Homo sapiens
tcctctctcctttagaaatatccaatcacatgttctttggggtttggacagattgctctgagttctgtttttttttttttttttttttaataattttttcttcttggggatggggagagatagaccagttttttttgttgtttttttttttgagacggagtcttgctctctctccgcttactgcaagctccacctcccaggttcacgccattctcctgcctcagccttccaagtagcttgggactacaggtgcctgccaccatgcccggctaattttatgtagttttagtagagacagggtttcaccatgttagccaggatggtcttgatctcccgacctcgtgatccacccgccttggcctcccagagtgctgagattacaggcktgagccaccgtgcctggcttagatagaccagttttaagagactcccagaagactgcttccccactctgcctgtgagctcacattagtagttcatttgggaggattttgcatggttctttcacc

SEQ ID NO: 471318 - DNA, 571 bp, Homo sapiens
gcaccttggaggtgagtgttgattttccatggttcacactgggagactggccgcaggaaggcaagtccagtacccaaggtctgcacactagtaagtggcagggccatggtttaagtccaggtcagctgtgctcatttgcatcctgctgcatccttctctgctccccagttttggaaccacttcaggctgttcatggacgtgttcttctggaaggctgaggttgtcacatgggtgacttgggagttcattagctgacactataccttttatttccaattagtcttctacttcatcaattcatatatcttctctctggctacccaaatgctgccatgcagcagggattctcctctaaacagcagaagagasgtgcctggagaccagagccagtgcctcaacagaaagtcaagtctgtctttccagttctgggcttacagcagattccatatcctctgatcttctgtggcagtctcattctccctcttccttctgtcatagaatctctccaaataagatttaaacatctggaactcccaagctgcgcttcccaaaaggaccccgtgacccatgg

SEQ ID NO: 471319 - DNA, 521 bp, Homo sapiens
agatagagagactgaaagagagacagaaggagaragacagagagagagagagaaagaagggagaagctgggggtaccctgcagtggagaagtcctggcctctattttccccgccccccgcccatgtctttctatgcgctatattaagagcagtggctctggggtcctagcactcactttttgcccctttccttcccccgtgcctcagtttcccctcttatggagcagatgccaaactggctccagtagaaagcttgaggatccctccgggcagggtagcaggctccgagagcaccctggagttcctgccggggtgtgggggtgcccaagcaccaccagcccctctcgccgtgtgcccgtgagtgcctgcttgaccatgtggctttctccatcgccggccccacagacaccagcggcgcctcccgtttctcagacgcatccaaggggtcccgctggagcttcctcgctaccacccccagcggggccccaaagtacttaccgagaaagacgagaaagacgcgg

SEQ ID NO: 471320 - DNA, 457 bp, Homo sapiens
ctcctgcctcgcctcccgagtagccgagattacaggtgtgtgccaccacccctggctatttttgtgtgtgtgtgtgtgtgtatttttagtaaagacagggtttcaccatgttggtcaggctggtctcaaactcttaatctcaggtgattccctygcctcggcatcccaaagtgctgggattacaggcgtgaagcaccgcacctggcctcatatagttactttttgtgtatggttatgacgtagggtctaagttctttcattattattattattttttgcatgtgtatatcctattcttgggaaaatttaaaggggattatttctgtttctggtaacgcgcgcgttcatcctgtgctcccctgcctgtaattctcccactagggtcagagtagggctggaaaagcgaaaaccataactagaagagacttccccaacaggatgttgcccaaccctggca

SEQ ID NO: 471321 - DNA, 457 bp, Homo sapiens
ctcctgcctcgcctcccgagtagccgagattacaggtgtgtgccaccacccctggctatttttgtgtgtgtgtgtgtgtgtatttttagtaaagacagggtttcaccatgttggtcaggctggtctcaaactcttaatctcaggtgattcccttgcctcggcrtcccaaagtgctgggattacaggcgtgaagcaccgcacctggcctcatatagttactttttgtgtatggttatgacgtagggtctaagttctttcattattattattattttttgcatgtgtatatcctattcttgggaaaatttaaaggggattatttctgtttctggtaacgcgcgcgttcatcctgtgctcccctgcctgtaattctcccactagggtcagagtagggctggaaaagcgaaaaccataactagaagagacttccccaacaggatgttgcccaaccctggca

SEQ ID NO: 471322 - DNA, 457 bp, Homo sapiens
ctcctgcctcgcctcccgagtagccgagattacaggtgtgtgccaccacccctggctatttttgtgtgtgtgtgtgtgtgtatttttagtaaagacagggtttcaccatgttggtcaggctggtctcaaactcttaatctcaggtgattcccttgcctcggcatcccaaagtgctgggattacaggcgtgaagcaccgcacctggcctcatatagttactttttgtgtatggttatgacgtagggtctaagttctttcattattattattattttttgcatgtgtatatcctattcttgggaaaatttaaaggggattatttctgtttctggtaacgcgcgcgttcatcctgtgctcccctgcctgtaattctccyactagggtcagagtagggctggaaaagcgaaaaccataactagaagagacttccccaacaggatgttgcccaaccctggca

SEQ ID NO: 471323 - DNA, 544 bp, Homo sapiens
ccaccgagcccagctaatttttgtattctttagtagagacggggtttcaccgtgttagccagtctggtctcgaactcctgacctcaagtgatccacccacctcggcctcccaaagtgctgagatgacaggcgtgagccaccgcgcccagccatattattagtgttattaatattattgatgagttacctactttaaggatcacgggcgctttcaacgacaagccccctrcattatcccagcaacttttgacattcttccggccgatgccctccgcgggagccggcggggacccctgggaagccggctaaggcccgtcccgcccgcagctccgccctcgcccacccgtaggcggggcccggggccttccggcctcagtttccccccgcggcccggggatgcggggaggcgccggctgccccgcgcggcgcggccgccaggggccgctgcggagccgcctttgtggtcccgatgccggggcgggcgcgggcgggaggagggcgcgggggcccgggagggaggcgggaggcgcggccgccgctccag

SEQ ID NO: 471324 - DNA, 544 bp, Homo sapiens
ccaccgagcccagctaatttttgtattctttagtagagacggggtttcaccgtgttagccagtctggtctcgaactcctgacctcaagtgatccacccacctcggcctcccaaagtgctgagatgacaggcgtgagccaccgcgcccagccatattattagtgttattaatattattgatgagttacctactttaaggatcacgggcgctttcaacgacaagccccctacattaycccagcaacttttgacattcttccggccgatgccctccgcgggagccggcggggacccctgggaagccggctaaggcccgtcccgcccgcagctccgccctcgcccacccgtaggcggggcccggggccttccggcctcagtttccccccgcggcccggggatgcggggaggcgccggctgccccgcgcggcgcggccgccaggggccgctgcggagccgcctttgtggtcccgatgccggggcgggcgcgggcgggaggagggcgcgggggcccgggagggaggcgggaggcgcggccgccgctccag

SEQ ID NO: 471325 - DNA, 593 bp, Homo sapiens
atgtgaaaagaaatggggacttggtcacatgatccttgctattgaagacagtcccaagaccactgtccagaattaaactctaaaatcaaatgtattttccaaacacatgcatgatgcctgccctccaccagaggtgggaggtggccaggcaagccagactgggtgccacctaagtcactggagatcaggggaggacacttgaccagaayaggtccattggctgacaggtggcccatgaggactccctccaatggggcaaactattgaatccatcagactggctccctgcagtgggctggacaatttgtagaggactggacaacagagaaagagacgcaggggctggggggcaggagagaagaacctgttgccagagcagccttgcatcctggcagctttccctcctcactcttcgtcctgaaggaagcctccctgggttctccattctaaccacgttagagtcagcctctcacgtaactcttaaggcacaaaacagagtcaaatgtacatagtaggcaggtcttctcccagtccttttgcttggcatcttttcgttcagattcctgcagttttgactcctttgtgaagtgata

SEQ ID NO: 471326 - DNA, 593 bp, Homo sapiens
atgtgaaaagaaatggggacttggtcacatgatccttgctattgaagacagtcccaagaccactgtccagaattaaactctaaaatcaaatgtattttccaaacacatgcatgatgcctgccctccaccagaggtgggaggtggccaggcaagccagactgggtgccacctaagtcactggagatcaggggaggacacttgaccagaataggtccattggctgacaggtggcccatgaggactccctccaatggggcaaactattgaatccatcagactggctccctgcagtgggctggacaatttgtagaggactggacaacagagaaagagacrcaggggctggggggcaggagagaagaacctgttgccagagcagccttgcatcctggcagctttccctcctcactcttcgtcctgaaggaagcctccctgggttctccattctaaccacgttagagtcagcctctcacgtaactcttaaggcacaaaacagagtcaaatgtacatagtaggcaggtcttctcccagtccttttgcttggcatcttttcgttcagattcctgcagttttgactcctttgtgaagtgata

SEQ ID NO: 471327 - DNA, 593 bp, Homo sapiens
atgtgaaaagaaatggggacttggtcacatgatccttgctattgaagacagtcccaagaccactgtccagaattaaactctaaaatcaaatgtattttccaaacacatgcatgatgcctgccctccaccagaggtgggaggtggccaggcaagccagactgggtgccacctaagtcactggagatcaggggaggacacttgaccagaataggtccattggctgacaggtggcccatgaggactccctccaatggggcaaactattgaatccatcagactggctccctgcagtgggctggacaatttgtagaggactggacaacagagaaagagacgcaggggctggggggcaggagagaagaacctgttgccagagcagccttgcatcctggcagctttccctcctcactcttcgtcctgaaggaagcctccctgggttctccattctaaccacgttagagtcagcctctcacgtaactcttaaggcacaaaacagagtcaaatgtacayagtaggcaggtcttctcccagtccttttgcttggcatcttttcgttcagattcctgcagttttgactcctttgtgaagtgata

SEQ ID NO: 471328 - DNA, 593 bp, Homo sapiens
atgtgaaaagaaatggggacttggtcacatgatccttgctattgaagacagtcccaagaccactgtccagaattaaactctaaaatcaaatgtattttccaaacacatgcatgatgcctgccctccaccagaggtgggaggtggccaggcaagccagactgggtgccacctaagtcactggagatcaggggaggacacttgaccagaataggtccattggctgacaggtggcccatgaggactccctccaatggggcaaactattgaatccatcagactggctccctgcagtgggctggacaatttgtagaggactggacaacagagaaagagacgcaggggctggggggcaggagagaagaacctgttgccagagcagccttgcatcctggcagctttccctcctcactcttcgtcctgaaggaagcctccctgggttctccattctaaccacgttagagtcagcctctcacgtaactcttaaggcacaaaacagagtcaaatgtacatagtaggcaggtcttctcccagtccttttgcttggcatctttkcgttcagattcctgcagttttgactcctttgtgaagtgata

SEQ ID NO: 471329 - DNA, 420 bp, Homo sapiens
ctggtaaacaagcaaactttgttaagtcctggttgtcataatcctctttcatcacatagtaagagatgaaaaagattaattaatttaaaaatgtaaggttcataatagaaattctgaaaggaaaactacaggaccccatctaggctttttckgatttcttatatctccattcatggtaccacataataaaaataatatctgtcacatatcaaaaatgataaatacttattggctgaacaaattaaacaatggctccaaagcattacaagatcctaaatcaaagactcaatttgtttgaaagctgctttattttaaagctatagtaatcaagacagcacggtgttaaaaagaataaacttaaaggggtagaatcatagataaagaaaacagaagacagtccagaaatagaattatatgtat

SEQ ID NO: 471330 - DNA, 420 bp, Homo sapiens
ctggtaaacaagcaaactttgttaagtcctggttgtcataatcctctttcatcacatagtaagagatgaaaaagattaattaatttaaaaatgtaaggttcataatagaaattctgaaaggaaaactacaggaccccatctaggctttttcggatttcttatatctccattcatggtaccacataataaaaataatatctgtcacatatcaaaaatgataaatacttattggctgaacaaattaaacaatggctccaaagcattacaagatyctaaatcaaagactcaatttgtttgaaagctgctttattttaaagctatagtaatcaagacagcacggtgttaaaaagaataaacttaaaggggtagaatcatagataaagaaaacagaagacagtccagaaatagaattatatgtat

SEQ ID NO: 471331 - DNA, 569 bp, Homo sapiens
ttatttttaaaaaagtttttcctggcctaggctgtcagggtgtctagcaccctattccccttgaattgctaagtgagaggcccacactgcaatctcttgatctgtttgtattctccatttaacagacagtgagtccctggagggcaagggcctggcctgccctcccctccatatttgtccctgaaattctgagttctggaaacttctaatggaaggatcgaagagaaagcatcagctcagcctggccactaaccccagacatggaaagaaaaaaaggagggatactctaccttcaaaagccatcccaaggccgggcgcagtggctcacatctgggatcccagcactttgggaagccaaggtgggcagatcacccgargtcaggagctcgagaccagcctgaccaacatggcaaaacccatcactactaaaaattaaaaaattagccatgcgtggtggtgtgcgcctgtagttccagctacttgggaggctgaggtagaaggatcacttgagcccaggaggtggaggttgcagtgagctaagattgcactgcaccactgcagtccagcct

SEQ ID NO: 471332 - DNA, 474 bp, Homo sapiens
cctcagcctcccgagtagctgggatcacaggcgtgcgccaccacgcctggctaatttttgtatttttagtagagacggggtttcaccatgttggccaggctggtctcatgctcctgacctcaagtgatacgctggcctsggcctcccaaagtgctgggattacaggcatgaactaccacacctggcccagggtgattttttttttgtatgtgaaaatgatattctgttcgaatcatggctgttcctcacatgacttgtaactactgagcacacgcagcccaggcctcttctcgcctgtggtaggatcttccgtggcaaggctgtgccttgggcgtttatcacccaattccctgtggacacttcggttgcctccattttttcccaacctcacccaatgccatggtgaatctccatgctgacatctcccaggtccccttggggaagcatttttgtctctcactggtgtccagtgaa

SEQ ID NO: 471333 - DNA, 617 bp, Homo sapiens
gaagcccagtacatccacacggaagagagggaatcaggcccagggcagcagccacagtgcaaggcctgggctagttgtggctggtggtgagcatcgagtgccaagccaagcttcaccgacgcagtcacaggggcagactccatgcggcagaggtggctgccagcccctcggggaacctgcagactcacgttcagcagtgggggaagagagcagggtgggcagggacctggcagccttgggggtaggggaactgtgggctccaggcggggagagagattatatattcatcagaatcttaaacaaaagccccgcagccgcctgtcagccaggctatggcttttatggtaatcagcaatgaattacccacaatgcctggccaagcgcaagtggttcttggcccggatcctaaactaatttttgtatgttcgtgtgtatataattttgctcgctccctcccgttcctctcccttcattaccaggarcacgggtggggtacggggcagggaggcaaaaggaaccctgggtgtagaagtggaggatgctcaccaagaccccctggccctacagcctgcctggcactaggccctgggctcagagtgtgtggaggtgggaggtga

SEQ ID NO: 471334 - DNA, 604 bp, Homo sapiens
tccattaaattatcttgacacccttgtgcaaaagcaattgactttaagggtgagggtttatttctggactgtyaattctatccctttggtctctatttgtattcttatgccagcagcttctgtttttaatagttgtaatgttttgtgagatttcaaataagaaagttcaagttctgcaatttattttggcaaaattgttttggctatttcaagggtacttttttgaaaagcaaggaggccaatgttttgcaattgggaaagccttttctgtcttgttttggaggcaaattttgctgtctagggatcttttcaagaactttatcaaagtaggtgaattatcaccacttcctttgctgaggtactgtgttaaaatgtgtgttgcctcccgttgaagaattgagagaccctggaagcacttgcccatgtggtgaaggacagtgagctccataattaggggcacagaagacattgctttgggacacaatgttgtcagggtagctgtgtgcatctctacttgtttatttttttgtacaacttgcatctctgctggacatactagatattgaaatctttgttcattctcttggttctgggttggctgacc

SEQ ID NO: 471335 - DNA, 577 bp, Homo sapiens
tagcacccaaagccttgaaggtgggaagcagagccatgggagtgtggtgtgatgggagcttgagtaccactggtctgacctagtcttgcaggcagtcatgggaggtagggctttcctgaggccrcattcttacagcaacatggtcatggggaatttgatccttagaacagcaatgaggaggagaagctgagtctgagattactggctcttaaccaaaatcttcgaagaggactttggaggtcctggatgagggtaccctcaagtccaagcggaaacagaagcgaattttcttgtggattcccaactcagacccactggactctgaagaggacaagcagcatggcctcacaagcaaagattcccaaatacataaggagcagacccctattagtgggaggcagcagactcaagagctacctcaagagctggatatagcttctcaagaattacagatgttggaatggccaaataccaaacacaaactaggtaggtatgagaagaacacataatacaaagaacatacaagaaatgaccaggaatgaagaaacagccttgcaaatatgaagctttcggagat

SEQ ID NO: 471336 - DNA, 577 bp, Homo sapiens
tagcacccaaagccttgaaggtgggaagcagagccatgggagtgtggtgtgatgggagcttgagtaccactggtctgacctagtcttgcaggcagtcatgggaggtagggctttcctgaggccacattcttacagcaacatggtcatggggaatttgatccttagaacagcaatgaggaggagaagctgagtctgagattactggctcttaaccaaaatcttcgaagaggactttggaggtcctggatgagggtaccctcaagtccaagcggaaacagaagcgaattttcttgtggattcccaactcagacccactggactctgaagaggacaagcagcatggcctcacaagcaaagattcccaaatacataaggagcagacccctattagtgggaggcagcagactcaagagctacctcaagagctggatatagcttctcaagaattacagatgttggaatggccaaataccaaacacaaactaggtaggtatgagaagaacacataatacaaakaacatacaagaaatgaccaggaatgaagaaacagccttgcaaatatgaagctttcggagat

SEQ ID NO: 471337 - DNA, 650 bp, Homo sapiens
ctctcctgacttccacgtatggcccaggaatcttggttctgactgtcaggccagctccacctgggccaggtatttatagatgacatccttagatggggaacacagagctagctgctataatagaaacccaaaataacagtgaatttaaggggggtagacatttatttctctctcaagcaatccagggtgtctccatgtcagactcccaggccccttctgtgttgttgctcctgcccacctagagtgttgccctccctgcatggcccatgatggcttcccactgtgttcacagtccaggcagcaggatggaagaaggggagtcaaagccaggttgcacccatctcttttccctctcagcccaacaaccagaactcagtccactgaaaggtaggaaatgcagtctttgttctgggcagccatgtgggagagtggatactggcagacaagtagcaggttctgacatgtggcctgtgtcttgggatttgattaagatgaaccaaagggcctgttgagagcatctgcactctgacctgtcaggagatctctatacactgtaggccacraacttatatgcaacaaaccacgaagaccaaagcaggctgtggcaccaatcacccatccctcctccaaggagctggtgcagaccctca

SEQ ID NO: 471338 - DNA, 482 bp, Homo sapiens
agttggcttggccaggttactgaacctctccaagcattcaatttctctaattaaatagccgagggtgattgactgaaaggattgtttaagtgtaagaccaagttctgtgggaagaagcatcctccatagtgcagcaccttcgtcaccactcacttaagctctaacatatggcaataacttctgtattataagtgaagaaactgagcctcagtgagagaaagaggttgctaaagtttcaggaattagcaaatgttggacttgagattyaagtgaaaatgggtgaagaaacattcctgtaggttagggtagcgcagtgggttgaatagcagccgctcagaatgtaagtccatgtcctaatccccagagagtgtcagtgttagcttatcaggaaaaagggtctttgcagatgtaattaacttaagaattttgagatgaagacatcgtctgggattatctggggagccctaattccaatgacaggt

SEQ ID NO: 471339 - DNA, 620 bp, Homo sapiens
atgactttatgtatgtgaggcacttagaataatctctcagtgttattatttaaccaacatttttgttgaatatttagttcatttccaggttttcactcttacaaatatactgtaattaacaaattcagtgcactcttaattgcttccaaagaaaatatctgtggtcacatttaaaaatcttttccagagtgaatcatgcactcaacacaaattgagtgtccatatgtacaaggcattatgttatgcacaaagaataaacacagttctcttcttgaagacacctaaaatgtagtaaggaagaggagakaaaaaggctcatgcaaatataagcaaaatactatgcagaaagagggcacacatgaagacctatgggagattctttagctggagaatcaaatcattcaatgacagagaaatgcagactccctcctctgctcccaccacctcccaaatccccaaatcggaattcacaatggtctccttttgtcatgttgagaatttgttacctcgaaagagcacacccagggctgtgttccaaagttaaaagctgggatatgggcgtatactgcaagaccaaatatttaggaaatacctttttctggaaaggaaagaacacattt

SEQ ID NO: 471340 - DNA, 634 bp, Homo sapiens
ctggtggtttttaattgcatgtgtgaatgttaagtggggttgacggcaaggccggacagagctgatggttttccatggtcagtatgcacagcagcaagagctcattacatgcagcacagatgggcagcccagacacatggcagcatggagcaaggtttactcaagaacagcctgggtctgctgcatgaaaagacatgaagccccagcagacagaggagttaggaggacatgatccaagtcagtggtctcaaagtttggttaagagattgctgtggtgtgtttttttgtttcttgttttttgggtttttgagactgggtctcactctgtcacccaagctaaagtgcagtagtgccatcatagctcactgcagcctcaacctcatgggttcaagcgatcctcccacctcagcctccagagtagctagggctacaggtgcgtgctaccatgcctggcttttaagttttttgttaagacagggtctcactatgttgctcagggtggtcttgaactcctgggctcaagtgagcctcccactttrgcctccccaagtgttggattacaggcatgagccactgtggttcttaaaggccctccaagtcacctacaatgtgtctgctttgttttgggcattac

SEQ ID NO: 471341 - DNA, 525 bp, Homo sapiens
cacagagagcggggttcaggagcagctcacggcatgatagcttgcagcggcagatacgggtggtctaagcattccctgtccacagctttcctagctgagaaaagtttatgggaaactgattcttgctccactgctccatgcaccttccttcagcatcactgagcagctctggtatcrtctgctgtggggactattctttccactgcatatgcagcttggcctctgggtgacagcttatttttcaggctaccagtatttggcaagtgcatttaggactactgaccttttccttagacctggttgtccatgaccctgacctaaaggtctcacaacctatgtgagctgccacccttgttaggggcctccccatttcccctcctgaccccggagcacaggaggcgctgtgagagcaactccccgcccctcctgcggcctcactcacttctcgtggggagggagagtgatgtgtgggtccaccccttctgggtccttccctgacaggatctgcctgcctgcagagagccc

SEQ ID NO: 471342 - DNA, 483 bp, Homo sapiens
aaggcaattcacaatgtgcacacagctctgctgtatccaaactgctactctgctaccccacacagacaaaagagtcatatgttccttttttacattcaaaaagaatatgtgagtttcttattggttatatatgcatataatttcagagtgattttccctggtatttctaaacaaatgttctagtggtctaaatactgagacaaggagctatactttcttaattacactgcaattagtgacacattcaacagacactgcaccctcattctcaacctggagtcatatacagtcagccaaattccaacacaaataggtatcctcttttaccccctagaataaaaaaataagatcacggcttagccaaagacatatttatttataagcttgacaaagacactgcctaccttcaaatatcttagtaataatccactgggtatgtggrtatattagaccataaaatgcacaaaaacatttcttaaaaaa

SEQ ID NO: 471343 - DNA, 596 bp, Homo sapiens
tgctgctgctgctgggcctcgtgcgtggtgcagccgcagcggatgcggtgaaaaagggcaacgggacagcctgcgtaatggccagcttcgctgccttctcgatgaactacgactctaagagtggctctaagaatgtgacctttgacctgccatccaatgcggaagtgcttgacagtggctcttgcagtaaagagaacacttccgaccccaggcasgcgattgtgctttggaggaagacagacactgaccttccatttcacaagaagtgcgacacgtgacagcgtccagctcatgagttttgtttacaacttgtcagacacacacattttcctcagtgcaagctccaaggaaatcaggactgtggaatctctaccagatatcaaggcccccaggtccgcacgaacagcgagaccatcaggctccgcggtgccccgatccaggcctagatttccaacagcagcttcagcaagggagagacgcgccacgagcaagacgcgccttccccgccacggcgccgagagccccttctcccctccgtggccaggtacagcgtgagcggcacccacggggcctgcctgccggccagcgcgggactg

SEQ ID NO: 471344 - DNA, 596 bp, Homo sapiens
tgctgctgctgctgggcctcgtgcgtggtgcagccgcagcggatgcggtgaaaaagggcaacgggacagcctgcgtaatggccagcttcgctgccttctcgatgaactacgactctaagagtggctctaagaatgtgacctttgacctgccatccaatgcggaagtgcttgacagtggctcttgcagtaaagagaacacttccgaccccaggcacgcgattgtgctttggrggaagacagacactgaccttccatttcacaagaagtgcgacacgtgacagcgtccagctcatgagttttgtttacaacttgtcagacacacacattttcctcagtgcaagctccaaggaaatcaggactgtggaatctctaccagatatcaaggcccccaggtccgcacgaacagcgagaccatcaggctccgcggtgccccgatccaggcctagatttccaacagcagcttcagcaagggagagacgcgccacgagcaagacgcgccttccccgccacggcgccgagagccccttctcccctccgtggccaggtacagcgtgagcggcacccacggggcctgcctgccggccagcgcgggactg

SEQ ID NO: 471345 - DNA, 413 bp, Homo sapiens
agctgtgacacttcagtctctgctccatggtcacatggccttctcacctgcactaatgcgagtggtgagctcattaggccacatcctcagcttgctcctccttcttcctctttggaagaaasagcaggtcatcctgtcacataattgtcacccgcataagaagactgcctcccatgccaacccaacagggcacttacttacttatttattcatttcatcaacaaatctgtactgagcttgcaccctgtgtcaggccctggggtaggtattagagctacagagataacccagacaaggcccttgctatcatggagcttacattctagtggagaagccaggtgataagcaaataagcctacatatatagatataggttgttataaattgtgataagcgccatgaacaggatgctg

SEQ ID NO: 471346 - DNA, 413 bp, Homo sapiens
agctgtgacacttcagtctctgctccatggtcacatggccttctcacctgcactaatgcgagtggtgagctcattaggccacatcctcagcttgctcctccttcttcctctttggaagaaagagcaggtcatcctgtcacataattgtcacccgcataagaagactgcctcccatgccaacccaacagggcacttacttacttatttattcatttcatcaacaaatctgtactgagcttgcaccctstgtcaggccctggggtaggtattagagctacagagataacccagacaaggcccttgctatcatggagcttacattctagtggagaagccaggtgataagcaaataagcctacatatatagatataggttgttataaattgtgataagcgccatgaacaggatgctg

SEQ ID NO: 471347 - DNA, 668 bp, Homo sapiens
agctggttcaggagattcaagagttaaggacaaaatgcctactcaggccatttcctaaccaattcttacactgttctacacagaaagatgccatgttcctattgcttagggaggggccacctaacacaaggcaggcacagaaatttcaacttcaacgtttgctaagtaattgttttatcattttaattaaaaattacccttgaattagaagtcagcaacaaacttgatttgaccctctactctcctctcactatactagcaggcaggaacttagaggcaccatggaaatcaaatgtgtgataagaaatgcaaatcaaatggagtaaggccagaaactagtatattcacaaggttgtacaaccatcaccactaactaattccaaaatattttcatcaccccaaacagaagtactgtatctgctgtcatcccccattccccactccttacagccctaaacaaccactaatctactgtctttatggattttcctgttctggacatttcatgcatgtagaatcaaacracatgtgaccttctgtgtctggcttctttcacttagcaaatgttttcaaggctcacccatgctgtggcatgtatcagtgcttcatccctttttgcagctaaataatactccagtgtatgaatacaccatattttgtttctccat

SEQ ID NO: 471348 - DNA, 668 bp, Homo sapiens
agctggttcaggagattcaagagttaaggacaaaatgcctactcaggccatttcctaaccaattcttacactgttctacacagaaagatgccatgttcctattgcttagggaggggccacctaacacaaggcaggcacagaaatttcaacttcaacgtttgctaagtaattgttttatcattttaattaaaaattacccttgaattagaagtcagcaacaaacttgatttgaccctctactctcctctcactatactagcaggcaggaacttagaggcaccatggaaatcaaatgtgtgataagaaatgcaaatcaaatggagtaaggccagaaactagtatattcacaaggttgtacaaccatcaccactaactaattccaaaatattttcatcaccccaaacagaagtactgtatctgctgtcatcccccattccccactccttacagccctaaacaaccactaatctactgtctttatggattttcctgttctggacatttcatgcatgtagaatcaaacgayatgtgaccttctgtgtctggcttctttcacttagcaaatgttttcaaggctcacccatgctgtggcatgtatcagtgcttcatccctttttgcagctaaataatactccagtgtatgaatacaccatattttgtttctccat

SEQ ID NO: 471349 - DNA, 406 bp, Homo sapiens
cccgcacgctttgggtgcacaggctcttactttgtgtctttttcctaatttcatgaagcctggtccccgtttgcctccagctaatcaatgctattgtacacgtttaggtctttatctcagttgaaacctgcaccagaactggagaactaagtagtagtcatatatagctcagcatgaatattagatatttcttattttaagtcttctcttgaatcatttaaagacatttcaatcacttattaacaggtatggaagttgttttgggggatgaggaccttcagtcctcttcttggtccttcagaaccacatcatctgggtggtgcctcttctgccccttcctcctcgaaggcagctctgccaccactaacagccacagwggagaagaggaaggggacttgcttcacgt

SEQ ID NO: 471350 - DNA, 613 bp, Homo sapiens
gctggggaaacaatgtgataggtggtggccctctgcccaccaacaacatagcccaagccacccaggggtgtgggggaaaggccatgctgcaaccccccaaccccactccagcaaacacacttttgggggctactttctggggcacccagagctgtcatragattataatccaggcaatgaaatcagactacagagcagaagtggaggggggtcctcttatatcaaggcaagtgaatcagaaggagagccgtagaagaaacatgagagtcataagggaagaaccacagcatgcttcagattatccaggagtaaatccggcttctcccaggaccatgaccaaataccaaaaccaggaaaaatcaatgcaggcttataggttcactaaatgaaagctttaagaataccagaaagttggctcaaattatgtacaatacccctccaatcatcaggtaagataatgattctaacaggaatcaggaaaatagcagaacaaggagaatctatccacagtgagcttaaaagcaaaggtttgattaaacagaagataaaaaatcctataaaatatttgttggcaaaaaatacagagaccaaagcactctgaaaaataattcag

SEQ ID NO: 471351 - DNA, 613 bp, Homo sapiens
gctggggaaacaatgtgataggtggtggccctctgcccaccaacaacatagcccaagccacccaggggtgtgggggaaaggccatgctgcaaccccccaaccccactccagcaaacacacttttgggggctactttctggggcacccagagctgtcataagattataatccaggcaatgaaatcagactacagagcagaagtggaggggggtcctcttatatcaaggcaagtgaatcagaaggagagccgtagaagaaacatgagagtcataagggaagaaccacagcatgcttcagattatccaggagtaaatccggcttctcccaggaccatgaccaaataccaaaaccaggaaaaatcaatgcaggcttataggttcactaaatgaaagctttaagaataccagaaagttggctcaaattatgtacaatasccctccaatcatcaggtaagataatgattctaacaggaatcaggaaaatagcagaacaaggagaatctatccacagtgagcttaaaagcaaaggtttgattaaacagaagataaaaaatcctataaaatatttgttggcaaaaaatacagagaccaaagcactctgaaaaataattcag

SEQ ID NO: 471352 - DNA, 458 bp, Homo sapiens
ttcaactttgtcattctgggcaaagaagagacttgtgagctaatagtagtgatgacagctcccaacaaccatcgctattgcccaccttcaaccctttgccaacaacatcatcatcattaatcatagtcacaacagaaaattattagcatgtcttaaatctcatcccacaaagccagaggcattttaattaggacttktaattgatatacatgaaacgacatacagtgaggtccatgctaaggcaaggaatcagtgagatacaactggaactttatgaatactgccaaccacacaagacaacagattttgtggtaaaacatgcagtttcttgcattctgtcatcactggtgccctttgtcttggcacccccacttcttgccatcctccctatccctctcccagaaccctaaaagcaacctgaagctggaaggttctcctgtggttgctctttcattccc

SEQ ID NO: 471353 - DNA, 595 bp, Homo sapiens
tgtaccagaactccactcataaacaagggaagctaggatgtttggttcttcaaaacttttttcattagagaggaaagagaaatagaaatgtaatgtatggtggaccttctactacaatggataagagcctactaactttttaacgtcaaaagaaaaatcaaataccattcactgaaggagaacaggaaaaaaaattaaagtttgtcttcaaacaaaaatggatattatactgatcacacaaagtcccataactagattttctttcttatataatcaacatttattgagcaccaactgcatgcaaggtcatactggtcatggggaatgcatgtatgaataaaacatttcccatctgctgttttgaataaaaaaaatttcaacttctacatctgttttttctctctgaagctgctggtgttacttgtattaagtaatagtaagattgaaattttgtcaggaatttatccatttcttctagattttctagtttatttgcatagaagtcaaatccctgaatagaccaataataagttctgaaattgaggcagtaattaacaacctaccaacaaaaaaagyccaggaccagacggattca

SEQ ID NO: 471354 - DNA, 579 bp, Homo sapiens
tgccatatcagggtggcatgagagaaaggatcatttccctgagaattgctattgcctagttcaaaccatggttataagtttcactctattttccaaaatgcacacacagaaagggttccatcatattcccatttcccagatttgaccatgagagatactagttctataagggatgcttctgatttttttctgtcttccttctaaaccagcagttttgaacttaagaatcaagactatgctaactttgttattccagttgcatagcatctttctttccccagggcaatgtgcaagttatgtctaacttctctgggctgaagggaaacagccttaggtaaataagtgaagagaaaaaatttaaagagcttggcaatgagaataaagtacataaatgcatacatgggtggggggaggttatgctcctacagttaagtatctctgtgttgtactgtacatattagcaatgctcccatatggctctggatgctgggcttctgtyactgatgctgcatacaacttgtcttttaatgataatgcagtcctattgcattaagactcaagactctctttgaaagtcaa

SEQ ID NO: 471355 - DNA, 622 bp, Homo sapiens
ttaggtgtgccctcctagtctgatcagccagaggactggacacctaggagctgcttgcctttccttgagctccgagggcagttgaggatcagggaggcaagggagctagatgtccagtggtagaygctctctagggcagcctctttgcccccccaggaatctgcctctcctgcccaacccggatgccagataacataggtttcttttttctgtagcactctcctagaggagctgtgttaggtagataatctgcctagagctggcctagctggggatcaactcaacaagaatttcttgtttccaagcgtctccttcacatgggcatccagtgccaatttgtgtccaagtctcttccctagcacacgggatggaggtccagcatatttggagacagctcactgtgtgccagagccacaggtcctagaatatccagcaatcacagtacccagggccaccccagcctcacaagtcactgtgcccaaggccctgagggaagaacagcttgctcactagtgcctgaaggaggctcccaaggcagccaccttgtacactggagacactcccagcagtgggaggcagatcaaggccaggacaccgttaatgaagctttgactagggtgag

SEQ ID NO: 471356 - DNA, 622 bp, Homo sapiens
ttaggtgtgccctcctagtctgatcagccagaggactggacacctaggagctgcttgcctttccttgagctccgagggcagttgaggatcagggaggcaagggagctagatgtccagtggtagacgctctctagggcagcctctttgcccccccaggaatctgcctctcctgcccaacccggatgccagataacataggtttcttttttctgtagcactctcctagaggagctgtgttaggtagataatctgcctagagctggcctagctggggatcaactcaacaagaatttcttgtttccaagcgtctccttcacatgggcatccagtgccaatttgtgtccaagtctcttccctagcacacgggatggaggtccagcatatttggagacagctcactgtgtgccagagccacaggtcctagaatatccagcaatcacagtacccagggccaccccagcctcacaagtcactgtgcccaaggccctgagggaagaacagcttgctcactagtgcctgaaggaggctcccaaggcagccaccttgtacactggagacactcccagcagtgggaggcagatcaaggccaggacacygttaatgaagctttgactagggtgag

SEQ ID NO: 471357 - DNA, 550 bp, Homo sapiens
tgccgtcactgtggcccacatatgagctgcctctggccgagcctggacctcccgagccttagtcactccaagcagagcagctcacaggccgaggggcaggtgacttcccacactcgccagcgcttccctgacggggctcatcttcacccctccctcaccctggtgctctcccaggatgcacccctccggctcgccccgcccacactctgtctcctctgctattgggcttctctcccctctcccaggaccccagaacttctaaatgcagggcaaaaatccatcccagacctccagcagagacacttcgatattaaggaaatggccctggacttctgcctctaacacttctgcgactcatattcagtcagtggtccactctgacccttacctcctgtcttctttgacagtaatcggacagactttcccctgactttcctatcaggcatggggacagaggggccatttttggttgagttgagcttgggttgaagggagaaggtagggaggacggtctgaccgtstccgctccagccaggaagcatcagcggga

SEQ ID NO: 471358 - DNA, 628 bp, Homo sapiens
tgccaggtgatctagccattcttctrtcagcacttacccaaaggtaattaaaatgtatgtacagacaaaaggttgcacatgaatgttcataatacctttatttgtggaagcctcaaactagatacaattcaaatgttcatcaacagataatgggcaaactttggcacattcataacatggaacattacttagaaatgaaaaggaatgaactattaatataagaaataatgttggtgaatcttaatatgctgagtagaaattctagaatacttcctccaagtttatgttccatttatttaaaattctacaaagtacaaaccaatctagagtgacagaaagtcagatcagttgtttcatggggatcagggcaaaggaagacatgaaatggcaagagggagaaaatacaaagggacgtaagaaaaaaattcttagaggtgatgaaaattagtttttttaattgtagtgatgatttcatatatatatatacacattaaaaattatcaaatcttatatatgaaatatgtggaatttatcatatgtcaaccataattcagtaaagctctcggaaaataaaaatatatatgtgtgtgtgactacttctgaacggtttttctgttttagtgatcta

SEQ ID NO: 471359 - DNA, 471 bp, Homo sapiens
tgcctttctcagagaaatctccactgatcacagtctccagagtcaacctctttcaaaacacccattttattttattttctgtattcaccagggcttgatattttcttgattattagttcactcattccataagaagatataattctgtcatttgtttwattcccagtgcctagggcagttcctggaatatgtaggttatgcatgtcttcatatttcatagagaaggggaccttacctggtttgttcattgtggtagctttaacgccttgcacatgatatgtcctttgtatatgctaaattaattgataatgactttccttttacagtttaatgcctaattttgttagagttttaaaagtaaaatacttgggaggccaaagcaagcagatcgcttgagcccaaggcttgcctgggcattatggggaaaccctatctccactaaaaaagcaaaaaaacaaaaaaacaacaaaa

SEQ ID NO: 471360 - DNA, 471 bp, Homo sapiens
tgcctttctcagagaaatctccactgatcacagtctccagagtcaacctctttcaaaacacccattttattttattttctgtattcaccagggcttgatattttcttgattattagttcactcattccataagaagatataattctgtcatttgttttattcccagtgcctagggcagttcctggaatatgtaggttatgcatgtcttcatatttcatagagaaggggaccttacctggtttgttcattgtggtagctttaacgccttgcacatgatatgtcctttgtatatgctaaattaaytgataatgactttccttttacagtttaatgcctaattttgttagagttttaaaagtaaaatacttgggaggccaaagcaagcagatcgcttgagcccaaggcttgcctgggcattatggggaaaccctatctccactaaaaaagcaaaaaaacaaaaaaacaacaaaa

SEQ ID NO: 471361 - DNA, 573 bp, Homo sapiens
tttggatggagcatatttttgtagaatatagttggtttttatgtatctgtaaaatagcactacaaaaatgattccattttgtgattaatgtggctggtgaaacaactctgatggtgtggtctctcatgtagacctgtcttcctgccactcctggaatgtatcaaactgaagattgcaaatggagagactgggccttgtaayagacaaaggaatcatgcaataggagtggaactcagcagacccctactctgtgccaagtcccagaataaaactctattagtgttttctaactgttacgtctatatttttaaattctgtattcccgtctataacacaaacacaatttttgaatgaattaaaaatgctcttttaatagctttgtttctgagtttaaatacatattgtgacatttataaatggagagattacaaagtacatagaactgtacttaaaatacattcctacagagattgagatatacacttgtatttgacaagggccaactaaagatctatgctctgacaaaaataaattggaacattatgcatgatttacacaaaaactgagattttg

SEQ ID NO: 471362 - DNA, 592 bp, Homo sapiens
ccacagtctgagaatcaacggactggaacatagattctgaagtgaggctcagccccttatcaactgtataactttaagaaaactgtttaatccaattcttttctgtaaatggggatgagttagtgtattcctcataaacatgatacgagggttaaatgagtcaaccacttaaaaccctgcctgaattctagtaagtccggtatgtgtgtgttaaaataaaatgtgtggaattagttgcatctgttatattttacccacagtcacctcattgcacctgcatatttctgtcagcattttatttccaggtggctgaaaaaaaaaatcactttaacccattggttcccaatcttggcagaatattagaatcacctgggaagcttttaaaaattactatttcattattttgatttatttgatgtaggctgaagccttggtactagaatactttaaatacwctctaggcaattataatattcagctaggattggaaattattgccttaacctataaataagcagtatgtttctagaacatggtggtcatatttgggatcttttgttacacaaataaataatcatattgaatagtgcaa

SEQ ID NO: 471363 - DNA, 654 bp, Homo sapiens
tgggaaccacagtctgagaatcaacggactggaacatagattctgaagtgaggctcagccccttatcaactgtataactttaagaaaactgtttaatccaattcttttctgtaaatggggatgagttagtgtattcctcataaacatgatacgagggttaaatgagtcaaccacttaaaaccctgcctgaattctagtaagtccggtatgtgtgtgttaaaataaaatgtgtggaattagttgcatctgttatattttacccacagtcacctcattgcacctgcatatttctgtcagcattttatttccaggtggctgaaaaaaaaaatcactttaacccattggttcccaatcttggcagaatattagaatcacctgggaagcttttaaaaattactatttcattattttgatttatttgatgtaggctgaagccttggtactagaatactttaaatacactctaggcaattataatattcagctaggattggaaattattgccttaacctataaataagcagtatgtttctagarcatggtggtcatatttgggatcttttgttacacaaataaataatcatattgaatagtgcaaagctctgttgcctagagctttttaaaatcgggctgattgtataatgtgctcacaaa

SEQ ID NO: 471364 - DNA, 418 bp, Homo sapiens
tgttgtcgttaatggtgtgtaagcttgagaaagtgggacttcaaatacggaccaatgrtaaggacctggtgggtctagaattgagtcctgctctttatctgatgctatttaacaaattgaagagacgcatcagcaagttttttgactcctaaggacaggtaaagtgtgctcttttttatttttcacctttccctatgaatagagtgacttgtttgaaataatgaagcctttttctttcagattatttaaattaggtactcacagtttttaaaaattgtcaaaaaattgtagaaagaagaatcatctcaatgaatggtcagcttgcttctaggaactctgatgtgtatgtgtgcctgagggtatacgtgccttgtatatgggtatgagtgtctgtgtatatctgtgtgcctgtttggct

SEQ ID NO: 471365 - DNA, 555 bp, Homo sapiens
tctataccattactctgatgaattgaatgaaattattatgaggatgttaaaggattaccatcgaccttctgttgaagaaattctcgagaaccctttaatagcagatttggttgcagaagagcaaagaagaaatcttgagagaagagggcgacaattaggagagccagaaaaattgccggattccagccytgtattgagtgagctgaaactaaaggaaattcagttagaggagcaagagcgagctctcaaagcaggagaagaaaggttggagcagaaagaacaggagctttgtgtttgtgagagactagcagaggacagactggctataccagaaaatctgttgaagaattacagcttgctaaaggaacagaagttcctgtctctggcaagtagtccagaacttcttaatcttccatcctcagtaattaagaagaaagttcatttcagtggggaaagtaaagagaatgtcatgaggagtgagaattctgagagtcagctcacatctaagtccaagtgcaaggacctgaaggtccttgcttcatgcttcatgctgcc

SEQ ID NO: 471366 - DNA, 555 bp, Homo sapiens
tctataccattactctgatgaattgaatgaaattattatgaggatgttaaaggattaccatcgaccttctgttgaagaaattctcgagaaccctttaatagcagatttggttgcagaagagcaaagaagaaatcttgagagaagagggcgacaattaggagagccagaaaaattgccggattccagccttgtattgagtgagctgaaactaaaggaaattcagttagaggagcaagagcgagctctcaaagcaggagaagaaaggttggagcagaaagaacaggagctttgtgtttgtgagagactagcagaggacagactggctataccagaaaatctgttgaagaattacagcttgctaaaggaacagaagttccygtctctggcaagtagtccagaacttcttaatcttccatcctcagtaattaagaagaaagttcatttcagtggggaaagtaaagagaatgtcatgaggagtgagaattctgagagtcagctcacatctaagtccaagtgcaaggacctgaaggtccttgcttcatgcttcatgctgcc

SEQ ID NO: 471367 - DNA, 555 bp, Homo sapiens
tctataccattactctgatgaattgaatgaaattattatgaggatgttaaaggattaccatcgaccttctgttgaagaaattctcgagaaccctttaatagcagatttggttgcagaagagcaaagaagaaatcttgagagaagagggcgacaattaggagagccagaaaaattgccggattccagccttgtattgagtgagctgaaactaaaggaaattcagttagaggagcaagagcgagctctcaaagcaggagaagaaaggttggagcagaaagaacaggagctttgtgtttgtgagagactagcagaggacagactggctataccagaaaatctgttgaagaattacagcttgctaaaggaacagaagttcctgtctctggcaagtagtccagaacttcttaatcttccatcctcagtaattaagaagaaagttcatttcagtggrgaaagtaaagagaatgtcatgaggagtgagaattctgagagtcagctcacatctaagtccaagtgcaaggacctgaaggtccttgcttcatgcttcatgctgcc

SEQ ID NO: 471368 - DNA, 489 bp, Homo sapiens
ccagtcacaaaaaaggaaacactgtatgatttcctttataaaaaatgttcttaaacaggccaaactcatctatcccattcaatatcaaaatggtggttacccttagggggatcggtgtctagaagagggcatgagaggggcttccaggctgaaggaaaagtcccaattcatgacccgggtgctggctacagaagcgtatccactttgtgaaaatttcttgagctgtgtcccatgatttgtgtccttttttctatttatgttgtacttgaataaagattttactatgcttataaaaaataaatggaccaatatcccataatgctccaagaaaagcatgatttttttaaagggtatttgcgaagcccactatgtttccaatttctgtaaattcagatcacaaaggtaaaggagkggagctcatatacctaggagtcaggcgtcctctccaagaccacttctccctcacctcaggcaaatcataaggacagc

SEQ ID NO: 471369 - DNA, 572 bp, Homo sapiens
gcccctcacatgggccactatgagcacagtggtgtgcagtgtaacctggaggatgtgtttcaagagtgtgaactcagaagagagagaactgaagaataagttatacttgcaaaacatttgggtgacgactttctcagctaatctttactcagccaaaaaagagataaggtaggtaattacattccctaatttttctgacaaggaagctgaggttcagagagactgagcagtatgctgacatgttcacaatcagggtatggaaggtaatgggtggtcctcccaatgcctagtgcgagagtatttytattgcagcagataagagaaagtcagcagccaaaggggattacaaaaatagtatacagacgacggctccaatggagcaaattcgacagagggaaaacatgggaacctgagagagttatccagaaagtagctgtgaaaatcctgaaagaactaaatcctgaattgaatacagatgagacgaagaaatttgtctgcttgaactgaggagctgtatgaaattagaccaaaaagatgatgacttgattaacgtcagtgatatattaaatctg

SEQ ID NO: 471370 - DNA, 485 bp, Homo sapiens
gtgcataagttttaagttctaaaggcagatgagaaggatgaccaagtgtcttccttcttttttatatcatgtttatttactagatatgttttctgtctcttttgaaagtacagagaagctgatagggggcacattgagaaaaagcaaacaaagcatttctgagcagacagcgctcgtttcttacaaataaaggtgccaggcaaacagtcaggctttattctctctatccattttcccactagtgaagtgactctcaggtacttcagtacggggctgaagtacgaggcctttgtactaaaactttttttttttttttgagatggagtttcactcttgttgcccaagctggagtgcaatggtgcgacctcggttcacctcagcctccacctcccaggttcaagcgaytctcctgcctcagcctcccgagtagctgggattacaggcatgcgccactatgcctggctaattttgcattttttgtagag

SEQ ID NO: 471371 - DNA, 568 bp, Homo sapiens
ttataaagatcagtcccacaggctgccaggattactcactcctgaactctatacgcatatcctttttgctaagacttgcaattggtcttggtgcttccagacaaagagtcagggtagtcatctcagagctgaaacagttcatgcatcatgtcacccaccccaacattttaccctacygggaaattgttcacctagaaggcattgaggataaatctgggctttgttcattatagttgtggaaaatattagtcgtgaaaccccaaagtcactccaagtgccggtggctgattataaacaaagaggagggcctgagatgggcagagctgagggccaggaccaccatctcaggcctgagctcaggaggggcataaagactcctattgtttgcacggagcctctttgatgctcactcaggaagcccccttcccaaacagtcgcctctgccagtccttggggacctggggaatacgttcgcctggcctttggtctgtgtgtttagactcatgccacaccgaatttcatccgggaggaaaagctgtttcagatgaccatgaatagcagctttcat

SEQ ID NO: 471372 - DNA, 537 bp, Homo sapiens
ttgagactggctcacgtaatttagtccctaattatacaggtcaggtccatttgctgtttttttcaggtgagttactctactctccctaactaggctctagtgcctttcaggcagggactgtgtccgctgggacctgagcgtggatcggtttcaataaatccctgctgcttgaatggttgtagaaatggaaccgttcctcttccaggaactggctaatgagagagccactttggttttcttcgtatgctgttgtgctgccggagtaaaccagcaaaggctcggcatctgcagktcgcttgcagtcagcctcctgttgcccagcccacagcctgtttcacttctctttctcacatagcagggcggcttgggctgcagcttgttttttctcagccaagaaagtagcacccagagtgaaagggagtgcacctcgcttcaactacagtaaggaactgacaactggcacagagacccttagaatagaacaggaggagggacagtgacaggcacctttgtcacacctcatctcaggtggcattg

SEQ ID NO: 471373 - DNA, 583 bp, Homo sapiens
gatttattaaaccagaagttcctctctctaacaggtgctgcttctttttaaaaacaaattttatattgcttttagagatggtatcttgctgtattgtccaggctggagggccgtggctgttaacaggtgaaattccactactgattagcccaggaatttttaatctgctctgtttccaacctgggtcagttcacccctccttaggcaacctggcagtccccactctggggaggtcaccacattgatgccaaacttagtgcagacacctcatcatagagcactatagcccagaactcctgggctcaagtggttctcctgagatggacaggaggcagggaaatactgggtagaagagggcagttccctggcaaaagccccaccctcaagcctggaaacctgtgaccctaaatgggaacaggcattcctgttttcacacccaaatgttgacttttggcctgccgtacccacccaatcctgtacccatataaaygctaaaccccaggctccatgagcagaatagctgctgggtggcagagcagtaaggcgaagaaagagaagagaaggagcgtctgaacgtcaagag

SEQ ID NO: 471374 - DNA, 569 bp, Homo sapiens
ttttgtatcttttgagtttctttctttcagctatagtttttagtgttttatctgattgttctttacaactgctgtttcttgctttgttgaatattttttcttctgggacgatatttttaaacttgtttagatttttgcatctgtccccataatgccagttcaagtactggctgctcaatatgtttcatttctagcagttatctttcccaaatgcctggtgtttccttttccctctgtgagctcattttcccctggaggtgttagccatgacccctcaggaggacaggtgcagttcctggtgagttcaaggcaggaggaagtcctgctgcagagcagggatcctgtggtttggagtctggakggatttccctcactcgtgcccctcaaccaagctgattttaatcagctcctacactgccccccaacctttttgttttcttgagacagagtctcactctgtcgcccaggctggagtgcagtagcgcgatcttagctcactgcaacctccacctcccaggttcaagtgattctcgtgccccagcctccagagtagcagagtagctgggatt

SEQ ID NO: 471375 - DNA, 569 bp, Homo sapiens
ttttgtatcttttgagtttctttctttcagctatagtttttagtgttttatctgattgttctttacaactgctgtttcttgctttgttgaatattttttcttctgggacgatatttttaaacttgtttagatttttgcatctgtccccataatgccagttcaagtactggctgctcaatatgtttcatttctagcagttatctttcccaaatgcctggtgtttccttttccctctgtgagctcattttcccctggaggtgttagccatgacccctcaggaggacaggtgcagttcctggtgagttcaaggcaggaggaagtcctgctgcagagcagggatcctgtggtttggagtctggatggatttccctcactcgtrcccctcaaccaagctgattttaatcagctcctacactgccccccaacctttttgttttcttgagacagagtctcactctgtcgcccaggctggagtgcagtagcgcgatcttagctcactgcaacctccacctcccaggttcaagtgattctcgtgccccagcctccagagtagcagagtagctgggatt

SEQ ID NO: 471376 - DNA, 558 bp, Homo sapiens
cagctgtaggacctctagcatgacagtcacctatggacttctggcaggagtgatgcccatctgtgaccccaaatgcttctcagtcctcaagggacagtgtttgtttaatggcacaggacactcatggatagagggcagaacccaagatttttgctcagaagcaacagaaagagaggctagagatttatatggaagatgaggaccaactaaaacaacaggaaccccaaagaaccagactcagaaaaaggccacagccttgtcagggtgccagagatgcagggaatgacctccaactccttcttctatcctctaatsacccctactcaaatgcaaagttcttgagtcataagttcgtctctatgcagagagaaaaccttgactgaccatcccaccaagaaggaaacctttaaatgtattatggagttgatgtatttttcttttcttttttttttttttttttttgagttggagtcttactctgtcacctaggctggagtgtggtggcatgatctcggctcactgcgacctgcaacctccacctcccaggttcaagtgact

SEQ ID NO: 471377 - DNA, 636 bp, Homo sapiens
cttaaggtaagtaaaaatatttaaacagggcacacacatgaaacatataagacaaactcgacaaactggtctatattaaaaataagaacttctgtttatcgaaagagatcattaggagagtgcaaacagcaagcatgagagcagagtgtatactcattatacacatggcaacaaaggcctcagggccagaatgtgtcaaccagaaataataacatcctccccatgtacctcaaattccatgatgaatgtggacagattttgaaacctacaaaatgcttcatcagtataaggaatgacatgcttggtcttcttggtgggtcactgcaacagtcccagatggagccgaggcagtctctccctttcgcayggcaaaaccagggatcgccaccctcccacctatgcccattacctacaagatgccacccagggtccttggcatgtcttttacagaccttcatcctttagtccttgctgtcatctctccccttatcctcaccattggccccatccatgctgagctccagcccccctgagttgctttgccccgattacaccacactcattaacatccctgggccttccgcaagctctttcctcttcccaagatactctttcctccctgcactggcaagccac

SEQ ID NO: 471378 - DNA, 497 bp, Homo sapiens
gacagcttacaaatgccatggcaacatcaggaagttaccctatgtggtctaaaaagggaaggcatgaataatccaccccttatttagcataccatcaagaaataaccataaaaatgggcagctagcagccctcagggctgctctgtctatgtactcgtaacccattctttyattccttcactttcttaataaacctgctttcactctgcactgcggacttgccctaaattctttcttgtgcgagatccaagaaccctctcttggggtctggattgggagtcctttcctgtatatctctgttctgtaacaccttgaggctcattttgtgtgtttcctttctctcaacaatcacagttctgcactgtgtaatgttcagtgtctgaaaacacctgcttcatgtttgtctaatttaatagtagttttctgtgggaatgaaagtctagtactagttacactgtcatggccaaaactgagggccttttgggtgtcttctaata

SEQ ID NO: 471379 - DNA, 517 bp, Homo sapiens
tattgctagagctgctctggctggaggcaaggcaagtctgctgatcaaatgcttttatagctaagaaaataagaatagcttgttttaaaatattagattccattataaagtctygatccttttagcctcagcttgctgtaggctcattcaaacctttttatatcccagatctacactggacacagtcctttaagacagagtcataaaccacaaagcccacggggccaggccaggaacacgcacaggaaagtgagctgagtggaggctgcggaagtgccggctgggtggaggcggagcgcacacacctctaagtcacgactgcctggcttcggcccacggctgttacaccttttgactttgttccaaaatattttaaaattgaaattcacgacttctctaaacgtgagaaatctcatttttcactgttgacaagtggactttttttccccaatattttgagctaaacaaaacatgtcagctctccacagacagtttttatttgtccacaagcttgtga

SEQ ID NO: 471380 - DNA, 517 bp, Homo sapiens
tattgctagagctgctctggctggaggcaaggcaagtctgctgatcaaatgcttttatagctaagaaaataagaatagcttgttttaaaatattagattccattataaagtcttgatccttttagcctcagcttgctstaggctcattcaaacctttttatatcccagatctacactggacacagtcctttaagacagagtcataaaccacaaagcccacggggccaggccaggaacacgcacaggaaagtgagctgagtggaggctgcggaagtgccggctgggtggaggcggagcgcacacacctctaagtcacgactgcctggcttcggcccacggctgttacaccttttgactttgttccaaaatattttaaaattgaaattcacgacttctctaaacgtgagaaatctcatttttcactgttgacaagtggactttttttccccaatattttgagctaaacaaaacatgtcagctctccacagacagtttttatttgtccacaagcttgtga

SEQ ID NO: 471381 - DNA, 439 bp, Homo sapiens
tgtgtccacacccaaatctcaccttgagttctcataatccccacatgtcaagggtggggccaggtggagataattgaatcctgagggcagtttcccccatgctgttctcaggatggtgagtgagttttcacgcgatcttatggctttttttttttttataaggggctcttctccctttgcttggcacttyttcctgccaccttgtgaagaaggtgcctgcttctccttcaccttctaccatgattgtaagtttcctgaggcctccccagccatggtgaactgtaagtcaattaaacctctttcccttataaattacccagtctcaggcagttcttttctttatagcagtatgtaaatagactaatacacatgctatccaatagattaaagagactgaaacacaagtgtgtccccaagacaggaagagctgggaaaataa

SEQ ID NO: 471382 - DNA, 352 bp, Homo sapiens
gggcaatgcaggtgaagggaagaacaagccgatggcccagaaggcaggatgagaatccgagatccactctccatgatctgccatgagttccaccagaggcctggccatgccttggtttcccccagcccacagcctgmaaatagctcctcgaaacccttggggtgttatggcccctgctcatcctcctgagggcacaggcagcgaactgagaacccctgtgaatagcactctggaaaagtcaagtgccctccacctgctgaatcacacttgacttttgctaaaatcaagacaattacaagattgttcctgatcctatttagtacggctggatggcccttgagccaaattagag

SEQ ID NO: 471383 - DNA, 576 bp, Homo sapiens
aaactccctaaggtatgataagggagaaagcacagttagaactatacatgcaaacagatcagcactgcaagcaacatagaaaaagctcaaaatagttgatttgatgggtagtaggatcagggtgatttaaaaatgtttttccttattgccagtattgcattatctgtataataagcracatttaaaaaatgatatactgtcattgggatacttccttcagtaacaaaaattaatggaggaggctacagagtttactgtgaagaatttgggtaagtctccactgttctgtgcttctggggttgccccacatgtttcatgaagaattctaacatctgcccatcctcctccatgggggtattaggaaactaagaacggcaaatcatcaacaggactaggtatgaaagaaaaaacattgagaaaaaaaagaggctgggcatggtggctcacacctgtaatcccagcaatttgggaggccaaggcgggtggatcacttgaggtcaggagtttgagaccagcctggccaacatggtgaaaccctgtcttttctaaaaatacaaaaaaaaattagccgggcat

SEQ ID NO: 471384 - DNA, 576 bp, Homo sapiens
aaactccctaaggtatgataagggagaaagcacagttagaactatacatgcaaacagatcagcactgcaagcaacatagaaaaagctcaaaatagttgatttgatgggtagtaggatcagggtgatttaaaaatgtttttccttattgccagtattgcattatctgtataataagcgacatttaaaaaatgatatactgtcattgggatwcttccttcagtaacaaaaattaatggaggaggctacagagtttactgtgaagaatttgggtaagtctccactgttctgtgcttctggggttgccccacatgtttcatgaagaattctaacatctgcccatcctcctccatgggggtattaggaaactaagaacggcaaatcatcaacaggactaggtatgaaagaaaaaacattgagaaaaaaaagaggctgggcatggtggctcacacctgtaatcccagcaatttgggaggccaaggcgggtggatcacttgaggtcaggagtttgagaccagcctggccaacatggtgaaaccctgtcttttctaaaaatacaaaaaaaaattagccgggcat

SEQ ID NO: 471385 - DNA, 576 bp, Homo sapiens
aaactccctaaggtatgataagggagaaagcacagttagaactatacatgcaaacagatcagcactgcaagcaacatagaaaaagctcaaaatagttgatttgatgggtagtaggatcagggtgatttaaaaatgtttttccttattgccagtattgcattatctgtataataagcgacatttaaaaaatgatatactgtcattgggatacttccttcagtaacaaaaattaatggaggaggctacagagtttactgtgaagaatttgggtaagtctccactgttctgtgcttctggggttgccccacatgtttcatgaagaattctaacatctgcccatcctcctccatgggggtattaggaaactaagaacggcaaatcatcaacaggactaggtatgaaagaaaaaacattgagaaaaaaaagaggctgggcatggtggctcacacctgtaatcccagcaatttgggaggccaaggcgggtggatcacttgaggtcagsagtttgagaccagcctggccaacatggtgaaaccctgtcttttctaaaaatacaaaaaaaaattagccgggcat

SEQ ID NO: 471386 - DNA, 650 bp, Homo sapiens
gctgccccctcagcctgggccaggcatggtttcttcccaggagacaaatccagagtgtggctgtggggaaagtgaccactttgccctgactcgatcggttaaggagctgtgcaataaccttcccagtacctgagtgagtgtgtcacttattgggttggccaagcctagtaaagctgttggaatgaggatgtgattctttttaagtgtgaaaaaaaaaaaaaagatttctgtacagatttgtatttgttctctggtggcattcccttagaaatgctctgtgtctgtccagcaccccggtaggcctggttgggtttctagtcatctttaaccacttatctcccatatgagagtgtataaaataggaacacatgctctacctccatttagggacttgcaacctctgcatcccaggttcaagygattctcctgcctcagcctcctgagtagctggaattataggtgcccaccaccatgtctggctaattttttgtattttcagtagagacactgtttcaccgtgttggccaggctggtcgtgaactcctgaactcaggtgatccacctgcctcggcctcccaaagtgctgggattacagacaagagccaccgcgaagggcttattttttaaaaaacactggagtcatggcatgt

SEQ ID NO: 471387 - DNA, 655 bp, Homo sapiens
tactctacctcttacagacttctcctccttatttcataacagaagtcctaagaatgtctcttccatcagtctattgtttgaacatgccaatcaactgagaraattttgttcctgtgtagcctttgttgagatgagatgtaaaaaataacaacataatttgcctaaaaaggttacagaaataaagaccagtgacgctgtcactgatgtctgttgctaagagaagacgattccttctcacagaccccacctaagtacttaatacctgcaaggccaacagacttttctgcttgctttcctgtgtagctggagaccattcaacagcgcttcatagtctttgacctgaggccatacggatctaatgctcaccactcattcttgtcctgtgatcatctaccagtctccagaaacatccctttcttccatttctgcagaactcttctcctgatggtccaaacaacaccctgggacctctaacttgatgcacttcagaaatctatactctaggccagtgctgcttcagtcatggcctgtgtaccaggtctggtctgtacacagtgccaatccatgaactgtttattttggtccacgtaaagataaggagcttgtgccagaatacaaatcagcttcatgactaaacacagttttgtactggccg

SEQ ID NO: 471388 - DNA, 648 bp, Homo sapiens
ctcctctaacctgtgatgccggcatctcaacatgtggctttcaggactattatggcagaacaagagcgggagggcctcacaatggctcttcgatgctttagttcggcagtgacacaaatcatttctgctcagagcccactggtcagaactactcacgtggctccgaaacaagggggcttggaaatgtggaggtacagcaggctatgaagggagcagtaaatatacctaataaactctcttctgctgtaaatcatagctggctacttgtgtttaagatgcatataggtctctccacattcaagtggacaattcagtctctttcctcttccccatcgccaaaacrtaaaacagaaaaatctatattttttccattaactccattcctatcaaatgcaaattcagttttgccaaaaccacccaccaaaaatgacccactcagctagcttctcttatatttcaactgagactatactgtaagaaacaaaaatgatctgaaccatatttgccatgtaacattaacaatgtgagaaaattattttttaaaactgttgtcaattaagacataacttatatttttctcattggaatttcccaacatggctgtcctggttaggacagccaaaccaagccaaagagcagctccctatg

SEQ ID NO: 471389 - DNA, 655 bp, Homo sapiens
cattttttattctcttctcacttgagaggcagtgtcatgtcatgaaatgaacctcagcttgctcctttttcgagatttgacttaaatgtcacctgtttcagcaaggcacatgctgacatgtcttagaagtgttgggtacagttttctctttgtctttttagtaccgacacatacattccatttagaacttttgtcattgtcttatcatgacttacagatctgtcccctgcagtggcatacgaggttcttgagggcaaagactatatctacattaatcctgtcccagtgtccggccaatagaaggtattcagtaatagctattgagtgaatragttaatgaatgactgaatgaattagtaaatgaatactcatacataagtctggaaaacagagacacgaaagataataattcttcagatagctaaggaagacatagccataatttgaattgagaggaagtataggagaataaagaaaaaaaaaggccaaagaaccccaagtttgggtctaaaaacataagcctaggatataaaatacagaaaaacaattgatctgggtaacgattaatgaggtcaaacctttcgaactaggttcaataataataaaaagattttcctttagcctctctacttgtacaaggtacatgactcaaggc

SEQ ID NO: 471390 - DNA, 619 bp, Homo sapiens
ttgtcaaaacagtttataatcttttgccaaatattgctaagtccagtttatgggcaggtattgattttttttaggtagacataccttagacaccctaataagttcccctaaagttaattttgagattctgtgccaggtaggctctcttgggtcaaagaaagtctaccaatctcaggagatcagagcctagtgtaggaagacctagggaagctgagaagaaggtctccatgttggctgccaccctggctggcactcaggtacctgaagagttgtctctagccatgggttcttttggggtcactctcgcagcaggcacctgcctggctctcatgctcagtcattgctgttattcagttccattgtcccttcttcctccactcctgcactgtgaattaccttccctcctgtcttcagaattccctctagtttatggcttctgcttacttataagcacktctgccttatggtttcagttgagtgccttttgtgtctttcagcttctgctcctacttctgactgctaatatcgatgacaccagttatctgcaaattcctcataaggggctccaatgacttcatttagccactctgcactgcagaccctattagtcagagctctc

SEQ ID NO: 471391 - DNA, 540 bp, Homo sapiens
tgctgtaataacccacgcaaaacygatgatgggctgaagctaaagcactgaggtgagagggcacagattccagggtaaatcagggggttgaaaagacacaatctgttgagtaatcagatgaaggagataacagaaaaagagtgtctaggatggcttataggtgcctgactttggaacataaattaaggtattaaggaaaaagatttgggaaagaaagtgaattggggtgaatacacacaaaatgtgagctgcctgcaggggcagcccaatagattttcagaggaactaggctcagaaaagcaatctgggttggaggtacagacagtgtggagtgtagcaaatgcagggaagtgagatgaggaggagattaaggaccaccaaactagagtaggtggaggaggaaggaacagaaacaagagctcagcagggaacaggcagaatggcttatttcttactcaacctttggttctcagcttcaagacgcattccctgagaagtaatccttggtctcctcagtttgaggtagatacttctctttgt

SEQ ID NO: 471392 - DNA, 540 bp, Homo sapiens
tgctgtaataacccacgcaaaactgatgatgggctgaagctaaagcactgaggtgagagggcacagattccagggtaaatcagggggttgaaaagacacaatctgttgagtaatcagatgaaggagataacagaaaaagagtgyctaggatggcttataggtgcctgactttggaacataaattaaggtattaaggaaaaagatttgggaaagaaagtgaattggggtgaatacacacaaaatgtgagctgcctgcaggggcagcccaatagattttcagaggaactaggctcagaaaagcaatctgggttggaggtacagacagtgtggagtgtagcaaatgcagggaagtgagatgaggaggagattaaggaccaccaaactagagtaggtggaggaggaaggaacagaaacaagagctcagcagggaacaggcagaatggcttatttcttactcaacctttggttctcagcttcaagacgcattccctgagaagtaatccttggtctcctcagtttgaggtagatacttctctttgt

SEQ ID NO: 471393 - DNA, 540 bp, Homo sapiens
tgctgtaataacccacgcaaaactgatgatgggctgaagctaaagcactgaggtgagagggcacagattccagggtaaatcagggggttgaaaagacacaatctgttgagtaatcagatgaaggagataacagaaaaagagtgtctaggatggcttataggtgcctgactttggaacataaattaaggtattaaggaaaaagatttgggaaagaaagtgaattggggtgaatacacacaaaatgtgagctgcctgcaggggcagcccaatagattttcagaggaactaggctcagaaaagcaatctgggttggaggtacagacagtgtggagtgtagcaaatgcagggaagtgagatgaggaggagattaaggaccaccaaactagagtaggtggaggaggaaggaacagaaacaagagctcagcagggaacaggcagaatggcttatttcttactcaacctytggttctcagcttcaagacgcattccctgagaagtaatccttggtctcctcagtttgaggtagatacttctctttgt

SEQ ID NO: 471394 - DNA, 614 bp, Homo sapiens
aggcagtgtttcccaaatttatttcaccatgaaaccttttttcaagagaaacgtaagtaacagatttcagaaattcctggtctgactagatttgagtggcagggatcatttcttacttatgtctgtatgaatcatagctctttgtagagtgtgttgtactcaatatgtgttctataaatattagaaaaaaataaacactagtgctaaaaagacaaataagtgacattctattttattgtacttttacaagtcatctagtatgatttactaagaagtatatgttaaaaatgaaagaaaatttattctgaactatttgagaaatgtagaatttttccccataagtttgggacatctggtaagttgtgttccctttaattttgtaaaaaactttgacatatgtttcctttccccatatcctatactacaaactayctacttttaattttttttttacgatgtcttagtattcctaaacacaatgacattttccaatacgattatttatttttttctttcttcttttcaggttactatagtcacttcactcacaaactctgagtagttacccacagtgaggattccctgtcattcatagtaagtatctactagcccta

SEQ ID NO: 471395 - DNA, 607 bp, Homo sapiens
cacaagtgggggtgggggagtgccgtcagtgtccagtgggtagaagtaggggtgctgggatgcactctgcaacacacaggacagcccacacaacagacatcttgtccaaactgctagtagtgctaagatgagaaattattaaaatttctgtattacatttgtattaaaataaaaagacctcactgtaaaaacatgaaacatctgcactgtaaaacattaaagacaaaaactgaagaaaatatttgcaccttataagtcaatgcaaactatatacagcaatagcccttagacaaaggcaagcagcccaacagcaaaacaggcaaactcaccagcaaacaactgaccaaaaaacccctaaatggccaataagcactaaaaagtaaacacactcccacctcgtaagtcatcaaaacaacttgaattaaaagaacatttctgatgttacctacaaaccgagccaagattttccaattcacggcattaatgatgagcactttaacacactgacaaacagaagtgtaagttgatttcaaacaaacaaaagactgggaagacatttagttttacttgaagtagtttytcttaattttaactttttattttgaaa

SEQ ID NO: 471396 - DNA, 504 bp, Homo sapiens
tgtcacaagcgatattgtcagagggaagggaaaatcctggtctgtggaagggccacagtgaccctgtgagccaagtcgcaacactgaagtcccagccaaatccctgctgtgttcactgatctggagcctgagacmttcacctgtttctcccatcacaagctgtggacccagagtctcccatgacacagcagcctcttttctcccattgttgatcaagcctaggcctactctggtttgcttggggcagaaagtcatggccagctttgatgtctaggggtaaaggtctctgtacttggacctgagagggactgagaggcctggcctctggccatgtgtatttgggatggcagcctggctcacagaggaacagaagatactcacggaggagattcagggtgactgggtcactgcgactggcactcactgggttccgtatttcacattcatagggtcctgcaatatactttgtgacaccaaatagatagagggtcctgttggttttgg

SEQ ID NO: 471397 - DNA, 504 bp, Homo sapiens
tgtcacaagcgatattgtcagagggaagggaaaatcctggtctgtggaagggccacagtgaccctgtgagccaagtcgcaacactgaagtcccagccaaatccctgctgtgttcactgatctggagcctgagacattcacctgtttctcccatcacaagctgtggacccwgagtctcccatgacacagcagcctcttttctcccattgttgatcaagcctaggcctactctggtttgcttggggcagaaagtcatggccagctttgatgtctaggggtaaaggtctctgtacttggacctgagagggactgagaggcctggcctctggccatgtgtatttgggatggcagcctggctcacagaggaacagaagatactcacggaggagattcagggtgactgggtcactgcgactggcactcactgggttccgtatttcacattcatagggtcctgcaatatactttgtgacaccaaatagatagagggtcctgttggttttgg

SEQ ID NO: 471398 - DNA, 412 bp, Homo sapiens
acggtatgcaacaccacattcaataaatttttaaatttttggaaagatgaaatcttgctatgtctcccaggctggtctaccagtcctggcctgacatgggcctttcaattcggccacccaaagtgctgagactacaggcctcagcaaacatcttgatgaatatccactgtaagctctgccttgtaccttcctggttttgggtgattcagtctcttaaatcaagtccctcaatgtccttctctagcatcctggcactcaatgggaaggccaggctagggtaggagacagggagagacctgaggctggaggcaggagccagtggtcactgtgtgcagattccacctaaggaaccatcagccccatcrtctgtttctcacccccattctgcttgggaaaaggcacctgagaattc

SEQ ID NO: 471399 - DNA, 615 bp, Homo sapiens
aaaaaaggatgagttcatgtcctttccagggacatggatgaagctggaaaccatcattctcagcaaactgtcacaataacagaaaaccaaacagcacatgttctcactcataagtgggagttgaacaaacaaaacacatggacatagggaggggaacatcacacactgsggcctgtcggggagtgggggactatgggaaggatagcattaggagaaatacctaatgtaggtgatggtttgatgggtgcagcaaaccaccatggcacgagtatacctatgtaataaaactgcacgttctgcaaatgtaccccagaagttaaagtataataataacaaaaaagaaagaagtgcctatttcttgagtattatcatgttattaggcttggggcatccagtgaagtatatacagcttaggtcaccacacccaagtcctttcaaatatctggaaagccttcccaggaaggatggctacaaataagcacagccagtgaaaactacaataaacacctaaccctccaatgcatagacaccaaataacatctgctagcattaacaccaaccaggaaaacatgacctcacaaaatgaactaaataagggagcagggaccagtcttg

SEQ ID NO: 471400 - DNA, 479 bp, Homo sapiens
cagggatgactcaggaccttgagtttcatttcatgtttctaatgtcatgagacaaccgtgggcctcgccctgctcagcagagtcctaccccccactttctccacacagcttcccctactcagggtacatgaaaaaggggttccccaccacaactctatggccacaccccagggggcaagttcaaccaacaggccaggcgaatgagccccatctgtgccccattcccacctgatcggaccccacagccctttgggagcactcagatactggtgagaatgcccctgtttgcttggggggcccgtggctacttattgacggcacagggcatctgttgagaagatgcaggcaggggagggaaggagagaaagacaagaggagcctatgcaattggcgagagacacagaggacagagaacatgsggaactgaggactagaacggatttctggcctgacccgttctgggggactccttttagacc

SEQ ID NO: 471401 - DNA, 474 bp, Homo sapiens
tttttattattttatttatttatttatctatttattttgagacagggtcttgctctgtcacccaagctggagtccagtggtacgatcacagctcactgcagcctcaacctcctgggttcaagccatcctcttgcctgagcctcctgagtaggggaaactacaggtgtgtgccaccaccacacccaactaattttaaaattatttgtagagagagggcttccctgtgttgctcaggctggtctcaaactcctggactcaagtgatccttctgccttgacctaccaaagtgmtgggataagaggccccagatgctttaaactgacaggtaaggtcatttgtggtctggccaactcatgcctgctccccacctgcagctccaaactctggtcctcacaagtgcctttagctcacccaatgtttcctgctgtcttgattgcctttagtccttcacacaacgaggcaatgtccttagtt

SEQ ID NO: 471402 - DNA, 576 bp, Homo sapiens
catgacatttatttgtcatttccttgaactaggtcacttgatcactgtattggaaaagtgtcctagggtcaagttctagaatctgacatttgtcttgctaagcagttgctcattccaagagaggaacctgcataattccagcacacttcttggaaacctaaaatgggtgcaacaaaatatgtctgtaacattctactttccaaagctccagcattaacttgacactatattataatatattcttttagtctgatgagaacaaatgtaaattgctactckattgctcttcacattttatcttctgtctttcctggagctgaccttgtaatttaaactgttcatgctccaatgagtgttcctgaggaactcagagttcattattaggtctagttatagtgcatcatcaagaaccactctgttgcagagaggcatgtctctttagaatgtaattcctgttgttgagggcttactgtgtctttagtagatattagagacacttaaaattcatatactaaatccccatccccaagggcttacagtttcattggacaggcagggtaagctagaaaaacatat

SEQ ID NO: 471403 - DNA, 423 bp, Homo sapiens
gttactattattaaccacattttgcagaggaagaaactgagcacagagagatgaagtaaatttaccaaaaatatgtcatatcaaaggagtagatttgggaaggaacccaggtctttatgagtccaaaacctactactttgattattagatccaactgactcacgaaaatttatttacactccatcattttactaaataactataaaagaataaagaagctgttttaatttgaaacagagactgtttgatggaaaaaacaaatctacttatcaagtaatgtgsgttcttcatgggaaataaacatcatatccaaagtatcactattcttataaaaataatttgctgagaaggaaaaagacaagtttcacctcccctcatcacccacagtgacacagcaatttgaattagttcacaattagccca

SEQ ID NO: 471404 - DNA, 568 bp, Homo sapiens
tggtaaagatctattgcatcacaacacaagcttcaaaatatgatttttaggattacttgaatcaacagtcattaatattagtaagctacccttagataaaaaataaacattaaaaagattctcaaagaaaaacagytttattattcatatttttattctagtctattgtaaaaatgcaattaaatttaaaataacataccaagtagcccctccatactgtctgtctgctatttcctttaagcagtccagagtgggcatcttcaactacaaccaagaatacaataaacaagcacatttttaatgaatactcaactatggtgtctggcagaacactgtgaaaacattctgagagctattaaagcagcataatatatggtccaaaaaaaggaagctgaaggagacaaaattagcccattcaacaaaaggggaacaatgtaaatcagtgtacgttgaaatgttaaatttcacaataccaaaggtgattgacataaagggaattcttcatgggagcagtcaaatttaagctagaatgcgaagacagaaatgataggatgatagaaatcacaga

SEQ ID NO: 471405 - DNA, 559 bp, Homo sapiens
tgcagcggggctttactataaaagtgaatcccttgatctgtgcttgaatctagtatttacatgccctttattaaatcacactagcaactggaagtttgtttttctcatcgtaacttgggtttttggttatagtacttaatgatgcaaatagaaaatttttattttggtggtaggattttcaacttttataaattattttaactatatagatctaaagatgccatttacctttctctttcacatattagtgtcttttcaattgtctgccagggatctagacatcttctagagagctagatctgaacttgttaagtcaaaaagccttagaatgtccctgaatctaaaaataaaataaaataaaataaaagccttagaatatattcctctcaaatggcaaaggtactttctcgtgtttttaaaaaagcctttataaatatcattttaaagagctgagtaatggcccatcaagaagatgtcataataaacatataatttgttcccctaccatggaaatctaatttgcttattgtgtttttgygactacaaataatgctgtgat

SEQ ID NO: 471406 - DNA, 584 bp, Homo sapiens
gggggagctgactatgaccagccacatggagaacttacagaatgccctgtacttcgatatggtgccagagtcctgggctagacgagcctacccttccacagcaggcctggcagcctggtttccagacctcctcaacagaatcaaggagctagaggcttggacgggtgactttacaatgccctccactgtgtggctgacaggcttcttcaacccccagtcgttcctgactgccatcatgcagtccacggctcgcaagaatgagtggccactggaccagatrgccctgcaatgtgacatgacgaagaagaacagagaagagtttaggagtcctcctcgggaaggggcctacatccatggcctcttcatggaaggtgcctgctgggacacacaggtaaagcttggaatgaaccaaagggcagctttctgggggctgattaaatacacattgcttcctatgaagtgtgactactaaaagagatattcctgaatctttttctctagctaaccttctttccttgaggccatcaggccatttttatttagccaggggtggtgcaaagagcgtaagttttgcagaggcagta

SEQ ID NO: 471407 - DNA, 630 bp, Homo sapiens
gcaactttgtgaacaaaattatagtggtaactgaaaggcaataaattgtgggtatgaggaaatccactggaaatccacggccatagaaaggyatgagacgcgggagacgtagagaagatacaaacatttcggcatctgtgaattttaggactcacagaagtcttcagagttattccttgaaaaaatctgactcgaccactaagaaaatttgaaactgccgttaaatcacattccccttcatgttggcctctttgcccttttattggtgggcctctgaagcatttgatgagggctactttctcttttctcttccccttttggttttctattttctcctctgctgcagttgtgtggagtttctggtcatgcaatgaaatattctaaattttgttacatatatgcagagagtcacaaggagtctggctttattttaatcaggatattagaaaagtgaagatctcaggcacgtatttgtttaaacttaagccaccagcttttacattctccagttttctgggctcctcatactctcaatttctcttctccctcatcccctccagaaaaatgccccttaacacgtcaccatgctgctaaaggcctacccttagatttttttatcaaactggaaaa

SEQ ID NO: 471408 - DNA, 630 bp, Homo sapiens
gcaactttgtgaacaaaattatagtggtaactgaaaggcaataaattgtgggtatgaggaaatccactggaaatccacggccatagaaaggcatgagacgcgggagacgtagagaagatacaaacatttcggcatctgtgaattttaggactcacagaagtcttcagagttattccttgaaaaaatctgactcgaccactaagaaaatttgaaactgccgttaaatcacattccccttcatgttggcctctttgcccttttattggtgggcctctgaagcatttgatgagggctactttctcttttctcttccccttttggttttctattttctcctctgctgcagttgtgtggagtttctggtcatgcaatgaaatattctaaattttgttacatatatgcagagagtcacaaggagtctggctttattttaatcaggatattagaaaagtgaagatctcaggcacrtatttgtttaaacttaagccaccagcttttacattctccagttttctgggctcctcatactctcaatttctcttctccctcatcccctccagaaaaatgccccttaacacgtcaccatgctgctaaaggcctacccttagatttttttatcaaactggaaaa

SEQ ID NO: 471409 - DNA, 582 bp, Homo sapiens
aagcaacgtgggtgtcccaggttgagaaacaaaacaaatgaaaattattacccatggtaagaattgcttttaccaatattatgaccaaaactctttgtagtttggaccagagggatgatgaggaagggagaggaaacaaggctgatatttactaaaggctgggtattacacacagcaccagggttttcctagcaggtctttctctgagtggatgctcaggtttttttcytgtcacttccagtattgaaagaggccagcatttccccgggtgtaatctttatcctgaaaagtgtcccataaaaaattacgctgtgatgaaataaatttgggagaccatatcccctcttgaacattcctgataaacattagcatattacagtctctgagatgatgttgcagtaaagatactagttgaattcaacattttccaagctttaggaccacgggatctctttgtctatgccctatctggtaacattcattgttctgaggaacacacatcagcaaacacaatcctcagctttatagggattgctattatcaggaacctcagaggatgaatgttttgtgaacatattgggg

SEQ ID NO: 471410 - DNA, 591 bp, Homo sapiens
ttcatacccctctctgagcgtgaaggagaaacagcaaaagctgaatttggggtgtgtgccccagtgccagccagtctttccagggtgcttccgatgcctccagtggaagtccccagcyatgttccctccctggggcattcccatctgccctcccagggaaggctgcttggtgcagcagaggtgtgctctctgggagcttcggtggagaggaaaggacaggggagtcaggatacgagggctggtggagtctgccaggtggggctagggcagcctcgctcttccttgtcccaggagcacatgtcaaaagcgccagggctggggaagcagcagggagcagaggctggagaaggcctgcgtccctgtcccggttctgctctcggcagcctcagttttctcatctccacctgtggctggagacgccttccccagtagtctccccaggttgttgggagcatgaaatgaggtgctgtcatgtgagcgcttgaacagccacactgctggactctcctaatgaacgagcaaagaaccatatgtgtcagcacaccaagctacatggcacaaatagtaaatgcctcagggaaaaggaccatt

SEQ ID NO: 471411 - DNA, 597 bp, Homo sapiens
tctgggtgtttccatgctattggtctggggttcattctctcttctgcagttgttcgtacctcctctacactatccaaccttaacactgaacagtaggaatgggagtcttcatctgttccacttggcttccaaagcttcccgtttcccaagatcaccaaaagggccagtttgcatgctgaatatttggtgccttctcaatgagctctgtgaccacccaggatttaggagggcacacaggcctctggcttcagagttcaggcatgaagagggccacggaactgtatattcaaggaaccagaggcacktggggcatctatgagaacagtctttgaccaactttttcttttcttcactccattcatactcgcccttagatgtttctatgacagcacaacgtatgttttgaaggaattaaccaagctgtcttgcttgtttttgttttttgttgttttttttaaagtaattctagaagggcagtcatgcctctaaggtcagagtgaataacactgcttcttgcaacatttagtcagcacacgcacacacacagtgcacacaaatgctacacagtgaccgtgtcccagacgtttcaacaatagg

SEQ ID NO: 471412 - DNA, 597 bp, Homo sapiens
tctgggtgtttccatgctattggtctggggttcattctctcttctgcagttgttcgtacctcctctacactatccaaccttaacactgaacagtaggaatgggagtcttcatctgttccacttggcttccaaagcttcccgtttcccaagatcaccaaaagggccagtttgcatgctgaatatttggtgccttctcaatgagctctgtgaccacccaggatttaggagggcacacaggcctctggcttcagagttcaggcatgaagagggccacggaactgtatattcaaggaaccagaggcacgtggggcatctatgagaacagtctttgaccaactttttcttttcttcactccattcatactcgcccttagatgtttctatgacagcacaacgtatgttttgaaggaattaaccaagctgtcttgcttgtttttgttttttgttgttttttttaaagtaattctagaagggyagtcatgcctctaaggtcagagtgaataacactgcttcttgcaacatttagtcagcacacgcacacacacagtgcacacaaatgctacacagtgaccgtgtcccagacgtttcaacaatagg

SEQ ID NO: 471413 - DNA, 651 bp, Homo sapiens
tcccactttctgtaaccactctttccacttgcttcttcagcctagtggtgctaatagatcactgttgttgccacttccaggccacccttgtggttctctttaccccatcataaaaagcaccagtcatctcaaattatcttaatttgagtgtgaggagatggtgggacaacctcgtagaaatatctagtaggcttatgaagcatgtcttgaactcagaagagaggacaaagaaaataaatgtaagtacaggtgtggatgcatgtacttagtggtgactattggactcttaggaaggagwgaagtgcatgaattttctgagagagagtttagagagagccacacaaagggcagaagactaacagaataaaagggcagagagaagctccacccatggacacagctcacaggtctagtcttctgggaactgttttcatattttcctaggtgaagatagtctctccctctcctctatgcttccaccgtcctttgggcataattcttaggaatattatcactgaggataacccccatgcaggcaaaactccagtcactgcttgagagcatctgataacaccaaaaagactggatgaggttgctgcagcctcccaggatggccagcgtgccctagggcctggctgctggttggtgggg

SEQ ID NO: 471414 - DNA, 651 bp, Homo sapiens
tcccactttctgtaaccactctttccacttgcttcttcagcctagtggtgctaatagatcactgttgttgccacttccaggccacccttgtggttctctttaccccatcataaaaagcaccagtcatctcaaattatcttaatttgagtgtgaggagatggtgggacaacctcgtagaaatatctagtaggcttatgaagcatgtcttgaactcagaagagaggacaaagaaaataaatgtaagtacaggtgtggatgcatgtacttagtggtgactattggactcttaggaaggagtgaagtgcatgaattttctgagagagagtttagagagagccacacaaagggcagaagactaacagaataaaagggcagagagaagctccacccatggacacagctcacaggtcyagtcttctgggaactgttttcatattttcctaggtgaagatagtctctccctctcctctatgcttccaccgtcctttgggcataattcttaggaatattatcactgaggataacccccatgcaggcaaaactccagtcactgcttgagagcatctgataacaccaaaaagactggatgaggttgctgcagcctcccaggatggccagcgtgccctagggcctggctgctggttggtgggg

SEQ ID NO: 471415 - DNA, 545 bp, Homo sapiens
gccggctaaactccatcctccccttttcccgagcccagcactgaatgatgccactgcccaaggccccatctccctggaaggtcttcctggtaccttgagagtctttccacccgccaagaggcagtcacttgacatgaactccaaactagcgagactgaatttctaggttatgtgctgtttgatctttgcatggaaccgtatgttccaaattttccagtagagctctcctgtcacatactcagtcctattggtcccataagtacacatgtgtttgtcagatcttaccctgatgtagggctagaaaaacaggctcatcacatgcgtgggccaatagtgatcttgtgttcacagaacgtttgtcagcagttgyttcaccaggcttgtctagggcccattttctttcaccaacatgagcagccagccctgaagaaggcccgacactcgcttatcagcggtgagcatggcctatctgagaacacttgggtggagaaatgtcgtgtattttccaaattagaacttgagttggaggagctgtttctggggca

SEQ ID NO: 471416 - DNA, 545 bp, Homo sapiens
gccggctaaactccatcctccccttttcccgagcccagcactgaatgatgccactgcccaaggccccatctccctggaaggtcttcctggtaccttgagagtctttccacccgccaagaggcagtcacttgacatgaactccaaactagcgagactgaatttctaggttatgtgctgtttgatctttgcatggaaccgtatgttccaaattttccagtagagctctcctgtcacatactcagtcctattggtcccataagtacacatgtgtttgtcagatcttaccctgatgtagggctagaaaaacaggctcatcacatgcgtgggccaatagtgatcttgtgttcacagaacgtttgtcagcagttgcttcaccaggcttgtctagggcccattttctttcaccaacatgagcagccagccctgaagaaggcccgacactcgcttatcagcrgtgagcatggcctatctgagaacacttgggtggagaaatgtcgtgtattttccaaattagaacttgagttggaggagctgtttctggggca

SEQ ID NO: 471417 - DNA, 380 bp, Homo sapiens
ccattgcattgctctgcagtaaagagtcttcaatgyagggacctcctgggcactgtgagccctggtgttccaaaccccaagattcccattccctcacctaccacaaaattcatattcatctgggagaaccaactcaaggctcagcccaaccctgccaaggtcaccagaggataaggccgtgaatcacttttcccacaacttcccttttaagggcaggtccccagcttttattgtactctgttttatatcattataattgtgctgatcagcaaggagaacagacccatttttacaagggaaaggagacacccacaaaaaaaagccaaaattatgacagtttaaagcttgcagcaaacactttttaaattagatctgccttc

SEQ ID NO: 471418 - DNA, 612 bp, Homo sapiens
ccctaatgcagttcagagcagtgggcttggccttcagagctgcgtagaggaaagaatctcctcccagctcttccacctcccatggagaatggcccagtagagaccttgatgacaaaatgccttttgctaaggtgaggccacacaggagactagtgccttccatcagggataacagtgatgagcagaacaacgtaagtccctgattcattgcctggaaggtagagaggttttcagttttatgttcaaacacaagaaaatgcccatgtgtttatatgtgaatctctaaggaaaagattgaaaaaatcaacctcatcaccctgaatcaaagcagaaattgaggcatcccagctctgcccttgctggrtacataatgttgggtggtttcacctttttaaatcttagtttccccatctgaaaaagtgaagctgataattccagtgcataggtggctgtgatgatagaataagatcattttcagaatacttaacacagtggtatataataagtgcccaataatggtgctatcattacaatgattattatttacttggtgcctgttataactagaagtatagaatcatcaaatattagacatgctccagcctttcctct

SEQ ID NO: 471419 - DNA, 646 bp, Homo sapiens
cagttcagagcagtgggcttggccttcagagctgcgtagaggaaagaatctcctcccagctcttccacctcccatggagaatggcccagtagagaccttgatgacaaaatgccttttgctaaggtgaggccacacaggagactagtgccttccatcagggataacagtgatgagcagaacaacgtaagtccctgattcattgcctggaaggtagagaggttttcagttttatgttcaaacacaagaaaatgcccatgtgtttatatgtgaatctctaaggaaaagattgaaaaaatcaacctcatcaccctgaatcaaagcagaaattgaggcatcccagctctgcccttgctgggtacataatgttgggtggtttcacctttttaaatcttagtttccccatctgaaaaagtgaagctgataattccagtgcataggtggctgtgatgatagaataagatcattttcagaatacttaacacagtggtatataataagtgcccaataatggtgctatcattacaatgattattayttacttggtgcctgttataactagaagtatagaatcatcaaatattagacatgctccagcctttcctcttaaagatgaggagcgtgagcccagagatgttaagtgatttgt

SEQ ID NO: 471420 - DNA, 633 bp, Homo sapiens
tatttaaagacaccttatttaatatatatgattgattcatgaacattaaactcctggccactagcaccgtaactcgcacctgcgtgaagcttatttaatgcacgtgttttctctgtgcagcacatcatagccctcctacgcatagtgacacaggacggcacttcagcattatgcttggggccattttaaacagcaaaatcaccaayaaaaagcacaaaaatgagaaaacatggcactaagtggacggtgaaaaggacacctcacagtatgagagctgaattgggaaggcagaactctacatgccccttgtttggcctcagcgggaacatgtagagtttttgtcatctgcacatgtccacagatgactgaaagtgccacgagtattgattctggagttacaaacacattttagtgagtaggcgcatttgtagatgtgggatccacaaataaggagcctgggtggtatcgatgatcaaagggcctagcacacctcaggctattggttggattccacacacaccgccctgtgcatgcttcacatcgctgagccctggcccctggctctccacaccacccctcatttttcatgttggccattgctggcgagagatgcagtcctgtctcgtgacaaat

SEQ ID NO: 471421 - DNA, 633 bp, Homo sapiens
tatttaaagacaccttatttaatatatatgattgattcatgaacattaaactcctggccactagcaccgtaactcgcacctgcgtgaagcttatttaatgcacgtgttttctctgtgcagcacatcatagccctcctacgcatagtgacacaggacggcacttcagcattatgcttggggccattttaaacagcaaaatcaccaacaaaaagcacaaaaatgagaaaacatggcactaagtggacggtgaaaaggacacctcacagtatgagagctgaattgggaaggcagaactctacatgccccttgtttggcctcagcgggaacatgtagagtttttgtcatctgcacwtgtccacagatgactgaaagtgccacgagtattgattctggagttacaaacacattttagtgagtaggcgcatttgtagatgtgggatccacaaataaggagcctgggtggtatcgatgatcaaagggcctagcacacctcaggctattggttggattccacacacaccgccctgtgcatgcttcacatcgctgagccctggcccctggctctccacaccacccctcatttttcatgttggccattgctggcgagagatgcagtcctgtctcgtgacaaat

SEQ ID NO: 471422 - DNA, 609 bp, Homo sapiens
gcccaatgacagaacaagtagccttatgaggacctgacagccctgggatagaggaggtcagtggagaaggggcttctgccctgggcaggtggctggcctgggtggcatttgggcttcctctcaactccaagagggtgacacaggcagcattgtggcaaaggttgatcatgccctctgtactgttcaaacgctggacaccargcaaatcaaatgccccatgcctgccctgtaggttgcagttggaaaaacgtgggccataaggaggccactggggtgtgcaaatctaccgcattggcttctcatccccagacctgcctgtgagaggtcagcacaggcacatgtcttggctggggcagtggaagtgaagagcccaagaggcgtgcacagggctagtgtcagacaacgaggcagctttcagcaccctggatctgagcacccacacccacgtgctggggcagggaggcaagtcaggcccacacccatgtgctggggcagggaggaaagcatactcgcaagaaactgataggcaactaagccatttcaacttaacatcctgggcaactacagagaaagagataagtttgagaagggtttttttttttttaattg

SEQ ID NO: 471423 - DNA, 380 bp, Homo sapiens
ccattgcattgctctgcagtaaagagtcttcaatgtagggacctcctgggcactgtgagccctggtgttccaaaccccaagattcccattccctcacctaccacaaaattcatattcatctgggagaaccaactcaaggctcagcccaaccytgccaaggtcaccagaggataaggccgtgaatcacttttcccacaacttcccttttaagggcaggtccccagcttttattgtactctgttttatatcattataattgtgctgatcagcaaggagaacagacccatttttacaagggaaaggagacacccacaaaaaaaagccaaaattatgacagtttaaagcttgcagcaaacactttttaaattagatctgccttc

SEQ ID NO: 471424 - DNA, 379 bp, Homo sapiens
ctcatttcattcactggctgcaatggagatttatggagtaaatgttatcacaagctgagacttaatgagaactcarctgtatctcctggatgtagtggaaagcaaccattttggtaataaatagagaacagcatctaatttgtaaattcctttttccgttgctaagtttaatcagatcagtgaaactgaagggaattgttgatgaccaaaaattattttccatgccttaatctggccaggaaacattactcctaatggaaatggcctgttgctctggcgatggaaggggatgacatttgtcattagactaacccaattgttgcatattgataaatatgtttaggccaaaatctatttaaaacccaatagaagctgaggc

SEQ ID NO: 471425 - DNA, 645 bp, Homo sapiens
caccaatttgccagtgcctcttccagggactcctttgtactctcagcccccagaggtgccacttgattaccagctgatttggccttcatctcacatctgtgtgtttttacaggattacacccagcccaagatgcaacagaatcagtctagatggtgaattcttctcagacagtgttgctgttcatgtcttgctgattcatttacttgtctttcatatctaattatagttaatttttatataaacttaataatcagcatttgtgtaatagtaaaagagtgatttgtttactttaatctaaaaaaagaggttatgtgtttgaagaggaaaatgtttctattccaaacttctcaagaactggtactatttactaattgcatattctttctttttccttctaagccactttttatcttctctcctgcaatccmacccacataatttccatgaagaaagcggagtggtgtcattttacaacaagaaaactgagttaagaataagtccaatcaattgctaggtgttgagactgaaatggaagtctcttagtactccacccaaggattttcatattaaacaattatcttgtcatcattttatttctgagttattctcttcagtttttgttctcttcaattttcagaaaaatt

SEQ ID NO: 471426 - DNA, 649 bp, Homo sapiens
tcctggttaataacatattcccatgtcccaaaggacacaaaccttggaagatgtgtttcccaataacttttcaaccttttactgagcagaacacatgaattttgcccttcctcatttggaaccatgtggaaaggggaaccacgaatggggatctgcttttggtttggwttggggcttgctatggtttggataatgggattttttgtccccatcaaatctcatgttgaaatttgctccccactgtggtggtgtcagaaggtggggcctaggggaaggtgtttgagttataggcgtagaaccctcatgaatgacttcgtgctgggctgctgttctcactctggcgagatgggattaggttggtttattattatgtaaagccaggatgccctttgggtatggtgtctcttcacacgtactcacttctcctttgaccttctctgacatgttgatgccggtgccatgcttcttgtacacctgcagaactgtgagctaaataaccctcttttctttataaatcctcttttctttatacccagtgtctggtactcctttacagcaacacaaaatggactaagacaggactgaaactcaagcaatggatgtggtaataggaaagagaaaggtacagtgcattcagcagagtcacagt

SEQ ID NO: 471427 - DNA, 649 bp, Homo sapiens
tcctggttaataacatattcccatgtcccaaaggacacaaaccttggaagatgtgtttcccaataacttttcaaccttttactgagcagaacacatgaattttgcccttcctcatttggaaccatgtggaaaggggaaccacgaatggggatctgcttttggtttggattggggcttgctatggtttggataatgggattttttgtccccatcaaatctcatgttgaaatttgctccccactgtggtggtgtcagaaggtggggcctaggggaaggtgtttgagttataggygtagaaccctcatgaatgacttcgtgctgggctgctgttctcactctggcgagatgggattaggttggtttattattatgtaaagccaggatgccctttgggtatggtgtctcttcacacgtactcacttctcctttgaccttctctgacatgttgatgccggtgccatgcttcttgtacacctgcagaactgtgagctaaataaccctcttttctttataaatcctcttttctttatacccagtgtctggtactcctttacagcaacacaaaatggactaagacaggactgaaactcaagcaatggatgtggtaataggaaagagaaaggtacagtgcattcagcagagtcacagt

SEQ ID NO: 471428 - DNA, 602 bp, Homo sapiens
actctgtgcccagtgccaatttccccaaaccagtgggtgacctggctattcctgggacctcagtttcttctcctgtaaaatgaggacatgtgggcctatttgataaaattgtttgtgagaattaaatggggtattatatgttaatacccagcagagtacgtagcatgtaataggtgctcaataaacactagcgcttgaggcctggcaaggcagctcatgcttgtaatctcagcacttcgggaggccaaggcaggcagattgcttgaggcccagagtttgagaccagccatggrcaacatggtgaaaacacatctctacaaaaaatacagtacaaaaattagctggatgtggtggtatgcacctgtcgttccagctactcgggaggctgaggcatgagaattgcttgaacctgggaggcggagactgcagtgagctgagatcacacccctgcactccagcctgggtggcaaaacgagactctgtctcaaaaaatagataaataaataaataaacattagctcttaatattatgatcattgttacatgccacttattggacaaagtggtttgcaatttgatcttatccatttaacaacaccatc

SEQ ID NO: 471429 - DNA, 583 bp, Homo sapiens
gaattgtgtgaattcctgaggctgttaactgttgtgcgggtctctggcttcggactgcctatggttgaatcctggcaccaacaattaacaggactaccagtgtgatcttgaaatcacttcatctctctgtgtgtcagtctccttatctgttaaataggactaataataatagggctgtgaagactaaatgagatgaggcatgtaaaacacttagaatgaccctggctatagtatatactctctaaatgttagctgtcactctgggagacagacattsttctttgtctacaaatagcaggaaaattagaaggttcaatctgagatttgatgatgtctcctcagaaggatgaggctatcctctgtgcacaagaactttctgaaaggcctggaaaagctcaattctcatgtgtccactgtctccctattcccagaagatttctcatgccatttagctcctttgaagttaacagctacccaccctgcatactcctctgcccttgtgttaaaagaagacaggactcacaataccatgcaaaatgagtacttgcctctagctaggaacagtgcctacttcagggagaat

SEQ ID NO: 471430 - DNA, 583 bp, Homo sapiens
gaattgtgtgaattcctgaggctgttaactgttgtgcgggtctctggcttcggactgcctatggttgaatcctggcaccaacaattaacaggactaccagtgtgatcttgaaatcacttcatctctctgtgtgtcagtctccttatctgttaaataggactaataataatagggctgtgaagactaaatgagatgaggcatgtaaaacacttagaatgaccctggctatagtatatactctctaaatgttagctgtcactctgggagacagacattcttctttgtctacaaatagcaggaaaattagaaggttcaatctgagatttgatgatgtctcctcagaaggatgaggctatcctctgtgcacaagaactttctgaaaggcctggaaaagctcaattctcatgtgtccactgtctccctattcccagaagatttctcatgccatttagctcctttgaagttaacagctacccaccctgcatactccyctgcccttgtgttaaaagaagacaggactcacaataccatgcaaaatgagtacttgcctctagctaggaacagtgcctacttcagggagaat

SEQ ID NO: 471431 - DNA, 495 bp, Homo sapiens
gtgggtccttatggctctctgggccacagcttcatcctgggtagaattgggctcactctgtatatctctattttaattgtagtaaaagatacctaacatataatwtaccgtttgtaagtgcacagtgcagcggcagtaagggccttcccaccgttctacaaccgtcaccgtcaccacgctcttcagagcattctcatcttcccaaatggaagccctgtcaccatcaagcccctctgcactgtcccctccctgagcccctggctactaccccctagattcatactaggcttctatgaatctgacgcctccggggaccccatgaggtggaatgatgggaggctcacgatggcttcatcgcagggtcaatggctcggccaaatgagatcccatatgggaagtgcctgcccagggcctggcattgaagagctcagtaaatgggacttcctttcttcccccagccccctttccttatgcccactggactcgaatgtcccc

SEQ ID NO: 471432 - DNA, 495 bp, Homo sapiens
gtgggtccttatggctctctgggccacagcttcatcctgggtagaattgggctcactctgtatatctctattttaattgtagtaaaagatacctaacatataatttaccgtttgtaagtgcacagtgcagcggcagtaagggccttcccaccgttctacaaccgtcaccgtcaccacgctcttcagagcattctcatcttcccaaatggaagccctgtcaccatcaagcccctctgcactgtcccctccctgagcccctggctactaccccctagattcatactaggcttctatgaatctgacgcctccggggaccccatgaggtggaatgaygggaggctcacgatggcttcatcgcagggtcaatggctcggccaaatgagatcccatatgggaagtgcctgcccagggcctggcattgaagagctcagtaaatgggacttcctttcttcccccagccccctttccttatgcccactggactcgaatgtcccc

SEQ ID NO: 471433 - DNA, 361 bp, Homo sapiens
ggactttttaaaagttatccagtaatgatcacctcttgtcaaaaaccaggtttaagaagatgccatttgattttgtgcaaacctcacttcccaagtcacaccaatttcttgtttgagaaaagcatttgatcatagatctgtgacttggctagtcaggtggcttatacttaaaagcattattttttgagaaaacattttttgtctatgtttttgcttcaaccctccagacttttaaagcaagaagaacgtgtttcattggtrtttttagttttttaaaaaaatacttgttgcactgtatttgcttcagattatttaaaagccctttaatattaatatattgaataaatggtcctgaaaccac

SEQ ID NO: 471434 - DNA, 550 bp, Homo sapiens
ttcaaataccttctggcttatttcaacctcccctgcccaccactcaagcctcccagatttggaggattgtccagaggtccacgtttgcctgtaggatgatggcaccatgtttaaacagttggatgtggcagtatcatgcatttggatgttggtggtaatctgcttatgacaccccccaatcccgtgggaaacttcagacttattttggaaagattgttaggaggtcagctctgggataccatgaatgccagtggagattaagagaagtagtgttttggcattcatattaaagtgactgggccaggcacggtggctcacgcctgtaatcccagaactttgggaggccgatgtgggcggatcacgaggtcaggagttcgagaccagcctggtcaacatggtgaaacccaatctgtactaaaaatacaaaaattagctgggcttgwtggcaggcacctataacgcgctgctcgggaggctgaggcaggagaattgcttgaaaccaaaaggcagaggtcgcagcgagccaagatcgcaccactacactccagcc

SEQ ID NO: 471435 - DNA, 425 bp, Homo sapiens
agcaatcgaatacactagttatcttcctaaattgatgatacatctggctacttcaccccttttcaatttcaaatgcaatttgtctgaagcctccaatttaaaccacagagatcttctctaaactaaataataggctacacaactcgctggcttcccatgaaaagacaaaggcgtgtgtgtgtgtgtgtgtgcgcgcgcgcgcacatgtgcacttgcactcactcgcayggtggggaaaatggattgaggttgatgagaagagatgcattccaactgatgattgaatttaaagctctttcatttctactggggatctgagatctgatgaaattttcatttctactaggcccaacatgccatgatttccaatatagatagagacttggggccttggatagctgagcaatcctgggcaaacctatact

SEQ ID NO: 471436 - DNA, 636 bp, Homo sapiens
accacctggactggtggcacataccaggaaactggctcaactggtcatgtgatcccacccgggcaatgactcagtacaagaagacagttccaacctcctatgatttcatccctgacccaaccaatcagcattcccaatttcctaacactctgcctgccaaattatccttaaaaaactccctagtctccaaatgttttgggaagctgatttgagtaataaactcttgtcttccccttggctagctctgcatttattaaaccttttctccactgcaacactgctgtctcagtgaattggctgtacctgtgcagtgggcgagaagaaaatggttattacaagaccatcacccaccttgggatacagtgctcttgggctggctttttttcaacttttgcagcctctctcatccccacctctacatttaaggcatktgagtgtccctgagatcaccccctgcagagagtggggtaattgctacatggggagactgccacctgactctctggctgagagcttctccaagtgcttcaagaacagagcagaaaagtgtggggaaacagtgtcccccagattttcaggaggatggaaatgcagtgagacacaaagggtacagttggtgcaagctgcctgtccatt

SEQ ID NO: 471437 - DNA, 425 bp, Homo sapiens
agcaatcgaatacactagttatcttcctaaattgatgatacatctggctacttcaccccttttcaatttcaaatgcaatttgtctgaagcctccaatttaaaccacagagatcttctctaaactaaataataggctacacaactcgctggcttcccatgaaaagacaaaggcgtgtgtgtgtgtgtgtgtgcgcgcgcgcgcacatgtgcacttgcactcactcgcatggtggggaaaatggattgaggttgatgagaagagatgcattccaactgatgattgaatttaaagctctttcatttctactggggatctgagatctgatgaaattttcatttctactaggcccaacrtgccatgatttccaatatagatagagacttggggccttggatagctgagcaatcctgggcaaacctatact

SEQ ID NO: 471438 - DNA, 607 bp, Homo sapiens
tgtgcccatagtaaagggctacctggggccaggtatgttcgacatggaggctttatcttcccttttctttgtcaccacgtgtacagtaaggaacaggcaacatggtaccagccaggcaaagagctcatctgcatagtaaaagattagggtgggggcagccaggtttttcccgccctatgcaaatggcacatctggtccaaacaatctttggtgccctatgtaaatcagacaccacctcaagttcatctataaacccccttggatttcactgtagaagtggcaacccatttccccaggacccctccctctgcagcagagagagctcatctctttcttttgcctattaaacttctgttcttaacctcactccggtgtgtccgcatcctagttttctgtggctgtgagaaaacgaaccttgggtatttaccctagacaacgatgctgcttcacttccagrggtgcctctagcttctctctgctgaagtccactgcctctccctgcagccctcctggatgaggtctaaaaccacacttggtccataggagacacacatggatgctttgtcctgacatgctctggaacaggaagacttcaaatgcaagcacc

SEQ ID NO: 471439 - DNA, 457 bp, Homo sapiens
agcctgaatcagtgtcagagaagactacacagaggtatgaacatcaggaagggagaattgtcttgggctactttggaagctgcattccacacagcaaaataataataataataataatagtcattattattattttcagacagggtcttgttacctaggctggagtgcagtggtgccatcacggctcactgcagtctccagctcctgggctcaagtgaccctcccacctcagcrtcttgagtagctgggactacaggcacgtgaccaagtccagctaattttttaagtttttgtagagacgggatctttctaggttgcccaggctggttttgaactcctgggctcaagtgattctactgcctcagccactaaataagcaatgcatttcacccattgctagttatgtcactggttccggggaaggttgcagtttctagggaggtgagtacttgggggc

SEQ ID NO: 471440 - DNA, 628 bp, Homo sapiens
ctgctcagaatatttcctcttctgagttgatcattgccctggaatcagattttgcagttctttctcaggtggcttctttattcaattgaccattagaaggtcaatccactaatcttctacacattggatgtctagatgctgaggctcaagctgggatccttcttttatattttagagacaatgtaaaaatctgcctctacaaatgaattgcctcttctgcctcactgcccaaggaagaacaggctgtggtgataggcaggccataatgacagtgtggacagtttcagaattgtatatataatgctggacattggaataatttgggtagccttttgttggaatgtctgtttttaaccttgcctaaatccctgargtctgggggtaaaatgctccttactttgcagtcactgatccactttaaatttgctaagcccaagatttgttatcaaaatggaaaatagcactggcttcctgccttcatcctcctttagatgattaaaaccagcttctgtgagcagaatttcaccttcaatgttccccatccttctcctccatcacctgcactaactgtcaaatggtattttctcttggtcatgtctgtacaagcttgagtttattcataccaaga

SEQ ID NO: 471441 - DNA, 655 bp, Homo sapiens
caggacagtgaaacactgggccatgaaaacagatacatggtcaattctgctttcaccaaaaaacctctccattctctttttataaagattgaaaaacatttactctgctccttctttgaaaggtcataacctgaggatttataatttcctagaaataactgatgctggtgtccctttatttttattttacaattaaaggatatgaagtggccttgttgatggattggatgactgctcgaggcaggaggtctggctttccctccatgaactaggagcggcctcaggaatcacatgaacatgttagatgtgcacttttcgaggccatggctggatcttagattcattctgtgactttacctgaggctcagtcctgacagccaatggactccatcaatgattgattaaagcataatgttccatgactatcaagacagcagctcgagagcatctgtagcaaatgaaaacaactgyttttggcagaaattgtcctgtatccaaatggacaaagctgaataactgtatgtggatgattatatcagttctgctgtgtggagccaggagccaccgaattgtggaggttcatgtggatggaatgcgcacctgacgtactaacttgatcctgacattccaatataatcccctattctctaaaggg

SEQ ID NO: 471442 - DNA, 553 bp, Homo sapiens
aagagaacacaaaatgtaagtagagtttcctggctgaggaagttgagggggtgcacccacaaaatattgaatggtcttgtctggctaacttgacgatgcttctcacccttccagttttgaggaaaataagggcaaagtaagtttaaaggagagaatcagaaaataaaggacttggaggaggagaataagggatggggccgttgctttgccaagggacgggcaggtggcactgatgtgtccccaagtattttgctctcttcaggaagtttaaatggaccccttcagagttgaatgcttcctctgaagagaaaaaatggagaaacaggctcttatactcttgggagactgcagatatattaatttttctgatttttgttcctcctggggagtctgatggttctagaagcagaaataaagaatacacatgcaagtgcttgagcacacattatgtttttcaaggactggttgcattgtgacctcccaggaacagaaccaagagcctgtgtggactcttcccctctattcaaagcrgaaaaaaacccaaaagtaagta

SEQ ID NO: 471443 - DNA, 553 bp, Homo sapiens
aagagaacacaaaatgtaagtagagtttcctggctgaggaagttgagggggtgcacccacaaaatattgaatggtcttgtctggctaacttgacgatgcttctcacccttccagttttgaggaaaataagggcaaagtaagtttaaaggagagaatcagaaaataaaggacttggaggaggagaataagggatggggccgttgctttgccaagggacgggcaggtggcactgatgtgtccccaagtattttgctctcttcaggaagtttaaatggaccccttcagagttgaatgcttcctctgaagagaaaaaatggagaaacaggctcttatactcttgggagactgcagatatattaatttttctgatttttgttcctcctggggagtctgatggttctagaagcagaaataaagaatacacatgcaagtgcttgagcacacattatgtttttcaaggactggttgcattgtgacctcccaggaacagaaccaagagcctgtgtggactcttcccctctattcaaagcggmaaaaaacccaaaagtaagta

SEQ ID NO: 471444 - DNA, 625 bp, Homo sapiens
ggcattgctatggactgaagatttatgttcccccaaacttcacatgttgaaacctcaagtccaatataatggtatttgaagtgaggcctttggaaagtgattaggtcaaatgggattagtgtccatataaaagagaccccagagagttccctggtccctaccactatgtaaggacacagcaagaagatagctgtctgtgaccaggaagtgggtcctcactgaacactgaatctgctggcactgtgatcttgaatttctcagcctctagaactatgaaaaatatatttctgttgtttgtaagccatccagtctaccatattctgttacagcagccagaacagaccaagacaggcaygatgttggaatcaacgttgactggccttctctgtaactaaggggaaatacttagggatacaaagtagttctcccagaaagggccagataagcaagatgctcagcactatatgtaattctgtttgggcaagggaagtggaatttcaggcatctttttggaaatggacagagaacttgccattttgtttcatgcctatcttctcctgggaaatgtattgcttatggttaacatatactcgaagctttaagtatataagcttggttatatttg

SEQ ID NO: 471445 - DNA, 446 bp, Homo sapiens
gataaatacaaagaaaaccatgcttggttccactgtagtaaaactgcaaaaagccagagtcaaagagtaaatcttaaaaaaacagccaaaggaaaaaagaaaaagatatattaccttcaaaaataaaggcaaaataaagttgtcttttttttaataagcacgccaacagaatttttgccagcagacctgcagtaaagcaaataataaagcaatttatttgggaagaaggaaaatgataccagatggaagcacagtaatgcaatraagaataatgatcctgggaaagaataaataggtgggaaaatctaaatctagatcctgtaaggactaaatgcctgtccttggagtaccaagtaacggtgcagcatgcgctgttcatcatgagctgagtttacctaatccaccaagtcataaagctgaatgtgtgcagcttgcattgcatagca

SEQ ID NO: 471446 - DNA, 446 bp, Homo sapiens
gataaatacaaagaaaaccatgcttggttccactgtagtaaaactgcaaaaagccagagtcaaagagtaaatcttaaaaaaacagccaaaggaaaaaagaaaaagatatattaccttcaaaaataaaggcaaaataaagttgtcttttttttaataagcacgccaacagaatttttgccagcagacctgcagtaaagcaaataataaagcaatttatttgggaagaaggaaaatgataccagatggaagcacagtaatgcaatgaagaataatgatcctgggaaagaataaataggtgggaaaatctaaatctagatcctgtaaggactaaatgcctgtccttggagtaccaagtaacggtgcrgcatgcgctgttcatcatgagctgagtttacctaatccaccaagtcataaagctgaatgtgtgcagcttgcattgcatagca

SEQ ID NO: 471447 - DNA, 446 bp, Homo sapiens
gataaatacaaagaaaaccatgcttggttccactgtagtaaaactgcaaaaagccagagtcaaagagtaaatcttaaaaaaacagccaaaggaaaaaagaaaaagatatattaccttcaaaaataaaggcaaaataaagttgtcttttttttaataagcacgccaacagaatttttgccagcagacctgcagtaaagcaaataataaagcaatttatttgggaagaaggaaaatgataccagatggaagcacagtaatgcaatgaagaataatgatcctgggaaagaataaataggtgggaaaatctaaatctagatcctgtaaggactaaatgcctgtccttggagtaccaagtaacggtgcagcatgcgctgttcatcrtgagctgagtttacctaatccaccaagtcataaagctgaatgtgtgcagcttgcattgcatagca

SEQ ID NO: 471448 - DNA, 446 bp, Homo sapiens
gataaatacaaagaaaaccatgcttggttccactgtagtaaaactgcaaaaagccagagtcaaagagtaaatcttaaaaaaacagccaaaggaaaaaagaaaaagatatattaccttcaaaaataaaggcaaaataaagttgtcttttttttaataagcacgccaacagaatttttgccagcagacctgcagtaaagcaaataataaagcaatttatttgggaagaaggaaaatgataccagatggaagcacagtaatgcaatgaagaataatgatcctgggaaagaataaataggtgggaaaatctaaatctagatcctgtaaggactaaatgcctgtccttggagtaccaagtaacggtgcagcatgcgctgttcatcatgagctgagtttayctaatccaccaagtcataaagctgaatgtgtgcagcttgcattgcatagca

SEQ ID NO: 471449 - DNA, 529 bp, Homo sapiens
tctcatcaatttcctcattcttcattccgcagggatctagcctctacagggtggggcaccaggacccaccaaaagcggggccctgagggctggggcagaagagaaccattctgattgcaccccttggggcaggtctggagaagcggagttttgggagagagaagtaagaggacacaggagcctgccttgtccttctcctgcatctccaagaggaagcttttcaggcccactagtgtaggaccaaatgctgaattaatgaatctattgttgaccatcygttgcagttaatatcacagggagagacaaccccacagggtgcccctcctggtggaaaagcacaggagccccccacagaggtgcagccagcgaggtccaggccatgggaaaccctgaaggacaaatggcctgcttcctcacccatgcacacacattcacacatgcacatgcacacatgtgcacatacactcacacatccacacatgcatatgcacacatgcacacgcacattcatgcatgcatatgcacacac

SEQ ID NO: 471450 - DNA, 529 bp, Homo sapiens
tctcatcaatttcctcattcttcattccgcagggatctagcctctacagggtggggcaccaggacccaccaaaagcggggccctgagggctggggcagaagagaaccattctgattgcaccccttggggcaggtctggagaagcggagttttgggagagagaagtaagaggacacaggagcctgccttgtccttctcctgcatctccaagaggaagcttttcaggcccactagtgtaggaccaaatgctgaattaatgaatctattgttgaccatctgttgcagttaatatcacagggagagacaaccccacagggtgcccctcctggtggaaaagcacaggagccccccacagaggtgcagccagcgaggtccaggccatgggaaaccctgaaggacaaatggcctgcttcctcacccatgcacacacattcacacatgcacatgcacacaygtgcacatacactcacacatccacacatgcatatgcacacatgcacacgcacattcatgcatgcatatgcacacac

SEQ ID NO: 471451 - DNA, 610 bp, Homo sapiens
acccagtcagcttgtgtatttatttaattttttcacaagaaaaagttaaaaatattaaacaacaaaagacataggggctattccagggttactaacaacccaaaggaaatgctcccgttcctgtcttttcctcaagacttcctgctctgcctgctcccccaggagtggaaggtcaccttcccacaggaggtactaggggcgagtgaccctgagcaaggctcactaaggcagcgctgtaagtgacaccagaatcctgaagttccgctcatcctgcttatgaaaggatcattctagactgcaggggtaggggtggggggtgawgtccctcagtcaccattcttccatcagcatacctcttccccttccctgctgcttttggtgcctccccggttggagtcttacttttggaagaacacgaagatcccagataggaacaggactcacttcacacctctcgctacctgcttggactggaaatcatctggcaggatccatcccacctccacgggtgcttctgaggctcctgggaccttagacctggaggattatacagattcaccaggagccgccatgaatctcactgggttgtgctatcctcaagatcctggag

SEQ ID NO: 471452 - DNA, 610 bp, Homo sapiens
acccagtcagcttgtgtatttatttaattttttcacaagaaaaagttaaaaatattaaacaacaaaagacataggggctattccagggttactaacaacccaaaggaaatgctcccgttcctgtcttttcctcaagacttcctgctctgcctgctcccccaggagtggaaggtcaccttcccacaggaggtactaggggcgagtgaccctgagcaaggctcactaaggcagcgctgtaagtgacaccagaatcctgaagttccgctcatcctgcttatgaaaggatcattctagactgcaggggtaggggtggggggtgatgtccctcagtcaccattcttccatcagcatacctcttccccttccctgctgcttttggtgcctccccggttggagtcttacttttggaagaacacgaagatcccagataggaacaggactcacttcacacctctcsctacctgcttggactggaaatcatctggcaggatccatcccacctccacgggtgcttctgaggctcctgggaccttagacctggaggattatacagattcaccaggagccgccatgaatctcactgggttgtgctatcctcaagatcctggag

SEQ ID NO: 471453 - DNA, 610 bp, Homo sapiens
acccagtcagcttgtgtatttatttaattttttcacaagaaaaagttaaaaatattaaacaacaaaagacataggggctattccagggttactaacaacccaaaggaaatgctcccgttcctgtcttttcctcaagacttcctgctctgcctgctcccccaggagtggaaggtcaccttcccacaggaggtactaggggcgagtgaccctgagcaaggctcactaaggcagcgctgtaagtgacaccagaatcctgaagttccgctcatcctgcttatgaaaggatcattctagactgcaggggtaggggtggggggtgatgtccctcagtcaccattcttccatcagcatacctcttccccttccctgctgcttttggtgcctccccggttggagtcttacttttggaagaacacgaagatcccagataggaacaggactcacttcacacctctcgctacctgcttggactggaaatcatctggcaggatccatcccacctccacgggtgcttctgaggctcctgggaccttagacctggrggattatacagattcaccaggagccgccatgaatctcactgggttgtgctatcctcaagatcctggag

SEQ ID NO: 471454 - DNA, 595 bp, Homo sapiens
gggtttccttcaaggacacagaagagcaagctgtgagagccagcgcgagtcactgaggggagcaggaatggctgccctctgcttgcgccctttgaacttgtcaatctgtcataaggaaatcacattaatgggatgtttttctgctacaaatagcttttgttttcacattttaattacagggctagatttttcttgatttctaaattattcgaagacctgggcaaaaaggaaaatgaaaagtaatgttgtttcaaaagatgtccttgaaattccaagcagcctgttagttgggagaggtggggtagaaaggagagaccatgtatgtttgtccccatatttcccacgacatgaccaaactggacccatgggtccagttcgtctaacgatgaattctgaaccctgtagatgttttgttctactgggaggcactattcaggaggcattgactgttaggaagtagctgaggctggtctgatttactctggcaacaatgtcctaaggaaaatctccgggaggtactgggtctgtctactacctttactgcagtcctggtatcatgggtgagygcagatgtccgaactcatcaaactgcact

SEQ ID NO: 471455 - DNA, 385 bp, Homo sapiens
ctgggattgcaggtgtgcaccaccatgcccatactaagtctttgtatttttagtagagatggggttttgccatgttggccaggctggtctcaaactcctggcctcaagtgatctgcccaccttggcctccctaagtgctgggattacagacgtgagccaccaagcccggcccggcctacaggagtgcttttttaattaattaattwatttatttatttatttattttttaacattacaatgtgcctgcgcttttcctttcagatcacagtgtctatctttggctttttaatactgaacggtaataatagctattatttattaggtgcatactaattgccaggtgcctgtgcccaccgaaacttatttactcctcaccaacaactc

SEQ ID NO: 471456 - DNA, 576 bp, Homo sapiens
ggctcagtcttcatttttgttctgggcaatattttattaatgactgaaatgtggacagcaatgttatggtgacctaagtaccctcgcttgagtgtgtagagaggattagtctggcttccccaatccatgaagtagaaattagtgtatcagacagtagaaccagggtctaacatggaccaccatattgaatgagagccattccctatcagccagccacgtgcttatttggttacagattcagtggaaattaacaatggtgcatgatgtctaatacagttagtataaatcttaggttaatacagtatcagggaaaagtaagkccatatttccaaggtgtgctgagcccatcatagagtttagctgcattacagggttccattctggatccaactaagaactgagagatccagaaaaactggaacaagttcagtgatggatacctgaaatggtaaaggtatcaaagtattgtcacatggggagctgtttaagaaataaagggaagataagatctatgaaagacatgatgtgtgtccccatatacttgaaggactgtcatgcagtgaaagaacaagattg

SEQ ID NO: 471457 - DNA, 631 bp, Homo sapiens
ggaactccagtgggatttttgttggactttctcatcctattcattatgcctcttcacttctctttggtctatctctttgtctctttctattgctttttgagtaatttatttggtccaatcatcaagtttactatttctctttttattggttccaaccttataatcaacatattcattgagattctaactttattacaattattttttcatttctaaaagttctactttgttcttaaatttatctagtcaattagagaattcctctttcatcaaacttgcaattttctgcttaatttctttcaatatattatstattaatttatttatttagagatagagttttgctctgtcaccagggctgaagtgcactggcatgatcacagctcactgcagacttgaactcctaggctcaagccatcctcccatctcagcctcccaagtagctggaactataggtgtgcaccaccaagcccagctaatttttttttctggagatagggtctcactctgttgcccaggctggtcttaaactcctggtcacaaacagtcctcctgccttggtctcccaaattgctgggattacaggtgtgagccaccatctccggcctatttttaaatattatgtaatact

SEQ ID NO: 471458 - DNA, 631 bp, Homo sapiens
ggaactccagtgggatttttgttggactttctcatcctattcattatgcctcttcacttctctttggtctatctctttgtctctttctattgctttttgagtaatttatttggtccaatcatcaagtttactatttctctttttattggttccaaccttataatcaacatattcattgagattctaactttattacaattattttttcatttctaaaagttctactttgttcttaaatttatctagtcaattagagaattcctctttcatcaaacttgcaattttctgcttaatttctttcaatatattatctattaatttatttatttagagatagrgttttgctctgtcaccagggctgaagtgcactggcatgatcacagctcactgcagacttgaactcctaggctcaagccatcctcccatctcagcctcccaagtagctggaactataggtgtgcaccaccaagcccagctaatttttttttctggagatagggtctcactctgttgcccaggctggtcttaaactcctggtcacaaacagtcctcctgccttggtctcccaaattgctgggattacaggtgtgagccaccatctccggcctatttttaaatattatgtaatact

SEQ ID NO: 471459 - DNA, 598 bp, Homo sapiens
aggcaaatatatgacatgatagtattattttttaattttagagaaatcactgtggtgacagatcagagggaggatggcagagaagcaagaatatgaattagagaaatattgccataatgtcaggcaaagcaagactttgtgaattatgtctaagtggtggtgatgaagaagataggatagatttgagatacagtaaagacaacagagatcatggtagagtaagggcaaaagatgaatgaaaagatgggatctagttttctgatttgacatccatccttagtgtttcacttctttccactgcatacataaatccaataaaccagcctacatggacatctatgcatgatcttgtccctgtctaactcccaggcaatgcgcaaccatcatttagcaatcctccttagtccttttagtgttcttccatggacttttacagtayatgattatgtatttgtttgattttatttttattttaaaaagtgggctttaaattttaggttatattcctaagaatcacttaagggtttacttaaaatgcatatttctcgttcttagagattacaactcataggtttgagaaagaaccctatgttggcat

SEQ ID NO: 471460 - DNA, 427 bp, Homo sapiens
tgtgccttgtgtgtcctcccttggccctttgcccttgtcctttgtaacatttaagttycttgtattaacttgagtaagtttggtctgcctttgcctccactaagctttgggaaagtcaggactgtgctatcttgctcatcaggtgtccccagttactagcacagtgactaacagagaatagtatttgatatatatttttgaatgattgaatggaatcgcatatgagtttatcctcagcggctaacaaattacctgtcaaaccaagcacatttttcccccaatctggcattacccatatttgaatggcatttgacaatgcctatattttgcaaagtgaataggacaaaagtttaaatgttttattgagatttaattttgcatctgataaaattcactcattttaagagtagaactcaaggatgtttag

SEQ ID NO: 471461 - DNA, 587 bp, Homo sapiens
gtcaaatctggatggtggatgtataggtgttcattgtaccaatattttcacatttctggattgacatactttttttaaattctagtgagtaataaatatagatgtatccttcttcaatatacgaagcaaaatatttgatcgaactgcttcggaagctattgcagaaatttaaaaggatgatataaatcctgttagctcccactgaaatggtactgactatttctgaacagactgcaatctctacatggtcaaggcagatccagttatatctcatagtaacacaaagcaatgtcttaatattcatgtcagcatacaagaaactcaacagaatgcaaaggtattgacaatctgtgatcttattccatgaaaccattctatgtttacaaaaagcacggctttgaagagattccaaaaaagtttgcaratttttactcatagatattttcccagccttaccaaataacatgacattaatcgaaatgtccccaaatagtatcagggtttgcccacgtaaaaatctattttattttgcctagcttatctttcccctggctgtccctgcccccaacacagaagttagctaagag

SEQ ID NO: 471462 - DNA, 587 bp, Homo sapiens
gtcaaatctggatggtggatgtataggtgttcattgtaccaatattttcacatttctggattgacatactttttttaaattctagtgagtaataaatatagatgtatccttcttcaatatacgaagcaaaatatttgatcgaactgcttcggaagctattgcagaaatttaaaaggatgatataaatcctgttagctcccactgaaatggtactgactatttctgaacagactgcaatctctacatggtcaaggcagatccagttatatctcatagtaacacaaagcaatgtcttaatattcatgtcagcatacaagaaactcaacagaatgcaaaggtattgacaatctgtgatcttattccatgaaaccattctatgtttacaaaaagcacggctttgaagagattccaaaaaagtttgcagatttttactyatagatattttcccagccttaccaaataacatgacattaatcgaaatgtccccaaatagtatcagggtttgcccacgtaaaaatctattttattttgcctagcttatctttcccctggctgtccctgcccccaacacagaagttagctaagag

SEQ ID NO: 471463 - DNA, 480 bp, Homo sapiens
taaattttgcctacattaaagaatgaataatgccactgaaaggttttgcttatttaaagtaattcagtaccaaatccttctgtcattgctgttgttgttgtctaatacaataatcacactctcaatatatttgttttatgaagttaatactttcatttggttgaaatgtaatgtcaactagcattatttacactattttataccttgagccaatacatgggttgtacaaggaagtatttctaagaaaatattagccatgcctttaactctatcaaaaatgaaattctggttcttattaaaaagaaataggcgcactgcacttacaattcttaatttaacccttgaaagagtttattcatatcctaccatgttccaaagtcaatgaggtaagttactaaataaatctacacactgatctacttacaattttataraagagattcactaaagtttaccaataaaaacaaatacccaataaaa

SEQ ID NO: 471464 - DNA, 203 bp, Homo sapiens
tgagttgatcaggtaacagtcccaaagaaacctctgtggggcagaggagtgagaagagggtttgcaatggttcaaggtcagtaatccaggtggtagaagagcactggaagggaggctgaaaccgcaagggaagtacagggataagtggatccccactatcgaatcagataagaaagtragtgaatgagtgccttcaaaaatta

SEQ ID NO: 471465 - DNA, 617 bp, Homo sapiens
tttgatgatggacatgtaatgctgagggaagcagatcccattctggttttcatgaaacattttactctggaaagtgggatggatattaatcaaagtagcacagtttcagtggagaggagggcttataagggagatcacacggcactattcgtgcaataaatattcatggaatagtgcctgaacttaggcactattccaggtggaggaggaacagcagttaacaagagagagaaggtttttgttttatgaagtttacatgatagtgatgcacgctgatgataaacaaataaacaagaaaaaattcatgtagtgtcatgtcctaagcagagattcaaaaaacagggtttcagatggtgtgaaataggtcatatgtgacgccacattagttttgatgctcagagatgtcctttctgaagaggcgacgtgcaagctgccatctgaatggcaaagaggatccagcctgtgaacaccaagggaacacacatttttccggagggagagaaycgctaaaataaaggcctctagagaaagtgagcttgacgtgttgagtaagaggaagatagacagcatgtctgaagggaggtgggagtgatacatctgcgctaacttgctagggc

SEQ ID NO: 471466 - DNA, 535 bp, Homo sapiens
ccttcttctggccccctaccctcaagccgcagcgacttggttcacatcttcagatgctcaagttaccttccttgccscatgctgcctcctcaccttgaaaaactgttgctcctctttatctgggaaattcttatcctttgcctggggctcctctaagaagggaatttcttggcctcccacatcaagcctggcatcatcatttttttttcaactacttaccccagtttaaaaaaaaaaaaaagaattgcttaagtcatcaatcgctgaataaagtacaggctcaatgaggacagagcaataccctgtttagtccattgccaggtgcacccaaatcaagaacatcttattatatgaggaggagttaaagaaatgagaaatggagatgggggtagtagaaggagaaggagcaggcaccaaacagggaggagagaagacagggcgagtcatgccttcaaacacatcaaagtgttccaggtaaaagtggccacaggcatagtctacatggcttcagacagagatcagcatagtacccaca

SEQ ID NO: 471467 - DNA, 574 bp, Homo sapiens
ttttaaatatattgagataaggtgatcacagtatttgcaaaattctaaaaatttctgtgattatgtccactttttcatttctaataccatttctttgattgtttatttctctttttttctgctaagccatctttagcataactttcatcctcatgatgccaaggtggctgtttgcagcggaccctatccttgttggactgaacaaaggatgacaaacatgggaataaagacaaagacaaaagagtatatttggaagaagaggtctgggggctccttgcttccagtgaacacaggccctgagcctttacagcccttcgtatttattagagtgaatagggagaaggggggtggttgtcggtcagtagcttgatttacagcaggcttgcaagactgcattcgtcaaccaataggctctagatgtcccattagataacctcaaggagcatgacaccagggagtgattgcyttcagcaaaccttctggtggctggagcagaagcgactttgcccacattctgcattcatgataaacagtttgctgtttgatcatatagcctccagtggaatgttgagtt

SEQ ID NO: 471468 - DNA, 535 bp, Homo sapiens
tggtgtggaaaatctactgcaagagagagcggagcttttaccaaaaaggctgcatcctcactaatatacagtaggaaacttyacccagggtctctgggtctggaaagaaaattgaactctgggagttccaaataattctttcctcctcctttgcccccttctctccagtaactgccatttccctgaagttccttcttttcttggccactgggacgtgtatcatccacttgcttccttaaatgatcttttctggaccctgatgcacttttgagctgacttccaaaggttttctcttctgtggttaaatggcctattgttttcatcatgcatccattcctgtgagaaccacaaattgaaagttatgggattgagccactctgctgagtattggcaggcgattggaaaaagggagaattacacataaatgtaagccatcagtgaattactctaatggaaaggataagacatgtttatggatagcttgcatgaagtagagtttgcagaatttcaaatagggcattatagagacaaagga

SEQ ID NO: 471469 - DNA, 530 bp, Homo sapiens
aggcgcgaggcgggaggctgggcgagaggagccggcggggcgggggcctgggccgtcacgtgggtgcgccgcgcaggcgccgggcgggccagacgtaggcccgggggttcccggcctggccgggtagcagcgcgggggcggccctggggcggggagacagggggcggctccactccggcgctctgcggaggacagcagcgatcgccaaggctcagtgagtccccgcactagcgcggcacctggcacttggcggggccgaaccaacgaatgagcgaatttgccgagagtcgccccgtctgaatccattgactctttccttgcctcggtcctaccctcattcctcgactcacttcctcctgcccttcctcactatctccctccccgctcatatcctccctctcctttcctcattcccttcttcactctcttctctcctctcttactccccccctctcattccctccctcyttcactctctcattccttcccttcctatcttacccaccattcccttcctccctcactcattc

SEQ ID NO: 471470 - DNA, 579 bp, Homo sapiens
tggtcagtgtctacagcacaaccttctggcatgggagaaggtcacctgaggttaaccctttacttgtagggtccttaatcaatctctggctcctttggaaccatggacacagaatcagtcctgggtgagaacctatatgtcatttcaggaatcggtgagtttcaaggatgtggctgtggacttcacccaggaggagtggggtcaactagactcccctcagagggccttgtaccgggatgtgatgttggagaactaccagaaccttcttgccctaggtaaaatccccccagccccaggctgggcgtcggctgtcagccttcttctrcatggtagatattaaggagaatcccttcagtgccggccctggtgccagatatatcatggggtgggaagcaaggcctgtgccttggggcactcatggccaggggcctcggccacgccagaagtccccaagggacagcgtgggagctggtagcatccttgcttggtgtttcccctggtcctgggataggggcagggagagaagagaagaaggtgggaccctggagcccagctggctctggaacagtcctcaagcaa

SEQ ID NO: 471471 - DNA, 608 bp, Homo sapiens
gtagtctcagcactttgggaagcttaggcaggagggtgacttgaggccaggagtttcagaccagcctgtgcaacacagcaagacccatctctacaaaagaaaaaaaaacccacaaaaaagtagccaggcatggtggtgctggcctgtagtcccagctacttgaagtgggtgctgaggtgggatacagtgagctatgtgatgcactccagttggggcaacagagcaagaccccatctcaagaaaaaaataaaagtctatcactaggccagggggtatgtatcctcaccaattttgagtggaatagacacagccaattcaattggttctgggactttagggtgatttatcttctcagactttactggtacattgggagtgggtctcttgaccayccctcaggataggtgctggcttctaccattccagcaagatccttgtgttgggttttcattaatttttttttttttttttgtcagtgaagatatgtctccaagaatagttttttcaaggtaagccctcatatatctaataatatcattctgttgtcttcacatatggaaagaaacttagctatgcataaaattcttgagacacaaccttttcccttc

SEQ ID NO: 471472 - DNA, 524 bp, Homo sapiens
gtgtgtgaagatccttttttgacaggtaaagttttagggattacgatgtgaatttttttgcctttttgggaggagagggtacatttttcagctcaccacagagatacatattgagattattccaattccacaaggaaccataaatcctaggtttctgtaatagaatcttagttgtttatttctcccattttacccatctctcctcagcagccattcctatttcccctagtatgaagaagaaagagagaaagatcctatctctgtcttttttttctcattgggagaaaataaatgtggtagacacagagtyacatccctattatacagctgcccccactctttgctgaaagaataccagtttggttctggagctcatgcacctgggcccagacattgaaccatgattggtctgagccaaccacagtgctgctctcttccccctttcccagatttcatgcagccacgtttgaccagcgacatgagcaagcctgtgatggtccctccggaaaaggattgtgctttcc

SEQ ID NO: 471473 - DNA, 524 bp, Homo sapiens
gtgtgtgaagatccttttttgacaggtaaagttttagggattacgatgtgaatttttttgcctttttgggaggagagggtacatttttcagctcaccacagagatacatattgagattattccaattccacaaggaaccataaatcctaggtttctgtaatagaatcttagttgtttatttctcccattttacccatctctcctcagcagccattcctatttcccctagtatgaagaagaaagagagaaagatcctatctctgtcttttttttctcattgggagaaaataaatgtggtagacacagagtcayatccctattatacagctgcccccactctttgctgaaagaataccagtttggttctggagctcatgcacctgggcccagacattgaaccatgattggtctgagccaaccacagtgctgctctcttccccctttcccagatttcatgcagccacgtttgaccagcgacatgagcaagcctgtgatggtccctccggaaaaggattgtgctttcc

SEQ ID NO: 471474 - DNA, 614 bp, Homo sapiens
taataacctcacttgtccttctcttggtccttgggctttcaaggaggagaaaaagacatagctttcctggggctgtagttatttgactcatacttacttaacatagcactgttatccwccgcttgtcctggtcatagcaaacattgatagagatatacttaattgaaagaactaaaggctaattaagataaatgtacagacaaagtaaatgaaaattttatggagaaaataaagtaagatttaaacaggaaaatcaaggtcacaatatgagtggctatcactgaatttatactaataaaatgaagaaaggggaaaaatcagataattgaaatgatacatgttttatggggaaaatcacatcacaaggacaacttttggatgatcaccaacaaaggtagggcatatgatagaaaaccttcaaaaatgaaatatttaactcacagaaaacaaactatgtcaagaaaagtcactcatgcaagcagactaaaaaagctaattcaattgtttgaatgattaagaacaattacagacaaaaatacttgctgttgaagaaaacaagaatatttccctcatgttatccaggttgactgcctgcattaatctaatttattaga

SEQ ID NO: 471475 - DNA, 614 bp, Homo sapiens
taataacctcacttgtccttctcttggtccttgggctttcaaggaggagaaaaagacatagctttcctggggctgtagttatttgactcatacttacttaacatagcactgttatcctccgcttgtcctggtcatagcaaacattgatagagatatacttaattgaaagaactaaaggctaattaagataaatgtacagacaaagtaaatgaaaattttatggagraaataaagtaagatttaaacaggaaaatcaaggtcacaatatgagtggctatcactgaatttatactaataaaatgaagaaaggggaaaaatcagataattgaaatgatacatgttttatggggaaaatcacatcacaaggacaacttttggatgatcaccaacaaaggtagggcatatgatagaaaaccttcaaaaatgaaatatttaactcacagaaaacaaactatgtcaagaaaagtcactcatgcaagcagactaaaaaagctaattcaattgtttgaatgattaagaacaattacagacaaaaatacttgctgttgaagaaaacaagaatatttccctcatgttatccaggttgactgcctgcattaatctaatttattaga

SEQ ID NO: 471476 - DNA, 614 bp, Homo sapiens
taataacctcacttgtccttctcttggtccttgggctttcaaggaggagaaaaagacatagctttcctggggctgtagttatttgactcatacttacttaacatagcactgttatcctccgcttgtcctggtcatagcaaacattgatagagatatacttaattgaaagaactaaaggctaattaagataaatgtacagacaaagtaaatgaaaattttatggagaarataaagtaagatttaaacaggaaaatcaaggtcacaatatgagtggctatcactgaatttatactaataaaatgaagaaaggggaaaaatcagataattgaaatgatacatgttttatggggaaaatcacatcacaaggacaacttttggatgatcaccaacaaaggtagggcatatgatagaaaaccttcaaaaatgaaatatttaactcacagaaaacaaactatgtcaagaaaagtcactcatgcaagcagactaaaaaagctaattcaattgtttgaatgattaagaacaattacagacaaaaatacttgctgttgaagaaaacaagaatatttccctcatgttatccaggttgactgcctgcattaatctaatttattaga

SEQ ID NO: 471477 - DNA, 653 bp, Homo sapiens
ctggccatttgatctctaatttcttagttgtatctgtgctaggttagaatgtgcttgaaatgatgttacagtgtsttttggagattaatcacccaataatgatacatttatatagttattaattaccctgcataattatttagttattactatgtggtacattaattcctagactttcaaactttgggcttttgtttcttcctgatttgaagcagtctggtaaatggccaaaagaaacaaagtgaagccaattgattctatatttaataggtatggattggtagccaaatagaagtatttttgcaaattaaagttttgcaattgaacactagcaaacaattcttttccctgacctgaatctatatggttccatagaacagttacaataacagaaaaaaataattaatagaaaaaaggcagttcaagattcatttattaccaaactagttttattcctgcagaatcagtattcttacaacaagtgaatgtggagacctagaatgaattttaagtcaggtggctggtttttgtttcttgggttaattttcttattttcttgctactcaaattgtgatctttgagccagcagtgtcaacaacacctggagattattagaactgcagtcctccaggttccacccctgaccactaaat

SEQ ID NO: 471478 - DNA, 635 bp, Homo sapiens
taatgtcatatgtttcactaaagggttattttattgtaattatttactaaatttatagtgtgctataatttagatgatactttgcaaaacttcttattgttcatttttcataattcagatgagtatctcataggagataagtctttttccaggctraaatgaatctaaattctcagattcctcatactttaaatttacacatgggacagtgttgtcttccttccttccttccttccttccttccttccttccttccttccttccttccttccttccttccttcctttctttctttctttctttctttctttctttctttctttctttctttctttctttctttcttttctattttgagatggagtctcgctctgtcacccaggctggagtgcagtggcgtgatcttggctgactgcaacctctgcctcccaggttcaagcgattctcccacctccgcctcctgagtaggtaggattacaggtacctaccaccgcgcctggctaatttttgtatttttagtggagtcggggtttcgtcatgttggccaggctggtctcaaacatctgacctcaggtgatctgcccaccttgacctcccaaagtgctgggattacagccatgagccacattgcccag

SEQ ID NO: 471479 - DNA, 521 bp, Homo sapiens
aaaagatactgtctgtttcagacactgcaggatctcacagaagttattcaatctctaggttgctttagcatctacttgtgtagtgagaagagttatttacttatattgtgcatgaggccktttagatatgttaaatgcaaaacagaactcttgctagctaaacacagtagaacttgaattttttttttgagaggttatttaataacaaaatcaggttatttgtgacttggttgaagtaaacggtgtctcagataaaataatttgttaaaagagttgcccaatttatgtcttataactttaaacaaataaataataataaataagacatatttgtgaaaagcttatcttgttattgtataaactttagttaaccaattcttggtattttttgagatattcactgggtggttaaagacaatgaagagaatgtagcaagttaaagacctacttgtccagggacgtgtagcagtgaaggatcaggccagggtacttttgagaaactatcacagaaatgtttcctt

SEQ ID NO: 471480 - DNA, 616 bp, Homo sapiens
ctgccaaaggatattgcctgaaaaacattctctctctaactgttaattcatttatttaatccttgggtgagcctccaacctgctgcttagacacggcagccgcctttgttgatgagaggttatagctgccccgacattccatttttatcagcttgcccttttgagatggcgtctggcttttaaaaagaggtagattgagggggaaaacacagtacagtttccagaagagacacctatggaagacagtacacaataggcaatagtttgaataaagagagcagaatggagccaaactgccaaagctaggctgctgtcctggctctcccattaaggaagttcccgatgaggaaatcaggtgcttttgctcagaatctctggactctgttctcaggtagcactccttgtaacaggtgagcagaactctaggstatttgaaataaagacttaatcctagtgatctctatgttcccagcacctaggacattcctgcttccacagtgtgtactcagcaaattcttgtgtatgaatgaggcgtctttctctgatctgctaatgacatagtcctagagaacagcaacaaaaagagggtgacaaatgacaaaaatggccccatgaa

SEQ ID NO: 471481 - DNA, 457 bp, Homo sapiens
taactgatgactataataatgtgtgactctcagaaatattgatagctccttgaagaggatgacagaaactgaaatgcttgtccaaactgcctggcaaactgaaagaatgcttagagatcactctgtctctctctttcagtctctctctcagtttctctccctctctctctctctctctgtctctctgattccttttrccaagatcatctcattctatttccctataggttgcttttgcttaaacttattctatgcagaacagacatatagaagaaaggacttgtagggaaatatttaaactcaaatctctttaaaaaaaaaatagtttttatctggtgaatatttgctgtcgttgacagaattttctgtccacttcataagaactttgtcaaaataactttcttgccaatataagcccctggagcaatccactgtccattgctttgtgctctgggga

SEQ ID NO: 471482 - DNA, 637 bp, Homo sapiens
gtcaatccaagccctgaggccttctcttttcacaaatcaatctgtragcctgcagactggaagcccctgatagcttgagagctgccaacaaatgggctagggaaagccgtggtttattcacagatgctcttgaccttctgtgttcttttcgaggttgcccacatcttcactgaagaaaccactcgagatggcttggcaggagccacgctctgtgccaggtgttgggcctgggtagtgcacagacaggtgagttgttacattagagagccataagtccaacgcaaagaggtgtgtggggggtaggtacagatcaggaggtagctcaggcaagatgaacctggggtacagttaagaggattggaagccatgtcaggcaaggagatggtacctgggccaggtgtgagggatgaaaaggatagattagctttgtgaacttgcatttagcctcaccgagcctccatttcctcatctgtaaaataggtataataacaacaagggggttaaaaaatagataaataaaatgattttgtaaattataaaatgctttataaatatcaattattatttgtatcttctagttgtcttccataagctaagcagccgaagacatggcatttaagaccagccaaagctgagc

SEQ ID NO: 471483 - DNA, 637 bp, Homo sapiens
gtcaatccaagccctgaggccttctcttttcacaaatcaatctgtaagcctgcagactggaagcccctgatagcttgagasctgccaacaaatgggctagggaaagccgtggtttattcacagatgctcttgaccttctgtgttcttttcgaggttgcccacatcttcactgaagaaaccactcgagatggcttggcaggagccacgctctgtgccaggtgttgggcctgggtagtgcacagacaggtgagttgttacattagagagccataagtccaacgcaaagaggtgtgtggggggtaggtacagatcaggaggtagctcaggcaagatgaacctggggtacagttaagaggattggaagccatgtcaggcaaggagatggtacctgggccaggtgtgagggatgaaaaggatagattagctttgtgaacttgcatttagcctcaccgagcctccatttcctcatctgtaaaataggtataataacaacaagggggttaaaaaatagataaataaaatgattttgtaaattataaaatgctttataaatatcaattattatttgtatcttctagttgtcttccataagctaagcagccgaagacatggcatttaagaccagccaaagctgagc

SEQ ID NO: 471484 - DNA, 298 bp, Homo sapiens
aggattaggaacacccaggatgaatggttgtctgaacttgctgattccaatcagtatataagaggttgggtgggtacaaggctatttctggggagaaatgacaggaagaccatgagtcactcatagaactcatactcttcatcgactctgaaacgcatcacagagggagtgtggcacacttcgctgggctgtacwctccaaatctctcaattcacatacttctgttcaatctgtggtgtcagaatgaggccaggagagttcaggctgcaaaaaacctgggtttgaattctaaattttc

SEQ ID NO: 471485 - DNA, 612 bp, Homo sapiens
ttatgtgcgcagtgagcaggtgtgtgtaactcagtgagtggcatggctctgtgtgactgtgggtgtgtgtgctgggatgtgactgagtattgaagggaaaacacgcatgtggccttctgtgcatgtgaaggttcctccccacacaacagcacttctgatgaaggaactgtgtgtcttttcatgtgtggcaatgtggrtcccaggtggcttaactggtagggatcttggagattgtgagttaccaaggacttgtttcagatcacttatgagagcagaatgtatgatcagtagatgtctcttcccagtaagagtggggaagaggaatggagactatgggggtgatggatcctcaggtggggtctgcacagagtgaccactgtctcttgcctcccaggctcagcttccctgtccccagcctatcctgtccttttcattgtgggacaggaggtttgctagagaaggatattagaggccatggtttcagagactgaatcacgtaaaatatccactgtaagctatgtctcaactgagtctaaacttgttcctccacccatgaaggaacaagtctagtctcagttcagacagagcttacagtggatattaatcaacaaa

SEQ ID NO: 471486 - DNA, 610 bp, Homo sapiens
tgcaggtggatttctacactgagatgaatgaggactcagaaattgccttccatttgcgagtgcacttaggccgtcgtgtggtcatgaacagtcgtgagtttgggatatggatgttggaggagaatttacactatgtgccctttgaggatggcaaaccatttgacttgcgcatctacgtgtgtcwcaatgagtatgaggtgagcaccccaggagctcgcagtacccaggctctttgggatcccagagcaggagtcagctctcattgacctggcctcaccagtccctcagggcccatctcccgtaactacccctgccccaggttttcatcacagagcaccctctgcttgcactgccgtcctcagctctttcccaaatctgaccaaggtcaaggtcggctcatcttccatttcccccaaagtggagaatctcctctgtcttttcacatagtgctcatttctacttatgccattatttaaattttcatgtagctgaatgaatacaatatacttaagaagaaagttttttctatcaatcaaaaattatgtcttcgtctcacttttgggccccaattctactcatacgaataacattaccagagctctgctctcct

SEQ ID NO: 471487 - DNA, 610 bp, Homo sapiens
tgcaggtggatttctacactgagatgaatgaggactcagaaattgccttccatttgcgagtgcacttaggccgtcgtgtggtcatgaacagtcgtgagtttgggatatggatgttggaggagaatttacactatgtgccctttgaggatggcaaaccatttgacttgcgcatctacgtgtgtctcaatgagtatgaggtgagcaccccaggagctcscagtacccaggctctttgggatcccagagcaggagtcagctctcattgacctggcctcaccagtccctcagggcccatctcccgtaactacccctgccccaggttttcatcacagagcaccctctgcttgcactgccgtcctcagctctttcccaaatctgaccaaggtcaaggtcggctcatcttccatttcccccaaagtggagaatctcctctgtcttttcacatagtgctcatttctacttatgccattatttaaattttcatgtagctgaatgaatacaatatacttaagaagaaagttttttctatcaatcaaaaattatgtcttcgtctcacttttgggccccaattctactcatacgaataacattaccagagctctgctctcct

SEQ ID NO: 471488 - DNA, 564 bp, Homo sapiens
ggatctgagtaaactacattgaaaacctsctggtaaggatttgccatcctagaagccattaaaaacattcatgggaggaaatcaacatattagcaataaaaggagtttgaaagaagttgattccaaacatcatgagtgagtttgagaggttcaaaacttcagtggagcaagtcactgcgaatgtaatagaaataacaaaagaattagcattagaaatggagtctgaagatgtaactgaattgctgcaatctcatgataaaactttaatggatgagttgtttcttatggctaaacaaagaaagtggtttattcccagactggaaggaaaaagaataagaaattgctcagggatagaaggaggagacaaatcattgccattgattatcttataccttcgtcatcaggtttagaatatatttttggatattgctaacacctatatttaaacaattattttagaacattccgatgccaaaaaagtatattataattttttactatattaatctaccttttggccatcttttattagtttggagaacatttgtctagttattccaaaat

SEQ ID NO: 471489 - DNA, 281 bp, Homo sapiens
ctctctgcctcctcttcctgctttaattttctccctagcrttcatctcccctttacttgcacacattttatttttttaaagtctgtccccccacattaaaagttaagaaagcagagattgcacaataattggcacatagtagggcttcagaaatattagttgagtagaaagaggaattaacgaaagttaatgttctcactcatgagtgggagttgaaaaatgagaacacatggacacagaaaggagaatatcacacaccagggcttgttggggggtgcagg

SEQ ID NO: 471490 - DNA, 281 bp, Homo sapiens
ctctctgcctcctcttcctgctttaattttctccctagcattcatctcccctttacttgcrcacattttatttttttaaagtctgtccccccacattaaaagttaagaaagcagagattgcacaataattggcacatagtagggcttcagaaatattagttgagtagaaagaggaattaacgaaagttaatgttctcactcatgagtgggagttgaaaaatgagaacacatggacacagaaaggagaatatcacacaccagggcttgttggggggtgcagg

SEQ ID NO: 471491 - DNA, 687 bp, Homo sapiens
ttaaccaggtatggtaaaatgatagatacgaagacaactgccttgaaagaagaatttcttacagttgccgagaggggagggcacaatatgccaagaagggtcgcatggggaagcacaagagttggtcaagagggcaaaggagcaaggaagagcatggcccagagtcttcttttttttttttaaggaagaagtatctttggtttccacaggaaagaacgggcaaggcagggtaggtaaccttgagtatattacatgacagctttaataatgtcagagggctctgatatacaggggtggttcttaagttgtgcagcatctggccctgaggtgatttaaggcaggggagtgtgagttagatagaggaggagtttagggatatgggctttggattggttggtttgtatatgaatggcaagactcaaatgcaagttgttatctctaaaaataagcaaatccygccagggacagttactctaggattcacaagccccctaagatgtcaaaacatcctaaaatacactaaattaaaaacatgattcatacaaagattaagcagaagggggcactgatgtgttacaaaagacagacatccactgaggcaacagtgtgagggtaattggcaggcttctctgagcctggacaggtaaaggagtcaggttatgtagcttctttttttttttgagacag

SEQ ID NO: 471492 - DNA, 607 bp, Homo sapiens
atgtttgtttatttatttatttattttaaagacggagtctcgctctgttgcccagtctggagtgcagtggtgtgatctctgctgactgcaagctctgcctcctgggttcacgccattctcctgcctcagcctcccgagtagatgggacgacaggcgcctgccaccatgcccagctaatttttttgtatttttagtagagacggggtttcactgtgttagccaggatggtctcaatctcctgacctcgtgatctgcccgcctcagcttcccagtgttgggattacaggcatgagccaccacacccggccctagtggggcaaratgtttttggtctcagataattcaagctcattcatcttcaagcacaccatcatgattaagcctcctatggctcgattaaaagaaaacaacacaaggctggtccaaaggtagtgagttatatcacctgattgttcagtcagttacaggccaaaccccttgttctactcttttcccttctcaatactgcacttgtttttaaataaagacaagaaaaaaacataaaacaaacaacatgatatattcctccagagctagcagttaatctagtggcaaaataaaaacgcta

SEQ ID NO: 471493 - DNA, 629 bp, Homo sapiens
cttgaacctcagctccatcagctagatgagtcacgttctcccagccgcagttcctcttctgagaaatcgacataatgagagtactgacctcatcaggctgttgtgaaaataaaataatgactgaatcacatttcacacagcgctttccgtttagtaagtgctcaaatagtattgggcatccttcttatttgtgttatttgatgctgagtgtgrgcactttctctgtgtcagggtaagccaatgatctgagtagggcttgataatgccattggagagtctgacaagatcaaagtgtaaatgggagagaagaggaaaagaaggaaagaaatgagagccacatatctactggcaaaaggaaaagtgcaaaatttccaagggcaggctgctgaaggcctgccagagcgggtaagtggagaggctgggccagagaggcagaggggctgctcacctagatcaggcccaagaagcggtttgagtgggtctcactgtgtcaggatagagaggtcaggtgtagtcaatacatgaataggaaggtgcagggcaagaagtaggtcagacaacagcaaaggtgtgcatgcccacaggattgctgtagatcaactggaactgaggcctgtggcttgtgatgc

SEQ ID NO: 471494 - DNA, 629 bp, Homo sapiens
cttgaacctcagctccatcagctagatgagtcacgttctcccagccgcagttcctcttctgagaaatcgacataatgagagtactgacctcatcaggctgttgtgaaaataaaataatgactgaatcacatttcacacagcgctttccgtttagtaagtgctcaaatagtattgggcatccttcttatttgtgttatttgatgctgagtgtgagcactttctctgtgtcagggtaagccaatgatctgagtagggcttgatratgccattggagagtctgacaagatcaaagtgtaaatgggagagaagaggaaaagaaggaaagaaatgagagccacatatctactggcaaaaggaaaagtgcaaaatttccaagggcaggctgctgaaggcctgccagagcgggtaagtggagaggctgggccagagaggcagaggggctgctcacctagatcaggcccaagaagcggtttgagtgggtctcactgtgtcaggatagagaggtcaggtgtagtcaatacatgaataggaaggtgcagggcaagaagtaggtcagacaacagcaaaggtgtgcatgcccacaggattgctgtagatcaactggaactgaggcctgtggcttgtgatgc

SEQ ID NO: 471495 - DNA, 629 bp, Homo sapiens
cttgaacctcagctccatcagctagatgagtcacgttctcccagccgcagttcctcttctgagaaatcgacataatgagagtactgacctcatcaggctgttgtgaaaataaaataatgactgaatcacatttcacacagcgctttccgtttagtaagtgctcaaatagtattgggcatccttcttatttgtgttatttgatgctgagtgtgagcactttctctgtgtcagggtaagccaatgatctgagtagggcttgataatgccattggagagtctgacaagatcaaagtgtaaatgggagagaagaggaaaagaaggaaagaaatgagagccacatatctactggcaaraggaaaagtgcaaaatttccaagggcaggctgctgaaggcctgccagagcgggtaagtggagaggctgggccagagaggcagaggggctgctcacctagatcaggcccaagaagcggtttgagtgggtctcactgtgtcaggatagagaggtcaggtgtagtcaatacatgaataggaaggtgcagggcaagaagtaggtcagacaacagcaaaggtgtgcatgcccacaggattgctgtagatcaactggaactgaggcctgtggcttgtgatgc

SEQ ID NO: 471496 - DNA, 683 bp, Homo sapiens
taagctaactggtgatagagtggtcaaaagtaagtcctcaaggccagatacctgcacttgaacctcagctccatcagctagatgagtcacgttctcccagccgcagttcctcttctgagaaatcgacataatgagagtactgacctcatcaggctgttgtgaaaataaaataatgactgaatcacatttcacacagcgctttccgtttagtaagtgctcaaatagtattgggcatccttcttatttgtgttatttgatgctgagtgtgagcactttctctgtgtcagggtaagccaatgatctgagtagggcttgataatgccattggagagtctgacaagatcaaagtgtaaatgggagagaagaggaaaagaaggaaagaaatgagagccacatatctactggcaaaaggaaaagtgcaaaatttccaagggcaggctgctgaaggcctgccagagcgggtaagtggagaggctgggccagagaggcagagggrctgctcacctagatcaggcccaagaagcggtttgagtgggtctcactgtgtcaggatagagaggtcaggtgtagtcaatacatgaataggaaggtgcagggcaagaagtaggtcagacaacagcaaaggtgtgcatgcccacaggattgctgtagatcaactggaactgaggcctgtggcttgtgat

SEQ ID NO: 471497 - DNA, 628 bp, Homo sapiens
ttttcagtatctgtggcttgtttgccctggcctcatcagtgcttcctttcccctacaaatattcttcagtgaatgtcatgtgatgttttgcttggccccttcctccaccaatagaaatccttaagggatcatctggcacaaaaatatcatagagaaaastgtatggactttgggtttgaaatgtattacttactgtcatatattagttcatagattagtatttaagttttcttggtcttagcttcctcttcaatgagactgatcatcccctcagttttatttagatattaaataaaatgatgaatgcacatcatttatcacaggctctgctacaaagtatgaactctgtcttttcattcttttccatgacttttccaatgtcttccataatcttccatcacacgtaccttttagttctaaaattaagaggaaaaaatgaaggaataagggagagaattgaaggacacttatcagataaaggactagaagtggagagcagcaaggcaaggaagcaaacttgaaagaaggatggtttcagaagaatagaataaaacttctgggaagctttttttctgacttccagtatgtttcggtatcaccattaactctaggcctaagcagagagcag

SEQ ID NO: 471498 - DNA, 628 bp, Homo sapiens
ttttcagtatctgtggcttgtttgccctggcctcatcagtgcttcctttcccctacaaatattcttcagtgaatgtcatgtgatgttttgcttggccccttcctccaccaatagaaatccttaagggatcatctggcacaaaaatatcatagagaaaagtgtatggactttgggtttgaaatgtattacttactgtcatatattagttcatagattagtatttaagttttcttggtcttagcttcctctwcaatgagactgatcatcccctcagttttatttagatattaaataaaatgatgaatgcacatcatttatcacaggctctgctacaaagtatgaactctgtcttttcattcttttccatgacttttccaatgtcttccataatcttccatcacacgtaccttttagttctaaaattaagaggaaaaaatgaaggaataagggagagaattgaaggacacttatcagataaaggactagaagtggagagcagcaaggcaaggaagcaaacttgaaagaaggatggtttcagaagaatagaataaaacttctgggaagctttttttctgacttccagtatgtttcggtatcaccattaactctaggcctaagcagagagcag

SEQ ID NO: 471499 - DNA, 628 bp, Homo sapiens
ttttcagtatctgtggcttgtttgccctggcctcatcagtgcttcctttcccctacaaatattcttcagtgaatgtcatgtgatgttttgcttggccccttcctccaccaatagaaatccttaagggatcatctggcacaaaaatatcatagagaaaagtgtatggactttgggtttgaaatgtattacttactgtcatatattagttcatagattagtatttaagttttcttggtcttagcttcctcttcaatgagactgatcatcccctcagttttatttagatattaaataaaatgatgaatgmacatcatttatcacaggctctgctacaaagtatgaactctgtcttttcattcttttccatgacttttccaatgtcttccataatcttccatcacacgtaccttttagttctaaaattaagaggaaaaaatgaaggaataagggagagaattgaaggacacttatcagataaaggactagaagtggagagcagcaaggcaaggaagcaaacttgaaagaaggatggtttcagaagaatagaataaaacttctgggaagctttttttctgacttccagtatgtttcggtatcaccattaactctaggcctaagcagagagcag

SEQ ID NO: 471500 - DNA, 628 bp, Homo sapiens
ttttcagtatctgtggcttgtttgccctggcctcatcagtgcttcctttcccctacaaatattcttcagtgaatgtcatgtgatgttttgcttggccccttcctccaccaatagaaatccttaagggatcatctggcacaaaaatatcatagagaaaagtgtatggactttgggtttgaaatgtattacttactgtcatatattagttcatagattagtatttaagttttcttggtcttagcttcctcttcaatgagactgatcatcccctcagttttatttagatattaaataaaatgatgaatgcacatcatttatcacaggctytgctacaaagtatgaactctgtcttttcattcttttccatgacttttccaatgtcttccataatcttccatcacacgtaccttttagttctaaaattaagaggaaaaaatgaaggaataagggagagaattgaaggacacttatcagataaaggactagaagtggagagcagcaaggcaaggaagcaaacttgaaagaaggatggtttcagaagaatagaataaaacttctgggaagctttttttctgacttccagtatgtttcggtatcaccattaactctaggcctaagcagagagcag

SEQ ID NO: 471501 - DNA, 401 bp, Homo sapiens
gctttgtaatcatgatatctcttgcactaacagattttgcacactacctttttcagaatatraaagccattgaagtaaaaatataaaattaaatagtgttgaaaagttcaatttctttagtgttggcattctataaaataagtctggtttccaaaataaagagtcagtatgatcaaaatttgtgtcacctttacttatttcacaagttacagaaaattcctgaccccaagtgatcattttgagtccctagacataagactttgacactttagatttttacttttgtgacaaagaaatcaccctgactgttgtgacaaaaagagaaccatctctggatatttttacaggaaaacaacaatttctttgaaagttaagatcttatattttccttagtaagctta

SEQ ID NO: 471502 - DNA, 515 bp, Homo sapiens
agcccatacatctgagtacctgtggggcattggagagacagtgggggcgagtgtttgtatgtatatgtgtgtatatgctagggggtgaagactatgcaagagaggccattatagcttactggttagcctcatggactcyggaactagcctgaatgagtttaaattacagcttggtcatttattaattatgtgactttgggcaaaacaaaggcaaaatggtaactacctcttaagactggtgtcaggattacttgggttaatacatgaaaagcacttagaacagtgcctagcaagtggtgagcactcaataaatattagcaactgtcattacaccaaatagaggagtgtgatgcatctaatacaaacttcatcatgttcaaaaggaagcctagattcacctgaagtttgaaatatgagccacaaagaatgagaaacatgacattaaatataagaattttaaaatgagtttctctaagccattgaaaagacctggcaaagtgtagtcaggttattta

SEQ ID NO: 471503 - DNA, 515 bp, Homo sapiens
agcccatacatctgagtacctgtggggcattggagagacagtgggggcgagtgtttgtatgtatatgtgtgtatatgctagggggtgaagactatgcaagagaggccattatagcttactggttagcctcatggactctggaactagcctgaatgagtttaaattacagcttggtcatttattaattatgtgactttgggcaaaacaaaggcaaaatggtaactacctcttaagactggtgtcaggattacttgggttaatacatgaaaagcacttagaacagtgcctagcaagtggtgagcactcaataaatattagcaactgtcattacaccaaatagaggagtgtgatgcatctaatacaaacttcatcatgttcaaaaggaagcctagattcacctgaagtttgaaatatgagccacaaagaatgagaarcatgacattaaatataagaattttaaaatgagtttctctaagccattgaaaagacctggcaaagtgtagtcaggttattta

SEQ ID NO: 471504 - DNA, 495 bp, Homo sapiens
aggggaaaacaaccaaccaaccttttagttacagcttgattctyatttcccaaactatcatagccttagttttacaaaagagaggctgaccttgattgtgcctcacttaggaaaatgactaccttatgctagttagagaagtgataagtctccaaggttttataaataacaaaagcagattaaaaaaaaaataataaaagcctgtattttactcctaatggaagcacattgaaaaacagtgccatggtgtgcaaggttattaaacaagtacatctaactgctggaaagttgaaatctcacctcactgtttgcagccagcaggctttctcctggcaatccctgactgttttaagtgaagacaggagaggagttgcacagccagctttctccatatggggtaaggaaaagactgtgcagaggtaaagtgcagaatgcaagtgcttcaggaaatgagctccagctctagctcttcttcattgcatcaacatcaaattt

SEQ ID NO: 471505 - DNA, 571 bp, Homo sapiens
tctaggctgggctaagatggtgggctggctttttcgcatatgtctctcattgtttttctaaaatgcgcagtttagcctgatcatatccttcacaaggtggtagcagaatcataaagtagcaagtgtttccaaacacttaggcctcttgaggtttaggctgaaaattagcataccatttctcattttattggccaaagcaggtcacaaggccaaaccctgggacagaaaattgtgctggatcacaagatgagcacactgcatggttgcataactaactaaggacacagatgcaggaagaaataaagagargaggcaaataattcagcccactaccaccctggattctgcttttggaaataaatataaatcaaatataaaaatcagacataattcaattgaattgattaaatattataatcaaagttttcctgtatgttaaaaaaaggaaaaagaaaagtatatacttctaaaatctgattaatctggcaacttgcatttcattttattttttgttaataagaggcagaaaatactaaaacattataaaataacacaaaataaaatttgtata

SEQ ID NO: 471506 - DNA, 571 bp, Homo sapiens
tctaggctgggctaagatggtgggctggctttttcgcatatgtctctcattgtttttctaaaatgcgcagtttagcctgatcatatccttcacaaggtggtagcagaatcataaagtagcaagtgtttccaaacacttaggcctcttgaggtttaggctgaaaattagcataccatttctcattttattggccaaagcaggtcacaaggccaaaccctgggacagaaaattgtgctggatcacaagatgagcacactgcatggttgcataactaactaaggacacagatgcaggaagaaataaagagaggaggcaaataattcagcccactaccaccctggattctgcttttggaaataaatataaatcaaatataaaaatcagacataattcaattgaattgattaaatrttataatcaaagttttcctgtatgttaaaaaaaggaaaaagaaaagtatatacttctaaaatctgattaatctggcaacttgcatttcattttattttttgttaataagaggcagaaaatactaaaacattataaaataacacaaaataaaatttgtata

SEQ ID NO: 471507 - DNA, 303 bp, Homo sapiens
aattggtgtttttatgagacgctggtcaaacagcatgaagcacttcagtaacctctcttctctacttagcaaccagatgaatatcttcctcttgtttgatttagacaagcaagcaaactattaatttacaaaggactttagttttcacttgatttcaccaaagttcagaaaagaagctcccagggtacactcctatcactaccagtttctttttctccatggtgcttgaaagtgcatttcacggaggaaaagaagagctygatagatggcttatctacaaaataaataacacagtgtttgcca

SEQ ID NO: 471508 - DNA, 661 bp, Homo sapiens
atttattttatattttgagttataaaccagtattactttattttgttgcccaaatttttccagctttggttattgaggacactttcagttggttggccatgaccttgcaaaaagtcaaattcctcaaaaacaaaaaaggtctaagaaactgttacaatcaactaaatgtgatgcaatattctagatggaatcttgaaacagggaaaagatattaggtaaaagtaaaggaaatctgaataaaggatgggctttagttaataataatgaatcaataatggtctgctagcaaatgtaccatactaatgtaagatgttaataataagagatactgtgtacagggtttgtggggactttttgtattacttttgcaattttttggtaaatctaaatctaaaataaaatgttaaaaagaaaccataatgccttagtttccactcagtagattcttttaaataatttcaactcttattttagagtcagggggtacatgttcatgggtatattgcatgatgctgaggtttgargtacaattgaacccatcacccaggaaataagcctaatacctaacaattttgcaacccttgcactcagcagaatttcaaggagttgaagatctaatttgagcagagctcctgcctgccacaaagacctcaagagccag

SEQ ID NO: 471509 - DNA, 581 bp, Homo sapiens
gaaactgaggctcgaaaactgtatgcattcattgaattacattgaggttcaaagacacacaacaaatwcatgtccaccaaattcggatcccctgctgctgtgggatgccaaaatgaacaggatgtggactctgtacccagaaggagacagcctagtgggatataatgcacatacattcctaggccttgtgtaagacaccatgtgggggaccttgcaggagaaatgttatgggcatcagaggcagaagaaaaggtcctgcctagtagaagttctgggaagccttctggaagagcaagcatttagctggggttgaaggacctggatttgggtagctggggaaggggagatgggctccctccatatcttctcccagcatcctgcatcctagtcttcttccgttggtgtgtctttctttctttctttctttttcttttctttttttttttttttgagatggagcctcgctctatcgcagtggcatgatctcagctcactgcaacctctgcctcccaggttcaagtgattctcctgcctcagcctcctgagtagctgggactacaggcgcataccactgcgcccag

SEQ ID NO: 471510 - DNA, 612 bp, Homo sapiens
agctgcatcaccgggacccagcaggggcatgccacgtggtgagtgttctagaatgttctacacactgcttcagaatgacagagtgaatgtggacaatgattccgctcagcacctggagctgtctgaataagaagaggcctgcaaatgccccacctgatggctgccccccagggcaccggctgttggagtgccggtccagggtccaacatttagtaaccaacatcaaatgtacttgtctctcctaagctgcacagactgccaaggtgacatttctcccacttacggacaggaaaccaaggctgaaagaggtcaaggggactgggtgtggtggctcacacctgcaatgccagtgtttagggaggctgcgacaggagggtggtttgagcacaggagtttgaggccagcctgggcaacatagtgagatcccatctctgcagaaaatttaaaagttagccaggtgcggaggtgcatgccaatagtcccagctactcaagaggctgaggcaggaggatggcttgagcccaggagttagaggctgcagtgagctataatcccaaggcactccagcctcrgtgacaagaggtcccacctctacaaaaaaaaaaaaaaaaa

SEQ ID NO: 471511 - DNA, 551 bp, Homo sapiens
agcagcgtccctccccggccagctctccacagccacacctccggccacaagttctctaatacaggatgttggcaggtagagagggatgctggatagggggaaaggaaagacctgtgatgattcaataaatttttacatagcacccatccccaccaagcccaactgtgtgctcactgctggcrtggggcacagaggaccccagctctgtccctgactgtctacagggtcttgactgcaagccctgcccctctctaggtcttttttttttttgagacagagtctctctctgttgcccaggctggagtgcagtggtgtgatctcagctcactgcaacctccacctcccaggctcaagcaattctcctacctcagcttcccgagtagctggaactacaagtgtgcgtcctcacgcccggctaattttgtatttttagtagagatggggcttcaccatgttggccaggctgggctcgaactcctgacctcaggtgatccacatgcctcaacctcgcaaagtgctgggattataggcatgagccaccgcacccgtcc

SEQ ID NO: 471512 - DNA, 319 bp, Homo sapiens
cttaagcttcttcagctatctggagccaccatttgtgtagaaatgtcctatgtgcttgagtgcccatcttcaaattttctgttgtgtataygttcaaaaacaattttgaaaagctgttttccctcctctgtctatgtttaatctaaattttttatcatacatttaattattgcaaagaatgtaatttctaccatattgtaaatgtagacattgaaataataaaagtttttactactctttaaaatgtttccagtagactctaaacactagcagcatctcaatactcatcattatcctttttttaaattttattttactt

SEQ ID NO: 471513 - DNA, 422 bp, Homo sapiens
gatgtgcgcgtgaagcccgtgggcgcggccggtggcagcagcacgccatcgcccaggccctccacgcgcttcctcamggtgccggtgcccgagtcccctgccttctcccgccacgcggacccggcgcaccagctcctgctgcgcgcaccatcccagggcggcacgtggggccgccgctcgccgctggctgcagcccggacggagagcggctgcgacgcagagggccgggccagccccgcggaaggaagcgccggctccccgggctcccccacgtgctgccgctgcaaggagctggggctggagaaggaggatgcggcgctgttgccccgcgcggggttggacggcgacgagaagctgccccgggccgtaacgcttacgggtgagtgctcacctgcgccggcagccgacgccgccaggtcggg

SEQ ID NO: 471514 - DNA, 622 bp, Homo sapiens
ttcaagtccttgctttcaattcttttgggtatatgcttaggagtggagttgctggatcacatggtaggtttttttgttgttgttcttttgttttttttttttttactaaagaacacttatttatttttaccaaaattttatcttgaggacatggctaaactgcgtttccatcccccaccccatcttgaagaagggttactacagtgaacgttataaagcagatataaacagtggaaggactggaaccaacattaattgaggaagaacaacttccatctaaatcatcataaaaatgtttaagtaaaaaaaaaggaagaaaagaaaaaaagagggggcaacgggggtttccaaatggaaaaagaacttcacatttcatctaatacagccaatcttggctagagtataacaaagtggaaacaggattactatgatacaaaacttccgctacagcacaccgtactcacctgtgttccaagcccacccccaacccccctaatgcttccaatacaattatttatcagcctgttgagcctgccgatgaagaagcatgtagaycttctctttaatccagtctttttttataaggctggtatgtctgggtatcagctcggtaaaccaggca

SEQ ID NO: 471515 - DNA, 467 bp, Homo sapiens
gggctttcatgtgatagcaaccaaggatgtccttgggcaagacactcaggctctcagtctcggctccctcatctatgaaacagaacactcaccagcccccytgcaaggggagaggtgaggactgagatgatgactatgaaagccccagcaaggctccagcacgtagcaggtgcttgatgtgcattgggcacatggtgataaaggagcagagacttcttggagggttcagctcagtcaagtcagaaaatgtcccatttctctcaagacaagtgcttggctaagcaggggcagcataaccctgggtccccaaaggacagatccctcctcccattgacagtgtttcattacgtgaactctggactcaggtttggggtgggaagcagaatcaagggaggctgaccagaagtccaagtgttgcagttaggcctgggctcccccagcaggggctgcaggaggccaagtccagg

SEQ ID NO: 471516 - DNA, 474 bp, Homo sapiens
ctgctgtctcatctggagactgatgcaacagtcctcaggtccaggcaagggctgagcggctgcccctggctgcctgggacactgcactcratctgcagtggcatctactccgccaccatcccttccatgccatggcaatgcttggtagactccatttcagcacaagcaacaacacctagagacagggggacgtgctcactctcacaggcattgggtattccaggcttccttggaccaacccaggagtggccaagcctccagcccgtggcagggagtaaatcattgtgtgtgcagccccaggaacaagtcagaaagggaaatctgtcataatatcgcgtcctttaaaacatttacagtgattacgctgtagcatctgacaagagtagtccaaacatccaaatcaccagcaggagaaagcatttccattcttttttcactttcctttcttgcctctttccttccttcctgctaacc

SEQ ID NO: 471517 - DNA, 591 bp, Homo sapiens
aaactacccccaacagaataatcacttatcttacacagaaatctgcaatttgggcagaggttggtcggctcacctcactttgctcaatgcaacatcagttagggtaggctaattaggagcaggaggatctacagtagtctctgtttatccacaagggatatgttccaagactcccagtggatacctacaacagcggatagtactgaatcctacatatactatgttttttctatacatayatacctatgataaagttttatttataacttagtcataagagattaacaacaactaataagagaaaaatcatagcaatatactgtaagaaaagttatgtaaataaaagttatatagtctctctcttacaatatcttattgtgctatattcacctatttttgggccacggttgaccatggataactgaaacctcagaaagtaaaccttgaacctacagtactttcaagatgactcacatggccagcaaattaggctgatggccaggagctcagccagggatgtgagctgggcacttctgttcctttccatgtggtcctttccacagagttgcttgggcttcctcacagcagggc

SEQ ID NO: 471518 - DNA, 617 bp, Homo sapiens
gcattcctttagttattggcattctctgttttgtgttttgtagtaagaatattcctgtccatttatatttatgtacctggtgtattttaattcaagtatattgagctaaaaaacacatacccctttaaaattttacaattctatgaattttagcaagtgcagactgtcttgtaaccaccatggaaatcacaatgaaaaacatacccatcatcacgagtttcctggtgcccatgtgcagccagcacctcccatcacgcccaggtgggactggctagttgtaggaaaacaagctcagggttcccacggattctaccttacagtgagtggtatgattattccattatatattacaatgtaataataatggaaataaagtgcacaaatgtgatgtgctcaaatcawcccaaaaccatccccatcctaggtccatggaaaaattgtattccacgaaactggtctctggtgccagaaagactgggatctgttctaagccttctccgatgaagttgccctttggtaagctttcccgcgtaacacaaatttatccatactccgtgtccaccgaagaagtctatccacatagttcctgcagagactgccctgttatcagttttcca

SEQ ID NO: 471519 - DNA, 545 bp, Homo sapiens
gtgggtattgacctaggcggagccgatcagattctctgagagatttgacattgggcctcccagcccccgccaagttgttgtctgcttctgtctggaaatgcgggaaggtctcctgagctgcagaatggccaagcaaaggaggtcagagaaagaaaggagagaggagaggagagtgggaagggacggggaatcagacagttctgtgacccacactgttktgactttgtgtcatggggtccgagtttgtgttacgaaaattcaaagatgatggtttcttcattcacaagcacgacagagaaacatgtcgtttgaatgtggagtgctctttccataagaaagaacgtgggctagaggagggcagcatcacctatggctgcactaaattcattttcacctgcaagggcaaccataattcccacgagctttggttgggcttaatgttttcctgtcttctaatggacagtaattgaaatggatttattatctaaattattccttagttcaggatatcacttagaaaaatgggactataaaatgagatattc

SEQ ID NO: 471520 - DNA, 616 bp, Homo sapiens
ggtgggtattgacctaggcggagccgatcagattctctgagagatttgacattgggcctcccagcccccgccaagttgttgtctgcttctgtctggaaatgcgggaaggtctcctgagctgcagaatggccaagcaaaggaggtcagagaaagaaaggagagaggagaggagagtgggaagggacggggaatcagacagttctgtgacccacactgttgtgactttgtgtcayggggtccgagtttgtgttacgaaaattcaaagatgatggtttcttcattcacaagcacgacagagaaacatgtcgtttgaatgtggagtgctctttccataagaaagaacgtgggctagaggagggcagcatcacctatggctgcactaaattcattttcacctgcaagggcaaccataattcccacgagctttggttgggcttaatgttttcctgtcttctaatggacagtaattgaaatggatttattatctaaattattccttagttcaggatatcacttagaaaaatgggactataaaatgagatattcatggtcaaaagcaatctgtaggagctgcgagttaaggcaagattcctccagcctgactcttccctagaga

SEQ ID NO: 471521 - DNA, 545 bp, Homo sapiens
gtgggtattgacctaggcggagccgatcagattctctgagagatttgacattgggcctcccagcccccgccaagttgttgtctgcttctgtctggaaatgcgggaaggtctcctgagctgcagaatggccaagcaaaggaggtcagagaaagaaaggagagaggagaggagagtgggaagggacggggaatcagacagttctgtgacccacactgttgtgactttgtgtcatggggtccgagtttgtgttacgaaaattcaaagatgatggtttcttcattcacaagcacgacagagaaacatgtcrtttgaatgtggagtgctctttccataagaaagaacgtgggctagaggagggcagcatcacctatggctgcactaaattcattttcacctgcaagggcaaccataattcccacgagctttggttgggcttaatgttttcctgtcttctaatggacagtaattgaaatggatttattatctaaattattccttagttcaggatatcacttagaaaaatgggactataaaatgagatattc

SEQ ID NO: 471522 - DNA, 545 bp, Homo sapiens
gtgggtattgacctaggcggagccgatcagattctctgagagatttgacattgggcctcccagcccccgccaagttgttgtctgcttctgtctggaaatgcgggaaggtctcctgagctgcagaatggccaagcaaaggaggtcagagaaagaaaggagagaggagaggagagtgggaagggacggggaatcagacagttctgtgacccacactgttgtgactttgtgtcatggggtccgagtttgtgttacgaaaattcaaagatgatggtttcttcattcacaagcacgacagagaaacatgtcgtttgaatgtggagtgctctttccataagaaagaacgtgggctaraggagggcagcatcacctatggctgcactaaattcattttcacctgcaagggcaaccataattcccacgagctttggttgggcttaatgttttcctgtcttctaatggacagtaattgaaatggatttattatctaaattattccttagttcaggatatcacttagaaaaatgggactataaaatgagatattc

SEQ ID NO: 471523 - DNA, 348 bp, Homo sapiens
ccacagttgttctatatggactccacagtagagtcagagaactaagtgacaagtggagcatcgtcctcctcctgctcacttcctcctcgccacctctctggcctggctatccttcagtctgaagagtgattcactttttcttttctttttagtctttactgtggaatctcatcaaagacttggaagcargggtggtgagaggggcctggggcgtggtgtggagggtcgagttctttgtcgtcccacagtcacccccaggaccaccttgcgaagccgaaaatacacatctgcattttaccgacaaggaacgccactgagaaagctgcagacatttgcctggggtcacgc

SEQ ID NO: 471524 - DNA, 587 bp, Homo sapiens
ctgtgagattgtaaacccaaggctcaaggtgctgaagttttgctgcagtgtaagtggcaggggcagtctttccctgatgatgtttccagaagagtcagtttctaggctttagatcatgtagggtttgtcctcagtggaccatggaaagctttctttacctggtgaaaatagacttgggcataatgcattaaagcctkgcagcacttagtcatatcagagcttaggaggagaagatgtgtgaggttttattattaggagcataggccttcagtgactattgcataagggatcaacttaacgttttgcacatggaagtggatctgtcatcaatccgcagtactttagaccaaggaaatccagtcaattcagttagctttgcctgatgtgattgtacctatgataccttatctcattgttttacaacttgtctgatgaaacaagtacctctatcactagcaatctttccaggtatgtcccatgagagaaacatgtttcctaataaccttttgtctactgttacagcacgagactttttgaatggaaaagcttctatacaatcagaaaacatgcattgaaaatggcaatgg

SEQ ID NO: 471525 - DNA, 587 bp, Homo sapiens
ctgtgagattgtaaacccaaggctcaaggtgctgaagttttgctgcagtgtaagtggcaggggcagtctttccctgatgatgtttccagaagagtcagtttctaggctttagatcatgtagggtttgtcctcagtggaccatggaaagctttctttacctggtgaaaatagacttgggcataatgcattaaagcctggcagcacttagtcatatcagagcttaggaggagaagatgtgtgaggttttattattaggagcataggccttcagtgactattgcataagggatcaacttaacgttttgcacatggaagtggatctgtcatcaatccgcagtactttagaccaaggaaatccagtcaattcagttagctttgcctratgtgattgtacctatgataccttatctcattgttttacaacttgtctgatgaaacaagtacctctatcactagcaatctttccaggtatgtcccatgagagaaacatgtttcctaataaccttttgtctactgttacagcacgagactttttgaatggaaaagcttctatacaatcagaaaacatgcattgaaaatggcaatgg

SEQ ID NO: 471526 - DNA, 633 bp, Homo sapiens
ctcccatctgccacgttaagtcacaggcttgcaccttaaaggccagaggccatccatggagaagactctcccaaatgactcccaattgggattggccctaacaaacaccatgagcttggagtctctcttctttcggggccactctgctttctcagtggtgctgtctcttcatgttacccacagccagtggaatcatgttctctgttccctctcaactatcagaaccagtcttttggacaggatctcctgaggttcctgctagcaaggtataaataacagattccctggaagtgttgaaaattggaaacgaaataggaatttttaaaatcttacacttcaagacaactggttggatgaattggggagatggtggstttatttttcttttgaagaaagtatacaaaggtggacactggacaggtagggacaaggtgactatggaagcatctcatggctgaagcttgctcccatctcccataacataaaggcattcatggcagggggtggggagtctttctcctccacctattcaaagtgatctttagaaggtctgcatcactccagcaaacagtggccaggctggttcttgccatattcgaccctattgaaattatcctaaggcagaccaatcag

SEQ ID NO: 471527 - DNA, 543 bp, Homo sapiens
attgggattggccctaacaaacaccatgagcttggagtctctcttctttcggggccactctgctttctcagtggtgctgtctcttcatgttacccacagccagtggaatcatgttctctgttccctctcaactatcagaaccagtcttttggacaggatctcctgaggttcctgctagcaaggtataaataacagattccctggaagtgttgaaaattggaaacgaaataggaatttttaaaatcttacacttcaagacaactggttggatgaattggggagatggtggctttatttttcttttgaagaaagtatacaaaggtggacactggacaggtagggacaaggtgactatggaagcatctcatggctgaagcttgctcccatctcccataacrtaaaggcattcatggcagggggtggggagtctttctcctccacctattcaaagtgatctttagaaggtctgcatcactccagcaaacagtggccaggctggttcttgccatattcgaccctattgaaattatcctaaggcagacc

SEQ ID NO: 471528 - DNA, 459 bp, Homo sapiens
tgttctcactgctcttagcacatgattaaacttgactcttgtgaggcacttgcataggcttttcagagacgctcacctctagaaacttctatcctgaagtcccacggccatctgctgttctaagcagatactctgaatttttctttcagaatctagtgataaactctaactagcctctctctgatgggataytcacagtcctctagtcaccctcttcgtcatgatcttagattacctcaagccaactctctattccacgtgaccagccactgacctaccaatcacactctcacatcgtttgctctgacaaactctgagggtgcaggatgtttgcaatgctgcaatgctctgtgggctctgtcaccaggcaattggcttgtctgtcttctgcccactactgctgtcaatgtgaccccaaactgcagagacacacatggctttctgacttatcttgtgaaa

SEQ ID NO: 471529 - DNA, 493 bp, Homo sapiens
cagcacatgttttggaagatgaaaggtgaaataaaagtggaaactgacctagcagagaaagtaaaatctcatgtgttcaaagaaaggatgactgacaagaagcaaggactgtgtcacagaattccagaaaggcccaggagctggaggcatggctggggagcacactaagtacaggaagttctgagaagagcctttataaggaatgcctaggtctgtaaatctccttctatgcccacgcagccaagtgactagccctctcctaccccagcaagaaaagggaaatgtattatttgtgggaactgagcacacatagcacagaactcagagcagcaggtgtggcagaggggacatgctgaggcagaagagtaagtgaaagtctactagctgaagggtgatgcctctgtgattgatatgaagatggacagaatggargaaaatattggcaaatcacgtatctataagaaattaatatccagaatatataaagagctcc

SEQ ID NO: 471530 - DNA, 614 bp, Homo sapiens
ctgtgtatttgaggtagctgcacccctggaggaagcctctgggagcactgggtcctggccttggactcagccaacttcttcagtggtcaaacctctaggcaatgtttcatttaataaactgttggaacagcaagtaattccaagtccaactatttgtagatcattccagttgcctcttgaattgggtgaagtttatactaaygttgtatttcttgtcaattctccatgtatttctaaaagattgtgctttacatactttttcaaggcatttttgttatatcaaagctcatgacattgatagcttcattttaaatgtcagtttttataaaagaaaaatgatccattttccccctagctagtaataagtagcacacctttacctagccttctctgtactcatgtcccttcttaccctggagcagcagtaagcaagtcttctgagaaatctgaatgccagcccattttctctgtataaatgtttctatcttgggctatgatgaattatacctaacatctgcccacatagtgatgtttaaatctcctctccagattcagatatgaagggaagtttggtatgcatcaagacttgaagtctacatcaactaatatcaaca

SEQ ID NO: 471531 - DNA, 614 bp, Homo sapiens
ctgtgtatttgaggtagctgcacccctggaggaagcctctgggagcactgggtcctggccttggactcagccaacttcttcagtggtcaaacctctaggcaatgtttcatttaataaactgttggaacagcaagtaattccaagtccaactatttgtagatcattccagttgcctcttgaattgggtgaagtttatactaatgttgtatttcttgtcaattctccatgtatttctaaaagattgtgctttacatactttttcaaggcatttttgttatatcaaagctcatgacattgatagcttcattttaaatgtcagtttttataaaagaaaaatgatccattttccccctagctagtaataagtagcacacctttacctagccttctctgtactcatgtcccttcttaccctggagcagcagtaagcaagtcttctgagaaatctgaatgccagcccattttctctgtataaatgtttctatcttgggctatgatgarttatacctaacatctgcccacatagtgatgtttaaatctcctctccagattcagatatgaagggaagtttggtatgcatcaagacttgaagtctacatcaactaatatcaaca

SEQ ID NO: 471532 - DNA, 588 bp, Homo sapiens
caacacctgtgaacagtagaatgaggattttaaaaaaaagcagagagaaggaccacctaaccctattcctttagtcacatgtactggattctcccctatatttcccacttccaaattgcccttaactccaaatttcctatctaacagcgacttttcttttttcagtagtgttccaggtggaggtggggaggcatctcacgaccctcccctccgccaacatattccccaaatcacaggagtgagcatcaggatctgagaagcctaattccatgtggtgatctgtgggtctccccacaccagccctgggagtatctttgctcatttctgccttgagggaaacaagtccagtcatcaaagaggtgtcatgatgtatgtttcatggttcatgtcaccatttcttgcactgtagtgtctcctgtctacagtttttccttcctctgggattcactgtgacttggtgggctgagggcaggggaaaggggaccgtatggagctaaaatgtgrctgtaggatacagtccaagccttactctcgtctcctgcaaccctcagtcctgaggtcttctctcccctgtcctcctacctctct

SEQ ID NO: 471533 - DNA, 647 bp, Homo sapiens
accacagtcctgaagaaatatagccacgcagcaaaagaagcatttattttcagaaacacatttcttttctgacattacaggggagtgggagggaaggtccagattaactgtactttttaataagagatggagtgctattggaaaactattaaggaaattgtggctttagctcagattcaaggaagcccataagaagaatttactaccttccagcttaatactgcagcagggccagttctacagacccactgctccctgaatgattctggagagtatttgcgagctggggttgttctaggagaggcaatcagccgctgatgagctcccctgcttaactttcctaattgattccaccagacctcctagtagactagttgctaaccctgccccatcccaactctggcctggctctttctgatggcagtcttcagagaccatttgccagtttggagttaggccttggagctgcagaacaggcttgtaaagcagatgcgtagtaaatgctgcagccaartgtacagcacattttcctaagtggaaatcctgtgttacagacagaacattacttaacagtaggtgggcagttcaatcctaaacagctcagttcttccccatcagagaccctgcagaagcaggcttctgccaca

SEQ ID NO: 471534 - DNA, 664 bp, Homo sapiens
gggaggaagaacagttcttgtaactgttaggagcagacagtggctaagagaaacagtctcttgggaagtccctgtctgtgattttcctacgtaaacacaagaaaacaaaacccctgggcttgtcgttcacacaagcaagccgcacaaagctttctttccttcatctgcatgtgctagtgtgctgttcttcctttaggttttactgctgcttaaaggtgtttttgyccagatatgtaaaggtgcctcgcccttctccttctcaggaaaaataactatttattgagtgcctgttgccacgcaggaactctgtatccatcatctcacctcttcctcatcaaacacatctcttccgagtgagttgccaaattacactgctggcttcccaacctgaggttttgcttctgtttacattttaccagagcaagagagaaaaagtcacaaatgatgtgctgtcttctcatcttactaatcccctcttccccaagcctttccacatctagaattaaatacctgggccttggcagccaggccaacccctaacattggtaaagcccaggcaagagcacaaatggatgcccatatgcctaaagctgtaagagttataatgcccctttaatgcatcctcatgtccacgttggatatgtgcattaaaattcatgaaaaa

SEQ ID NO: 471535 - DNA, 639 bp, Homo sapiens
tgccaccaaggagattgtcagtgaactgacctgaggctagaatgttctgggaacacacagacctgaacatggagcttggatgcaccctgagctgaactaggactgcccagtaattgtcaaccctttgggaacatttatggctgctttgaaaatctgatgaaagtcctaattggaacctcttttcacacaaaaatacacatctgccaatacacacaaaatatttgtgtataacttcaggggtcccagggcccctgaaaattcactcatgaatccttaggaatccacgcacccctatggaccaccactttaaccccacctctctgattcagaatgaactttcaacaaggttttcccatgaacwgtgggcaaagatagcagggctgggcacaaatgcccattgcacagcagaagtcaaacagggctggtctttggaaaaaggaaaagcagcaaagattagctttggagttcccagcctggcctttcttctacctcttcctggttatgttcataccctcccccattgctcctcaagggtttgagtttattaagcaaacactacctttgctccctatatgcctggtatgtaaagcacaggaaatgttttttaatcaacaacccagagtctttgcacttcctgta

SEQ ID NO: 471536 - DNA, 628 bp, Homo sapiens
tcttttgtgtgtagctccgtctccctatttcctaacccaaaattcaaatctcaatccatacarcctggcacagaaaaacaacttggggcaagcagattctctggctgggggagtccttgaaataataaataatgagcaagccagatgcttaagagtaaaaagtgaagttgtaggttatgatttaaagagcaattgagaagttggctgggatgtcatgatggatcatattcaagtgagggggagtggaaactatgagcaaacatacactctggcgatgaggttatacatttatttaaactacaattccactatgcagacaaaatatagcttctttatttgatttagaacagccttaatcttgttaatgagccctacccactggataacaaaaggaacaaaccaaaataacatgctttagtctagttcttagtttgaagcaataattttgacattcttaggcattactcaattttttagaatcttatttcttttccttctctgtcaatgtgatgtctggggctatagggcagattggagcttatatgatcttgtgggctttgaggggaaagaggcccaaatgccatttaatattctttgtctcctctagtctccacagccatgaccttga

SEQ ID NO: 471537 - DNA, 575 bp, Homo sapiens
ctgtgacacaggcatctcaaaccatccgacatacccctccactccttaggactctatggtggcatcccttagccccaggaagcacaggagtcacatcactttctcatttaagattcacttgctcaaatcttcttttgtccagttccaccctactttttctaaagctgcatgatgcatctgtaggcactcctttgtaccacttactatgtgtcagacctggtatcttgatttgacctcattttgcttacagcaaccatgtttttgtttcttgcaacaaccaagtttctgtttacttacsgcaaccaagtgatttctgttgttatctctatttcatgggtgaggaaatcgagcattagagagggcaaataaagtacccaaagttagagattcggcaagtctttgggttcataatatttgaacccaagccctctgatcccatagtccacattcttaaccactgtaccagtgcttctcaaagtatagaccactgaccgtcggcaccagggtcactgggtgcctgttaaagtgcaaattcctgggtcccattttctatctacttacctgatgaaaaggga

SEQ ID NO: 471538 - DNA, 575 bp, Homo sapiens
ctgtgacacaggcatctcaaaccatccgacatacccctccactccttaggactctatggtggcatcccttagccccaggaagcacaggagtcacatcactttctcatttaagattcacttgctcaaatcttcttttgtccagttccaccctactttttctaaagctgcatgatgcatctgtaggcactcctttgtaccacttactatgtgtcagacctggtatcttgatttgacctcattttgcttacagcaaccatgtttttgtttcttgcaacaaccaagtttctgtttacttacggcaaccaagtgatttctgttgttatctctatttcatgggtgaggaaatcgagcattagagagggcaaataaagtacccaaagttagagattcggcaagtctttgggttcataatatttgaacccaagccctctgatcccatagtccacattcttaaccrctgtaccagtgcttctcaaagtatagaccactgaccgtcggcaccagggtcactgggtgcctgttaaagtgcaaattcctgggtcccattttctatctacttacctgatgaaaaggga

SEQ ID NO: 471539 - DNA, 621 bp, Homo sapiens
gctgccaagggcatgatctgggggagcaaggcagcacgacagggtggcatgtgccttttgcaatgtccttagttgacaagagagagcactcaggctgctccatccccgggggtggggaggaggggcgggggggggagcgggggctggggtggaggaggggaagcatcgctgcagcatgattataaaaacctggggcagggacgaagttctttacatctccgtctccctgtagcatctggcaggtgcccctacctcacaccaggtgcttgatggttgttggttgattattgattggcctctactcttctgtgcctagaaactccctcctctgcttcttccaagtaactcatackcctccctcataattctgctccatatcctaaacctcccaattcaacccttccctccctaccaccctgaatgtgtgcgctaggtattcctgctttgagcttccctaagaccttctgtttataactgtcatagcctaaccactctatattttagttgtatcttgatttgtctgccttttccctctcccatgctccatgctacaggaggctatgagcctatagaaagcaataatttttttttatttttgggagatttttccccctatctgga

SEQ ID NO: 471540 - DNA, 606 bp, Homo sapiens
caagccattcatgagggatacacccctgtgacccaaaccttgccccccttccaacattggggcttaaatttcaatgtgatgtttaggggtacaaacatccaaaccacagcagagaaatacagagttctgtatttctattcccaaagggcaaaatttgggaggtgaatgggtctatatgtgtgttggggggaagaagttaatatgaagaaaagaaactaaagtgctttacataataatkagaattacagattaaaaaatctgtaatctttccctaaaaagggaaagaagtaccatgcaaattatgaggtaagtagactatatgacttatttatttttattaggttagagcaagaattgcaaactcaaggtcctgactccttgaattgcactctatggacccagtcatacttcatttgcatattatatattaaatgctttggcatgatctttgctcccccttacatcctcaaaacactctttttccatttttcttaaaatatatgttcctctttgtctatattttatttttccaactttgaaaaggacttacacataaaaatggtatcactttcttcttaactgtaagaaaaatggtctcagccatac

SEQ ID NO: 471541 - DNA, 466 bp, Homo sapiens
atactggcttcctcactgatgcttatgtgaattttccagaagccccacagatgcctcccacttcacagtctctaccatctgctcctacccttggtgattcaccccactggtttttattgttgttgttgttaccagggtccactttcctggcagccagttctcttgggtgggatatgggtgagacaggctcaaggctggctgctttctatgcgttcctttgatctgtgaaatcacacttccatcaccaaatgctaaatggtaggcatgggagctgcagyactctaccctttctctctgcctccttccaattctcttttctacttgtcacattggacagaggtgggccaggccgtctacgtataagcagacatcaaattggtgagtgaggagggagcaggaaaagcacctcctcactctgcagcccccccaaggaagcagatgactcaccaacagtctctcctcttgc

SEQ ID NO: 471542 - DNA, 662 bp, Homo sapiens
attccttctcttctcctattttcagaaactacccacttcagtcctaatcttgtaaaaccaagcaaactactcccagaaggtgacaatgaggagggaccatacactagagtgtaggtttagtgagcaaagaatagctccaggaaggtaccaaagctgctatactcacattttctacattttagcataatctttcatcttggaggatcttcagtagagatagaaagatgccaagaaatctctcctaaattccatggattcagatatactatatttaatctttaaaaagtgctgaatcatagagttgcagaggtggaaaggaatggactttagaaatccagtccatttcctcaatctgtttattaatttcctctataacattcctcaaaactggccatccagccacagttttttttttatttctctttaaaaaatattgtttaaagaataatgagcctaattccaaagacttaatcagtatttcttaaagaatgttctgcagatgacctgcatcagaatcacccggcatgctgccaaagggtccctgggatctaccctagatagacagaatcctagagcctaggggtgcagtccaagactctgcacytccaggtagtgcttgcatatactaaagtctgcgaccctgtattctaacagggatcagc

SEQ ID NO: 471543 - DNA, 613 bp, Homo sapiens
aattaaatggtgtgcatagttgacatatttggtttatattcttgtgcaaactgaaaataytcagatagtaagaatttaggcttttcaggccatacagtagttgtcacaattttaggctttgtataccgtacagtccctgtcaactttgtcagtatagcacagaagcagccataggcaacaaataaatgaatgggcatggctatgcttcaatgaaactaagaagcagacagcagtctggttttggtttgtgggccatagcatgctgaatcctgaatcctaagccatttcagcagctcatcccgtcaaagctcattatcgtgtctgcttttataataatgtcaaaagaatgtaggcaagagcaaaaacagaattggagatatctttccttagagaccagaaaaccaaatgcctgaaatagttgtttcagatgccccaacatggagatagagggatagaatgaaatatggaaaattgtacataattatttaaaatgtatatgagtaataaagtgcacaagtactgccagtcaaggccctgggccaaatttggaaaaaataaatattctaagaaggtttcatttcaaaatgttgatatctcaacattactgcttagc

SEQ ID NO: 471544 - DNA, 613 bp, Homo sapiens
aattaaatggtgtgcatagttgacatatttggtttatattcttgtgcaaactgaaaatactcagatagtaagaatttaggcttttcaggccatacagtagttgtcacaattttaggctttgtataccgtacagtccctgtcaactttgtcagtatagcacagaagcagccataggcaacaaataaatgaatgggcatggctatgcttcaatgaaactaagaagcagacagcagtctggttttggtttgtgggccatagcatgctgaatcctgaatcctaagccatttcagcagctcatcccgtcaaagctcattatcgtgtctgcttttataataatgtcaaaagaatgtaggcaagagcaaaaacagaattggagatatctttccttagagaccagaaaaccaaatgcctgaaatagttgtttcagatgccccaacatggagatagagggatagaatgaaatatggaaarttgtacataattatttaaaatgtatatgagtaataaagtgcacaagtactgccagtcaaggccctgggccaaatttggaaaaaataaatattctaagaaggtttcatttcaaaatgttgatatctcaacattactgcttagc

SEQ ID NO: 471545 - DNA, 574 bp, Homo sapiens
gctgcagagagggttggggtaatggggaaaattaaggggcaatggggaaattagagaactagagatggcagcagaggctgtaaaaagacgatatagatacatgttaaattttgcctaattcccaaatttccttcaggatggccatagccaagagagccaaaaattacttgtcatggcatgaaaaggtgctgcttatttcagcagggagaaaaggcctagtgtcaacggctgagcatccttcttcagcacatctgtaggctgatcttcatctgctaggatgccataaarcctcccaggaggctcttggtgctctcttcttgaccacagattgataactcctagggtcctctaagcatgactctcttatcagtgcatcacaaacatcatacatatataggtctatgtgtatatatgtatatatatatgatgttattttgtgatggcatgatatatatatcattatatatgatatatatatcaagatatgtataatgccgtttatatatgactcatccattctgtcttctgatgtttacattctcatacccatgttctccactacttctctcttctt

SEQ ID NO: 471546 - DNA, 574 bp, Homo sapiens
gctgcagagagggttggggtaatggggaaaattaaggggcaatggggaaattagagaactagagatggcagcagaggctgtaaaaagacgatatagatacatgttaaattttgcctaattcccaaatttccttcaggatggccatagccaagagagccaaaaattacttgtcatggcatgaaaaggtgctgcttatttcagcagggagaaaaggcctagtgtcaacggctgagcatccttcttcagcacatctgtaggctgatcttcatctgctaggatgccataaaacctcccaggaggctcttggtgctctcttcttgaccacagattgataactcctagggtcctctaarcatgactctcttatcagtgcatcacaaacatcatacatatataggtctatgtgtatatatgtatatatatatgatgttattttgtgatggcatgatatatatatcattatatatgatatatatatcaagatatgtataatgccgtttatatatgactcatccattctgtcttctgatgtttacattctcatacccatgttctccactacttctctcttctt

SEQ ID NO: 471547 - DNA, 574 bp, Homo sapiens
gctgcagagagggttggggtaatggggaaaattaaggggcaatggggaaattagagaactagagatggcagcagaggctgtaaaaagacgatatagatacatgttaaattttgcctaattcccaaatttccttcaggatggccatagccaagagagccaaaaattacttgtcatggcatgaaaaggtgctgcttatttcagcagggagaaaaggcctagtgtcaacggctgagcatccttcttcagcacatctgtaggctgatcttcatctgctaggatgccataaaacctcccaggaggctcttggtgctctcttcttgaccacagattgataactcctagggtcctctaagcatgactctcttatcagtgcatcacaaacatcatacatatataggtctatgtgtatatatgtatatatatatgatgttattttgtgatggcatgatatatatatcattatatatgatatatatatcaagatatgtataatgccktttatatatgactcatccattctgtcttctgatgtttacattctcatacccatgttctccactacttctctcttctt

SEQ ID NO: 471548 - DNA, 516 bp, Homo sapiens
agctgggtttgaaagtggaaataatatggatgtgttggtataccatgaagattttcctgtttgtccctagatttctgtttttttgtttgtttgtttgtttttctttctttctttttctttttttttgagacagagtctcgctctgtcggcaggctggagtgcagtggcacgatctcggctcactgcaacctccgccttcggggttcaagcgattctcctgcctcagcctcccgagtagctgggactacagacgccygccaccacgcctggctaattttttgtattttagtagagacggggtttcaccatgttggtcaggatggtctcgctctcctgacctggtgatccacccgcctcggcctcccaaagtgctgggattacaggtgtgagccaccgcgcccggctttcttcttcttctttttttttttttttttttgctccttcacctcccccctactcttcatccttcattttgtcccgtttctatcttcaggtgcccaactcatgtccttcttg

SEQ ID NO: 471549 - DNA, 580 bp, Homo sapiens
gtttgaaagtggaaataatatggatgtgttggtataccatgaagattttcctgtttgtccctagatttctgtttttttgtttgtttgtttgtttttctttctttctttttctttttttttgagacagagtctcgctctgtcggcaggctggagtgcagtggcacgatctcggctcactgcaacctccgccttcggggttcaagcgattctcctgcctcagcctcccgagtagctgggactacagacgcctgccaccacgcctggctaattttttgtattttagtagagacggggtttcaccatgttggtcaggatggtctcgctctcctgacctggtgatccacccgcctcggcctcccaaagtgctgggattacaggtgtgagccaccgcgcccggctttcttcttcttytttttttttttttttttttgctccttcacctcccccctactcttcatccttcattttgtcccgtttctatcttcaggtgcccaactcatgtccttcttgttttctcagtttctttggatggcccctctttaagagtctgtgcttctcttccctgacatgtgttctttac

SEQ ID NO: 471550 - DNA, 491 bp, Homo sapiens
ggttaatattcatgaaactatgtagatgctttgtgccacacagctctgttgatgtccaagaagagttatcagttgtgggtgagagaggaatttcagaggataagtgtctagtaaaacaaaacatakctgtctaggcagggacggatttaccaggaaccaatgaagcacaagctttgaggcctctcacgacctcctactgaccccttacttccaagtccttgtaagcggccttaggaatgcctgtgagtatttgcttttgtaacattcccaaaagtacagtgttttgtatgaaatcagttaagacagttctctcttcactttagtttctttatacttttctcatgggaagtacactatggtaactggagtgattgcagtcatttttgagatctggctaaaaggaagctgaggatgcattgaaattgagtgtactatgatatatttatgtggttcacagtctcttccatggatatccctatgtcattactact

SEQ ID NO: 471551 - DNA, 506 bp, Homo sapiens
accccaggctgccgcatttctcgtgggggcagcctggccaccgcccgctcccgttccgctacgccccctctggctgcggcccacgcggcgctcagcctgaacctgaggaaggcgaggggcgaacggacgccgcgagaggcagtgaggaacagmaacacgccgtcgcgcaccagcaaagcgggcccttttgtagcttctctttggtgagaatatttaacaaatggtatgaaagtgcaatattggaatgtttgaatccttatttatatatggccactgtggtctctgatacaagataaggtaacgcttatttatattgtaattactgcagctctaaaccccagtagaaatcagtcctaagcattctcctagctttttcagtgttccaggctgtcggctcatgtttaatccagagcaatgcccatagctattcttctagagacactattgctgatggcctcataggccttggtatagggaggactccgtgtgctcatatttttcacaga

SEQ ID NO: 471552 - DNA, 568 bp, Homo sapiens
ccagtcactgcagaacagcaacaaggattgtgggctgcaaaacggccactgcttcccttctactcccacatctcccatgggaagctgtctgtaacccacgctaatagaacacacccagaaaaaagaattctggaaaacgtaggtcaacctaggcaagctgacacttcacaaagcctccatacttagtgagctagaagaawgtgtctctgttacagagaacacgaagacttaattttctcaaataaaagatgatctgaatgaattgttgtcctgatagctatttttttttctaaaaagtagttcaaaataactaatatttagtgagtgcttgttaggccccaggcatcatactgagcacctcctaggtgcatatgcattaacttcctaggtggcctgccttcctccactcttgtccctctacaatccatcatccacaccatggcctaaaacacccattagatcatgccactccactgcttacatcctccagtggcctccctttatgcacggaataaaatccaggtcccagctggttccatgagctctcgttcctgtccacttctctgat

SEQ ID NO: 471553 - DNA, 533 bp, Homo sapiens
accctgcttccaaaaacctcattcataaaagaaaattagaaaaggaaaagttgagtcataggaaacaagtacaatgctgatgaaatggattctcctaattcagattaactaaacgtatcagctagtgctgcaaaaaacagagaagaaagaaagtaattaaaaccgggcttaacaagagaaaaaatatactgactcatttgcctgaaagatccataggtagtcttggctttagttttgtttattttatcaagcaattcaataatgtcatcaaatactaaggggtttgtttgtttgtctcccaagcatgcttttttcagtgttgtctgccactatggttggctgtactctttattctaagatggcttccagaagcttcgacaataattatacaactcacagttccagcaagaaagagacaccatctttgtcatcagcaaatgtcctaagtgttactttaattggataggcwgtcacatgcccaaaatcgggtcaatcacggtggccaggcagattgcagtgatttgtcatatgct

SEQ ID NO: 471554 - DNA, 594 bp, Homo sapiens
caaggttacactttactaccaagagagtaacaccttttaattggttaacaccacaaataaagaggtggtggcctttctagctggcttctgatttgctcccgcattaaatgggtttaagaaaacaaaatcctttccttgcttactttagaagctgtgattttaactaggaaacaaaggggcacacaggaaaaagtcagagacaaaacgggaaacagaagggaacttctaagtgggtcagaactgaatgttttagaaaatccccttaaaagcagatataattaagtgaaaataactttatgaattcaacattaagaggaaaacttcagtcttatgggaggtcaagaaaagaaaagccacattgtgtagcatgcacayggggggttgtggatttcggaggatcatttaatttcaaatactatgtccctcaacttcacggatccttcccccatagtggcttttttccttcttcggctcagtcatcccactctgtcaacaaggctggaacaaataaattggatagccaaaactattgctttcacttctaaaagagactacccggcattataggcatttagaacagcatcaaattttaaa

SEQ ID NO: 471555 - DNA, 335 bp, Homo sapiens
cacttgcagctgtttgtgcctcagtgcctgacaagctgagtaatgcctgggtgtttcctggcttatcagtgccctggcggccacatttccatcacccgaggtcttgcctattggattcttctgtgtctggctttctttgctcagcatcatgttttcaagattcatccaagttggtttctgtatcagcagcatgcctctttttcttgctgagtagtactccattgtatgaacacaccgcaaatcattaatctgttctcccaataatggatggatggtttgtkttccagtttggggtaattctgaataagactgaggtgagcattctagcgtaagtg

SEQ ID NO: 471556 - DNA, 589 bp, Homo sapiens
aaaacaaacaagaaggcagagatccaaagactaaagccagtctcaagccatcatagaacatcaggggcaacctgaaagggggaattggccatggaagggcagcctggtcggtgtgtggagagaggggaaggccggcaatactggctgcagagtatggactaaaggcctgtgaaacagcagcctcttccccattgccygagctgctgaattaccaacaagagtgagtgagcaacccttcaaaggatgctcactcaggccccgccacacttttccctgaatcactggacccaccatcatttgctgtcagagttaattcctccaagacaaggattccttgatataatgttattgaacaaaacaagcttggattgccttctggctttacaactcacctcctgaatgtctttggtgttaagtaacctctctgtacctgtgtttcttaagctgtaaaatgggaataataatatcactattgcagggttgtcatgagaaatcaatatgatgaagcatgtcaagtgcccggcacagagcctaacacaggtaggggctccacaaacttggtttctttctcctaggtggatattactga

SEQ ID NO: 471557 - DNA, 620 bp, Homo sapiens
gcttttactaatgatgtgaactttacaagttcattaacctatcagtgtctcagtgtcactgcctacctttaaaatggcgataaccaggctaggcrcaatggctgacacctgtagccctagctactctggaggctgaggtgggaggattgcttgagcctggaagtttgaggatgcagtgacctatggtcgcaccactgcactccagagtgggtgacagagtaacactgtttcaaaaacacaataaataaataaataaataaataaataaaataaatagggataacaactgttcctacctcaactcgttgtgaagattacatgagctaatgcacatgagcagttagaacactgctgcagtgaacaccaatacataacctctgtatggatcattttggtctataggtttggacaggatgacatggaaagaaaaagcagactcaaactccatcgctatcacttctagatccgtgattaggaacatgttctccttctctgaagctttgtttacttgtctttacaacaaagaaaatcatacccatgataaaggatgggcatggaaatgaaatactgtttattaagcatggatattacattaagtataattacatgttgcctattaa

SEQ ID NO: 471558 - DNA, 625 bp, Homo sapiens
gactgattccctatgcttatcaatcactggatgtgggaaaggatgaaaaataagaagctgtatctcagtttatacttctggaaacagtgggattatagtgttataacggttaaattaatagacacatgaaaagtgctttaaacagtgacaagcacatagttaagttctcagtaagcttaacagttgttacttttaggaacttcagaagaagtatggctaggaaatgctaggaagggactcaaagtgtaagacaataacattctcatgatttctcccaaacagaagctcatgtttccaaattgaaacatgttgcagcgggctgtgttttccaaggaatgccttgtgttgtggaaaagaaatgatgaagaatgccagagaaagggaagaggtcccagatatcttgccaaggatcaagcgtcgggagtactccaggcttcagaggcatgtggctaatgtggtccaggaacagcagcttctgagtgatatcagtgtcataaataggcaggacttcagtgacaacaggcagtttgtytgctattttcattttgcagattaccttcccagacttcaacttgatgctacctgcagaagttgaatgtgagaatgttaagccagcatttcagac

SEQ ID NO: 471559 - DNA, 661 bp, Homo sapiens
tgccttgcccagagttgtgtcctcttccaggagcatcctgcagccagggctggttcagatgggggtataaaagcctggcccctcgacctcatttgtgctatcccagttctaaagctccctatgggattgctgagacctgggctgcaattgcaccacaataycaattctccctctccttagttcagcttccccatactctcagtgaaccctgcatgaacatcttcatctaatagtatgctttccagagaaatgagttggtgacatccctgattcctggttgagatctgtgtgccatcagaaaacttaaacacctccaatgctttgtgcccacagttttatactcaaggccctggtgatgctattcccaattgtagggtaattaggttcaggattccttgagagaggaataggggatatgagcaaattctgttcagtccttcacaaacagagggcacctcttccctctactccccttcttgatctcctcgtgaagactgacctgaaacctgagggtctactgatcccagtgagctattctgtggccatcccatgcctcctggacatgctgacctctggaggtacatcctgattgatgtttagggctaaagtctgctaggctataggagaggcagagaggttttttgtactcagagtgagggcc

SEQ ID NO: 471560 - DNA, 661 bp, Homo sapiens
tgccttgcccagagttgtgtcctcttccaggagcatcctgcagccagggctggttcagatgggggtataaaagcctggcccctcgacctcatttgtgctatcccagttctaaagctccctatgggattgctgagacctgggctgcaattgcaccacaatatcaattctccctctccttagttcagcttccccatactctcagtgaaccctgcatgaacatcttcatctaatagtatgctttccagagaaatgagttggtgacatccctgattcctggttgagatctgtgtgccatcagaaaacttaaacayctccaatgctttgtgcccacagttttatactcaaggccctggtgatgctattcccaattgtagggtaattaggttcaggattccttgagagaggaataggggatatgagcaaattctgttcagtccttcacaaacagagggcacctcttccctctactccccttcttgatctcctcgtgaagactgacctgaaacctgagggtctactgatcccagtgagctattctgtggccatcccatgcctcctggacatgctgacctctggaggtacatcctgattgatgtttagggctaaagtctgctaggctataggagaggcagagaggttttttgtactcagagtgagggcc

SEQ ID NO: 471561 - DNA, 576 bp, Homo sapiens
gccttgcccagagttgtgtcctcttccaggagcatcctgcagccagggctggttcagatgggggtataaaagcctggcccctcgacctcatttgtgctatcccagttctaaagctccctatgggattgctgagacctgggctgcaattgcaccacaatatcaattctccctctccttagttcagcttccccatactctcagtgaaccctgcatgaacatcttcatctaatagtatgctttccagagaaatgagttggtgacatccctgattcctggttgagatctgtgtgccatcagaaaacttaaacacctccaatgctttgtgcccacagttttatactcaaggccctggtgatgctattcccaattgtagggtaattaggttcaggattccttgagagaggaataggggatatgagcaaattctgttcagtccttcacaaacagagggcacctcttccctctactccccttcttgatckcctcgtgaagactgacctgaaacctgagggtctactgatcccagtgagctattctgtggccatcccatgcctcctggacatgctgacctctgga

SEQ ID NO: 471562 - DNA, 661 bp, Homo sapiens
tgccttgcccagagttgtgtcctcttccaggagcatcctgcagccagggctggttcagatgggggtataaaagcctggcccctcgacctcatttgtgctatcccagttctaaagctccctatgggattgctgagacctgggctgcaattgcaccacaatatcaattctccctctccttagttcagcttccccatactctcagtgaaccctgcatgaacatcttcatctaatagtatgctttccagagaaatgagttggtgacatccctgattcctggttgagatctgtgtgccatcagaaaacttaaacacctccaatgctttgtgcccacagttttatactcaaggccctggtgatgctattcccaattgtagggtaattaggttcaggattccttgagagaggaataggggatatgagcaaattctgttcagtccttcacaaacagagggcacctcttccctctactccccttcttgatctcctcgtgaagactgacctgaaacctgagggtctactgatcccagtgagctattctgtggccatcccatgcctcctggacatgctgacctctggagrtacatcctgattgatgtttagggctaaagtctgctaggctataggagaggcagagaggttttttgtactcagagtgagggcc

SEQ ID NO: 471563 - DNA, 659 bp, Homo sapiens
tatagatatttagtacaagtgagaaagtaacttttgttaatttagttaattctgttaagtcattgataatttagaactgtttgttaccatgctatgcactggctcagtgggaccgatacactcagtaaatttgtcaccagagtatgggaaaatgagttatggaacaaatctcctagataactttcccaaagagtgtcaaaataagtcacctcaagagatccccctgggacctcgttcttctcttagccactgtctctgaaagctgtcctggagtcgaattaacatactgagcttctaatcaacagattttccttctctcccactgccaaaaatgcccaccatgcccacagtaagacagagccattccccattcccaaacactgtaaggatagctgggtawggatgcacccagcaaccctcttgaatgtggggaaaagactcgggagctttctagttctggctcttccagtgactggatgtgaggttgaggcatttcttgtccacccacaaaacctgtttccctatttttcaaatggagaatttgcagtgagtctgtaaagattcttgctgacctagtagctctggaggtggttaccttacctttcctgtaaggagttggggggcttacctggcccagcgagcccctgggggctgaaggc

SEQ ID NO: 471564 - DNA, 459 bp, Homo sapiens
tgtttcatccagctcactggccatccctagcaagcaggggcagcttcaagggctttttctctttctttcttggaggctttcttttcagcaatgaagtagagtagaccaatttcttgcctgtgatttggtgcctgatgaatgaggggccttgatcaggaatgatcctgagtgatgggcaggaaatggatccccccttgtgaaaacaaaatattgacttctaaagagttttttttcttttttttaattggaaaaggtatcttttatttttattattattctttaagttctgagatacatgtgcagarcgtgcaggtttgttacataggtatacatgtgccatggtggtttgctgcacccatcaactcgtcatctacattaggtatttgtcctaatgctctccctccccttgcctgccatccaccgacaggccccagtgtgtgatgttcccctccctgtttc

SEQ ID NO: 471565 - DNA, 560 bp, Homo sapiens
atggatctactttgtccagtgaccctatgagctaaaaagacaaataatttgtcacttacctaaagtttcaagtttgaaaaggacagggtacttgtaatcaacactctcatttatggaaagaaagatggcattcatcaatggccaatgcactgtgccaagcctaaaatccttcagacagatgttataaaagtctgccatccagaacatcacacaccggggccttttggagggtggggggctgggggagggatagcattaggagaaatacctacagtaaatgacaagctgatgagtgcagcaaaccaacatggcacatgtatasctatgtaacaaacctgcacgttgtgcacacacacccgagaacttaaagtataataaaaagaaaaaaaaagtcccccatccttgattagactggttctctctttctgggggagctctgttgtcttgttgatcctggtttctggtttcctttgtgagttccctccttttccattattcccctttggtcacctctgaagtgagtattgaagagagacatgctcttcttgggggctctgctg

SEQ ID NO: 471566 - DNA, 560 bp, Homo sapiens
atggatctactttgtccagtgaccctatgagctaaaaagacaaataatttgtcacttacctaaagtttcaagtttgaaaaggacagggtacttgtaatcaacactctcatttatggaaagaaagatggcattcatcaatggccaatgcactgtgccaagcctaaaatccttcagacagatgttataaaagtctgccatccagaacatcacacaccggggccttttggagggtggggggctgggggagggatagcattaggagaaatacctacagtaaatgacaagctgatgagtgcagcaaaccaacatggcacatgtatacctatgtaacaaacctgcacgttgtgcacacacacccgagaacttaaagtataataaaaagaaaaaaaaagtcccccatccttgattagactggttctctctttctgggggagctctgttgtcttgttgatcctggtttctggtttcctttgtgagttccctcyttttccattattcccctttggtcacctctgaagtgagtattgaagagagacatgctcttcttgggggctctgctg

SEQ ID NO: 471567 - DNA, 643 bp, Homo sapiens
gtgccctttgtcatctactgcactatctctttattataacattcatacaattagcacataccctgtgcagagcaccaggtagaggactgcacagggagggagaagtgaattagacatgatgcttccttttcagaagagatgctaaagtaagaatccatggaaagtaggactgaatttaggaataaatctgatcagtacttaccccaagcttccagcatctaagatttcttgctttctggattggatctgccccagrtctaattgcatgcagtagccaagaatactcctgagcatgggaataggggtggcgatgggcatagcatatgagaacagaaagagtagtggcctgagttggtgggtgggggtgatggtggtgaggagtagtgatgcctgaggaagcaagaggcttgttctttagattgtcttctgagccagccctcacagattagcacctgagccctagagggaggagactgatgtgggttgggggtaagagttaaataaattcttaggctaaaggcagcgtgagccactctacagcactttcgtgttacacattgggggagaaaatgctttcctcatttggggcttgcattgtacaaggtggcctgagcagtgtgatgagggggtcaaggtgccgaac

SEQ ID NO: 471568 - DNA, 643 bp, Homo sapiens
gtgccctttgtcatctactgcactatctctttattataacattcatacaattagcacataccctgtgcagagcaccaggtagaggactgcacagggagggagaagtgaattagacatgatgcttccttttcagaagagatgctaaagtaagaatccatggaaagtaggactgaatttaggaataaatctgatcagtacttaccccaagcttccagcatctaagatttcttgctttctggattggatctgccccaggtctaattgcatgcagtagccaagaatactcctgagcatgggaataggggtggcgatgggcatagcatatgagaacagaaagagtagtggcctgagttggtgggtgggggtgatggtggtgaggagtagtgatgcctgaggaagcaagaggcttgttctttagattgtcttctgagccagccctcacagattagcaccygagccctagagggaggagactgatgtgggttgggggtaagagttaaataaattcttaggctaaaggcagcgtgagccactctacagcactttcgtgttacacattgggggagaaaatgctttcctcatttggggcttgcattgtacaaggtggcctgagcagtgtgatgagggggtcaaggtgccgaac

SEQ ID NO: 471569 - DNA, 568 bp, Homo sapiens
cttctgacattgtcatgagacttgtatgaattaataaaccaagagtgctctgtaagcaacttgtaaagagctgtgtcagtctgagggctcgtggcatgccttctcaggggatgtcccagggcacatgccagtttctgggcattggatgcctacagtcctgatgcccagtacaagcttctgctgtgatwtcttgctatgaaaatgtgttggccatttttattatataatgcatagggaggtttccatttcctaagctttttttcatccccattctgtctgcccatgacaaaaagctgaaggtcaaagaagtaaccccagaatcaagccagggcctcagctcctcacacagcagccagctctcaccagaaggtcccaccctgccaggccctctcctgtctcctcacctcatgtcaccctcagccccactctctgcttccagaacacaccatagctccattccaccttgaggcctttgcccatgctggaccccagcacctggtacagtatcttccatgtcgtaggttcttaacaaatatcatttaaattaattattaacagttcaagaatc

SEQ ID NO: 471570 - DNA, 403 bp, Homo sapiens
tgcacaactattgaggagcagacctggtgtgtctgccttatggtaggttatcaccttcatgagtgtgttgagggagtataaccacccaatgggtttaccttgccctctgcctagacagagccaatttctcaagacagaggaattgcaatagagaaagagtaattcactcagagcctgctgtgcgagagactagagtttcattattactcaaatcagtcttcccaaatattttgggagcagagtttttaagcaaaacttggtggayggggggaagccggtgagcccagagtgctgattggtcagagatgaaatcacagagagtccaagctgtcttcttgcactgagtcagttcttgggtggcagccacaagatcagatgagccagtttgtcaatctgggggtgc

SEQ ID NO: 471571 - DNA, 569 bp, Homo sapiens
tctatcatttcttatagcctcagattcctatcccgggtcttctatgtctatcccacaagtgagagaatggggtgggaatgtggagacacccccagtcttaattgccgcagtgtggaggccatgtcacttccactcacagcccattggcaagaactggtctcatgaccccaggtaggagcctgagagatgtactctagctatgtgcccaggaggaaaaggcaacttggtggaaaattaaccagtcatagacatgatctggatgggaacagatatatatgcatttttttgttcatttaaacattttattatgtatattcgaggcttacaacatgctgttacaaatacacgtttattctaaccatctttggtaactctaacaaaggtggcttgaagcccgttttcttgaggaagttttatccacaagaacctgtgtgagtaatagcaagtgggtgctaaatcattttcagatcatggagattgtcttgtaggggcagaaatggaaatgcacaagacaaatgcccrctagtatcctggtgttctcaggagagtggttcttgttcatagccaga

SEQ ID NO: 471572 - DNA, 507 bp, Homo sapiens
ctgacccccttcctgctttgtgtgctgcctgggcagaaaaaaacagagcctttctggaatctgaagagggagagggggtagaatgggtgttctgcctgsggtggtcatcctatggtaatctaagaaggtctatgtgtctgaattggccaatatgtgtgacatactccacgcgtacattatgctggcatgcccagagttgtcatgacctaagagccatcaatgtgtcttgactcttgagtatcatatcagtcatcccagactgctagttcatccagaaggaaaaagatggtcaaataggtgtttgataagtgtatcagtaatgccttttttccagcatcctttcgtaccttggagtggttctgcccttgcagccagaatgttgccaaaagcagatggctgctaggtgagatgttttagtagctcatcttagaattcaaactcctgttaatcaagcaatatccttctgtctgggtacatttgaactgtctgccgttctcttctccaggc

SEQ ID NO: 471573 - DNA, 481 bp, Homo sapiens
cactgcatgcaccaccgcactccagcctgggcaacagaacaagaccttgtctctcaaagcaaatttgagagtcaccttttgtgctctcagagtacacatgaggctccgtgctcggcaatttcacagatcgcatttccttttcttaacaccccgygaaatggtgccggtctcattgtgcccaggaaagtcaaggtcacgcagcaggtctgacctgggatttgaagccgggtctgcctcgcccccagcttatcctgcctcgcccaggctcttggcccctgaggacccacaagcagccatgggagcacacagggacagggaaggtgtgcagaggccacatgcccgtggtccacctgcaaaccgggacgctctcacgtggggatgcccgggagcgttgatgactcaggctccaggctctcctgtcctcaaccttggtccctcggctgattagatagtgggccctgcccgggcgaagggggacccc

SEQ ID NO: 471574 - DNA, 481 bp, Homo sapiens
cactgcatgcaccaccgcactccagcctgggcaacagaacaagaccttgtctctcaaagcaaatttgagagtcaccttttgtgctctcagagtacacatgaggctccgtgctcggcaatttcacagatcgcatttccttttcttaacaccccgtgaaatggtgccggtctcattgtgcccaggaaagtcaaggtcacgcagcaggtctgacctgggatttgaagcygggtctgcctcgcccccagcttatcctgcctcgcccaggctcttggcccctgaggacccacaagcagccatgggagcacacagggacagggaaggtgtgcagaggccacatgcccgtggtccacctgcaaaccgggacgctctcacgtggggatgcccgggagcgttgatgactcaggctccaggctctcctgtcctcaaccttggtccctcggctgattagatagtgggccctgcccgggcgaagggggacccc

SEQ ID NO: 471575 - DNA, 203 bp, Homo sapiens
gcatggccggggtcccaccacccctagaaggcaggcaggcaggcaggaggttgacagaggaggctcagagaggggaagtcaattgcctgaggctgcacagtagtctagggagtgggggcgtgggagggcagccttagccccaggcccagktgtccctcaccccccacccccataaggggctctgtgtaggccaggagtgtgtg

SEQ ID NO: 471576 - DNA, 555 bp, Homo sapiens
gtgcagcaaaccatggcacacatttacctatgtaacaaacccgcacatcttgcacatgtacttcagaactttaaagttgaagaaaaaaaagagttgagagtttggagaccttcccaaacccaaagttgagaagcctgaatggcttggaaagacatcaaggcattcagcctgatctttgttatcagtgaactagggaggagactttctgcctttcaaggctgtgccattgccaccttcaggcaccttgcatactttggctattggttctggctctgcagagaagtgactgccttcatgaggggagtaaagggacagtccagcctcaggattccagcaagcaaggaaatctgaataattgtgtttctggggcacaataacttctgtttccttgccccctcccttcaagccacagactccaattagcagcttagcaccraagttcccagacattttccttcttttggagacactgaataatggagaggtttctgaagctgagatgaggagggtgggaggtaggatgtgaacttgtaaaaatgtagtgagagagatttc

SEQ ID NO: 471577 - DNA, 555 bp, Homo sapiens
gtgcagcaaaccatggcacacatttacctatgtaacaaacccgcacatcttgcacatgtacttcagaactttaaagttgaagaaaaaaaagagttgagagtttggagaccttcccaaacccaaagttgagaagcctgaatggcttggaaagacatcaaggcattcagcctgatctttgttatcagtgaactagggaggagactttctgcctttcaaggctgtgccattgccaccttcaggcaccttgcatactttggctattggttctggctctgcagagaagtgactgccttcatgaggggagtaaagggacagtccagcctcaggattccagcaagcaaggaaatctgaataattgtgtttctggggcacaataacttctgtttccttgccccctcccttcaagccacagactccaattagcagcttagcaccaaagttcccagacattttcctkcttttggagacactgaataatggagaggtttctgaagctgagatgaggagggtgggaggtaggatgtgaacttgtaaaaatgtagtgagagagatttc

SEQ ID NO: 471578 - DNA, 504 bp, Homo sapiens
cacagttttgctaagcagctatggtatgtgaggctctggacacaaggggtgtaaagtgaatttgacacartcccttccctcaaagagtttctaatctggtgtgggacctgtaaaggtaacaaattgcaatataatgtgctagatgtagtaacaaaaccatggttattatcattatatgagggttaatgaatgcattacctgtggctaaaatactttagaggctgagatgtgctcacctcccccaaagaggcttagcagaggtgattagtgtatattgaaacctgctttgtgaagagcaaatgtctgtgatgccatgtcagagggtcggataggctcctacttgcttcacaactggaacaacttctgtccccttttctatctctacccctagcttcctgaccccaaggttaattcctttgtgtaattatacacatcatccctggcccagtttccaaactccttctgagaagtgagcacccccaggtctagagctcttcttcccca

SEQ ID NO: 471579 - DNA, 504 bp, Homo sapiens
cacagttttgctaagcagctatggtatgtgaggctctggacacaaggggtgtaaagtgaatttgacacagtcccttccctcaaagagtttctaatctggtgtgggacctgtaaaggtaacaaattgcaatataatgygctagatgtagtaacaaaaccatggttattatcattatatgagggttaatgaatgcattacctgtggctaaaatactttagaggctgagatgtgctcacctcccccaaagaggcttagcagaggtgattagtgtatattgaaacctgctttgtgaagagcaaatgtctgtgatgccatgtcagagggtcggataggctcctacttgcttcacaactggaacaacttctgtccccttttctatctctacccctagcttcctgaccccaaggttaattcctttgtgtaattatacacatcatccctggcccagtttccaaactccttctgagaagtgagcacccccaggtctagagctcttcttcccca

SEQ ID NO: 471580 - DNA, 554 bp, Homo sapiens
ctggggccggagccccggctgcctgcatccgaaacacatattcaaacccattgcattccaccgcctctaccattgcaagatctcagacttggaagagccaccttaggaagtcaacaagctcaatctcctatttgtagggaaagctgtgctgagaattctcccagcccagctcaaatgtttckgggagtaagaagtcaacttttacatgggacagcccatctgtgattggacagcactgattgctggggaacttattattattattttttttctgaatgagcccaataagtcagcctctccccatctccaggcccctctctagagctgcctatatccctctcctgaagaagtgccgctttgcctgtgggagaattgggtcaaatcccctggacctgcccaaggttttgcagtgggaatggggagctgaggaagttgcaccattctcgggaagagaggcacaaatgttctgggtctttcatcttaagtggtttctgatctgtctgactgaatgagtgcctggagccacccctgttgaacatacattcatgtagatt

SEQ ID NO: 471581 - DNA, 554 bp, Homo sapiens
ctggggccggagccccggctgcctgcatccgaaacacatattcaaacccattgcattccaccgcctctaccattgcaagatctcagacttggaagagccaccttaggaagtcaacaagctcaatctcctatttgtagggaaagctgtgctgagaattctcccagcccagctcaaatgtttctgggagtaagaagtcaacttttacatgggacagcccatctgtgattggacagcactgattgctggggaacttattattattattwtttttctgaatgagcccaataagtcagcctctccccatctccaggcccctctctagagctgcctatatccctctcctgaagaagtgccgctttgcctgtgggagaattgggtcaaatcccctggacctgcccaaggttttgcagtgggaatggggagctgaggaagttgcaccattctcgggaagagaggcacaaatgttctgggtctttcatcttaagtggtttctgatctgtctgactgaatgagtgcctggagccacccctgttgaacatacattcatgtagatt

SEQ ID NO: 471582 - DNA, 554 bp, Homo sapiens
ctggggccggagccccggctgcctgcatccgaaacacatattcaaacccattgcattccaccgcctctaccattgcaagatctcagacttggaagagccaccttaggaagtcaacaagctcaatctcctatttgtagggaaagctgtgctgagaattctcccagcccagctcaaatgtttctgggagtaagaagtcaacttttacatgggacagcccatctgtgattggacagcactgattgctggggaacttattattattattttttttctgaatgagcccaataagtcagcctctccccatctccaggcccctctctagagctgcctatatccctctcctgaagaagtgccgctttgcctgtgggagaattgggtcaaatcccctggacctgcccaaggttttgcagtgggaatggggagctgaggaagttgcaccattctcgggaagagaggcacaaatrttctgggtctttcatcttaagtggtttctgatctgtctgactgaatgagtgcctggagccacccctgttgaacatacattcatgtagatt

SEQ ID NO: 471583 - DNA, 519 bp, Homo sapiens
ggaaatatgtataagaatggaattcragaagttggacttgggtggggtggaatatagactggaaataagacatttattgacatggggacactcttccaagacaggatttaatgttttggcagggaatcctggagccttcttatgctgcttggacagctccttggaaatgtcagaactgttagagaagtgagtgtattagaatggattttattacacaaaaccagaaaacctatcatgtaaatctatgtacccagagaagggcaataggacactctcaccattagaatgataagcaatgcactagtgagggaggctccagcctcaatgagtggcttggtggtggctgtcctctgtaggctggagcagacaggagatgaagccatggggttgagttctctgtgtcaatggagaagagaagaacctggactagtagaggtctggtgttggcattaacaatcagaggcaaagtggacataattactgtagtaggaagcaaggccagagtggccaccagtgtgc

SEQ ID NO: 471584 - DNA, 519 bp, Homo sapiens
ggaaatatgtataagaatggaattcgagaagttggacttgggtggggtggaatatagactggaaataagacatttattgacatggggacactcttccaagacaggatttaatgttttggcagggaatcctggagccttcttatgctgcttggacagctccttggaaatgtcagaactgttagagaagtgagtgtattagaatggattttattacacaaaaccagaaaacctatcatgtaaatctatgtacccagagaagggcaataggacactctcaccattagaatgataagcaatgcactagtgagggaggctccagcctcaatgagtggcttggtggtggctgtcctctgtaggctggagcagacaggagatgaagccatggggttgagttctctgtgtcaatggrgaagagaagaacctggactagtagaggtctggtgttggcattaacaatcagaggcaaagtggacataattactgtagtaggaagcaaggccagagtggccaccagtgtgc

SEQ ID NO: 471585 - DNA, 640 bp, Homo sapiens
acagtctccgccgctcagatttaaacaattaaaataacgtagaacctaaaaacaagcatttatggagctcctaaaaggcaggcagtctcatttgatcatcacaccaacatggcaaggcaggaattatcattcctctttatgaagaaggaaactggggtgaggaggcgtattaaatgacttgtggaagatcacaaaatttaaacgtgacaagatggggcccaaagccaccaagctgatgccagagcccaggttttccatcacttcacccagaatggaatttccaaggaagagggacattgtcagttttcttcacagctctattcccagcaccgagaacactaggkgatgaatcattgatatttctggaatgaatgaatttttgttcccttcttcctgttggctcctcaacctgagagaagggacttctacactttcttgccatgtgggaatgtgctagtgtcttctctccccttctttattcctttctagttgggccacctaccactgcaatgtcactcttccgtgtgtgcatgtgtgtgtgtgtgcatgtgtgtgtgcgggcgtgtgtgtgtgtgtgcgggcgtgtgcgtgcgtgtgtgtgtgggtgtgtgtgtgcgcgcacgggcgtgtgtgtgtgtgt

SEQ ID NO: 471586 - DNA, 640 bp, Homo sapiens
acagtctccgccgctcagatttaaacaattaaaataacgtagaacctaaaaacaagcatttatggagctcctaaaaggcaggcagtctcatttgatcatcacaccaacatggcaaggcaggaattatcattcctctttatgaagaaggaaactggggtgaggaggcgtattaaatgacttgtggaagatcacaaaatttaaacgtgacaagatggggcccaaagccaccaagctgatgccagagcccaggttttccatcacttcacccagaatggaatttccaaggaagagggacattgtcagttttcttcacagctctattcccagcaccgagaacactaggggatgaatcaytgatatttctggaatgaatgaatttttgttcccttcttcctgttggctcctcaacctgagagaagggacttctacactttcttgccatgtgggaatgtgctagtgtcttctctccccttctttattcctttctagttgggccacctaccactgcaatgtcactcttccgtgtgtgcatgtgtgtgtgtgtgcatgtgtgtgtgcgggcgtgtgtgtgtgtgtgcgggcgtgtgcgtgcgtgtgtgtgtgggtgtgtgtgtgcgcgcacgggcgtgtgtgtgtgtgt

SEQ ID NO: 471587 - DNA, 497 bp, Homo sapiens
agataacaatcaaattatatacattttaaatggcattctggggtcttagtgattttcataagaaagctcagcttggagtccttggcatctgtttctccttttaggacagaaaccaagagactatttacatattcttagggccctatcaccaattaaatcttttcagaacctcagccctccctgtcccccaacccccatcaactctctccacattcaggattaaatttcttggcagacagtggttgctgctctctttggtgatttatttattcagttggattatttttcatctcgagcctgggcatttcaggccccagcgtccaccttctgatcatcrggaagtgacctgcttgaggaccctccccaaactcggccaggctagaacgcattccttcaggcgccaagaggcggcctgtctccgtgccatccctctgcacccccgcccgtccctcccccttcctgactgtgacagagcttccttcgggagatgagggagc

SEQ ID NO: 471588 - DNA, 512 bp, Homo sapiens
caaatgagtcgttgctgctacttcctagctctgtagagtaaatgtgataatctacacaacgtgcatagtccagtgctccacacatagtagtacttgataagtgtcggctgctactggtaataatgtcatattgtraataataattattaattaataatagtttcattcatataacttgcttcacgtgcttaagctaaaaaataagcccacgcttcctgtgttattcaagctgaaactgatcataaccctgtctctccatcagaagattgcctttccttcctggtgtctacgctcccacattgaactgaagaggaatgatggagtttcaacttatagttgcaaccctccaaatgcttattcatattagatccagtcccactggggattctatcagatgcaggtgtgccaccaggaagctggtgaggccctagctgtcctgggtccacctttgccacgttagttgctggagcaatgaatctccacctgacattctcagctccggctctagtcaa

SEQ ID NO: 471589 - DNA, 560 bp, Homo sapiens
gaattttggtgctaaagtccctccagtgggaaggggtggtatacatacccttagcaccatacatacctttagcacctaatagagaacagatcacccaggagaccacttcgtttaaaaaagaagtgtggttggccgggcgcggtggctcatgcctgtaatcccagcactttgggaggccgaggtgggcggatctcctgaggtcgggagttcaagaccagcctgaccaacatggagaaaccccrtctctactaaaaatacaaaattagctgggcatggtggcacatgcctgtaatcccagctactagggaggctgaggcaggagaatcacttgaacctgggaggcggaggttgcggtgagctgagatagcgtcattgcactgcagcctgggcaacaagagcgaaactccgtctcaaaaaaaaaaaaaaaaaaaagtgtggttgagctctttgtttcccagctctttccaatggctcttcttggagcgggggcctgtttatgccctgcaacatggctttctcatgataatactagtaacatcctctctcagatgctttaggaa

SEQ ID NO: 471590 - DNA, 587 bp, Homo sapiens
ggatctgccccaccttcccccccatactgctcccctcaaccaggacagagaacatggcctcctctagggccctgcctcccaagccttaccctcacacaccaagtaccttttcagctttttaactgcccccagccaggcccacggaagcctgtgtcactctggcacaagctgccaccaccagccacctacacacccccccagcacacctcgcacgggaccacagccccagcygtgctgctaagggccaagcacaaaggctccagtgagcaaatgttcaagcccctggtagccaggcctccccttgccgagccgctgccaacccaccctgtgggaagtggccccagccatctcctctagaccacggcaggcagccccggggtccccagacccctgtccaggccagcatgtctgcagccccgacatctgcttcctctgtcgcccaatccaaaatcgacgaaatggagggtcctctgggctgggccacattcacattcccctccccctgaggcccagcgaagcctccggaccccaggctctgctctgcaccctcgtggtcggcagtacatgaagggcacagacaccctggc

SEQ ID NO: 471591 - DNA, 587 bp, Homo sapiens
ggatctgccccaccttcccccccatactgctcccctcaaccaggacagagaacatggcctcctctagggccctgcctcccaagccttaccctcacacaccaagtaccttttcagctttttaactgcccccagccaggcccacggaagcctgtgtcactctggcacaagctgccaccaccagccacctacacacccccccagcacacctcgcacgggaccacagccccagctgtgctgctaagggccaagcacaaaggctccagtgagcaaatgttcaagcccctggtagccaggcctccccttgccragccgctgccaacccaccctgtgggaagtggccccagccatctcctctagaccacggcaggcagccccggggtccccagacccctgtccaggccagcatgtctgcagccccgacatctgcttcctctgtcgcccaatccaaaatcgacgaaatggagggtcctctgggctgggccacattcacattcccctccccctgaggcccagcgaagcctccggaccccaggctctgctctgcaccctcgtggtcggcagtacatgaagggcacagacaccctggc

SEQ ID NO: 471592 - DNA, 587 bp, Homo sapiens
ggatctgccccaccttcccccccatactgctcccctcaaccaggacagagaacatggcctcctctagggccctgcctcccaagccttaccctcacacaccaagtaccttttcagctttttaactgcccccagccaggcccacggaagcctgtgtcactctggcacaagctgccaccaccagccacctacacacccccccagcacacctcgcacgggaccacagccccagctgtgctgctaagggccaagcacaaaggctccagtgagcaaatgttcaagcccctggtagccaggcctccccttgccgagccgctgccamcccaccctgtgggaagtggccccagccatctcctctagaccacggcaggcagccccggggtccccagacccctgtccaggccagcatgtctgcagccccgacatctgcttcctctgtcgcccaatccaaaatcgacgaaatggagggtcctctgggctgggccacattcacattcccctccccctgaggcccagcgaagcctccggaccccaggctctgctctgcaccctcgtggtcggcagtacatgaagggcacagacaccctggc

SEQ ID NO: 471593 - DNA, 587 bp, Homo sapiens
ggatctgccccaccttcccccccatactgctcccctcaaccaggacagagaacatggcctcctctagggccctgcctcccaagccttaccctcacacaccaagtaccttttcagctttttaactgcccccagccaggcccacggaagcctgtgtcactctggcacaagctgccaccaccagccacctacacacccccccagcacacctcgcacgggaccacagccccagctgtgctgctaagggccaagcacaaaggctccagtgagcaaatgttcaagcccctggtagccaggcctccccttgccgagccgctgccaacccaccctgtgggaagtggccccagccatctcctctagaccacggcaggcagccccggggtccccagacccctgtccaggccagcatgtctgcagccccgacatctgcttcctctgtcgcccaatccaaaatcgacgaaatggagggtcctctgggctgggccacattcacattcccytccccctgaggcccagcgaagcctccggaccccaggctctgctctgcaccctcgtggtcggcagtacatgaagggcacagacaccctggc

SEQ ID NO: 471594 - DNA, 561 bp, Homo sapiens
tagatacagtcagccctcttcatcagcaggtccacatcttcagattcaactagataaggctgaatatttgaagaaaraaacaataaaaatacaattagaaagtacagtataacaactgttgccatgatacaatatctatacattttattagtgatgacctaaagttcatgggaccaggcacggtgactcacacttgtaatcccaacactttgggaggccaacctgggcagcatagtgagaccttgtctttaataaaaataaaaataaaaaaattagctagtgtggtggtatgcacctgtagtcccagctactcaagaggctgaggtgggcagatcactggagcccaggaggttgcggctgctgtgagctgtgattgtgacactgctctccagcctgagtgacagagggtgatcctgtctctaagtaagtaaataaataaagtatatgggggggatgtgtgttggttatatgcaaacactgcaccattatacgtaagggattgagcatccacagattctggtatggtgtggaggcgatatcctagaaccagtcgtctgcaag

SEQ ID NO: 471595 - DNA, 350 bp, Homo sapiens
tagatacagtcagccctcttcatcagcaggtccacatcttcagattcaactagataaggctgaatatttgaagaaaaaaacaataaaaatacaattagaaagtacagtataacaactgttgycatgatacaatatctatacattttattagtgatgacctaaagttcatgggaccaggcacggtgactcacacttgtaatcccaacactttgggaggccaacctgggcagcatagtgagaccttgtctttaataaaaataaaaataaaaaaattagctagtgtggtggtatgcacctgtagtcccagctactcaagaggctgaggtgggcagatcactggagcccaggag

SEQ ID NO: 471596 - DNA, 561 bp, Homo sapiens
tagatacagtcagccctcttcatcagcaggtccacatcttcagattcaactagataaggctgaatatttgaagaaaaaaacaataaaaatacaattagaaagtacagtataacaactgttgccatkatacaatatctatacattttattagtgatgacctaaagttcatgggaccaggcacggtgactcacacttgtaatcccaacactttgggaggccaacctgggcagcatagtgagaccttgtctttaataaaaataaaaataaaaaaattagctagtgtggtggtatgcacctgtagtcccagctactcaagaggctgaggtgggcagatcactggagcccaggaggttgcggctgctgtgagctgtgattgtgacactgctctccagcctgagtgacagagggtgatcctgtctctaagtaagtaaataaataaagtatatgggggggatgtgtgttggttatatgcaaacactgcaccattatacgtaagggattgagcatccacagattctggtatggtgtggaggcgatatcctagaaccagtcgtctgcaag

SEQ ID NO: 471597 - DNA, 561 bp, Homo sapiens
tagatacagtcagccctcttcatcagcaggtccacatcttcagattcaactagataaggctgaatatttgaagaaaaaaacaataaaaatacaattagaaagtacagtataacaactgttgccatgatacaatatctatacattttattagtgatgacctaaagtwcatgggaccaggcacggtgactcacacttgtaatcccaacactttgggaggccaacctgggcagcatagtgagaccttgtctttaataaaaataaaaataaaaaaattagctagtgtggtggtatgcacctgtagtcccagctactcaagaggctgaggtgggcagatcactggagcccaggaggttgcggctgctgtgagctgtgattgtgacactgctctccagcctgagtgacagagggtgatcctgtctctaagtaagtaaataaataaagtatatgggggggatgtgtgttggttatatgcaaacactgcaccattatacgtaagggattgagcatccacagattctggtatggtgtggaggcgatatcctagaaccagtcgtctgcaag

SEQ ID NO: 471598 - DNA, 600 bp, Homo sapiens
ttgaattgtggggaggtttaaaataaaaaaaatttttgagaaggaaagcaatgttgatacctgtagacagacgatctgtcttctccccaaaaccycattggtcctgagtccatagggtgactccatggggtgtcagaagagggacagcattgatgggtagggggccaggccatgtcctgggacttttggccaggcttggcatccagcggagattggagtggaacagcctttgatcctagaagcaggagaaatggtgccatgtttctttgccctaaacaacgaatacctgttggtttgggattttcccccaataggctccatctcctgaattcaaattctttcagcaaatgtttccttggtaccctgtggctctgactctgctgttgagggctttccagattgttggagacgacagatgtataaatgggaaaatgccatgataaactgggaatgcagtattttgcaacttgtaatgaaatcatggctctaggccgggcaccgcggctcacgcctgtaatcccagaactttgggagggcaaggtgggaggatcgcttgaggccaggagttcgagatcagtctgggaaacataatgagacccc

SEQ ID NO: 471599 - DNA, 588 bp, Homo sapiens
cccttcaccctgcatttcacttcttggtcagtattgtgtccatgctgccatctttctattaggagaatgggcaaagagaatgaaagtgaccgctaaagggctgcctgtctatgttgctgaaaatcatatgcatggagagtaaaaagggaaataatgggtctgygtgagagaagggaatccagatgagtaaaatatcatagaaacctaagggagaaaaaaggcatactgaaaatgtatgtggttaccttaggtaagaatgaaagaaagaatctcaaatattctccaaggcctccttggggtggttttgaaaacaagaccctaaatgatttgatacccctcctatcaagaggtggagtgatataccttcctttgaatctgggagggctcaggactgcttcaaccagcagagtatggcataagtgatactaggcggcttctgaagccatatcataaaaagccatatatctgtcttggtctcttgggaaattcactctctgggcactccctcttggaaacatgccactgtgttatggggagctcaagttatacagaaaggccatgtgaaggcactctggtcagtaaccccag

SEQ ID NO: 471600 - DNA, 301 bp, Homo sapiens
acccaccattgggttctgcagaaatagcctgtggggtgtcaggagagaagtttccagagtgggcaggagtgagctttgcaactccaaaaagagactgaacatgcacaagagcaggtatttctgtacagtttgttccctgatgcattctatcatggagaatggtgcccarcacatagtaggtgctcaatacatggaatagatgcagacaaggaagctcagaggaggaactttgtctccatccagggcagtactggcaggaaaccactctaagcgatgcctccccatgaccccatcatgctgt

SEQ ID NO: 471601 - DNA, 563 bp, Homo sapiens
ctgggccctgggcagaacgaagggtatacagcctgggccaccaggataagtccagaacccaccaggagctgaggacagacagaaggaccacggagggggtgacgggctggtgtgaggattgktgcccctgggccaggactctcctctcttctccctgctggctccagaccagagtccaagccctaggcagtgccacccttacccagcccagccttgaagacagaatgagaggggtttcctgtctccaggtcctgctccttctggtgctgggtgagtggggacagggactgggggtgagggccgcagacaccttggctcccagttctcccatctcactgctccctgggccgggctccctggagcactcttgggctttctaatcttgattccaagggctcaatcctctctgccactgaccttgacctcaccacacctcgatgtgcttgtcggtgtcatgctcatacgcccttgccccctgcaccttcacagtgctctggggagggttaaataagataacagacggcacgaaagcctggcgcaatgtcagggcaacattgtttcac

SEQ ID NO: 471602 - DNA, 571 bp, Homo sapiens
ggcagaaagccctcatgtgacccagtccagcaggtactcaggcactgtcctgcctgctgccagggactgcaccacgctaggcattggcaccagcactaacgttgacacagcggattctctcattggatcctcataaacacccctgtgggcactggtgttggggcagagtggtgagtggcttgcctgacggccacgggaacaagaggcccagccgtgcagacccacagccttctggccaccacactaggccatcggtagcaaagaatggctggtttaaaaatctttggcttctgctgactccttcaaattgcgatttggagatattggcaacaaatctcttttttaaaatgtcaatttaaaaacacacttcccacttttccagttactctgtgttcccatttccatgcccagctctttctcacacgagctcctttgtgctagctgtttcttctgccctggtgcttttcctgtcrcatgaatggaaagagccttcttatcactcaggtctctacttaaatgccattttctcggagaggccttcatgagcccccgtggacccccctgccccaac

SEQ ID NO: 471603 - DNA, 616 bp, Homo sapiens
tagtgggtgagctcaggctgttgaagaagtgattttggtgaagggatttttctggtgttccctaaatcccatcattgargcatccaattatgctacctctgtgaggctggaattattaaaatatcctgaattgtgatgctaatagcaaatttgctaaatgggaatgaatttttaatatcataatttgctttttcctttttatctgattccttttctttctagatgtcacttcataagagtgaatgaaacttggaaacatttcttgccctttctgcttatgacatatttcatcagatttctccacatctcagaatttttcagaattcatctaatgcactatgcctgatgggcctgggctcatttgttttggtgacgtctgatctcacacccgaaatcacccctccatgggcagccttaacccccagcttgacgatgtcacaagacagtatccaggcaagcatcagagctggaactgccatccaaaaggggcccaaatgtctccagacccagccaatctctggctactagcaaggtcatgttagcaacagaaaccagtgtcagaaggtctagcacaaggctggccactcaggcctgcagcccttcctgcatgtttttg

SEQ ID NO: 471604 - DNA, 616 bp, Homo sapiens
tagtgggtgagctcaggctgttgaagaagtgattttggtgaagggatttttctggtgttccctaaatcccatcattgaagcatccaattatgctacctctgtgaggctggaattattaaaatatcctgaattgtgatgctaatagcaaatttgctaaawgggaatgaatttttaatatcataatttgctttttcctttttatctgattccttttctttctagatgtcacttcataagagtgaatgaaacttggaaacatttcttgccctttctgcttatgacatatttcatcagatttctccacatctcagaatttttcagaattcatctaatgcactatgcctgatgggcctgggctcatttgttttggtgacgtctgatctcacacccgaaatcacccctccatgggcagccttaacccccagcttgacgatgtcacaagacagtatccaggcaagcatcagagctggaactgccatccaaaaggggcccaaatgtctccagacccagccaatctctggctactagcaaggtcatgttagcaacagaaaccagtgtcagaaggtctagcacaaggctggccactcaggcctgcagcccttcctgcatgtttttg

SEQ ID NO: 471605 - DNA, 616 bp, Homo sapiens
tagtgggtgagctcaggctgttgaagaagtgattttggtgaagggatttttctggtgttccctaaatcccatcattgaagcatccaattatgctacctctgtgaggctggaattattaaaatatcctgaattgtgatgctaatagcaaatttgctaaatgggaatgaatttttaatatcataatttgctttttcctttttatctgattccttttctttctagatgtcacttcataagagtgaatgaaacttggaaacatttcttgccctttctgcttatgacatatttcatcagatttctccacatctcagaatttttcagaattcatctaatgcactatgcctgatgggcctgggctcatttgttttggtgacgtctgatctcacacccgaaatcacccctccatgggcagccttaacccccagcttgacgatgtcacaagacagtatccaggcaagcatcagagctggaactgccatccaaaaggggcccaaatgtctccagacccagccaatctctggctactagcaaggtcatgttagcaacagaamccagtgtcagaaggtctagcacaaggctggccactcaggcctgcagcccttcctgcatgtttttg

SEQ ID NO: 471606 - DNA, 543 bp, Homo sapiens
ttcatctccacctctgtttttacggtttccaatttttggaagaagtactccacgataatgtgggtgcagttaatcccccacctcggcaagtaaatttaattacatttaacatttcaacactgaatatagtatctcttgaagagattccattaatgctgatgaaaattaccagaaattggttcagaagagcatgggggcttgaaatgaactgasgcagataaaattcatgaagaaggaacgtgtgactaatgcgaaagctatgcaataaacaaccatcttcagagttgctctccttgtaggaacacgtatgcaaatgttactctatacatgcaaaacagtagtggaggcggaaaggatgcagaaaggctctaataatcgttttgccttgtactaaaacaattagacagttgaccaacacttaaaattagtttttgttctatatatacatatatatatatttttttggggggggggaggaggaagctagtactgtttaaagtcaccgactaactcaatattttttattcctagaggaagaaacgc

SEQ ID NO: 471607 - DNA, 682 bp, Homo sapiens
gctggggatagtacatgaatggcaaaataaccattttccaacataagaggataagttctgtttaaggaagtttcaaacattccacaaaactcagcagtgaaagatgagcaagtaaagggaaaactaaagtcactctacatgaagaatcctttaagaagagaaagacgtatcacagtggtgtgagcacctcatcactgatagagttgggcccagcctgactggccttatgtggaggctgatgaaggagggattcttacatcaagaagaggttcagccatgaacctgaggtcctctccaaccccaggactccataattcacatagataaagctcctgtttctttaattcctgggagttttgttctttgtattttgcatttcttactgtaaagcgaaaaaaaaaaagcagattgggaacacaaattttcttaattttctaattttttatttttcagggayggggtcttgctctgtcactcaagctgcagtacagtggcacgatcacagctcactgcagcctggaatttctggactcaagaaatcctcctgcctcagcctccagagtagttgggggtacaggtacatgttaccataccagagtaatttttattttttaatttttttgtagagacggggtctggctatgttacccaggctggtcttgaagtcctggccccaagcaat

SEQ ID NO: 471608 - DNA, 499 bp, Homo sapiens
gatagcagttgcagcatgtaaaagactgtscagaaaacgtaacaggaagtcttgaaaaagagatgtttacaggggacttcaaacactctgagatattcctgtgaccccacaggtcgtgggcatgagcaaggctctggcccacccaggaaaagacctgagaagccccaatctctcacttctggcggacctcaagttcctgcaccaacaggcagcaaaggctgaagctgagctctaaactgccagagtgctggaggcatcaaaccctgacacagagagagccctcagaaaggtgtagaagattcactggagacatcacacccaacacagaggagagagaaccctcggcgaggtgtagaagactcactggagacatcatacccaacacagaggagagagagcccttggtgaggtgtagaaggctcactggaggcatcacaccccaacacagagacagagagctctcggtgaggtgtagaaggctcaccggaagcatcagacc

SEQ ID NO: 471609 - DNA, 640 bp, Homo sapiens
gctgcctgagaaagtgatagcagttgcagcatgtaaaagactgtgcagaaaacgtaacaggaagtcttgaaaaagagatgtttacaggggacttcaaacactctgagatattcctgtgaccccacaggtcgtgggcatgagcaaggctctgkcccacccaggaaaagacctgagaagccccaatctctcacttctggcggacctcaagttcctgcaccaacaggcagcaaaggctgaagctgagctctaaactgccagagtgctggaggcatcaaaccctgacacagagagagccctcagaaaggtgtagaagattcactggagacatcacacccaacacagaggagagagaaccctcggcgaggtgtagaagactcactggagacatcatacccaacacagaggagagagagcccttggtgaggtgtagaaggctcactggaggcatcacaccccaacacagagacagagagctctcggtgaggtgtagaaggctcaccggaagcatcagaccccaacacagagagagagagagccctcagcaaggtgaagaaggctcactggagatatcacaccccaacacagagacagagagagccctcggtgaggtgtataaggctcattggaggcatcacacccc

SEQ ID NO: 471610 - DNA, 499 bp, Homo sapiens
gatagcagttgcagcatgtaaaagactgtgcagaaaacgtaacaggaagtcttgaaaaagagatgtttacaggggacttcaaacactctgagatattcctgtgaccccacaggtcgtgggcatgagcaaggctctggcccacccaggaaaagacctgagaagccccaatctctcacttctggcggacctcaagttcctgcaccaacaggcagcaaaggctgaagctgagctctaaactgccagagtgctggaggcatcaaaccctgacacagagagagccctcagaaaggtgtagaagattcactggagacatcacacccaacacagagkagagagaaccctcggcgaggtgtagaagactcactggagacatcatacccaacacagaggagagagagcccttggtgaggtgtagaaggctcactggaggcatcacaccccaacacagagacagagagctctcggtgaggtgtagaaggctcaccggaagcatcagacc

SEQ ID NO: 471611 - DNA, 477 bp, Homo sapiens
tcacaagtcatttgtcacaggccagcctctatgtgcctctttgggtataatactcagccttgctctaatcaactctgacaaaaggggggatcatataatataaacatgacctattcaggcagaggggctgcagatggcaaagtgccttacaacagggagtggctgaaatttatccttagcatctgtttaggcttgaaaacaatgtttgtttgggcctatatagttttgttttgttttgttttktttaacatgggaaatgagaacatatgtcatcagtcactacttttgatgagcttcaaagacttaagattttcctacaagtaatctcaagaaactcacccagaaaaacaaactaggactcagcgctgacctcccagcaatcccaataacttgcttgaaagtgaaggaagtggatttcaaacaagtgtaagccaagagaggatttgatgcccacataaaccaggaagaatgatatta

SEQ ID NO: 471612 - DNA, 625 bp, Homo sapiens
agcatactttcttagcatcactaacagctctcttaataaagctgccaacattgccaaatatagtgtgttggtgtttgaaaggttaaagtcatgtaagtatttatgttacacatctagaaacaattagtggaatacatggtacattaattaaatttgatgttttatcatctggttcttgataaataagttgtattttcagagcttcttctaccctcaattaacaaaaattgtgagaaagaagtttgtgatatctctgtaaggaatgtgtatctttgtgtgtatatrtatgtatatgaaatcatatatatatatatgaaattatgtatatatataacattttaaagatacctaattttttgaaattaaagttttgctttcttaagtttttcctgtatgaattgtataatgctcatgttttctttttcgtacagtgtagacacacacaccacttagtaaatattatataaccatttgataggcaaagttctttcttgatttaaagaaaacaggttattttcccaggttagtacatatgcatcaacttcattctttttactagctaaagagtataatattgtatatacatgtactacaataattttttaccagttccttgtcagtggtc

SEQ ID NO: 471613 - DNA, 625 bp, Homo sapiens
agcatactttcttagcatcactaacagctctcttaataaagctgccaacattgccaaatatagtgtgttggtgtttgaaaggttaaagtcatgtaagtatttatgttacacatctagaaacaattagtggaatacatggtacattaattaaatttgatgttttatcatctggttcttgataaataagttgtattttcagagcttcttctaccctcaattaacaaaaattgtgagaaagaagtttgtgatatctctgtaaggaatgtgtatctttgtgtgtatatatatgtatatgaaatcatatatatatatatgaaattatgtatatatataacattttaaagatacctaattttttgaaattaaagttttgctttcttaagtttttcctgtatgaattgtataatgctcatgttttctttttcrtacagtgtagacacacacaccacttagtaaatattatataaccatttgataggcaaagttctttcttgatttaaagaaaacaggttattttcccaggttagtacatatgcatcaacttcattctttttactagctaaagagtataatattgtatatacatgtactacaataattttttaccagttccttgtcagtggtc

SEQ ID NO: 471614 - DNA, 573 bp, Homo sapiens
ctgcaaatccttttcctcttggccagctatgagcacccttcagaaccagctccagtgccccttctgttgttgccccttactatgccttactgtgggccacctctgcccttgactgccccgttggtggtaacttgtgaggaaataccggggtgcaagtttgcagatgcctggcacatagtaggtgctcacagaaggggctttgaggcactcccaggccaggctgatagggatgaggtcggtggacatcctgtctgtagggggaaacaccaccatctccacaaccccccaacattttaccctgctccatttattattattattatcattttgagactgagtctcgctctgtcacccaggctggagtgcagtggcacaaacttgtcttactgcaacctctgcctcccgggttcaagcarttctcctgcctcagtgtcccaagtagctgggactagaggtgcatgccaccatgtccagctaatttttgtatttttagtagagacggggtttcaccatgttggccaggctggtcttaaattcctgacctcaactgatctgcccaccttagcctcccaa

SEQ ID NO: 471615 - DNA, 456 bp, Homo sapiens
gggtgtagagccagagaccgggacgggcgacgctcagcacccgcacccggtgttctaggatgtgcagctccatcgcggctcrcgcggacccgaccccgccgccaactagacccaggccgcacgggaggcggggcggcgggggtggtgcccgagccttaaaggagccgctgcgctgccgcgtccacgccgcccgctgcgaggctgacccgcccagccaggcgcggcgtccggctccttgacggccacgccccgcgggaagagaagcctattgggtggtcacgcctcctcctaacgccagaacctcatcccgctttccagccagcccaccgagaccgccccgaacggctccgccttttttagtactggctcggggatagaccccaccccgtctgactcctccaggccccgcccctgacgcgccccctccctgggctccgccctttccgcggaaagcca

SEQ ID NO: 471616 - DNA, 456 bp, Homo sapiens
gggtgtagagccagagaccgggacgggcgacgctcagcacccgcacccggtgttctaggatgtgcagctccatcgcggctcgcgcggacccgaccccgccgccaactagacccaggccgcacgggaggcggggcggcgggggtggtscccgagccttaaaggagccgctgcgctgccgcgtccacgccgcccgctgcgaggctgacccgcccagccaggcgcggcgtccggctccttgacggccacgccccgcgggaagagaagcctattgggtggtcacgcctcctcctaacgccagaacctcatcccgctttccagccagcccaccgagaccgccccgaacggctccgccttttttagtactggctcggggatagaccccaccccgtctgactcctccaggccccgcccctgacgcgccccctccctgggctccgccctttccgcggaaagcca

SEQ ID NO: 471617 - DNA, 545 bp, Homo sapiens
tgcattcacttcaaagctctctgcagctgagtactgctctgccatcgtgttcttccccgaccgatgctgaagctcatctaccgtcatgtggggaagaggggctgagaaatgatctgatatgaagaggccaccgctctagacaagcctggtgctgctagtgccacaagccattgctctgctcacagtggaggtgctctgggggccctcactgggaagtgtctgtgagccccagctcccctctccatcctgctctcttctctcctccagctgcagctgggcagtgccacctgttctaggaagctgtccccaagcyccaggctgagtgcctttatcatgccctagagggtgccggggccaccaccagctctgtgcttaccccagcagagtgacagcatgtctctggcctatctgctctccagactgggcccccatgagcccagggctggagcagcccacgttggccaacacgtgctgggggctgtacaccaggagaccggggcatcactgcctggcagagaagtaactcaagaaatgcttgggggcca

SEQ ID NO: 471618 - DNA, 526 bp, Homo sapiens
ctgctgtggaaagcagtttggagatttctcaaagaacttaaaacagaactaccattcggcccagcagtcccattactgggtgtatacccaaaggaatataaattgttctaccaggaagacacaggtacctatatgttcattgcagaactattcacaatagtaaagacatggactcaacctagatgtccatccatggaggactggataaacaaaatgtggtacgtacactccatggaatactacactgtcataaaaaatgaaatcatgtcctttgcagccacatggatgcagcttctgtagggtcttaaaacaacttagygataaccaattgactctcatgtatctctacattgtttccctgttttgtatttctctagaggtgggaagaaaggaacacatgattgttgttacttggagaaaccacttaaatttctatttcaaagcatgtgtccatttttgagtgagttcctaaaaatattattttcccagtcaaatagaatttgtaatagcccaagatatacaagct

SEQ ID NO: 471619 - DNA, 456 bp, Homo sapiens
ttgagtggaaactgaattagaacttcggaagggatttgcaaactttttgaatataaatcctgcaagagcaaacaagcagcacatgcagacgaccagcaatgagagggcgtggtgactctgaggacctgacttggttagggtgacgagagcgggggagtgtggagagaggaggtcaggcagcctttgcrcagtgtagacagtgagagccacgtggccagttttgtgttttagggagactttgtgggcagacacctatggcacacagagtcttgaagatgaccccatgtgaggtgacaggtgcctccgaggagggcgtagggtgagaatggtaggagtgggtggaagggagttctgtcatttgcgaggttcttaaaattatgtaaggagatatgtatagtcaaaaccacccatgaaaatccttcaggaagggcccgtttatgcagctctgagtcagtg

SEQ ID NO: 471620 - DNA, 238 bp, Homo sapiens
gttttagggagactttgtgggcagacacctatggcacacagagtcttgaagatgaccccatgtgaggtgacaggtgcctccgaggagggcgtagggtgagaatggyaggagtgggtggaagggagttctgtcatttgcgaggttcttaaaattatgtaaggagatatgtatagtcaaaaccacccatgaaaatccttcaggaagggcccgtttatgcagctctgagtcagtgggagaa

SEQ ID NO: 471621 - DNA, 238 bp, Homo sapiens
gttttagggagactttgtgggcagacacctatggcacacagagtcttgaagatgaccccatgtgaggtgacaggtgcctccgaggagggcgtagggtgagaatggtaggagtgggtggargggagttctgtcatttgcgaggttcttaaaattatgtaaggagatatgtatagtcaaaaccacccatgaaaatccttcaggaagggcccgtttatgcagctctgagtcagtgggagaa

SEQ ID NO: 471622 - DNA, 456 bp, Homo sapiens
ttgagtggaaactgaattagaacttcggaagggatttgcaaactttttgaatataaatcctgcaagagcaaacaagcagcacatgcagacgaccagcaatgagagggcgtggtgactctgaggacctgacttggttagggtgacgagagcgggggagtgtggagagaggaggtcaggcagcctttgcacagtgtagacagtgagagccacgtggccagttttgtgttttagggagactttgtgggcagacacctatggcacacagagtcttgaagatgaccccatgtgaggtgacaggtgcctccgaggagggcgtagggtgagaatggtaggagtgggtggaagggagttctgtcatttgcgaggttcttaaaattatgtaaggagatatgtatagtcaaaaccacccatgaaaatccttcaggaagggccmgtttatgcagctctgagtcagtg

SEQ ID NO: 471623 - DNA, 548 bp, Homo sapiens
gaggtatcattagatattcttttttagactaaaatatttcctaaggggtyaccttctcctttctttgcctttcctccatggaagaatatttgactatttgatccaagctcccttgccactccaaatctgttagaaatgtaagtcagaattgagccccttcatagtggctcacatctataatcctagggctttgggaggctgaggctggagcattgcttgagccagggttcgaaactagcccaggtgatatagcgagatctcgtctctatttcaaaaaagaagaaaaaaaaaaaaaagaattgagccttttgttattgacgcccagggtccactccagtgagtctgagtcctccctatttccgccaggattgctgagcaacactgccaaggaggggctttcctgaccctcatgctgggccttcaactctcctcacgggctgttggggttccaatttggaccctgaaatctgggctgatgtgctcgatgtgactatgtgtctccccccagtgaaggctgggagtaaaagagactgttcgtagcctccgaa

SEQ ID NO: 471624 - DNA, 561 bp, Homo sapiens
tctgaacacttttctacttcaccaaagagtgccgaacaagttaaaatgaatctgtttttaaacacttctcctaaaccatgagcattaacttgatttcctctgtcatagggatatgggrgacaatataacatccatcagagagttcctcctactgggatttcccgttggcccaaggattcagatgctcctctttgggctcttctccctgttctacgtcttcaccctgctggggaacgggaccatactggggctcatctcactggactccagactgcacgcccccatgtacttcttcctctcacacctggcggtcgtcgacatcgcctacgcctgcaacacggtgccccggatgctggtgaacctcctgcatccagccaagcccatctcctttgcgggccgcatgatgcagacctttctgttttccacttttgctgtcacagaatgtctcctcctggtggtgatgtcctatgatctgtacgtggccatctgccaccccctccgatatttggccatcatgacctggagagtctgcatcaccctcgcggtgacttcctggaccac

SEQ ID NO: 471625 - DNA, 561 bp, Homo sapiens
tctgaacacttttctacttcaccaaagagtgccgaacaagttaaaatgaatctgtttttaaacacttctcctaaaccatgagcattaacttgatttcctctgtcatagggatatgggagacaatataacatccatcasagagttcctcctactgggatttcccgttggcccaaggattcagatgctcctctttgggctcttctccctgttctacgtcttcaccctgctggggaacgggaccatactggggctcatctcactggactccagactgcacgcccccatgtacttcttcctctcacacctggcggtcgtcgacatcgcctacgcctgcaacacggtgccccggatgctggtgaacctcctgcatccagccaagcccatctcctttgcgggccgcatgatgcagacctttctgttttccacttttgctgtcacagaatgtctcctcctggtggtgatgtcctatgatctgtacgtggccatctgccaccccctccgatatttggccatcatgacctggagagtctgcatcaccctcgcggtgacttcctggaccac

SEQ ID NO: 471626 - DNA, 613 bp, Homo sapiens
gctgagtactctgcaagataatgagggatgggaaaggggaggaaataagtcaaagcaacaatatgtgttttaaggggtaatcaagattgtttctgtagtaatcgattaaatgttatactgccaaagaagctagcctaacttaagattctgattctgccactattcagaaatatagagacactactgctccctattgtgtgtgtgtgtgtgtgtgtgtgtgtgwgagagagagagagagagagagagaatttgcaaaaagataattgataatggggcaaagcattctgattactgctggaatcaatgactaagttgggtgacaacatcccagtgctccttaagctttaatatgcatacaatcacttgagggttttgttaaaatacggattctggttcagtaaacctagggtagggcttgagattctgcatctctaaccaatttgcaagtgatgcagatggtggtcctgagaccacactctgaatagcaagaggcattctttacatagaacttggggtttgcagccagatagaacaagcttctctggcctcgaacaatttatctaacttctctgagcatgttttatctctaaaatgagaaataatatacctagta

SEQ ID NO: 471627 - DNA, 437 bp, Homo sapiens
actgtgtcataaacgaatgaatgattttggagcaattcagtcgtctattaatctgttttatatatatccattttgcttttctcttaaaaatacagcaaaattaactgtgagcttttaaagagtagagaccacacgtcttttgtttcatattctttcccaattttgcttgaagtaatgtcaatccttaaatgtgaatcagaataacttcttcagtcatctttacctgtgcctgtttatttcatgcctgtttaatatctcgtatgggccaggcttgattactgcttgaaggaaataaagttcctcctcgcagttaytgttctcggggagggtgttttgaagggaaggtagtctatattatagaggacaggtaagtgggacctttgtttaagttgtattatattttgttcatttttgaataagtctacatattttatctc

SEQ ID NO: 471628 - DNA, 484 bp, Homo sapiens
ggttagaaaacttaaaaacacagcatgtttcctcatcttttccctggtgactatttacttttctctctcatgcatgtttcacttcatttttctccttattctgtgttctctgcccatctttccatgtatttggcggcctccacaacccagggaacmagacttgattgcatatttttcaagaagctcccttataaatgttataattatttccttaggctttgatggcaatatttattcaaaaaatttgcctctgatccactggttctgcatcttggctgcacaacagaagcactattaaacatatgagtgcacagactgcattttgaagcagtggaatcagaatcccctgggtatctctaggccaggggtgggtactggggaagaggtcgggggcaggaggaaccagtggctccaggcaatgttgagaacctctacacttaaccaaacattcccaactccacaacacccatagatgactgggttt

SEQ ID NO: 471629 - DNA, 543 bp, Homo sapiens
aggccaagtatcaggaaaagacaacagaagccacagagaggagtcatcacaaggaagaggtaatctaagctggtgataaaaatgcctaatttcactgaggtcagaaagtacatgctcaacatgagacctcatttccctagtaggggacaaaaggcataacaggataagcgatgattcttgaacccagcctgtcaataaggctgggggtccctgkgaatagtgagggacaagaaccccaagaaaagactggacctcctgataatttggcacattgggcttattgacattgtcatttgtatcttgtttggtaagaggtgatgaccatatttcatggccctaaactccaaatgccctccaagcgtgaccaaggaaaaagagaacgaagtaatcaaagctatcattaacccttattgtggtaccactcaatggtaatgaccctacagaggagctgtagggtaaccttgattatgctctgatttattcattgataaataaactcttcccatacctgagtactttacttgtagtaatttatgcacaaca

SEQ ID NO: 471630 - DNA, 589 bp, Homo sapiens
taccttgaagtatgccaatgtctgcaaagcatgcaaaaatccaagtcttaccatctgttggatgattcatttgtaaatctgcctagtattcctttgggaagttccagggctgatttttaacctcattataaaaatttggtgggaatgaattcagggatatagtatatatgatgtgctctgagcacttggaagagtgtgccacattaatctgagtcatgtttaaatgggatatgcactgcaatcaaaaataaaagcgtttgaaagtaattgaagatttagggtttttatcaagagttccagaaaaaatagaggctttasggtaatatacagatcacagaaaatatttttttctactttttgcccaaactagcctttgctgataataaagacactaaactcctatgggaaagaactgtgacttactcatttttgaacccccacacccagaatgtcctttcaaggttaacttttgtatctacttctaagatgtcttcttctgaggctatagaaaccacattaaaaacttggttgaacatctcatcagccttgtctttcttccacctgcttcaattacatcatgcatgggctt

SEQ ID NO: 471631 - DNA, 599 bp, Homo sapiens
tctgggttacatgtatcatccataaactcttagaagctacttatggaatcatcagccagtccactggtggaccactggctaacatattagggacctagggatatgtctttgkatatatttcaaagactctatcaagcacattcaaaaagagaaggcagagtgagtctcagtgtcctgccccttacccccatacacatgccagtccatcactctgaccacaaccaccaatgctttccaggacacagtgaatattcctccgctggatgggctcctgcaaagagctcatgaccccatgacagggatgtcatacaagggatttgagctttagacagagtggtgagcactggactggatcatttgtaaactctactttaacttgaaatctttcaaatcccaatgaatacatctgttgactgaaccaagctgatcggcttgcctgataacaactgtgtttgatgaaaggggtggagaaatggggtaagataaggtggtgaagtccccttgtgggcaagcagagaaattttgggtcaacacaagttggggtctaactgtggctctgaaacatggatgtgtcacaggtcactgggggagcttcgaga

SEQ ID NO: 471632 - DNA, 599 bp, Homo sapiens
tctgggttacatgtatcatccataaactcttagaagctacttatggaatcatcagccagtccactggtggaccactggctaacatattagggacctagggatatgtctttgtatatatttcaaagactctatcaagcacattcaaaaagagaaggcagagtgagtctcagtgtcctgccccttacccccatacacatgccagtccatcactctgaccacraccaccaatgctttccaggacacagtgaatattcctccgctggatgggctcctgcaaagagctcatgaccccatgacagggatgtcatacaagggatttgagctttagacagagtggtgagcactggactggatcatttgtaaactctactttaacttgaaatctttcaaatcccaatgaatacatctgttgactgaaccaagctgatcggcttgcctgataacaactgtgtttgatgaaaggggtggagaaatggggtaagataaggtggtgaagtccccttgtgggcaagcagagaaattttgggtcaacacaagttggggtctaactgtggctctgaaacatggatgtgtcacaggtcactgggggagcttcgaga

SEQ ID NO: 471633 - DNA, 599 bp, Homo sapiens
tctgggttacatgtatcatccataaactcttagaagctacttatggaatcatcagccagtccactggtggaccactggctaacatattagggacctagggatatgtctttgtatatatttcaaagactctatcaagcacattcaaaaagagaaggcagagtgagtctcagtgtcctgccccttacccccatacacatgccagtccatcactctgaccacaaccaycaatgctttccaggacacagtgaatattcctccgctggatgggctcctgcaaagagctcatgaccccatgacagggatgtcatacaagggatttgagctttagacagagtggtgagcactggactggatcatttgtaaactctactttaacttgaaatctttcaaatcccaatgaatacatctgttgactgaaccaagctgatcggcttgcctgataacaactgtgtttgatgaaaggggtggagaaatggggtaagataaggtggtgaagtccccttgtgggcaagcagagaaattttgggtcaacacaagttggggtctaactgtggctctgaaacatggatgtgtcacaggtcactgggggagcttcgaga

SEQ ID NO: 471634 - DNA, 599 bp, Homo sapiens
tctgggttacatgtatcatccataaactcttagaagctacttatggaatcatcagccagtccactggtggaccactggctaacatattagggacctagggatatgtctttgtatatatttcaaagactctatcaagcacattcaaaaagagaaggcagagtgagtctcagtgtcctgccccttacccccatacacatgccagtccatcactctgaccacaaccaccaatgctttccaggacacagtgaatattcctccgctggatgggctcctgcaaagagctcatgaccccatgacagggatgtcatacaagggatttgagctttagacagagtggtgagcactggactggatcatttgtaaactctactttaacttgaaatctttcaaatcccaatgaatacatctgttgactgaaccaagctgatcggcttgcctgataacaactgtgtttgatgaaaggggtggagaaatggggtaagataargtggtgaagtccccttgtgggcaagcagagaaattttgggtcaacacaagttggggtctaactgtggctctgaaacatggatgtgtcacaggtcactgggggagcttcgaga

SEQ ID NO: 471635 - DNA, 126 bp, Homo sapiens
tggatgttatcatagctaagtattaaaaaaatcttatgagcacttggaaagctctcaagagttgtctataaccaaagttatcttataataaaaaaaaargggggggtaagaaaagagagaggggag

SEQ ID NO: 471636 - DNA, 287 bp, Homo sapiens
cagggcaaacacacagtgagcagcagacccagagcagagcttggcttcctgcaaggaaatctgcccagtgcactggttggctgctgctttgccacagccctgggtctggctcaagcatcttatccaagtgaactcttttgggaaggctggtggctgcaatgccaggcaacacagactcccaaagaagagarcattggaatgaggttccaggcactttcactagtgactatagaaggtgaagcttggaattaccaggtgtttgacctcaccttgtcttaccttcaact

SEQ ID NO: 471637 - DNA, 561 bp, Homo sapiens
tgtcctgagctgctccacctgcggccttctcagatgaactagtccctctctgcaggctcctatcccttggcaccagttctctacaatgaggaatgtaaagatggcaggcttggccgggcrcagtggctcacacctgtaatcctagcactttgggaggccgaggtgggtggatcacctgaggtcaggagttcgagaccatcctggccaacatggtgaaaccccatctctactaaaattacaaaaattagctgggcgtgatggcacatgcctgtaatcccagctactcaggaggctgaggcaggaggatcgcttgaactcaggaggtggaggttacagtgagctgagatcgcaccactgtgctccagcctgggcgacagtgagactccatctcaaaaaaaaaaaagactgcaggctttagagtcaggcagacctaacttggaatcctgactcctctgccatcttaccaaacctctctgagtcactttccttgtaggtaaaaatgtcacaatactcactcctcggggttgtcaggatgagggataaaatatgtaaaacacttac

SEQ ID NO: 471638 - DNA, 620 bp, Homo sapiens
acagcatggggagagagtggtcagtgcaaaggccctgaggcagagtgtgatggttggagaccatgcccactgcagtgtctagcacgtaggaagcacgcagtatgcaggagccactgtgatcatgagcattgctctcactgctgccgaaacaccgagttaccagtcatgggtgagccaaagccagggaaacccaatatattaatacatcaccaccaatgctagttagggccccttcagacagcagctccccagccaacactgcagctctgggggctctttttatgccgctacagaaaacagccaggtgcggtcaggggccgttaggaacaggcacaggtgggcagcatatttactccacttcatcctcaattgctttcttccttccccacatttgcctcctccctttccccaaacgcaccttctgaggaaaggaggtctctgcccgcagccaaccttgcagtcgcactgctcacatgtgctgagtccctagtgtgtgctcaagtctgggctacgacygggaaccctgaactgcaacaaggtgagatctttctctctaggggctcacagtttggggagaagttatgggtagagaaaaaaagctgctccaaaataataccagc

SEQ ID NO: 471639 - DNA, 426 bp, Homo sapiens
gccatgttgtccaggctggtctcgaactcctaggctcaagcaatccacccatctcagcctcccaaagtgctgggatcacaggcgtgagccctccggcctaaagctgtcttaaattttgacatgttatggaatataataaaataaattttaaaacaggttttttttaaatgtctccagtgtctggccttcwggaatggctgtttgatctctggccaccatggagtaggagaaagacactttgcatgttcctggctcacagtgctgagtggacatgggttattctcatctcaagagttcctgggagaattcttctgaagatgtagaaattctcccaggggccgagtatggtggcttttgcttgtaatcctagctgcttaggggactgaggtgggaggattgcttgaacccaggaattcaaggctacag

SEQ ID NO: 471640 - DNA, 487 bp, Homo sapiens
ttttccatgttaccacaaagagatttgcctttctttttcattggcagcttagtatgccatagtaccactgtatcacagttaggcaaccattctgttgacacttaggttgtttccacaattgcaaacaattcttcagtgaccatccttgcaaataatatccatgcatttcaatatcttctttcttcaggcaataagaccagctttgtcaccattctaatggtaaaaatgttaagctgagtaacaaaggaacacaaccaggctagctatttgagatggttatttttggttaatgggtgacaggtgggcttcaactatgcccagaatggtgtttaaaacatagtgggcactcaataagtatttgctgaatgcatgaatgcataaacaagtgaatccacaaccactatagacacttgtcaggcctgccctgcccmcatttatgataggatttttcaaccccagcactatggactgttagggccaggtaatt

SEQ ID NO: 471641 - DNA, 438 bp, Homo sapiens
ttacaagcctaggagccagaggcagaaacagccagggcagaaggcagaatcaacayattgagagcctagctctgtggcgttgcccacatctgcctttcagggtcggggctcccatcctggtgttgaaaagaggatctttgcatctaaaatagtgtgtatgatgactgtgtgacacgaccaccagactcagaaatactcacctgcctcagacataaaagtaaggacttcgttcattacgttgatcctctgtgaaacctcaaaaggtagcaatcagctaattgaagaaaaatgataagttggacacattgcttggatgtactgaaagtaaggctcagagcaaaacccgctcccttctgcctcatattgggaaaggtaacagggactagtgcagagagaggcatggagagaattcggatgagatcattgtcctttcacctg

SEQ ID NO: 471642 - DNA, 438 bp, Homo sapiens
ttacaagcctaggagccagaggcagaaacagccagggcagaaggcagaatcaacacattgagagcctagctctgtggcgttgcccacatctgcctttcagggtcggggctcccatcctggtgttgaaaagaggatctttgcatctaaaatagtgtgtatgatgactgtgtgacacgaccaccagactcagaaatactcacctgcctcagacataaaagtaaggacttcgttcattacgttgatcctctgtgaaacctcaaarggtagcaatcagctaattgaagaaaaatgataagttggacacattgcttggatgtactgaaagtaaggctcagagcaaaacccgctcccttctgcctcatattgggaaaggtaacagggactagtgcagagagaggcatggagagaattcggatgagatcattgtcctttcacctg

SEQ ID NO: 471643 - DNA, 546 bp, Homo sapiens
cagcttcaagtgatgggcaggggagaagggcattctcttctctggaagaagaaaacagcatctgctgtaattcttagtgaccctagctcagaagtgtgcaatgaagcaacaggcacagctatgaaggcaggctggagcatcagatcaacagacataaccagttcaacacacacatacagacttcttcatccaggcaatgagtaaacaaaggttttaaacaatagctgacaagatcacttgtgcattttagaaaatcagaaacttgaagaactgacaagatagagagaagcctggagaaaagaatgttatataccctgaactaaggaatagcactgaaaatagaaagggatagagctagatcttatttagaaggcagagataggacctgaagactayatggggaataaaggatgagaatggctgactctcagctttcagatttcatgaaaggagataccattaaccaagataaagaatatctcaggagggggagtaagtttgggataagggtgttgccagattgagttcaagggggctgcgagacag

SEQ ID NO: 471644 - DNA, 621 bp, Homo sapiens
gcactccagtttgggctacagggtgagactccatgtcaaaaaaaattttttttttaattagctgagcatgrtggcatgcacctgtagtcccagctacttgggaggctgtggtgggaggatcccttgagcccaggaggtcaaagttacagtgagctatgattgtgccactggactccagccaggacagcagagagattttgtctcaaaataaataaataaaaaagcataacctaaagataacaagaaggaatatcaaacaaacccaactgaggcacagtttaaaatatacttgatcagtactttctaaaatgtcagggtcatgaaggacctcggaaagactgaggaactgtcacccattgagggagacaaaggaggcgtgatgacctaatgatcttggttggcccagctcagataattgtaattggtcatacaagatactaagctcaggggaatttttgcatctcttctgtaaggctatgattatttcaaaataaaaaattaaaaatacaacaaaaagtaatgagagagggagagatagaggtgtgagtacaaagagaaccaaaaagaaaagtggttttgggggctctatctcaaaaagaactgtgggcctcgttgtcggca

SEQ ID NO: 471645 - DNA, 538 bp, Homo sapiens
gagccgtaaattattttcatgtaacattttcagatggaaatatctctaagatgcggtgaacatttcccttccttcttgcttggagaatgtggaacaccattaacctttctgtaatggcccagggttgccgctgtgaacctccgctgctgagcrggaggtaatgcagccctccgggcttgcgaggtgtgctggggtgtttgccctctgctaatggcctctgttctcggagcttccttcagtctcacggccgatttcctagagatttttgagttcttccctcgccatcaggcctctagttgtcactgtcatcggtgtggtcatctctcccttcctaaattgccatttctaattggctgtggactagaaaccagaactctaggcttatgagagtgactgtgaagtcagcattcatctgctttgatgaagcatctgataggcctgagttaagggcagaaccttcaggctttgcagcccctgtgccggccatggagagtcattcttgtgtttctccttgatttacagccacagttcggaaaag

SEQ ID NO: 471646 - DNA, 538 bp, Homo sapiens
gagccgtaaattattttcatgtaacattttcagatggaaatatctctaagatgcggtgaacatttcccttccttcttgcttggagaatgtggaacaccattaacctttctgtaatggcccagggttgccgctgtgaacctccgctgctgagcgggaggtaatgcagccctccsggcttgcgaggtgtgctggggtgtttgccctctgctaatggcctctgttctcggagcttccttcagtctcacggccgatttcctagagatttttgagttcttccctcgccatcaggcctctagttgtcactgtcatcggtgtggtcatctctcccttcctaaattgccatttctaattggctgtggactagaaaccagaactctaggcttatgagagtgactgtgaagtcagcattcatctgctttgatgaagcatctgataggcctgagttaagggcagaaccttcaggctttgcagcccctgtgccggccatggagagtcattcttgtgtttctccttgatttacagccacagttcggaaaag

SEQ ID NO: 471647 - DNA, 600 bp, Homo sapiens
taatgttgacataactactaattcccttttgctgtgtaaggcaacatattcacaggttccagaaattcagatgtgagcatcttggaggcaggggaatttttctgcctaccataggcagggactctcttgccctggtatattgtcagtttcatatactcacattggtactgatgagtgtctttgggtatacaagctcataggtattcacaattttctgattttattgtagttaggaagatactgaattgaaataagaagaaaatatttttcaaatggctccattttatttggttwagggagttacctattttactgtttgatgtccaggacccttacaagctttatttagatgagtgagcacaaagcagtaatgtttggcagaatatgaattggaaatgaaaatcaagcagtccaagacttggtctggagacttcccaaaagtctcagacccttacaggggtttctaaagtcacaactattgtcctaatatactaagatattatttgcctctttcacgctctctccctccagggccactagtggagttttccagaagctacagtggtatcatgacagattggatgcagaagcagaaaaagc

SEQ ID NO: 471648 - DNA, 523 bp, Homo sapiens
taccagatgcgattccacccttggggccattatcctggaaacaacagacattttaccttttattattttttttctatatgcttttcccaaaactttttgctctctgggcaaaaaccaggacacataataaaatggtagaaaatgtagcagaatctcaaactgcagstgttcctaccaagaggtcagcataaatccatcaactgtttgctgagcctctgcatgtgggttacacccgtgtttcataaacaactgtagacatcatcagggttacttcccacactttattaaattggaaatggcaacaggaaacgggaaaacaggagagggactatattgctatttagttcctcggcacataagaaagtgatttagagggaactgggaggatttctgaccctgctaatttgcattctgggatctgccaactttttgcccatgtcatcactgatagtgggtcagtgttctaaaatactaagagggaagattcatgagtcaaattgcctgagtacatacaagtcatggt

SEQ ID NO: 471649 - DNA, 634 bp, Homo sapiens
ctgggttgtattcatcttgtatctacagtaccaatgggcaactcagaagatattttttcattgaacggaatagtctgtacatgacaggttttgggtatcagccccacaggataaaactaaatgttcctccttccacttttctcagtgagaccaacatcatggctcagctcctttgaagatgtttagatttactctgctccaggaccctcgctatgcctctgatcacagttgccatttcataggtgtgtgtctcatgccaggggaacctggaaacacaccagtgactacgtgcaggtgctttgctacctctgtgaacagggcgagggtgtgcagtggtgcaagrcctttcatgaggggcccagccaagggggttagtcgagggcagaaactggccattgactgagttgccaggctctgtgccctgaggtccctgggcagaaaaggccccatttccaatttgcaccaagctgccatgtgggttggcagaggactcgtctttgcttgtgttgtagtgcaaagactatgggttttgtagtgaaaaaaaaaaaagttcggtgcaaatcccagcattgtcgtatgtttccccagcatggtgaccgtgaagaggctgagctgcctcatttgtgaagggaac

SEQ ID NO: 471650 - DNA, 646 bp, Homo sapiens
tttgaattttataaagaaattttaaaaaagaaaaggaaattcttttcaccaaaaggtgctgaaataacagcatatccatgagaaaaatatgaatatctactattacttgatacaaaaaaatgaactgaaattkgtttatacactgaaatgtaaagggtggtttctccctaatactgggggtgctcctttccttcgacagtgacataatctatttgttctaattcagtaactgctacatccatctttattaatcaagtactcacccacacccaggccttcctcattgatgggtcaccaatcatgagggctgggaacagtagtagaactcagccactgaaagagttcattacagttcacaaattctagcaattaatcatatgatcttccatattcaataagccaaaccagggagtggtagaagcaacagattggagtcaccctctttgtgttgtcactgatggtgtcaaataatgatgaaaccagtgaagattcccaggtggtagggtcaatttaaaaaaagaaaaagagcagcggttgagagattttatggtgaaatcatagacatagagaaccgatctccctgaatccctgcctcttctgtcctgattttctccaatcacctcctccaaggggaatgtttcctctg

SEQ ID NO: 471651 - DNA, 574 bp, Homo sapiens
aacctagggttctgccttgattcttccttcttcctactcccccatcagccaatgtttcttgagcatctacttgttgtttgtttgtttgtttgtttgtttatttatttatttattagtttcttttgaggcagagtctcactctgtcgcccaggttggagtgcagtgaggtgatgtcagctcactgcaacctccacctcccgagttcaagagattttcctgcctcagcctcccttgtagcttggattacaggcacccactaccatgcctggctaatttttgtattttttagtagagatcaggttttgccatgttggccaggctggtctggaactcctgacctcaaatgatccacccatctcagcctcccaaagtgctgggattacaagtgtgagccgcagtgcccagcctgagcatctacgctgtaggagccctttgrggacaactcccagaaagccagtggaacaacacattttcttccctgcatcctctgtgaaagaacctaggacctgtcacaaagctctttgcttgtgagacctttcagggcggcactccgccttctgcatggtgaggtggg

SEQ ID NO: 471652 - DNA, 406 bp, Homo sapiens
taaaaatcaagatctggcattttaattaagttataaaacatcggagaaaagaattgtttcataggacactaacatacagacaaattcatttggaacccaatgaattaatgggcctaagataacaaccaatagaagctaaaatgacgagtaactgtttcagaagaaaacatatatggaatgaatcagctgaaaatacctgaacctactgatcaatttttatatcacatgaagtgaatacacataaagtataatatggarcacatagaaccaactagaaatgagcctaattggtaaatattctctattttatgataatatacaggaaatatgtcaaagagagaaacatgcaagaacaccgtagggtttaataagataatcacaaggtatggaatattcaacaggatga

SEQ ID NO: 471653 - DNA, 406 bp, Homo sapiens
taaaaatcaagatctggcattttaattaagttataaaacatcggagaaaagaattgtttcataggacactaacatacagacaaattcatttggaacccaatgaattaatgggcctaagataacaaccaatagaagctaaaatgacgagtaactgtttcagaagaaaacatatatggaatgaatcagctgaaaatacctgaacctactgatcaatttttatatcacatgaagtgaatacacataaagtataatatggaacacatagaaccaactagaaatgagcctaattggtaaatattctctattttatgayaatatacaggaaatatgtcaaagagagaaacatgcaagaacaccgtagggtttaataagataatcacaaggtatggaatattcaacaggatga

SEQ ID NO: 471654 - DNA, 406 bp, Homo sapiens
taaaaatcaagatctggcattttaattaagttataaaacatcggagaaaagaattgtttcataggacactaacatacagacaaattcatttggaacccaatgaattaatgggcctaagataacaaccaatagaagctaaaatgacgagtaactgtttcagaagaaaacatatatggaatgaatcagctgaaaatacctgaacctactgatcaatttttatatcacatgaagtgaatacacataaagtataatatggaacacatagaaccaactagaaatgagcctaattggtaaatattctctattttatgataatatacaggaaatatgtcraagagagaaacatgcaagaacaccgtagggtttaataagataatcacaaggtatggaatattcaacaggatga

SEQ ID NO: 471655 - DNA, 576 bp, Homo sapiens
cccttatatttagtcagaactcggtatgttttaaggaaagaatggttacacgaagacatacattcattcatttatacaacacattttcagtgttgaatgataaattttggaatagttaacagatgataaaagtgttggtttcagtcatccctatccaatgaagtaaaaaaaaaagtgttgaatgggaagaaatcaagaatagttatacgaatatcaccattgcattaaagctctcttccttgtttctaaaagaatatcttgacacacattaagctcactgacccccacaccatgaatgagggcatcttcaacaatggtggatgacgtcttagtttccstcaactcagttaatctaagtaagctcatggtatcactttcctgtcctagagggaacatatttcctgcatttttctttttttccttactttccatcaccaagtaactcttctgatattttttctcttgagaaaattaatatgactcatagatctggttcccaagagaaatcaatggaggcctggttacaaggatctaagaagcatcaatgggtcactaacatctagtggtactaattaa

SEQ ID NO: 471656 - DNA, 430 bp, Homo sapiens
gtaggggaggccgggcgcggtggctcacgcctgtaatcccagcgcttttggaggccgaagcgggcggatcacgaggtcaggagattgagaccacggtgaaaccccgtctctactaaaaatacaaaaaattagctgggcgcagtggcgggcacctgtagtcccagctactcggagaggctgaggcaggagaatggcgtgaacccgggaggtggagcttgcmgtgagctgagatcgtgccactgcactccagcctgggctggagaccccttctcagatcgagaccccttctcaaaaaataaataagtaaaaagaggtaggtagggggtccagtgaagaggccagagtggctggccagagactgtgatgggctggaccaggtggaggcagtggagaaggaaggagaaggggcacgagtgaggtcacagaaatg

SEQ ID NO: 471657 - DNA, 618 bp, Homo sapiens
gctcaggagggtgaggtgagaggatcacttgagcctaggaggtggaggctccagcgaactgtgatcacaccactgcactccagcctaggtatagaatgagactctgtctcaagaaaaggaaaaaaagatacatttgtttgcagaattgcagcagcactctattcattattaaaaatagaaaaaagccacaaatagatatatgcactcagaactaaatgcaatttcacaccaaaagttgttctttgtgtacctaattattacattaccttataaaataacacaaaaatataatgttgagcataattacttttatatagtatttatttcataatttgcatttcgattcttgtaagtatggaagaagaattttaaaacagtttggccaaatgttagtattagagcacttccacccgtaatcccagcactttgggaggctgaggygggcggatcacctgagggcgggtgttcgagaccagcctgaccaacatagagaaaccctgtctctaacaacaacaaaaaaaatacaaaattagccgggcatggtggtgcatgccggtaaccccagctacttgggaggctgaggaaagagaatcacttgaacccaggtggtggaggttg

SEQ ID NO: 471658 - DNA, 620 bp, Homo sapiens
aatgctgtctacctatttctctccagaaatgttgttttccctccagtgattgtccagattcttctttccacgtgcttcactacaaaatcaaacttattccaattatgtgcatactcattaacatcattcttattctaaattacagttttgagacgtaaattatgaagtttatttttcttaaacttaagaactaattacattggagacccatcgctttggagactttttaacaactattaaatgcctgtgagaagaatgccataatataaagttgccacatttccttgtcrctaattacacattgcatcctattcttttggacaataaatgtaaccaaacatgactaaagatgttaagacaatgcctactattgctacttggatcgtaaagctttccctcttgattgtacattaagaaaaaaatgactctagagtgttatatagaaaggaacagagatagacctaatgatcaaaattatcaaactatatagataagaaagatatactatttctgaagttaaatacatattttactcgtcatgacaattgggcatttatcttgtgtcaatcaaaaaagaaggtcaatattattttctggttattttaaatgttatttatttt

SEQ ID NO: 471659 - DNA, 565 bp, Homo sapiens
ataagttcacaaccacagcatttgcagggacggctcaaggggtgggagctacccccactgcatttataaaggtactagcaaagaagcatttccattcattttcattataatayattccatggataaataacttggcactgcacctatgggcccctaaaacaatttcctccacatggaaaactgatcaagacagaatgactaggtacgtggtcctgtgcacagggattcatcaagtcccagaagccatatagtaaaggatgactacacacacacacacaaattacctgacagataaaaatttcaggagtaagatgtgaccattcggaataataagcctaaagaaataaaagtaagacagataatacccaacacgagagtctagactcgtggatggaaattcagacttctgatcagtctcaactgattggccttttcctcatgtcccatattttttcctggggtggataaacagccaagatgcctcaacagtagtggcatgaataaatctgtttaagttttgttcttaaacaagtaagaggaacttaaaatggcttcacgtgatgac

SEQ ID NO: 471660 - DNA, 565 bp, Homo sapiens
ataagttcacaaccacagcatttgcagggacggctcaaggggtgggagctacccccactgcatttataaaggtactagcaaagaagcatttccattcattttcattataatatattccatggataaataacttggcactgcacctatgggcccctaaaacaatttcctccacatggaaaactgatcaagacagaatgactaggtacrtggtcctgtgcacagggattcatcaagtcccagaagccatatagtaaaggatgactacacacacacacacaaattacctgacagataaaaatttcaggagtaagatgtgaccattcggaataataagcctaaagaaataaaagtaagacagataatacccaacacgagagtctagactcgtggatggaaattcagacttctgatcagtctcaactgattggccttttcctcatgtcccatattttttcctggggtggataaacagccaagatgcctcaacagtagtggcatgaataaatctgtttaagttttgttcttaaacaagtaagaggaacttaaaatggcttcacgtgatgac

SEQ ID NO: 471661 - DNA, 565 bp, Homo sapiens
ataagttcacaaccacagcatttgcagggacggctcaaggggtgggagctacccccactgcatttataaaggtactagcaaagaagcatttccattcattttcattataatatattccatggataaataacttggcactgcacctatgggcccctaaaacaatttcctccacatggaaaactgatcaagacagaatgactaggtacgtggtcctgtgcacagggattcatcaagtcccagaagccatatagtaaaggatgactacacacacacacacaaattacctgacagataaaaatttcaggagtaagatgtgaccatycggaataataagcctaaagaaataaaagtaagacagataatacccaacacgagagtctagactcgtggatggaaattcagacttctgatcagtctcaactgattggccttttcctcatgtcccatattttttcctggggtggataaacagccaagatgcctcaacagtagtggcatgaataaatctgtttaagttttgttcttaaacaagtaagaggaacttaaaatggcttcacgtgatgac

SEQ ID NO: 471662 - DNA, 608 bp, Homo sapiens
tccgtgtccgtgttcccacagagctcatattctagcagaacagtaactacgcaacgtgtatcttcatcacaacattaatacaatgctaggcatattggggctttcaaaagaagcacaaaaagtaaaaatagagaaaggtattgttcttrttcctaaagagtgatcaggttagaggaggagatgacactactctacttgagtcatcatgaacttatggtgttgtacacagcattccttaaattccttaagtgccaaactcggggggtatacagattaacacaaagaagtgtaaatagggcaaaaataaatctagagcactcacagaagcttgtaaaaagggtagggcctgaatttgtcttggaatatgggttaggagtagatagaaaaggaggtgaaagagccatcagggtaggaaaatggctgccatgagccatctaagtgagttataatgaaaatgttatccgtagggacagaggagagagtgtccaactggaaaggaggctgtgaactcagaaatggtacatattgaggatggatagagacagtggatgtaaaattatacaaggcctgaaaaatataggtagtacaatgatccaaaaagctggcag

SEQ ID NO: 471663 - DNA, 608 bp, Homo sapiens
tccgtgtccgtgttcccacagagctcatattctagcagaacagtaactacgcaacgtgtatcttcatcacaacattaatacaatgctaggcatattggggctttcaaaagaagcacaaaaagtaaaaatagagaaaggtattgttcttattcctaaagagtgatcaggttagaggaggagatgacactactctacttgagtcatcatgaacttatggtgttgtacacagcattccttaaattccttaagtgccaaactcggggggtatacagattaacacaaagaagtgtaaatagggcaaaaataaatctagagcactcacagaagcttgtaaaaagggtagggcctgaatttgtcttggaakatgggttaggagtagatagaaaaggaggtgaaagagccatcagggtaggaaaatggctgccatgagccatctaagtgagttataatgaaaatgttatccgtagggacagaggagagagtgtccaactggaaaggaggctgtgaactcagaaatggtacatattgaggatggatagagacagtggatgtaaaattatacaaggcctgaaaaatataggtagtacaatgatccaaaaagctggcag

SEQ ID NO: 471664 - DNA, 338 bp, Homo sapiens
ttatatggctcagaaaactgataactgggcaatagtatacggagtatagagaaatctttggaatctacaggtgctcaacttctgagcctaatggtagattaaatactgatcatgctcttgaaacatttgcactcagtggtaaactgaatttaactgggctgcarctgggctgaatttaactaaagcccagatatagttaaagcatgcattagattatctcagccctctaccttagcaaccccgtagatgaaatgaggtgctttttaggaggaaagaattaccaacttcagtctattcaaatctttcaacataaaacgtccggcatacaataacaaatc

SEQ ID NO: 471665 - DNA, 562 bp, Homo sapiens
tagaaaagatatttactatgtattaggtggaagtggatcatcatctttacatagagtctcagtgggggcagaggtggaggaggtggaaggggaggcaagacaggcaggcgcactgggtagaacttttattgaaaaaaattcacatataagtatgccgtttcaacccatgttgttcaayggtcaactgaatatttgcagcaaaactggcagccaagctgagaaaaatgaagaatgaaaaaggtaaaatgctattcaggccgcagtttacactaagcctgtgcagggaaggaaagcatctaaaactgctgatccagcccaaagcatgctgtgcccacagtggagagtcgtatttatttagaggcaggctggattgacttcatctggtgaggattacatcccctactagggccggcattgtgccttcattctctcattcatcagctaattccttacaggtactgtgccctggacttgtttcgttcaaaatacatcttttttccccctcagcaaaatagagcagagttgacaagaagttctgataattactccctaaacaataaat

SEQ ID NO: 471666 - DNA, 562 bp, Homo sapiens
tagaaaagatatttactatgtattaggtggaagtggatcatcatctttacatagagtctcagtgggggcagaggtggaggaggtggaaggggaggcaagacaggcaggcgcactgggtagaacttttattgaaaaaaattcacatataagtatgccgtttcaacccatgttgttcaatggtcaactgaatatttgcagcaaaactggcagccaagctgagaaaaatgaagaatgaaaaaggtaaaatgctattcaggccgcagtttacactaagcctgtgcagggaaggaaagcatctaaaactgctgatccagcccaaagcatgctgtgcccacagtggagagtcgtatttatttagaggcaggctggwttgacttcatctggtgaggattacatcccctactagggccggcattgtgccttcattctctcattcatcagctaattccttacaggtactgtgccctggacttgtttcgttcaaaatacatcttttttccccctcagcaaaatagagcagagttgacaagaagttctgataattactccctaaacaataaat

SEQ ID NO: 471667 - DNA, 589 bp, Homo sapiens
tacttcttcatctactagagagacaaattcactcaaaatgacttttagacatttctagaactatttcaaatgaagtgggctgcttaggaattgaagcagatcaatttggaagattagaaaaggagaagcttggacgctgtttattttaccattgcatgtaggagtcaaagtctcactcctgagacacaggcaggttgtgctgaataaggtcgtaaaccactaattctctctttctgatgaccctgaatttctgtcaaattcaatgattctgaatccacatagttaaactctggcacatagttggtgcaggaatttcaaggtccaggtcttactgccgaggtcttagcagcctggcgaagtgcaggtccactcagtgctgcagacactggatgtttccatctgrcaaacagtctatggggtgctacaaattttcccccatgtaaagtctcacaaggccacataaattttccaaattacaatcacttgaacccttatcctgctcagttgcaggacagcaaattctgctctccaaggatatctgggaagcctcagggatttcttagatgttccccagtctctcttggttgcc

SEQ ID NO: 471668 - DNA, 589 bp, Homo sapiens
tacttcttcatctactagagagacaaattcactcaaaatgacttttagacatttctagaactatttcaaatgaagtgggctgcttaggaattgaagcagatcaatttggaagattagaaaaggagaagcttggacgctgtttattttaccattgcatgtaggagtcaaagtctcactcctgagacacaggcaggttgtgctgaataaggtcgtaaaccactaattctctctttctgatgaccctgaatttctgtcaaattcaatgattctgaatccacatagttaaactctggcacatagttggtgcaggaatttcaaggtccaggtcttactgccgaggtcttagcagcctggcgaagtgcaggtccactcagtgctgcagacactggatgtttccatctggcaaacagtctatggggtgctacaaattttcccccatgtaaagtctcacaaggccacataaattttccaaattacaatcacttgaacccttatcctgctcagttgcaggacarcaaattctgctctccaaggatatctgggaagcctcagggatttcttagatgttccccagtctctcttggttgcc

SEQ ID NO: 471669 - DNA, 480 bp, Homo sapiens
actaagttattacatcagtctacttcttggacaatgcaaacacattagaaaacattaacttttaacatttaccacataatgtcttgtgtattattctgataaattttaatttcacacatcttaaatgtttttaagatgtgattattgttttctacaattattattcattgggatttattcacattttaaaawatatatatatttttatttctcccacatatccatgcttttggctaagatcatatttcttctgcctgaaaaactcctgttaggttaatacaggtttgttggtgaaaaatctttatcttagcctaacttttcaaagatactttccctgagtgttgagttctatgttggcagttattttccttcattatgtttaaatatgtcactacatggttgcttggcttcagtcgagtctattaaaaagtcaactgtccatcttcttgttgctttccagaagataataggccttttcca

SEQ ID NO: 471670 - DNA, 573 bp, Homo sapiens
cagggcactgccttgttcagcctcagctaggagtgtatgcatcaggcaactcaaatttctcatagctctgtgcatgtccgattttgagattataaataaatttcatgtgtagtcaatggaatccacaaaactaataggatcgatcaactgtatttatgtttaaggagaaacacattttcatatatgacattctgttgttttatttgaaggagcttataatagcctgcatttwttgagaacatcccctgagccaggcacatagaccctttacctgcattcatttgatgtgtgtaaagcattagaatgaggtaattgacatagcatatttcattggggaaaaagtctgttgcattaattataattagtcactaaacacaaacccacactgacactagattatttttaattctactaggtagtgctacataagtttgaggtgttctttgagttgtatttagtactttatttaaatagaatatgaagcccttttcttttacacatatgcatactcacataccacaaaaccacttttctatattaggggctattaggcagtagttataccctatctaa

SEQ ID NO: 471671 - DNA, 578 bp, Homo sapiens
tgcaggtttgtgagcacggtcaaagtgtgtgttgtttgacatagatctagagaacggcagtatgaaaatggatcaggagggagaaatctagaagggtaaataaaattcctttattacagggaatacctgaagcaccaggaagaccaaatgattacagagttggaattttcatccccactcacagacctccaggatgagaagagaaggaagagaaatgtatagactatttacaatttcatgctaccaagaargctgacttccaaattaccaaagtcaaagtcattgatttttctaagaaatgtccagagagattgactgtataagcaactgtaagtggcccgccccgttgtttaaccattgttataattaagaagatggtttgcttgctttcttttaaagtaacacatgtgtatgttaagggactgtagccactgggaaaacacactctgtttttctacatcctcacacaacgcttctgacaccagatgtgtgggggttttccacaccaggcaattcttcaactctccaaacaccagttgggtattctgcaatttaattagattctgacactatctgga

SEQ ID NO: 471672 - DNA, 578 bp, Homo sapiens
tgcaggtttgtgagcacggtcaaagtgtgtgttgtttgacatagatctagagaacggcagtatgaaaatggatcaggagggagaaatctagaagggtaaataaaattcctttattacagggaatacctgaagcaccaggaagaccaaatgattacagagttggaattttcatccccactcacagacctccaggatgagaagagaaggaagagaaatgtatagactatttacaatttcatgctaccaagaaggctgacttccaaattaccaaagtcaaagtcattgatttttctaagaaatgtccagagagattgactgtataagcaactgtaagtggcccgccccgttgtttaaccattgttataattaagaagatggtttgcttgctttcttttaaagtaacacatgtgtatgttaagggactgtagccactgggaaaacacactctgtttttctacatcctcacacaacgcttctgacaccagatgtgtgggggttttccacaccaggcaattcttcaactctccaaacaccagttkggtattctgcaatttaattagattctgacactatctgga

SEQ ID NO: 471673 - DNA, 601 bp, Homo sapiens
tgcataattccacttacatgaggtatctaaaataatccastagatagaagcaaagagtaaaacagtgattgccagcatctggggaggaggcagtgttggggcattgctattcagcaggtataaagtttcagtatgcaagtcattaagttctagagatttgctgtacaacattgtgtctatgttgttaacacagtcagcaacactgtattgtatacttgaaaatttgttaacagggtagatctcatgttaagtgttcttaacatgattttagaaaaaagtacatataagtttatgcacttttatgcagtaccttaggttcagaatatgtgaaaccgtattatgcactgtagaaattttaagatcaatttaaaaataactaataaaataaacatatgcctaatatgtccatgtgtctgaaattgctgttgatcattgtgtctgagatatttgatatacacagactgaacacactgtttatacagcagacattgtataaagtctatcggtatgaccagactggttattatgtaggaagtagagatttattcatcaaatactcattgagcacctatactgtgtgaggcactgttctagaaccgag

SEQ ID NO: 471674 - DNA, 429 bp, Homo sapiens
cccaaattccctctcatggagctacagtcttgtcatttttgtaaatgcggtggtttattatgaccacaatagcccttatgcttggaattattagtacytccaggcctctatgtgtacagagagtttagtctagattagttgaggattgggccgtgcctttgtattgctacctgactggttcctaaggcattgggtgaagggtcttcctcagcagaggggctgtgcactaaaggcggtcattgctggggtgagggtggggctttatcaggctcccttggagactggattcgttgtcctcctacgcttagctgctcaaccctatccaaagcagcccttacccttacagcactgccatggctaagaggcttctgactgctgtggcacccaaggccatctttatccttcagtttccttttctattcattcata

SEQ ID NO: 471675 - DNA, 429 bp, Homo sapiens
cccaaattccctctcatggagctacagtcttgtcatttttgtaaatgcggtggtttattatgaccacaatagcccttatgcttggaattattagtacttccaggcctctatgtgtacagagagtttagtctagattagttgaggattgggccgtgcctttgtattgctacctgactggttcctaaggcattgggkgaagggtcttcctcagcagaggggctgtgcactaaaggcggtcattgctggggtgagggtggggctttatcaggctcccttggagactggattcgttgtcctcctacgcttagctgctcaaccctatccaaagcagcccttacccttacagcactgccatggctaagaggcttctgactgctgtggcacccaaggccatctttatccttcagtttccttttctattcattcata

SEQ ID NO: 471676 - DNA, 226 bp, Homo sapiens
ctgcgcgccttcgagctcacactgcaggccmgcgaccagggctcgcccgcgctcagcgccaacgtgagcctgcgcgtgttagtgggcgacctcaatgacaatgcgccacgggtgctgtaccccgcgctggggcctgatggctccgccctcttcgatatggtgccacgcgccgcagagcccggctacctggtgaccaaggtggtggcggtggacgcagactcaggac

SEQ ID NO: 471677 - DNA, 226 bp, Homo sapiens
ctgcgcgccttcgagctcacactgcaggcccgsgaccagggctcgcccgcgctcagcgccaacgtgagcctgcgcgtgttagtgggcgacctcaatgacaatgcgccacgggtgctgtaccccgcgctggggcctgatggctccgccctcttcgatatggtgccacgcgccgcagagcccggctacctggtgaccaaggtggtggcggtggacgcagactcaggac

SEQ ID NO: 471678 - DNA, 226 bp, Homo sapiens
ctgcgcgccttcgagctcacactgcaggcccgcgaccagggctcscccgcgctcagcgccaacgtgagcctgcgcgtgttagtgggcgacctcaatgacaatgcgccacgggtgctgtaccccgcgctggggcctgatggctccgccctcttcgatatggtgccacgcgccgcagagcccggctacctggtgaccaaggtggtggcggtggacgcagactcaggac

SEQ ID NO: 471679 - DNA, 226 bp, Homo sapiens
ctgcgcgccttcgagctcacactgcaggcccgcgaccagggctcgcccgcgctcagcgccaacgtgagcctgcgcgtgttrgtgggcgacctcaatgacaatgcgccacgggtgctgtaccccgcgctggggcctgatggctccgccctcttcgatatggtgccacgcgccgcagagcccggctacctggtgaccaaggtggtggcggtggacgcagactcaggac

SEQ ID NO: 471680 - DNA, 499 bp, Homo sapiens
ggcccaacccggaggcagagcggcaactgaactctagccggaaagagccagggttatgtgcacatgggaggtgrggaggacaggggctgtatgtgaccctcacatctgttcctcgcgccccagatggcttctgctgcctgctccatggaccccatcgacagctttgagctcctggatctcctgtttgaccggcaggacggcatcctgagacacgtggagctgggcgagggctggggtcacgtcaaggaccaggtgaggagtccactgcagttgccccgggaccacagagctccaggcgggccaactgaggccccacgaaggtgctagacccgccagagcccagccagagctctgctcagctctacgatgcactaatgggtcacggtgcttgattttagccaagcacatcatttagcgggtagcatcagctccttcttacaggtggggaatggaggcccagagcagggtggaaactcatccaaagtcacacagcaatttg

SEQ ID NO: 471681 - DNA, 453 bp, Homo sapiens
tcagagaggtgaagtcacttactcaaggtcacacagccctgcccaaccaggattagaaccaagggttacctgacccaaagtttgtgtgctgggacagcatgcctactgcatgccggctaccaggaggggacaaccagaggtgaatcagacctcgtccctgccccttgggtgagataacgcctggctggctgcaaatctagcctgtaattctgtgtgataacagccactcccttttgaatcagccggtgtctcctgacaatgtcctgtgtcttcctyagccttgtgggacggacagaaccaagccctgttgaatttgggtccccatcttttttttttttttgagatggagtctcgctgtgtcacccaggctggagggcagtgccacattctcagctcactgtaacgtccaccacccgggttcaagtgattctcctgcctcagcctcccgagcag

SEQ ID NO: 471682 - DNA, 638 bp, Homo sapiens
ctgggagctcagggacagacctgaggagcctcagtgggaagtgctgaagtggaaagttctggaatgtttcaggaaaaaggctggaggcttagaggaaaggctgtcgctcctaatatggctggcaaccctggatgggctgtgttcctcccacctgcccatcctctcactgctgccacctctagggacacaacctctcttcatgtccaccttcccaaactcacctgcactcctccattatctgactttatgtgaaagcagtgctaagatccctctcctgcaatgcaagaaggagatgagaggcccgggtccccacagacaactcagcagtggggtcctgctgaagtgggaccgggcagaatcatgcactcccaacatcctggatcctgactgggggtaacagtgaagttcaaagaccatgccatcaaaatctccagagtgaggctcctccctggggtccctgaggtctgtccaggagctgctccctgagcaaatctagagygtggagggctggggttgtggcagtaaaagcagccacatttgtctcagggtggaaagggagacggtgagctccagtaagggcaagggcgccatctagtgggcgcctcctgctaaggagcaaggagaccaggagagcggag

SEQ ID NO: 471683 - DNA, 559 bp, Homo sapiens
tgagctgaccaagcccatgggcttctgtaccagatcctccaagccaagccttgtcacccccatcttgctaattcctgcccacgtcacacccacagagaagactctggtcctacagaccagcgctgcccttacagagactcaggtccagcctatccagtgtccctgctgggcacacacagcactcaggatgcccaatttaagggtcatctgtgggctcgggggtggggaggtcctgtaacttgcatgggtcagagccctcctcacatcctacatttcagcagtcaccagggtcctctctgccctgtcctcaccttcaatgtctcaatgactcactcaatgtcctgggtcatccttgtcatctctcctggacatagccacagctcctgacaggaggggttgaggctctgtctctccatcagtccctcccactctgaccacatgaacytggtcagccccatctgagcctcatcccctcaccaggggccctgtgctctggatccctggatacctgggtccttgtcatgcaaacttgacaacagtaataaccaccaggccctgg

SEQ ID NO: 471684 - DNA, 521 bp, Homo sapiens
ccatgtgcccagcctatttgtcacatattttatctttccttatgttagcttattagctttatttctttattgtcctttttttttttttttgagatgaagtctcgctctgtctcctaggcttcagtgtagtggcacagtctcaactcactgcagccttgacctcctaggctcaggtgatccttccacctcagtagttgggactgtaggcacatgccactatgcctggccaattatttttatttttttatttttactagagasgaggtcttgctttgtttcttaggctggtctggaactcctggcctcaagcaatccccccaccaccccctcccaaagtactggtattataagcatgagccaccatgcctggggtatctgtgtcttttccatttatttattgagttactttgtcttttactaattcaatgatctgtttaatcttttattaaattataaaaataataaatacttttaaataagtgaaaaatgtccttcactctttagacccataatcttatctc

SEQ ID NO: 471685 - DNA, 521 bp, Homo sapiens
ccatgtgcccagcctatttgtcacatattttatctttccttatgttagcttattagctttatttctttattgtcctttttttttttttttgagatgaagtctcgctctgtctcctaggcttcagtgtagtggcacagtctcaactcactgcagccttgacctcctaggctcaggtgatccttccacctcagtagttgggactgtaggcacatgccactatgcctggccaattatttttatttttttatttttactagagacgaggtcttgctttgtttcttaggctggtctggaactcctggcctcaagcaatccccccaccaccccctcccaaagtactggtattataagcatgagccaccatgcctggggtatctgtgtcttttccatttatttatwgagttactttgtcttttactaattcaatgatctgtttaatcttttattaaattataaaaataataaatacttttaaataagtgaaaaatgtccttcactctttagacccataatcttatctc

SEQ ID NO: 471686 - DNA, 494 bp, Homo sapiens
ctatatctgcattcctagccctagccctactcctagcccacttatccggggcctttagccctggtgcctctgcctgaacttccttatggagagaggaaaagaaatcttcaagacacctttctccatgctggctcagtactcagaactttttcactccagaccttcccctctccttattcccaggtttgtaaaccacaggagcctttgttcggggatcccttgacagtgagactattcttcaagtgtgatttctgtgctttacattcaatcattggycaatgtcattaagttgttagggacctccactaatcagatacctgcaaagaagtccttgaagttctttcccaaggacacacagctagtaagttgcagaggcacgattggaactaggtgtgtgttatctgtagcctgagggcccttaaccccacagcacctagaatgacatggaacttatctgcgtgtgggggcaggtaaacagatattcattaaaggta

SEQ ID NO: 471687 - DNA, 486 bp, Homo sapiens
cagtaaaccatgattaccagttakggaaccctcttgaaattcaagtcctcagaagccagcctaggaccaactgtgcagacagacagaccctccttcacaggataatataatagtctcagatctgctttgttaatttttgtttgcatagagttttataattggaagatgtctcaaatgctacatatttctgtctaatggactttagtaagagtgttgtatagtatacaacatggaattattctccattataggcaggctgtgataagtgttctaatgtttatacaaaagaactctgtaactttgagcagagtaaagagagtgttaacgatacttttgactgcaaatagtggaaaaatgttgtgtttaactctgaaatatgctttgcctgatattagtatttctattctagctttctcttgactagcgtaagcatggtatatattattccattcttttattttaacctgtttgcatctttgtatttaa

SEQ ID NO: 471688 - DNA, 486 bp, Homo sapiens
cagtaaaccatgattaccagttatggaaccctcttgaaattcaagtcctcagaagccagcctaggaccaactgtgcagacagacagaccctccttcacaggataatataatagtctcagatctgckttgttaatttttgtttgcatagagttttataattggaagatgtctcaaatgctacatatttctgtctaatggactttagtaagagtgttgtatagtatacaacatggaattattctccattataggcaggctgtgataagtgttctaatgtttatacaaaagaactctgtaactttgagcagagtaaagagagtgttaacgatacttttgactgcaaatagtggaaaaatgttgtgtttaactctgaaatatgctttgcctgatattagtatttctattctagctttctcttgactagcgtaagcatggtatatattattccattcttttattttaacctgtttgcatctttgtatttaa

SEQ ID NO: 471689 - DNA, 486 bp, Homo sapiens
cagtaaaccatgattaccagttatggaaccctcttgaaattcaagtcctcagaagccagcctaggaccaactgtgcagacagacagaccctccttcacaggataatataatagtctcagatctgctttgttaatttttgtttgcatagagttttataattggaagatgtctcaaatgctacatatttctgtctaatggactttagtaagagtgttgtatagtatacaacatggaattattctccattataggcaggctgtgataagtgttctaatgtttatacaaaagaactctgtaactttgagcagagtaaagagagtgttaacgatacttttgactgcaaatagtggaaaaatgttgtgtttaactctgaaatatgctttgcctgatattagtatttctaytctagctttctcttgactagcgtaagcatggtatatattattccattcttttattttaacctgtttgcatctttgtatttaa

SEQ ID NO: 471690 - DNA, 560 bp, Homo sapiens
tttttctagatactacatataagtgagattatgcagtatttttctttctgtgtctgccttatttcactgagcacaatgtcctccagatttgcccatgttgttgcaaatggcaggctctgctctcatttttttctaacgaagaagttggagctcagagaagacaagtgacttgctcaaagtcactgcggagacacaatgattattttcttcctgacaagtcaccctggaagaccatgaacttgttctggtgatactgccattgctggaaatatttttggatttccagtttgagaaggttctttggaaagttttctacctctagaaaaccagggatgacatktttaaaacttcatcttttatccaaagtgaccgtcagcttgtacccccagctgacttatcagacagcactggatgaccttagagtgtttctctagatcaaacacattctcaaacagtgaagctaacagacagaacgtgcccagtgagcctggaaacagtttagctccatggtggcatggtgggatcactggggagcttgctgaggggctcatttggagggg

SEQ ID NO: 471691 - DNA, 560 bp, Homo sapiens
tttttctagatactacatataagtgagattatgcagtatttttctttctgtgtctgccttatttcactgagcacaatgtcctccagatttgcccatgttgttgcaaatggcaggctctgctctcatttttttctaacgaagaagttggagctcagagaagacaagtgacttgctcaaagtcactgcggagacacaatgattattttcttcctgacaagtcaccctggaagaccatgaacttgttctggtgatactgccattgctggaaatatttttggatttccagtttgagaaggttctttggaaagttttctacctctagaaaaccagggatgacatgtttaaaacttcatcttttatccaaagtgaccgtcagcttgtacccccagctgacttaycagacagcactggatgaccttagagtgtttctctagatcaaacacattctcaaacagtgaagctaacagacagaacgtgcccagtgagcctggaaacagtttagctccatggtggcatggtgggatcactggggagcttgctgaggggctcatttggagggg

SEQ ID NO: 471692 - DNA, 530 bp, Homo sapiens
aggagtgggatgggaaggaaagcacaataacaagaaaactgaaagatgggaaattagtggtggagcgtgtcatgaaccatgtcgcctgtactcggatctatgaaaaagcacaataaagattccatcatcactttggacaggagttaaccaagagaatgaccaagctcagttcaatgaacaaatctccatactgtttctttcttttttttttcattactgtgttcaattatctttatcacaaacattttacatgcagctatttcaaagtgtgttggattcattaggatcatccctttggttaataaataaatgagtttctgctaaaaaaaaaaaaaaraaaaagaaaaagaaacatttctcaggccgggcacgatggctcacagaccaggcacagtggcacacacctgtaatcccagcacttttgggaggccgaggcgggtggatcccctgaggtcgggagtttgagaccagcccgactaacatggagaaaccctgtctctactaaaaatacaaaattagccgggcatggt

SEQ ID NO: 471693 - DNA, 200 bp, Homo sapiens
gggtttaataaaatggcctaataccatatgttagatgaacagagarccatgaaataaaattatgtataaaaacacatttaggagttaaaaggtggtgttagtttttttgtttttttttctgagactgagtttcactcttgttgcccaggctggagtgcaatggcgtgatgttggctcattgcaacctccacctcccgggt

SEQ ID NO: 471694 - DNA, 611 bp, Homo sapiens
tgggcccaggaattggcattttcaacagcttccaattgtacaccagaatactcaagcttgtgactcccctgctcactgttttcttcatcctttctcacttcctgctgagtacatatgtattttactacttttagagatacttttacaataaaggcagtcttgaaagtgtgtccggaattggtgggttcttggtctcgctgacttcaagaatgaaggcrcggacctgagtgttacagttcttaaaggcggcacgttgggagttgttcgtttctcccggtgggctcgtggtctcgccggcttcagaagtgaagctgcagaccttcgcggtgggtgttacagcccatagaggcaacgagttcggaattgttccttcctcccggtgggctcctggtctcgatagcttacaggaacgaagctgcagaccttagcggtggatgctacagctcataaaggtagtgcagacccaaagaccaagagaacaaaactaccacaacgcagaacagaaccctagcgggttgccgctgctggctcaggtagcctgcttttattcccttatttggccccacccacatcctgctgattggtccattttacagagtgctgattggtcc

SEQ ID NO: 471695 - DNA, 595 bp, Homo sapiens
ttttgggtacttgccaacactgcaaatctttgggaatcaccataacaaaaaatgaccacacacctctggagactctaatagccagagaatatatggtttggatccactcttacccaaagaaggaaattcctttttacctctattctctaagcagtttcaaattctcttgtttacaaaaactaattttattcttcatgcctgcatcaagagtttatgccattccataagtcaagactcagttatccagtgagactagcaaattaaaaaaataaaatattccagccaggcacggtggctcatgcctgtaatcccaacactttggaaggctaaggtgggtggatcacctgaggtcaggagttccagaccagcctggccaacatggtgaaaccctgtctctactaaaaatacaaaaattagctggcagttgtggtgcacgcctgtagtcccagctactcgggaggctgaggcaggagaatcacttgaacccgggaggtggaggttgcagtgagctgagatcgcaccactgcactccagcctgrgcgacagggtgagactccggctcaaaaaataaatattcttttcaagtggattccat

SEQ ID NO: 471696 - DNA, 594 bp, Homo sapiens
atctaccaaaattggaaggtgtttttattatacagtttcatccttttagaaatatagaaagatcctaagtttgggcacagtaagacactcaatatagatctactactaaacaagtaagaccaattacacaattaatgtcctaataccccgagtggagaagtaaaatctacttgttttctgttgacttgaaygccttctcttctttgttgaattaatcaatctatttgactccaatgtcaaattaatcaatgtcactttagaatattaaaatgtacaattatgaattacacatttaattttaaaacacatcattctgatctctgtcttgattgatactagaagattatcttccaaactaaggtggaaaaaatgacagactttagctattggcaatgataggtcatttttttagggaagaggagtaaagagggccacctccataggtcagatatccctttgttctaagaagccaccacccctgtttcttcatatgaaaaaaaccagaggcatccagtggttcccaaaaccttctcaactttacgcttgaggaacccacagatttcaaataatacaactgacctaaaacactcattt

SEQ ID NO: 471697 - DNA, 341 bp, Homo sapiens
tgcttcaggtggggcatggtggctcacgcctgtaatcccagcactttgggaggctgagatgagagaatcacttaagcctaggaggtggaggttgcagtgagcctagatcgtgccactacactccagcctgggcaacagagtgagactccatttcaataaaatwaatcaaatgaatcaaacgtgagcaactctcataacttccaacatttttttcttcttcctgttggtggttctgcctctctggctccattaggatttccctactccatttcagtcatgggagccgagtttctgttcctgaaacacaccaggcctttctggcctctggatttttgtacttg

SEQ ID NO: 471698 - DNA, 523 bp, Homo sapiens
aaatggggataaaaatacctacaacgaagagttgttgcatggctcattagatgctgctatttaaaaagcattcagctattgttacagtaaaacagggagtttccatgattagaaaagccgtttaaagtggagccatttacaggacctgcctttcaggaagcgaatgaagaacctagagaccctgaccaccgcccctgcaaatgccagccacaggkgcaatggggactggctcagaggcccctggggagcaggtattgggctgtccctgcctgtttgaagggaatagtctgtgctgtcctcttcctcaatcttccccgaccctagcagggtctggtggttttcgtcaccaggtgatatcctgcaaacctgagattggggccttccaccagctatgtgacatctatctaaggtgagaggttttaaattgcaaacacatgtctgtgacctagcacaagaagtataacctggcagtagtcctcaagctcaactgcacattcagctcacttgggctgatagagaggca

SEQ ID NO: 471699 - DNA, 523 bp, Homo sapiens
aaatggggataaaaatacctacaacgaagagttgttgcatggctcattagatgctgctatttaaaaagcattcagctattgttacagtaaaacagggagtttccatgattagaaaagccgtttaaagtggagccatttacaggacctgcctttcaggaagcgaatgaagaacctagagaccctgaccaccgcccctgcaaatgccagccacaggtgcaatggggactggctcagaggcccctggggagcaggtattgggctgtccctgcctgtttgaagggaatagtctgtgctgtcctcttcctcaatcttccccgaccctagcagggtctggtggttttcgtcaccaggtgatatcctgcaaacctgagattggggccttccaccagctatgtgrcatctatctaaggtgagaggttttaaattgcaaacacatgtctgtgacctagcacaagaagtataacctggcagtagtcctcaagctcaactgcacattcagctcacttgggctgatagagaggca

SEQ ID NO: 471700 - DNA, 507 bp, Homo sapiens
gttttaattacacatccacctgacaaaagtcaccttaattaggaaggctctcccaaagaaaatgcagctggcagggctgggtcaagctgtcccattgggtgggtctttccgatgcaaagttactggtcttccagaagttctcctgcatcttttccttccctccccactgctccaccatgctgtagttcagctcttcatccytcacacccggacaactcaacctcttccaagtggcctctgcccccagtctatcccccactgttgtagcagatcactttgctgcttttatgcagaaaacttcagtggctctgccgctcccaggaaacagtggagacccctcagccctgcactcaggacctgctcagtgcaaccctcgcttccttgccaaccccaatctccaacactttctaacgctgcttccactcccaggccctgttccctcctggagggcaacagagggtctgtcttcttgcctggagcatgagctgaccaaagggggtcctgaag

SEQ ID NO: 471701 - DNA, 494 bp, Homo sapiens
caggagctagagggagagaaggagggagcagtgaaggtggggcctggaggggacagccagagcctcctacacagtaaggggacactgctgccagcccccattttgggggatgcgccatcctagtctgcctctttaagcatgggggaacacagacatggctcaccaggatcctctaggtccccttggagcagtccccaaagccagragacatgtttctcctgtgtcatcttcttactattgttcctcttcctcctaccaggacctcaccatggatacagacctgacggcagcaaatggcaagaaagtcaaagcccttgaaatctttgcttatgccctgcagtactttaaggagcaggcgctgaaggtaggactgatagttgaggccagccagctgtgtgctaggcggtggcacccgtgccagctccgtgtctcgggctgctgcacctgctggccagggtaggaggcacagcctggagggagagtgtgggctttgg

SEQ ID NO: 471702 - DNA, 376 bp, Homo sapiens
ttcctccttcctccacagcagcactaggctgtggtggccagaacgttcccgaacaagacatsagtccttgcctgtgttccagaattcatactcctccttcccactacctgaggctttggacatttgaatgatggtggcggtgggtgggagggggaggaaaggaatctgagagtggacatgcaggggtcaagccccaaagccatctcagagcagggcacaatgagggtttccaggacgcccctcccaaaggctgggaaatgtctcctctggaatccaagctccagagcctcttgttggtcctcaacttgttattagggcctgaggtgcttcatgatgccaagaaaagaggaacacagcagggcctagaaccagcagg

SEQ ID NO: 471703 - DNA, 408 bp, Homo sapiens
cctgggtcggggccgttcctccttcctccacagcagcactaggctgtggtggccagaacgttcccgaacaagacatcagtccttgcctgtgttccagaattcatactcctccttcccactacctgaggctttggacatttgaatgatggtggcggtgggtgggagggggaggaaaggaatctgagagtggacatgcaggggtcaagccccaaagccatctcagagcagggcacratgagggtttccaggacgcccctcccaaaggctgggaaatgtctcctctggaatccaagctccagagcctcttgttggtcctcaacttgttattagggcctgaggtgcttcatgatgccaagaaaagaggaacacagcagggcctagaaccagcaggactggggcctctctggt

SEQ ID NO: 471704 - DNA, 557 bp, Homo sapiens
ttcgggtatataaagcactccaagtcaaaactgtataaaaagatataaaaactataaaaagacatcataagatgtctcaccatcatccccatccctttcactctgccccctccattttgttagtttctagtgtatggctgttgtgtttgtttttgcaaaactaaacataaatatatatgtatatttccccactcctttttaacacaaaacatagaatactctctttatgtagtcttttgtattttgcttgtttttcttaayatgtcctagaaattgctccatgtctattgatagggcttttcttcatttatttctatgactgcatagaatttcattgagtgaatctaccatattgtattttcaacttgtctatgaatgatcatttatgttgtttccactattttgcaatcacaattcagcctacgataataacctttcacattgttggtttgtatttgtaggtagattcctagatatggggttgctggatcaaagtataaatctataatacatgcagctatggcttccataaaagtagtgccagtggaaaggctttt

SEQ ID NO: 471705 - DNA, 579 bp, Homo sapiens
cccagggccaaggcctcaaatagagggtcccctggccccaccctgctgggggcagttccacccagattctgggaagctggggacctgccctgtatgcatggagagactggatcatatcgcactatacaaacagaagcgatgtatgcagaagaaagaggtctgcagaggctactatcagaatgtgagcagtattatctgggggtaggggtttttcacaagagatttttctttacatttcttgtcagttattattgcttgaaaatgatcgtgtttcaccggtgtcatttgaaaacattttattttaaaatattagctaaaagatcatttggcttctcctagcccatatgtacattgagatagaaaagcaaagccagatccattcagaagcagcaagtttccaccatgcctgagttcaagttgaatactaagttgggctgcctcctaccaacaccagggtatatcttttcatacmctgtcagctctgtcaccatcagcaacaaaacttctttatgcatttaccatgtgtctggagctgtgctagaggtgaccatgatgtagctactgtccttaagatggtgg

SEQ ID NO: 471706 - DNA, 595 bp, Homo sapiens
acttacaattatttgtttgttgtgctagaacatgtgtttctataagtgataaatgaagaatgatggtggtattcagaaaagttgtgttggcacattctcaatttttcccagtatgtttgcactttgatagatcaggatgaacttttttcttttttttcttttcgagacggagtctcgctctgtcgctcaggctggagtgcagcggctcgatctcggctcactgcaagctccgcctcccgggttcatgccagtctcctgcctcagcctcccgagtagctgggactacactcgcccaccaccacgcctggctaatttttgtatttttagtagaggcagggtttcaccgtgttagctaggatggtctcgatctcctgaccttgtgatctgccctcctcggcctcccaaagtgctgggattacaggcatgagccaccgtgctcagcccagaatgcacttttttcatgattraaggctaatatatgaaaaaagcaaaaaaaaaaaaaaaagctgaaaatctgtagatgcaactacctttagtgtaagtcagggctgttttagtattgttccattccccattcccttaagctctgttggca

SEQ ID NO: 471707 - DNA, 482 bp, Homo sapiens
tggtttaagttctgggcaccatccctggatcctcactgtaaaggtacctttttggcttcctcyggccagagaaggtttacttactcacaagcaaaattcgttttaaaacagacattctgccaagagccaaggcacagaaagatgggcaaccaacatggtcaggggcccgttctgcctaagcacaaggaccaactccggggccctccaggggaggccaactggccagccatggaggatgtagcattgactgagtccacaagggcccatgcagcaggaccctggaacagaccatgggaacgggctgcgcagaggagctggcccacgcctgggagcacactgattcctgcctgtccaagctcctcggcttctcccccaggaaacgttgggagggtgggaaccatgttggacctggtctgggaaagccaggagggcccggttccttcatagccaggttcctaggctgtacagaggcccttggaagg

SEQ ID NO: 471708 - DNA, 482 bp, Homo sapiens
tggtttaagttctgggcaccatccctggatcctcactgtaaaggtacctttttggcttcctccggccagagaaggtttacttactcacaagcaaaattcgttttaaaacagacattctgccaagagccaaggcacagaaagatgggcaaccaacatggtcaggggcccgttctgcctaagcacaaggaccaactccggggccctccaggggaggccaactggccagccatggaggatgtagcattgactgagtccacaagggcccatgcagcaggaccctggracagaccatgggaacgggctgcgcagaggagctggcccacgcctgggagcacactgattcctgcctgtccaagctcctcggcttctcccccaggaaacgttgggagggtgggaaccatgttggacctggtctgggaaagccaggagggcccggttccttcatagccaggttcctaggctgtacagaggcccttggaagg

SEQ ID NO: 471709 - DNA, 482 bp, Homo sapiens
tggtttaagttctgggcaccatccctggatcctcactgtaaaggtacctttttggcttcctccggccagagaaggtttacttactcacaagcaaaattcgttttaaaacagacattctgccaagagccaaggcacagaaagatgggcaaccaacatggtcaggggcccgttctgcctaagcacaaggaccaactccggggccctccaggggaggccaactggccagccatggaggatgtagcattgactgagtccacaagggcccatgcagcaggaccctggaacagaccatgggaacgggctgcgcagagragctggcccacgcctgggagcacactgattcctgcctgtccaagctcctcggcttctcccccaggaaacgttgggagggtgggaaccatgttggacctggtctgggaaagccaggagggcccggttccttcatagccaggttcctaggctgtacagaggcccttggaagg

SEQ ID NO: 471710 - DNA, 631 bp, Homo sapiens
tttttgacgggggcagattttacttcttagaaaacataagtgtcttggaaccactgaattatggagatctgagggaggtgttgctgtgcagtctggggtcttcatccgtcatcggcacgttagttagtgtgacttagattatcacagtgagaaatagttaaggctggagggtggaggtgtgggagctctcagtgttctgtgagccaacttcattttccacatgaagaaacagaaacctagaaagtgacagtgagcccgacagcacacctggaggcagtagggccatgccgttcatcggagcaagccaagactggctgtctggatgggatattggggacgggyagaggctaagggtaggagtgttgaggggcagccccctcttgggcctggtggtttgacaggcacccccagaaggaactgtgggaaattggggatggtctacccaaggacaccaaccctttggggagcactcacaaggggggtggtaggtagtgatatcagagacccagcaaggaccttttactgctggagctggtggggtcctgccaggcctgtctcgggggaggctgctgggaatgtgcgtatataactctgaatgtgcatgcatgcgtggggagagaggtagagtgag

SEQ ID NO: 471711 - DNA, 638 bp, Homo sapiens
agcagtgacattctcggccagacgctggtcctcccacacagccaggcggcagcagacccagctcccactaggctggcccggccggcagctttccatgcccaaggacttgggaacaggcaaggastcagtcatcctgtccctcccatctgccctagatccctcagcctaggtcactcaggcatccggaggccatggccttctccctaccacttaggcacagcactggctgggccatgcctccacaatgggcactaattgtcactgagaaaccacagggctgtcagccatgcctcccacagagactgctttttggggggacaggcagatggccagggtggggactggaggaacaagaatggccaggagccattctcttaagccatcacccactctgctgaacagcacccatcgtggcaaaactctggcagcgtggatgtgagcagggtatgccttaccatccttcagagggtcctgggggacatggaccactcagcctccaaccctgccatgcttcccaggcgctatgcctcagtcccactggagctagcagccatgataagcagaggaaccccaaacacagataacacctgaggccacgggccagtacacatggcctacggctgtgatcagagtacatt

SEQ ID NO: 471712 - DNA, 639 bp, Homo sapiens
tttgagcctatgggtgcccttgccaccattctgcatggggtgacgacactggaattctaggcaagacaactctggactgagacttttctatccacatgcctactgactggacttgccagtgggraaactgaggctcaaagaggataggctggcccacatcagagccaggcccaacccctgccgcgctgagtggcttgaggacctaagactcacagcctgccccgggcctctgactgcacaggtgcctggccccagggccacatggcaccaacatccggggatcggcatctagccaggatgggcaggagctgaaacccaagccctggtgggtgggtcaggcggagcacattcccaggcagccagggcagggtcagcaggaggacaggtcctgctttgtggcccaggcccctggtccctgcacaatgggtcccttgcctgggccccctggggcctgcacagacactaagctctgccaggctccagaggcagactctgcccattcttgggcctgggaggtgagccaggttagatgctcagcgctgccctcaggacctgcctgccaaggctcgtgggctgggaagcctccccaggtcagggtcctatcctgggggaatacttgacccccaaatgcatgcagtg

SEQ ID NO: 471713 - DNA, 615 bp, Homo sapiens
gaaagaaagtatccaaccttatcttcagaggaccttgaaaacacacagagtgcactccaggctagctacaagtcttggccaagtttttcctgcaaatgactcaagaagttgcttttaaatacctcagaaagaggccgggcacggtggctcacgcctgtaatcccatcactttgggaggccgaggcaggtggatcatttgaggtcaggagtttgagaccagcctggccaacatggtgaaaccccatctctactaaaaatacaaaaaattggctgggcgtggtggtcggtgcctgtaatccaagctactcgggaggctggggcaggagaatcagttgaacccgggaagtggaggttgcagtgagccaagattgcaccactggcactccaccctgggcgacaaagygagattccgtctcaaaaaaaagaaagaaagagaacatttagatgagatgggaaacagttactgccttcctagtggagagaggagaaaggaagaagggcttttcttacctgtccagagagcggccagagaactcctggctctgggccactggggaaaggtaaagatccatgttttcttccccaagtgtgcatggagatgatgctggcagataa

SEQ ID NO: 471714 - DNA, 641 bp, Homo sapiens
gctcatcatgtagaattaggggtgaaaatattccaggcagaagaaactgtatgcaaaaggcacagaaaagcacacatttgagggaaatggccagaaaccccaggtggctgtgagaagtgaggcggggactagggcaatggcaggagaggaaactggagatgaaaaaggagtcagcatgtccctaagggccccaaataacaggctaagaaggtggagcttagctctgacagcaaagccagattttaagcagggaagtggcacagtcagagctgtggtttacagagattgccagcatggaggccaaggatgcactgggtagctggagaaggggtgatgctgcccgaggggatgagcaaggagagcagagaacagatgggagggaattctaggaggtttaaaccagtgacagtcaggaagagtaaagacggctttaawttttctcacctgtgcccttgttcttggttttcaaaaggttgactgggtttgactccaaatgggaaacttttgggggaagaccaagatggaggcgagtgaatgaagagaaggaaggcgctggggtggagagtctcacagaatagagcagtggttcccaaagtggaacccccaggccagcagcttcagcatcccctggtgtgctcggt

SEQ ID NO: 471715 - DNA, 604 bp, Homo sapiens
ctggcctgtggcagactcactcccttctgcaagggggtgaagggtgtgaggctgagctcttccttccccagtagcactcaagccagggcaggctttagctatactggttttctagaatacctgtagatacttttaagggcaaggtcccttaaaagtatttttacacattcttcgtgtgtcgcagttagtaatcaaaacccttaaaggacaggaatgaggagaaagkagtcatttttgctaaattcagttaccatgaatagcccttgaaggtcgcggtgtcagctaggaggcaattctcagagagtgagagagagagaggaggagggggcccgcaccctgcagcagcagcaggaatgggagggacaggacagacatggccaagtgcccctcaggagctgccaaatgatgagatgttgcaggaggaagagaacaaaaccagttggaggctgtgggaagacttgggtatctttaactgagcaagtgtgtgggaggaaatgttggttttggcagatagtgatgcatgtagcactggatgtgatatggctgaggtgttgaagtgaaggtgtctagcaggtcgttagatattccccactgcagctcagag

SEQ ID NO: 471716 - DNA, 546 bp, Homo sapiens
ctgcaaacagatttctagacttctgatggaggtgatctgagatgagcagcctctaaaagcagcctctgcgagcctctaagagcagccgggacctgctggagaacagaacatggcctaggagcgcaacagccaagtgttcagcaccacggacagcttcgctggcctattgctggggaggccagaggtggggaggctggttgtccagcaagacagagtgccatgggagagagaaaaaaacatgggaaagatctcagagaccatctagtccagcctcctcgatttggatgggaggagacccaggacaagagagaagtgacttgtccaaggtcacacaacaagtcagtagagagccagagatgggagctgacarcctacttcctcacacctcttcaaggccctcagatacctggtgtccatgacttattagtggcacagccagaccttgattaagggctccaaaattaaaattacctgtccttggaaatgacaagaaaagaaaaaaggagaaatcaaagaaatggaaagagcacccggccctgatgggaa

SEQ ID NO: 471717 - DNA, 594 bp, Homo sapiens
cataaataaagtgtgaaattcatgtacaatgttatgaacttatttcagtgattttaaaaatcttacgtgataaaacaccctatgtgatagcatttgtattatacttcagacggaacagttgcttatctatctttatgctttaagattctaagtaaagtttggtaagcaaagccttctgcagtttaagaaggagtttaaaatcctttggcttaacatcattaatttactcttattgcatagatttaaaacacatcattagaaatattttggggcaacggaattttctayatgaggcctctctgacaatgtgaattagatggatgcctgctataaatgcaggtaaagctacatggccaagtttttggctttcatgtggtttatgaggcagttttgtttggcactgcactgaggaaactctgctgacagtgatagtgatgctgataagactaaggcacagattttaactgaattaaaaccactgggaacatgataagccttgactagcacagcgctaaacgtggccttgaatgttcagaaactttacaaggctttaatatttaggggaaaagtttgatattcagttccagtggaaat

SEQ ID NO: 471718 - DNA, 594 bp, Homo sapiens
cataaataaagtgtgaaattcatgtacaatgttatgaacttatttcagtgattttaaaaatcttacgtgataaaacaccctatgtgatagcatttgtattatacttcagacggaacagttgcttatctatctttatgctttaagattctaagtaaagtttggtaagcaaagccttctgcagtttaagaaggagtttaaaatcctttggcttaacatcattaatttactcttattgcatagatttaaaacacatcattagaaatattttggggcaacggaattttctacatgaggcctctctgacaawgtgaattagatggatgcctgctataaatgcaggtaaagctacatggccaagtttttggctttcatgtggtttatgaggcagttttgtttggcactgcactgaggaaactctgctgacagtgatagtgatgctgataagactaaggcacagattttaactgaattaaaaccactgggaacatgataagccttgactagcacagcgctaaacgtggccttgaatgttcagaaactttacaaggctttaatatttaggggaaaagtttgatattcagttccagtggaaat

SEQ ID NO: 471719 - DNA, 516 bp, Homo sapiens
cacccttattctaagctattttaaatgagtgacatcatgtgatgatgggtcagcacaaagtaacccctctccttaaaaagcaactcaaagtacaagaaaccttgacttttatcaattctatctttatagtatatgaaggagaatgttttgtatgaaatgtgagtaatagtgatacatgcttgtgtcacgtaaaacaagagataggcatctaattcatgattaactaaatttttttttcagagacaagttctcactatgttgcccaggctggtctcaaattcctggactcaagtaatcctcctcccaccttggcctcccaaagtgctgggattacaggtgtaagccactgcacccagtgaagttaactacatttatgtgcaagtataattagaaagaattcttgaaatgaatacactgagagaggtttctgcttgatctagatytgcgtctcttcttatcttgcacttgtacttgaagctggagcagttttctttatagaaatcacatactccttac

SEQ ID NO: 471720 - DNA, 537 bp, Homo sapiens
agttttagcatctaattttaccttctgtctgattcttttttatgttcttatattttgttcttttttctttccatcccactttgttgttgctgttgtttgcagatgcctacagtgggtctcagggctccaagtgtaagtgtctatgaaaccatatataattcacaattatctttgttcataattggtttcctttacaaaatttttaaggcaataaaagacagaaagattactacaagtgcttaagcactttggacttcacttttctcattatcttaaatggagaagcatttaagatatttataaactcagaatactatagaatatgtattacatcactttatggaatacatatttacttaagaagttgattttacttcaaaatcgagtctactatatttttcttaacttcactcaaaaatctgtagctatttatcttggaaataatttaacctcaagacacaataaaaaatactyttcaggaaatataagttttttataatacccgcaataagccttaagtagtgacacaaacagttt

SEQ ID NO: 471721 - DNA, 616 bp, Homo sapiens
ttgctatttcccaggaggaaggaacagtggaaatgacaaaaggaaatctgagaatggagataataaaatgatggttgcatttgaggctgttatcagtacttctctcatgccaacatataaaggagaagtaaagattttaatattatgagaactgtaagtatccataattcagatttcagcagtctggtagtacggtaagtcgcatcttggtgggatccacaaaaacttttgcaaaagtgtttaattgtatgatagcatttcaaaatcatttcccttgatcagataaggaccttcatgtgaatctattttatcaattaatggtcagtttcatgtagctaggttacatagtataaattacttttaaaacccccttccaaagaattcatgttttaataaactatagtraatgacactgtgtctaaaacagtgtagcaactagttctgtgattggcacagttaatataccattaatgtctcactgaaagctaacttctgtttttcagtgaacctgcctacacacaaatactctactgaaatgtggttgtgatgtgaatattttacattaataggattaatgtattaatcaactttccacaattgctatatcacctacatt

SEQ ID NO: 471722 - DNA, 616 bp, Homo sapiens
ttgctatttcccaggaggaaggaacagtggaaatgacaaaaggaaatctgagaatggagataataaaatgatggttgcatttgaggctgttatcagtacttctctcatgccaacatataaaggagaagtaaagattttaatattatgagaactgtaagtatccataattcagatttcagcagtctggtagtacggtaagtcgcatcttggtgggatccacaaaaacttttgcaaaagtgtttaattgtatgatagcatttcaaaatcatttcccttgatcagataaggaccttcatgtgaatctattttatcaattaatggtcagtttcatgtagctaggttacatagtataaattacttttaaaacccccttccaaagaattcatgttttaataaactatagtgaatgacactgtgtctaaaacagtgtagcaactagttctgtgattggcacagttaatataccattaatgtctcactgaaagctaacttctgtttttcagtgaacctgcctacacacaaataytctactgaaatgtggttgtgatgtgaatattttacattaataggattaatgtattaatcaactttccacaattgctatatcacctacatt

SEQ ID NO: 471723 - DNA, 609 bp, Homo sapiens
tgtttaattgtatgatagcatttcaaaatcatttcccttgatcagataaggaccttcatgtgaatctattttatcaattaatggtcagtttcatgtagctaggttacatagtataaattacttttaaaacccccttccaaagaattcatgttttaataaactatagtgaatgacactgtgtctaaaacagtgtagcaactagttctgtgattggcacagttaatataccattaatgtctcactgaaagctaacttctgtttttcagtgaacctgcctacacacaaatacyctactgaaatgtggttgtgatgtgaatattttacattaataggattaatgtattaatcaactttccacaattgctatatcacctacattttaaacgtgtttttatcttctgcttttcttacctcattttcttctaaagagaagaattgtcttgcttcctcttatctctttattgctgttaatcttgaggacatataaaaggattaccttattcacaggggggaaaaaaggtcattagaaatcctcactcctttattttctccttcctgcctttcactgatttcatggaagaaatcttagactgtttttccattgctagt

SEQ ID NO: 471724 - DNA, 621 bp, Homo sapiens
aaatctcctcctttcaaggtagcattcaagatttcttttatattttattatatgttgctaaagaagatagtacagataaaaactgaattgcaacattcaaggaatattcatatattcagagttaaaaaatatgcttagctatttatacacacagatgtttaagagatgaattacatgttctgccttcaaacttagaaataaaaattaagacaaaaaaaagaaaaaagaaaggaaaaagctgtattatctaatttaccaagacttttgcttgttctgatatttgttttcctcttttgttagtcatcagaatcaagttctaaagtctttttcttattaaattagakaggtgagcttcactcaatttgagagaaaagtttgaaacttacattagcttcaggctaatctgttaaatgactaaggccatactgaaagatgtaatacatcccctgtctatgactatggctatggtttataaccatggactatggatgtcatttaggctttgttcagcttatcattttaacctttgaaaatattcctatcagaaactaaaggtgaaatgtaaaataattttttgagcaaagcccactctttaaatatgagtcattcctcaaatgccag

SEQ ID NO: 471725 - DNA, 621 bp, Homo sapiens
aaatctcctcctttcaaggtagcattcaagatttcttttatattttattatatgttgctaaagaagatagtacagataaaaactgaattgcaacattcaaggaatattcatatattcagagttaaaaaatatgcttagctatttatacacacagatgtttaagagatgaattacatgttctgccttcaaacttagaaataaaaattaagacaaaaaaaagaaaaaagaaaggaaaaagctgtattatctaatttaccaagacttttgcttgttctgatatttgttttcctcttttgttagtcatcagaatcaagttctaaagtctttttcttattaaattagataggtgagcttcactcaatttgagagaaaagtttgaaacttacattagcttcaggctaatctgttaaatgactaaggccatactgaaagatgtaatacatcccctgtctatgactatggctatggtytataaccatggactatggatgtcatttaggctttgttcagcttatcattttaacctttgaaaatattcctatcagaaactaaaggtgaaatgtaaaataattttttgagcaaagcccactctttaaatatgagtcattcctcaaatgccag

SEQ ID NO: 471726 - DNA, 595 bp, Homo sapiens
agcttctcccagacaatgccccgggccttttactcattctttcctcattcctttccagagaaggaaggaatttcaatacaattctgtgccaacatgaatgctgaaatcatgcaaactgtggtggtcctgttggcttccatcctctgcctgtcacctgttttcaaggtggacaggtgcagactattatttcctctgtgggactaggggaaatgggtgtggtgaactgcacccagccatttttgtgytttttcgatggtcaaagtggaattaaaaataatgtcgctcccagcactttgggaggccgaggcaggtggatcatctgaggtcgggagtttgagaccagcctgaccaacatgaagaaaccccatctctactaaaaatacaaaattagctgggcgtggtgatatatgcctgtagtgccagctactcgggaggctgaggcaggagaatcacttgaacccgggaagcagaggttgtggtgagccgagattgcgccattgcactccagcctgggcaacaagagtgaaactctgtctcaaaaaaaaaaagtatctctcattaaccctgcaataacataatcctggaagccactgag

SEQ ID NO: 471727 - DNA, 531 bp, Homo sapiens
tgcttctctgaacattactgtacaagtctacgtgtggacatgtgttttcatttttcttgggcatatacctaggggtggaattgcttgctaggtcatatggtaaactttcatttaacattttaagaaatcaccaaactgttatattcctaccagcaatgtatgaggggcctatttactctagatgtttcctatragaggaatatgagagaatttgagatcaaacatgggctgtgggaagaaacgtattcaaaatactgttcattaaataatttcacacaatagggtgggaacaagttgtttctttacactagtttcaatcttggctgcatattagaatcatctggggagctttaacaagttgtgatgtccaagccatgtctcagacaattacaataaagatgctgtgagggtgggtgggcaggtattagggttttgaaactccccaggtgatttcagtgtgcaggctgagacgctcttgtgtgaaaaaaaaaaagtttgtcaagtcattcaccgagataatgagctaaatag

SEQ ID NO: 471728 - DNA, 482 bp, Homo sapiens
gaagtgggagctgaagacaaataggactgagggatggggctgtagggaccctgaactgttgaacaactcacactgctaggagatgagtacatcctggcagagaagagagtgcagtttgtccataggagactcatcattgagatctaggaattaatgatgaaactggaagagggtaaagagaaaacaactgaagatactgtcaaagcaaatcctatggaagttaatayagctgatagggagcacctactatgtctcaggcactggactaagtaagcacttgatacatttgtttaatttaatccttgtagcaagcctatgaactaagaaaaatcaaggtttcaaaagcatgcataatttgcacaagatgacacagctagaaagtagtagagcatggatttgaacccaggtctatccgatttcagagactaagcactgggaggagatacctaaggcaaaagaaataggtataacaggaagtgagg

SEQ ID NO: 471729 - DNA, 443 bp, Homo sapiens
ggcgtctcagcacacaagcgggcccctgaacttcctaagcgcatactgtcttctctcaaccttaggccccacctcaacatcaaatgcttggcagagcctggggatcggtgtacacagcctgctgtcagtcaaatgctagcgtcactgctcgggaacgcttctctcctcttccccgagagctgcagaggcattygtcagtggctccctgggcagcccagcactgaggagaaaacactcctgtacacgggcaccaaacatcaaaaccacagtcctggaagttctgtgtcaaggactacccctttaggaggggccctgcatgtggctcttttagccagaaagggtctggcttcaagctcacaattcaagaaagtcactgagaatcaggaaagaggcttagaagggagcaaaatgatccaataactggaaattaggccccaagataa

SEQ ID NO: 471730 - DNA, 571 bp, Homo sapiens
tgaaaacacagattgctggggcctacctctagagtctctgattcagtaggcctggggtggggccaagaatttacagttctaacaccttctcaggtgatgctgattcagagatcacactttgagaaccgctgctccagaagaattacctacaagaaactggggagtggaggctctggcaagaggagtcaatgtggttacaactctccagtgcttggcctcagtggattctctttggagaagaaaaagaaaggagccagttttcctttttccacccaagacattagtctgagacataacacactacataayaaaattaagctcctctaagggaacaaaacaagaatctcattcatttgcataatttataaaaactgtttctgtgaggagacatcatgcctcactcaccctccagagcttccccaggaggtaaatctaagtgtatttcatttaggaggaagcaatttaggtaattggttgcagcccccctcttcaaccgtatctgcacactccccttcacaaacctccactgcaagtcagccttctttcactttgaccccaccaaggctggaca

SEQ ID NO: 471731 - DNA, 641 bp, Homo sapiens
ctcccaaggtgttacaaatccagcagccacttgttcctgctcattcattctcgttcctctccaccccccacacaaaatctggcaaccaggcaggaacacagttccagctctgagtcactgccccactgtggccaaggggagcagtggctagaggtaatcaaccaggcaagcacttcatgtctctagaatccaattcttccgttctttgagaccgtggggttggctgcccctctagaaccaggacataaagaaacacccctatctacagctctggagtcagaacaaattgctcattcaggtttgccctaccatgctgagctgaaatcagccccaaaacagagcctatctttggtgaagaaacaatggctccttatcaatatttcataccagtcagggcagggaaaggtttgagtggttacaggtcagcaaacccactccccctggtaacaatgattctttcmtcaatgcttgggatggctaaggttctctcagcaccgatttaaccatgtggcactcactcccagaacaggtctgaaaacgagaagggcagaggggttaaaaagagaaaccaggcaccaaagtgaaagatcaacactgtggctcttttcattgcaagctacgtagttctacaagtcacagtg

SEQ ID NO: 471732 - DNA, 539 bp, Homo sapiens
accttcttttcatgaagaagatctgttttaagaaataaagatttcttgctggccatggtagctcatgcctgtaatcccaatactttgggaggccatggcaggtggatcatttgaggtcaggagttcaagaccagcctggccaacatagtgaaaccctgaatacaaaaattatccaggtgtggtggcacatgcctgtaatctcagctactcaggaggctgaggaaggagactcacttgaaatcaggtggcagaggttgcagcgagccaagatcawgccactgcactccagcctgggcgacagagtgagactccatctcaaaaaaaaaaaaaaaattcatatgtaaaagtaaaaactaaagcaagatgccaggtgtggtggctcatgcctctaatcccagcactttgggaggctgaggtgggcggatcacttgaggtcaggaatttgagactagcctggccaaaacagtgaaacctcatctctactaaaaaaaatatatatatattagctgggagtggtggcggagcctgtaatcccagct

SEQ ID NO: 471733 - DNA, 626 bp, Homo sapiens
ctgttcgggagactgaggcaggaggaaaaaaaagaactaaaggaagatgacaaaaattggcccagaattttccctgtcacaaaaatcttaaaaaaaaaaaattattccaacagtggactcactcttaaccttctctaactgagcttttgaaaggtaaaccccggccaggcacagtggctcacatctgtaatcccagcactttgggaggccgaggcgggcggatcacttgaggtcaggagttcgagaccagcctggccagcatggtaaaaccccatctctactaaaaatacaaaaaaaattagccaggtgtggtggcgcatgcctgtagtcccagccaccaaggaggcttaggcaagagaatggcttgaaaccaggaggcagaggttgcagtgagctgagatcgygccactgcaccactccagcctggcaacagagcaagactccatcggaaaaaaaaaaaaaagaaagaaagaaaaggtaaaccccaaaccagccaacagactgtttcttccacagagtgaaaaatccagaaagataccaccaccaattctatccctatagaacccaaaggaagagtggtaccagtggatgcagccctaatggccacccaaagaggccactggcag

SEQ ID NO: 471734 - DNA, 243 bp, Homo sapiens
cacaggaagatactgcatctcatggactaatggactttcaagtcagcttgkgggggtcacatctgttttatgcaagcagacaaggtgaattattgaactaacagctttctcaggtatgggctctgcagtgtgattaattatgtataatgtgcactcaggcaaaaaatgaggtgtttaaaggctgctggagtcattccaccttcaaacaaggaagagcaagctgaagacttttgtagtgtctta

SEQ ID NO: 471735 - DNA, 559 bp, Homo sapiens
cctagggtgttgaccagtgtctttcccctctgggcatcagaactctagcatctccctagctctgcgcaacctcagaaatccctgttagcttttctaccaggagytgctctctgctaggcctctagagttttgctcagtacctgtgctgtataggattctgcgtgggatagggaccccctccctaagccttctagggatccttctcagaatccctcttctctcagacacatgatccacaatctcatacactttagtggtccagtgtctgtttccttccccacgccgtatttggctgtacactgagtctccatttccatttggaaaatgccgcaggagaaacccaggatgcatgtggcgctaacctcccatacgtcccttctagccaaaatcacagtgttgtgcaggctgctccccagcacctgaaattgtggcaacacacactttatccagcttcatagttgtttaccacaataccagcaaaagtctgttattacatacattttaaagtacggtgttctctcggccgggcgcggtggctcacgcctgtaatcccagcact

SEQ ID NO: 471736 - DNA, 559 bp, Homo sapiens
cctagggtgttgaccagtgtctttcccctctgggcatcagaactctagcatctccctagctctgcgcaacctcagaaatccctgttagcttttctaccaggagctgctctctgctaggcctctagagttttgctcagtacctgtgctgtataggattctgcgtgggatagggaccccctccctaagccttctagggatccttctcagaatccctcttctctcagacacatgatccacaatctcatacactttagtggtccagtgtctgtttccttccccacgccrtatttggctgtacactgagtctccatttccatttggaaaatgccgcaggagaaacccaggatgcatgtggcgctaacctcccatacgtcccttctagccaaaatcacagtgttgtgcaggctgctccccagcacctgaaattgtggcaacacacactttatccagcttcatagttgtttaccacaataccagcaaaagtctgttattacatacattttaaagtacggtgttctctcggccgggcgcggtggctcacgcctgtaatcccagcact

SEQ ID NO: 471737 - DNA, 601 bp, Homo sapiens
actaaaatgtgggtattgctataagacttcagtaaatgagaatagccccatgagcagcaagcacttttggttttctgcaaaatattaaatgtgtaatctacagaatttgagaggaggtaatctactaagagttcatcccattccactgcacatcagtcatggccaggcagaccgactctgcctggrcaaatcaagggagggaaagcttaggattctcagatgctggttgtaatggtgattattacaaatgcaaggtagaatagaaattgcaactgctattatggcgaccataaggtaacaattgaatttatgttaataaatcaatcaggaaagagtttgtcaaacagaacaatatgggttttgttgagaaagtgatttggaaagggagtgaggaaggtatgaggtcgggaagtgctttaacatgacaagagatgcaattaaattttccaagccctaaaacaagccctgcctccaggttctacaaaggagccaacccactctaaagaccctaaattcctgaaccagaattattattcctgcagggaaaattgcaaggagaattttaagagttagtcaaggtggctgactcaactctatagtt

SEQ ID NO: 471738 - DNA, 584 bp, Homo sapiens
agtaatcaaatcaattccatagatttattgcaagataaactaagagtgattgtgtagaccactcagtacagtggctggcacatagcaagtactgaacaagtgacagtatttgttccttttatgtattaatataagtcctctaatagaagaatatagaaactacactacactgacgacaccaagggggaggatgaatttttttttttttttgagatggagtctcactctgttgcccaggctggagcacagtggtgcgatctcagctcactgcaacctccacctcccgggttcacatgattcttctgcctcagcctcctgagtagctgggattacaggcatctgccactacrcgtggttaatattttgtatttttagtagagatggggtttcactatgttggccaggctggtctcaaactcctgacctcctgattcacctgcctcggcctcccaaagtgctgggattacaggcgtgagccaccgcacagagcttgcactatagtttaaaattatgttcccaaatatttactagctcttctacactgtctttcccttgccctcactagatggcaaggggcaggaagg

SEQ ID NO: 471739 - DNA, 565 bp, Homo sapiens
ggaaactgcccaacaggaaatggaggcctgttttgatttaatttagtcacccagaacctgaattctaattgatcttcactaaatcttgactggacccatgaagaatttttaagatggtgctaaattctcttctgtcattaagatacagtgcataaagaagaatgtttargccatgtgtcatggaggaggctgggatcggtttgataagggattgtaggatttggatttgttgggaaagaagaagggcatctggtttggggaaataaaggtctgagatgccatcaagcaaacacgtctggcataggaataggatgtggttggctgacttctgcacaggaaagtttctgcaggtgtaaagagagttggacaccaagaggagacatcattgtctctgtgttccgtgcttgggtaccatgtccatagaatgcagtgtgaatgaggcttcatggagatgttaaattggcttcctgtttctagggtagacacccttacttctctactccctctgtgttagttagaattctccagaaaagcagatatagggtatatatccaggaagagattc

SEQ ID NO: 471740 - DNA, 510 bp, Homo sapiens
aagtgagtgttgtgggtatggagtggacacaagaagggagggaggctgcagagatggtgaggccagatcagagagggcttttatacctggtaaagagggatgttaaggggagtgggggtgacygcaggtccccatatgctctgggtaaggccacacatacacaccccttcagcaggattgcagagcccctaattagctttgtgatttttaagagccacttccccttctggccaccacttttcttatctgtaagatacggaagttggactaatatgacatttaaacttccttccaattctaaccatctctggatctggataagccttcgctcctttttgtgtaatgaatgcagcgagtcctgttgcctactgaattcgtccatgtggcaggctcctgggctttctcactattccctcctattgatatggttatggttagtcttccaaacactgaatccacggcatcttctgcatctccttccttcacctctgaatgtcgtggatcgcctct

SEQ ID NO: 471741 - DNA, 665 bp, Homo sapiens
ctcatgacaataccttgatggtaatatcacagatgaggaaactgaggcacagagaaagttaaataacttgactgaggttgtagagttagtgagagagttaggattcaaacccagacagtctggctccagaccccacatgctatattgcccattgaagcttggaaataaagttggctgcctgytaggctgtcattttgtcagcatggaaccagaggacatggtcaccagctgccagaacacccaggatagacccctctgctgaattgtggctgctgctgaacccaggcaatgcctaaccctgttggaacatctcctgccatccctgcctggtgggagacagtccttctgtgcgagtcttgaaagcttattcaggtgctgtcactgaatgacaggtgcacaagcttgttagccttgtaatgaatatcccagcctcctctggtgggagccagcctgcctaaggatgatggggaatggagagaggcagaggaacctccttcaaaaggcttcagtcattgtcagaaagtttaagagaacacacctgtgctggcggctagcatgcagatgccagctggctgttgggttgtcactaaggagagggaatgagagaaaagaacatgggatttggattcagagtttgaatctcagctcagccactttctagcttt

SEQ ID NO: 471742 - DNA, 349 bp, Homo sapiens
ggatgctggcccttcagtgtcactctggccccaccatggacaaacaaytcttctctttataccctataacagggccaagtagagaccagatgatctttagtaaaggctgtggcgagtcttgactctagacggtggaaagcagggtggagagcaagtcactttgtggttttgaacctcagttttctcatctgtacaagggagataagaatgcccagattgtaagagcatgaagatttaatactcaggcaaagcgctggtatgcgggtgagcacccgatgcctttgtgtccttatgcctgtgcgaaatcctggggataagaggtagcagtcagggcatttccacatttgaa

SEQ ID NO: 471743 - DNA, 610 bp, Homo sapiens
tctgcctcatgctccagagctgggattaacatagggggctgaggccccctctgtgctccagccctgctcagtggccagggagggctgttagacacyggtgatggtgatgcttgaacccgctttgcagacaagttatggttgggccctgaatggggaggacactcagagaacatttagtccagacccatctcacaggagggcagagacccaggaaagttcacactgtgactggaggtgcccagggctgctccagactctgagatctgagggagggtcacctcttccgcctcctcgcacccactcctcctctcagccaggcccccaagactccatccctccagtcaggctaaatgcatccctgctcctaatcctcagcttgtttttgacatcccagccatctggtgggcccattctagtacctctcctcacaccatttccacccttctccaggctacctctctgatgaactgcctggcttctgcatttgctccatttcctcttctcaaattacatgcataggttactttgcacttatttgtatatttccctgaatgcctgacatcatttcttcatggtatgactagtctcccccatcagactgggtattctt

SEQ ID NO: 471744 - DNA, 610 bp, Homo sapiens
tctgcctcatgctccagagctgggattaacatagggggctgaggccccctctgtgctccagccctgctcagtggccagggagggctgttagacactggtgatggtgatgcttgarcccgctttgcagacaagttatggttgggccctgaatggggaggacactcagagaacatttagtccagacccatctcacaggagggcagagacccaggaaagttcacactgtgactggaggtgcccagggctgctccagactctgagatctgagggagggtcacctcttccgcctcctcgcacccactcctcctctcagccaggcccccaagactccatccctccagtcaggctaaatgcatccctgctcctaatcctcagcttgtttttgacatcccagccatctggtgggcccattctagtacctctcctcacaccatttccacccttctccaggctacctctctgatgaactgcctggcttctgcatttgctccatttcctcttctcaaattacatgcataggttactttgcacttatttgtatatttccctgaatgcctgacatcatttcttcatggtatgactagtctcccccatcagactgggtattctt

SEQ ID NO: 471745 - DNA, 610 bp, Homo sapiens
tctgcctcatgctccagagctgggattaacatagggggctgaggccccctctgtgctccagccctgctcagtggccagggagggctgttagacactggtgatggtgatgcttgaacccgctttgcagacaagttatggttgggccctgaatggggaggacactcagagaacatttagtccagacccatctcacaggagggcagagacccaggaaagttcacactgtgactggaggtgcccagggctgctccagactctgagatctgagggagggtcacctcttccgcctcctcgcacccactcctcctctcagccaggcccccaagactccatccctccagtcaggctaaatrcatccctgctcctaatcctcagcttgtttttgacatcccagccatctggtgggcccattctagtacctctcctcacaccatttccacccttctccaggctacctctctgatgaactgcctggcttctgcatttgctccatttcctcttctcaaattacatgcataggttactttgcacttatttgtatatttccctgaatgcctgacatcatttcttcatggtatgactagtctcccccatcagactgggtattctt

SEQ ID NO: 471746 - DNA, 610 bp, Homo sapiens
tctgcctcatgctccagagctgggattaacatagggggctgaggccccctctgtgctccagccctgctcagtggccagggagggctgttagacactggtgatggtgatgcttgaacccgctttgcagacaagttatggttgggccctgaatggggaggacactcagagaacatttagtccagacccatctcacaggagggcagagacccaggaaagttcacactgtgactggaggtgcccagggctgctccagactctgagatctgagggagggtcacctcttccgcctcctcgcacccactcctcctctcagccaggcccccaagactccatccctccagtcaggctaaatgcatccctgctcctaatcctcagcttgtttttgacatcccagccatctggtgggcccattctagtacctctcctcacaccatttccacccttctccaggctacctctctgatgaactgcctggcttctgcatttgctccatttcctcttctcaaattacatgcataggttactttgcacttatttgtatatttccctgaatgcctgacatcatttcttcatgrtatgactagtctcccccatcagactgggtattctt

SEQ ID NO: 471747 - DNA, 582 bp, Homo sapiens
ttaatgcccaacattatttgggcagctcaactctctgcaaaatgggttaccttctgtactggctgcttacagatctttttactcccatttccctagaatctctacctttagttcctcttcaggcatcacacttcctccatcccccaccccgtggccagccctgactctagctgtcccctttctcttcctccctctggcccacgtggacagtaagctaggaccaccctgggcacccagccaagggaggatttggacttgagccatgmaggctgggctccgctgtcccctccctctcttttcctccccacccccatacagcttcatttaattccagggcaaagcacttgcctaatgcgagccagagaaagagagcaagagccagagacggaaatacagagacgaagagagcaagagccagagacggaaatacagagacgaagagagcaaggacactttctttgccacagcccagcagccaaacggcagcgaactctgatgtggttacaagctcctcaacttcttgtttgttggccaacttggctgccaggtacaagtgggagaggaagagccgggggcccaact

SEQ ID NO: 471748 - DNA, 582 bp, Homo sapiens
ttaatgcccaacattatttgggcagctcaactctctgcaaaatgggttaccttctgtactggctgcttacagatctttttactcccatttccctagaatctctacctttagttcctcttcaggcatcacacttcctccatcccccaccccgtggccagccctgactctagctgtcccctttctcttcctccctctggcccacgtggacagtaagctaggaccaccctgggcacccagccaagggaggatttggacttgagccatgcaggctgggctccgctgtsccctccctctcttttcctccccacccccatacagcttcatttaattccagggcaaagcacttgcctaatgcgagccagagaaagagagcaagagccagagacggaaatacagagacgaagagagcaagagccagagacggaaatacagagacgaagagagcaaggacactttctttgccacagcccagcagccaaacggcagcgaactctgatgtggttacaagctcctcaacttcttgtttgttggccaacttggctgccaggtacaagtgggagaggaagagccgggggcccaact

SEQ ID NO: 471749 - DNA, 608 bp, Homo sapiens
tttcttcaggcgagtacaaattttgcaatttttctttcattgttttgacaatggatttgatwtgtatatgtcagcctcatataatatccctatttagagcaattctctgatccggaggtaggactgaggaggaggaagtgtcaagcctgtcttctgacccagaaaccacttcttgtttccacagaaactaccttccccccctatctcttcctgacttgggggagggacagtgcagaaatgtctgttgggttcctaatctgtgggctatcatatgtgctcattaaactttattgctgtgtgtcatctggaatctggccccatgttgatgttttcattgtagacaataaaaactatgttgaattattaagtgatagttaatgctggctttaaaaaatgagattggagaagagaaaaattgactttaagttgcaaatatatttaagtcactgaagtggatccgctctcctcaccctacactatgccacggtgcatacagttttagcaattgttgcagagtggaatggtgatctcacttagcaaataaatatttagtgagcacctgcttatgtcaggcagtgctctggagactagaaagacaaaacaaacca

SEQ ID NO: 471750 - DNA, 608 bp, Homo sapiens
tttcttcaggcgagtacaaattttgcaatttttctttcattgttttgacaatggatttgatttgtatatgtcagcctcayataatatccctatttagagcaattctctgatccggaggtaggactgaggaggaggaagtgtcaagcctgtcttctgacccagaaaccacttcttgtttccacagaaactaccttccccccctatctcttcctgacttgggggagggacagtgcagaaatgtctgttgggttcctaatctgtgggctatcatatgtgctcattaaactttattgctgtgtgtcatctggaatctggccccatgttgatgttttcattgtagacaataaaaactatgttgaattattaagtgatagttaatgctggctttaaaaaatgagattggagaagagaaaaattgactttaagttgcaaatatatttaagtcactgaagtggatccgctctcctcaccctacactatgccacggtgcatacagttttagcaattgttgcagagtggaatggtgatctcacttagcaaataaatatttagtgagcacctgcttatgtcaggcagtgctctggagactagaaagacaaaacaaacca

SEQ ID NO: 471751 - DNA, 417 bp, Homo sapiens
gtccaaaagtctatcttcacctctgacttatggatcctgaagctgcccccctttcaagtaaggcgggggtggggcaggactagaccctctcttrtatctgtctctcttactctattattttaccgtcatgtgcataggaccactccagtgtccctctaaagggattctacataaggagaactgcacaactatgtgggaataggggtccagtccatgggaagtaacagtgagtccactcctcttgtgtctcttctttccctgtaagagctaaactgtgctttttggtctcctggtttgagtttcagtcccaagctgaagttgaccactgggtatgtccatcaccatctacccctcagacaaaggtagatgggtggattgtgtggggctcagtagagggggattggggcctggacagag

SEQ ID NO: 471752 - DNA, 417 bp, Homo sapiens
gtccaaaagtctatcttcacctctgacttatggatcctgaagctgcccccctttcaagtaaggcgggggtggggcaggactagaccctctcttatatctgtctctcttactctattattttaccgtcatgtgcataggaccactccagtgtccctctaaagggattctacataaggagaactgcacaactatgtgggaataggggtccagtccatgggaagtaacagtgagtccactcctcttgtgyctcttctttccctgtaagagctaaactgtgctttttggtctcctggtttgagtttcagtcccaagctgaagttgaccactgggtatgtccatcaccatctacccctcagacaaaggtagatgggtggattgtgtggggctcagtagagggggattggggcctggacagag

SEQ ID NO: 471753 - DNA, 503 bp, Homo sapiens
tgccatcccctgtcttatcctctgtttgatggtaggccacctaaaatctttcattaaatctcatagacactttactgagctctaaatgaattgtacctagtggtttgattaaaataactggattcagaattggggttcagattttgatcattttcaccacaaagcatatcatgatgaaaatggctttgtttgggtacagatttggggccactctggccatacttgccttcctcccccttgtgtctyctggaactggagtgtgattggttccacatggggatctttgcatgtgaagtgggggcatgctaactagtgacagggcctcttgaggggctgggtaggggcagaggggcgtggtctgtctgtttggcattgacggccctgcagacagtgccctgcaactggaaagcagtttttgggtcatccaatgggcagggtcttttcccttctcacaaatctccacgtgctcctgggcacaggtatctattcttgttcagcagatt

SEQ ID NO: 471754 - DNA, 561 bp, Homo sapiens
ctggggttcggaaaacatggggggaaagctgaggtctcccgtcagggaattaggagttctcaggttgctcagaaatggttggaaccaacatttcaaattcccaggtggaaaaatcaagcctagacacgagagctgrtgtttctgaatcagaggctgaagccttgggaactctcatttcccagcctgtgccttctctcctcctctaacaaagggcgggctgatgcctggcgagagcattgtccctccttggacaacctggggctccatcctggaattttcgcttgctcttcccgagggaagagctacaggtgcccagacagtgcctgggggactcgtgccctgttttgtcccagcttgggcagccatgggccctgtgtgtgcatcccagagccaggctgacctcaggcactgaggttgggtggtcacaatgactctgtggccattggcttcggctccatttgtggacttgcaggattagactggaccattcagatgttgcctccaggatgttcctgctgggaccaggtggctttttagggccagcttcctaataacccattg

SEQ ID NO: 471755 - DNA, 295 bp, Homo sapiens
tggtgcgctggtgagtgggcgcygggcggcgcggggcctaatgcgggagcgaaccccgaggcccggccggcgcgggaagcagcggggcgcgggcccaaagtttcgtcccgggctgaggctgcggggcccgggtgggcggaggggcgccggctgcctggtccccaccaccccctccggtccccaccaccccgcgtccccgcgccgggtctctgcggctctccaaagagatgggcgacggggaccctgtgcgagccgtcaggctttgggggaaccccgtccccctcccgcgggggcg

SEQ ID NO: 471756 - DNA, 559 bp, Homo sapiens
tatatcgtaacctccagttattaccccagtttttgcccctatttacagttaaagtattcaaataatggtctacatttactctctccaaatcctktcctcctgttctctcttgagctctctctatgtatctcatatacatatatatgtatacaaatgtatttatatacaatcatatacatatatttgcctactaatccacaaatgttacttctgttttattcaccaaggccttccatattgcttatttaaggcctaattctcagtccatctggcttgatctattagcactttatatgctagatctgtccctctttctggccacactttctttacttgactttcggtcaacccattctccaagtttccttcagggtgggcttttttttagtgactatgttgttcctttttacccttaagacctttaaatgagcctcagttcttggatttccttactttgacctgctttctagggaacatttagatgcccagctttacatgctattcctgttctggaaactctcagatgtgcatttctagcaaggatgtctctcttgaaccc

SEQ ID NO: 471757 - DNA, 621 bp, Homo sapiens
gacagccatttttcaaaagactttatgagaagagactctagaaggttttcaactgttgatgattactcatcaatgctgccattaactcataatatgaccttaggtatgccatttaattgctttgagtttccaattttcttatttttgtaataagggcgtgaaacaaaaggcttcaaaaggcccctctagctcccaaagatgatgtctccatatgaatagaagtatgataattctttgaaaagctattcaatgtgagtatacacattcacacatcatagatgcatgcatacccataccatattttagctgtgaaayctcaaatgacataggatttgatttatacataagaaagagaaaaagaaatataagcaataagtttgcatggccttacgtttaatatgtcacttagatgtagctttgttgtccaaatttgtcaaaaactttagcaggatagattctggtagaaaagatgtgaaacttagaggcatgcctctcttattatagggcagctcccactcacttcctaaaagcaatccatctgttaggtcaaccagaggctgcaccctgttctttggagggcagttattttttttttccataagagtaaaaggtattgaagag

SEQ ID NO: 471758 - DNA, 638 bp, Homo sapiens
gaaaatgttgaccctcttaatcccccgttgcaacccttcattccaatctacatatctgggatacaatttttttctttttttttttttttctgagacggagtctctctctgctgcccaggctggagtgcagtggcaccatctcggctcacggcaacttctgcctcccgggctcaagcaattctcctgagtagctggaattataggtgcacaccaccacacctggctaatttttgtaattttagtagatacagggtttcaccatgttggtcaggccagtctcgaactcctgaccttgtgatccacccacctctgcctcccaaagtgctggaattacasgcgtgagccactatgcctggcctgggatacaattctaatgcttcccctgatatttgagacccattgcttgctcacttcttggcctgcttccttctctgtatccttgaaccctcatcccaccatgggttatatttgctcacccccagatctctgcacgtgctgcactccccttacctgacatgcccatcactcttgcctatgtcaagctaacttttttactttcaggtctcagaagagtggtgacttcccacctgaagccttccttgacactgcagcaatcttggaacagccaacacttacac

SEQ ID NO: 471759 - DNA, 662 bp, Homo sapiens
cttattggctttgtgtcagtttcatcagtggttttatttgttaaattgtgcacatcctacatgactttcatacagaaagctcctcttatttcatgtttatttagggtttccacttgaaatactgcattcttagcctcacaattctgtggtagaggcaaagatggtattaatatttccgtttcacagatagtgaaatgtatatttaattggaattagcaatttgctaactgggttataagtcacctagcaaaaccagaacatgaactcaggtcttatgattgcatattcagtgatatttctatatctccttagcaccaaatccagcattaagtaaggaatacagttaatggctattccttaacccaaaaatgtcttctaagtctgcttcctcttgaggacatcacctmattttcacccttctttttataaacatactttcaaaagtattgttcagtgagaaataatgctgtggaaaaaaatagcagtagaggcaatatagtttttagacggcccagaatctaaatctccccatccgcaaataaaacaaggagagcaactaaaatacctaaacaaacacgaatggacaactttcaataaaactgggtgattggatagccccataaatccccaaaatgtaagcaggtgtggacaaacaaccaaca

SEQ ID NO: 471760 - DNA, 486 bp, Homo sapiens
gtaattttatgtaaaatgagaaacataaaagaattctatatgaagaaattgtaagaaaaagaaaatacaaggagcagaacaaagtctgtacagacaatgaaattctgccagaatatatatctataaaacagatttttatctgygaactattttaaagacacttaaagaaattgagaaaataatagaagctttgaaagaaaccgttaatcaaaagaagttcagaaatgatgttattggaggagaggagtgtttgaaaagtgcaaaccaaaaataaaattctaaggctccccaaccatttgaatgaacttcctcctcagtcaggacactctaaaatttaacctgaaatactggttcaggccatgccctgaagtgggcatcagccatgcctcattataccctccttcattaacatcaacacagaccttaaatctgataaaacttatgaccaagttggttttaccaagaaatgtaagtttgttttaacac

SEQ ID NO: 471761 - DNA, 463 bp, Homo sapiens
agcatacttttgataacatgaaagcattcctcttttgtatcaaaggaaatacaatcaaaaagtgtttgaggcagcgctaggttgggatttaaagactgaaaggctaaaacgttccctgagagattcctgactgtgttcctgagttacactttgctgaaagaatgggtctaccatgggaacacttagcggacagtaaccatggagagcctggatgcaccaacatgctcccaccatgctctggttcaaggtcaggmacatctggtagagatgcaagaatgtgtttctcaatgtatctttacatagaatacagtatcacaaactaccacttcctggaagtttgtcctgtggacttcattgtccatagctatacactttcaacagtcattctattgtgagccttttcataccaatattttttggcgggtaggagagggcccatcagtcatgctaattagctaccatc

SEQ ID NO: 471762 - DNA, 454 bp, Homo sapiens
aaaaaccggagctgtcaaatgctaaagcttggacttttttctatgttgcatgcatttggttgcaaaaaaagtattaatcatgattttttatgttctaaaaacatgagttacataggagacatgttttacagcagttttctcaaactttaacatgaggaatcttattaaatgcagactctgattcacsaagtctggggtggggcctggaattctgcatttctagcaagtgccctagtaacactagatattgctgatgtggcgaccagattggagcaagaaagtttggagcatgtaatctcaacaaataagactctaagcccttgtagatacagtgcttgagagtatttgcactaaataacaaaagtggcgagttctgctgagtatcagtatgcttttttttttttttttttttttggtcatcactaatgaccgtgtctaaattcattttcacaga

SEQ ID NO: 471763 - DNA, 454 bp, Homo sapiens
aaaaaccggagctgtcaaatgctaaagcttggacttttttctatgttgcatgcatttggttgcaaaaaaagtattaatcatgattttttatgttctaaaaacatgagttacataggagacatgttttacagcagttttctcaaactttaacatgaggaatcttattaaatgcagactctgattcacgaagtctggggtggggcctggaattctgcatttctagcaagtgccctagtaacactagatattgctgatgtggcgaccagattggagcaagraagtttggagcatgtaatctcaacaaataagactctaagcccttgtagatacagtgcttgagagtatttgcactaaataacaaaagtggcgagttctgctgagtatcagtatgcttttttttttttttttttttttggtcatcactaatgaccgtgtctaaattcattttcacaga

SEQ ID NO: 471764 - DNA, 454 bp, Homo sapiens
aaaaaccggagctgtcaaatgctaaagcttggacttttttctatgttgcatgcatttggttgcaaaaaaagtattaatcatgattttttatgttctaaaaacatgagttacataggagacatgttttacagcagttttctcaaactttaacatgaggaatcttattaaatgcagactctgattcacgaagtctggggtggggcctggaattctgcatttctagcaagtgccctagtaacactagatattgctgatgtggcgaccagattggagcaagaaagtytggagcatgtaatctcaacaaataagactctaagcccttgtagatacagtgcttgagagtatttgcactaaataacaaaagtggcgagttctgctgagtatcagtatgcttttttttttttttttttttttggtcatcactaatgaccgtgtctaaattcattttcacaga

SEQ ID NO: 471765 - DNA, 544 bp, Homo sapiens
cttaaatttggtcttcctcacttccataagagagaatacccattgtgcacatgaggaaaatgaggcccagataagttaggtgatgtctccgaattgcacactgaggatgtggcagagctgtaacttctattctgatgagagagcaaatggacaaacataaacagctagagagggtcaagaatgggaacaaggtagccagaaaatggatgaaaaggggagagaacagagaagcaagaaaaattttagaaggcagaaaatatctagacaaggagggccaagaaaactattgaacaagagtrcagcactttgcctcccacctctgaccctctgagctgtgctccagctccctggtatttagagacgaaaagacaggagaacctttatgatgattcactgaccctaaaacctggtacctcctattcgactgtgctgcttatatgtcctttatttgagcaggctgtttatcctgtggtcacctaggcagggggaaatatctttatgccctcttctgaaacatgtggctcatgttttagtcattaatact

SEQ ID NO: 471766 - DNA, 675 bp, Homo sapiens
acacgtttaactatttccagggaattgccaaagaacacgtgacaagcagcagatatcatgctaagcaagcaagctgtatgtatggcctcatttaaccctcacmaacaatcttacaaaatgagccctattataactttcattttacagaggagaaactaaggtaggaagaggttaaattactcatccaaggtcgcacagttaatacatgacaggcccagaattccaaattagtatactgaactacttttaacctcacacagtgtctgaaagggcagtgatctggtggagggattacagtattggagaaagtgggaatacaaaagagagtgcttgaaactaggcattaagatatcaggattttaatcccagttctgctaatgagccatcaagggaccttacaatgtcacttcccttcctgggacctcggtccttcatctgaaaaataattgggttgtaactgtgatatctaagtttaccatccagaatcctatgagatggtttgtgcctgcaccgcagaaggcatctgctcccttacaaacccttcatgaagagcataaaccctagtggagggtcagtatgatgggatgaaaagaaagcgccctattccaactctgtaaaataataataactttatgtattacagtaacaaggacaatgctgttattattaacaatc

SEQ ID NO: 471767 - DNA, 651 bp, Homo sapiens
ccagcctcaggggacctgggtcccatgcccaagctattctgatttcattgctctgggaggggcccagccatgagtgtttcaaggagtctaactcttgtcgcccaggctggagtgcastggcgcaatcgtggctcactacaacctctgcctcccaggttcaggtgattctcctgtctcagcctcctgagtagctgggatttgcaggcacccaccaccacacgtggctaattttcgtatttgtagtagagatggggtttcaccatattgatcaggctggtctcaaactcaggtgatccacccgcctcaatcccccaaagtgctgggattacaggcgtgagctgctgcacctggccacaattgagtgtttttttaaaacgctctcaagatgactctaattgaacagtcagggttgaaacactcccttaaacagacaactcaatcaccctgggtctcaattttcacatctataaaatgggaataatatcttccctgcttaattaacttccagagtttctgtgagaattccataagatgatgaatgaggcaggtcatgtggattatggagccctggactcgagtcagcacagactagatatgcttatgttagcccaagcaatgggtttgtctgcttatatttggttgtcaagattt

SEQ ID NO: 471768 - DNA, 651 bp, Homo sapiens
ccagcctcaggggacctgggtcccatgcccaagctattctgatttcattgctctgggaggggcccagccatgagtgtttcaaggagtctaactcttgtcgcccaggctggagtgcagtggcgcaatcgtggctcactacaacctctgcctcccaggttcaggtgattctcctgtctcagcctcctgagtagctgggatttgcaggcacccaccaccacacgtggctaattttcgtatttgtagtagagatggggtttcaccatattgatcaggctggtctcraactcaggtgatccacccgcctcaatcccccaaagtgctgggattacaggcgtgagctgctgcacctggccacaattgagtgtttttttaaaacgctctcaagatgactctaattgaacagtcagggttgaaacactcccttaaacagacaactcaatcaccctgggtctcaattttcacatctataaaatgggaataatatcttccctgcttaattaacttccagagtttctgtgagaattccataagatgatgaatgaggcaggtcatgtggattatggagccctggactcgagtcagcacagactagatatgcttatgttagcccaagcaatgggtttgtctgcttatatttggttgtcaagattt

SEQ ID NO: 471769 - DNA, 626 bp, Homo sapiens
gctgggattccgactctgttcttctgtttctaggaggtccacactggatcatttattagagagatctttctctgctagagtcctctttcctcacacccctccctccgtaatacacacaccaccgacggtggcattttattgggcggactgtgtaactgcttattcagactaaagagttacctagcaattacgtggtgactctccaaagtatctatgctttaaatgtatttaggtaacattcttttgcgcggggaggtaatattmttggtggcaccattaattattggaaactttatgagctttgggaaagctgcttgagcagaaaatctaatttgtaggtcacctaagtgcagtgtttattattagttacctatgatgataataaggcattaagatttaatgttgttttttttcctaacatttccaaccattaaaaaatactggctcactcttccttatgaaacttctttgatgtagaatctacatcagagatgaaactgcaccatttgggaaaagtaaatgtaccagagtacccagtgaggactggtgctcattaacatctgctgggtacccatacttcatgactgttttgcggatgccttctgccattagagaactggaagcat

SEQ ID NO: 471770 - DNA, 357 bp, Homo sapiens
gctttaagtgacttactcagattttgtatccccagtgccttggcacataacagatgctcaataaatatttaattttttgatacctgagtttttgtttacatatttcgtatttttaaagtaccattaggttgttattattggtckttgtttctgaaagtaagaacacttactaaatgacagtagctgataagtctccatgtcaaatgggagtattctgaattttcagcttttattagaatattagaagacctggtttcactggagttggagagatgggcaaatctgggatatagtttggaggtggagccagtatccctcagatggactggattggataggtgggtggagagaagcaag

SEQ ID NO: 471771 - DNA, 535 bp, Homo sapiens
tgcgccatagtcttgatccaaataaagttgggcacctcggcaggggcaaggtattgcccgtctttgataatcctttccccatcctttcctggaaacaatctctgtgctatggagcaggagttggagagggtggtggtggtaatgggggcctgttcttcagtggctctcctatctgggtcctccctaaatagcagaagcttggggttggggagttaggagctgatactrtggctcactttgcatcttcctcagcacaaagccttttgagatgcaatctctggatgttcactagttgcaaacatacaaacctggaatagctctaggaaactgggagtagtgggaactaccactgagctgctgaacccattggaacaactcttctgcaacacagagctgtggggaatagaggacagcgtaggctgtcattagctgttatgctttgatcttccctaccgagtagcatttaggagtcagggaaagggtgccgctttcaggctgccttgaaggctctcgcatagcccttccacacacacag

SEQ ID NO: 471772 - DNA, 535 bp, Homo sapiens
tgcgccatagtcttgatccaaataaagttgggcacctcggcaggggcaaggtattgcccgtctttgataatcctttccccatcctttcctggaaacaatctctgtgctatggagcaggagttggagagggtggtggtggtaatgggggcctgttcttcagtggctctcctatctgggtcctccctaaatagcagaagcttggggttggggagttaggagctgatactatggctcactttgcatcttcctcagcacaaagccttttgagatgcaatctctggatgttcactagttgcaaacatacaaacctggaatagctctaggaaactgggagtagtgggaactaccactgagctgctgaacccattggaacaactcttctgcaacacagagctgtggggaatagaggacagcgtaggctgtcattakctgttatgctttgatcttccctaccgagtagcatttaggagtcagggaaagggtgccgctttcaggctgccttgaaggctctcgcatagcccttccacacacacag

SEQ ID NO: 471773 - DNA, 452 bp, Homo sapiens
ttggctcaaagcagtaggtattcaacaaatgctcattgaataaaaatgtccttgatcctctaattctgatttgattcgagaaataacttatggcaaagagctcaattgtaatggggttgggactaaaattcaagttaatgttgaaagatgtttcaagaagtatttaggttatattattaaatattagacactttctgtttatatagatttaacatataaagattttaagttttctgtgtatgtgaggtctcgtagtagtttctgctgaaaatgacaggggcgcggggwtaagggtgaagacagtatctcaggattggagaaggaaatctaagatattgtctccaccagccatactcctcatgaacatgcacatggaaggacatttcccagccaaagtgaatccctttatttgttttagtttcagatttgagtctcagatttctttgtaattc

SEQ ID NO: 471774 - DNA, 546 bp, Homo sapiens
ggaactgcatgaatcccacacggcatactggatttataatagagtcactcagagcttctcaaagaccctgttttcagggaggaaacagaccaggctttgtgcagctccaggctggggtgctgacatcactggacccctccttgtggggggackctgtctgtcacgtgagctggggccatcagtttgagcgtggctgctccacagggcccaagatggaggcttttcttctctttccaacaccgaagggctgcattggtgggccagggagggtggcctgacccacctgcatatccagtgccctttagccttctttgggcttcaaatgcaaccttggggcacccagggaaatggagcttgcctttgatcatcttccccctctgcagcgtggcttcccagtcatactgtcggctgcatccttattcctcactttctttttccctctccacacatttctttgtctgtttggcagtgcccataggcattgcttgcttcacctggtatgtggcaactctgttagggggaccataggcccctgtggtctgcatg

SEQ ID NO: 471775 - DNA, 546 bp, Homo sapiens
ggaactgcatgaatcccacacggcatactggatttataatagagtcactcagagcttctcaaagaccctgttttcagggaggaaacagaccaggctttgtgcagctccaggctggggtgctgacatcactggacccctccttgtggggggacgctgtctgtcaygtgagctggggccatcagtttgagcgtggctgctccacagggcccaagatggaggcttttcttctctttccaacaccgaagggctgcattggtgggccagggagggtggcctgacccacctgcatatccagtgccctttagccttctttgggcttcaaatgcaaccttggggcacccagggaaatggagcttgcctttgatcatcttccccctctgcagcgtggcttcccagtcatactgtcggctgcatccttattcctcactttctttttccctctccacacatttctttgtctgtttggcagtgcccataggcattgcttgcttcacctggtatgtggcaactctgttagggggaccataggcccctgtggtctgcatg

SEQ ID NO: 471776 - DNA, 546 bp, Homo sapiens
ggaactgcatgaatcccacacggcatactggatttataatagagtcactcagagcttctcaaagaccctgttttcagggaggaaacagaccaggctttgtgcagctccaggctggggtgctgacatcactggacccctccttgtggggggacgctgtctgtcacgtgagctggggccatcagtttgagcgtggctgctccacagggcccaagatggaggcttttcttctctttccaacaccgaagggctgcattggtgggccagggagggtggcctgacccacctgcatatccartgccctttagccttctttgggcttcaaatgcaaccttggggcacccagggaaatggagcttgcctttgatcatcttccccctctgcagcgtggcttcccagtcatactgtcggctgcatccttattcctcactttctttttccctctccacacatttctttgtctgtttggcagtgcccataggcattgcttgcttcacctggtatgtggcaactctgttagggggaccataggcccctgtggtctgcatg

SEQ ID NO: 471777 - DNA, 545 bp, Homo sapiens
tggtggtggggaaaaggccaactttgcttttaggggtttgttattgtgggaacccgctgcttatcagcagctctaggtggtccacctgctttgtggcgccaacatgggaacttgtttggagggtcagagaagaagcacttggccctcaaagcrtgttgacacctttgaggagggcggacgccaagtcagcaggcagcagcttgtaggagaattaaaatagaattctgaacttttggatagaagtggatttctggcacttggcatagttccagaatgaactccggaggttggagtagtttcctggatccagggggcttgggaattccatatgagtcatctgggctgacctcataagtgccccagggtgaggggcagtcttctgtccccccaggcacttctgttcaagtattctgcccaggagttggcatggccacccacgtccagccacctcaagagatagatagaataccagcagcccacaggcgtcccttgtcagcaaaaagcaccctggaaatgggtggctggataaaaggtcctctgtctgt

SEQ ID NO: 471778 - DNA, 601 bp, Homo sapiens
tggtggtggggaaaaggccaactttgcttttaggggtttgttattgtgggaacccgctgcttatcagcagctctaggtggtccacctgctttgtggcgccaacatgggaacttgtttggagggtcagagaagaagcacttggccctcaaagcgygttgacacctttgaggagggcggacgccaagtcagcaggcagcagcttgtaggagaattaaaatagaattctgaacttttggatagaagtggatttctggcacttggcatagttccagaatgaactccggaggttggagtagtttcctggatccagggggcttgggaattccatatgagtcatctgggctgacctcataagtgccccagggtgaggggcagtcttctgtccccccaggcacttctgttcaagtattctgcccaggagttggcatggccacccacgtccagccacctcaagagatagatagaataccagcagcccacaggcgtcccttgtcagcaaaaagcaccctggaaatgggtggctggataaaaggtcctctgtctgttgttggctgggacagcgtctaccacagcctacactttgattatgggaatatttccc

SEQ ID NO: 471779 - DNA, 545 bp, Homo sapiens
tggtggtggggaaaaggccaactttgcttttaggggtttgttattgtgggaacccgctgcttatcagcagctctaggtggtccacctgctttgtggcgccaacatgggaacttgtttggagggtcagagaagaagcacttggccctcaaagcgtgttgacacctttgaggagggcggacgccaagtcagcaggcagcagcttgtaggagaattaaaatrgaattctgaacttttggatagaagtggatttctggcacttggcatagttccagaatgaactccggaggttggagtagtttcctggatccagggggcttgggaattccatatgagtcatctgggctgacctcataagtgccccagggtgaggggcagtcttctgtccccccaggcacttctgttcaagtattctgcccaggagttggcatggccacccacgtccagccacctcaagagatagatagaataccagcagcccacaggcgtcccttgtcagcaaaaagcaccctggaaatgggtggctggataaaaggtcctctgtctgt

SEQ ID NO: 471780 - DNA, 601 bp, Homo sapiens
tggtggtggggaaaaggccaactttgcttttaggggtttgttattgtgggaacccgctgcttatcagcagctctaggtggtccacctgctttgtggcgccaacatgggaacttgtttggagggtcagagaagaagcacttggccctcaaagcgtgttgacacctttgaggagggcggacgccaagtcagcaggcagcagcttgtaggagaattaaaatagaattctgaacttttggatagaagtggatttctggcacttggcatagttccagaatgaactcyggaggttggagtagtttcctggatccagggggcttgggaattccatatgagtcatctgggctgacctcataagtgccccagggtgaggggcagtcttctgtccccccaggcacttctgttcaagtattctgcccaggagttggcatggccacccacgtccagccacctcaagagatagatagaataccagcagcccacaggcgtcccttgtcagcaaaaagcaccctggaaatgggtggctggataaaaggtcctctgtctgttgttggctgggacagcgtctaccacagcctacactttgattatgggaatatttccc

SEQ ID NO: 471781 - DNA, 601 bp, Homo sapiens
aaaacttttcctaattgtctatcaggatgttgagtacaaaatcatcccttttaccctcttactcttttgggttccattagatattttccaggataattctattgctctgccaaattaagaataacaacagcaacaacacaaaaatcattttctggtgcattttcctaaaatttataacaccattctgtattcattctattcatcctaaagcaggtgaatcttgttttatttatttgaactctagaagtataggaaacactttcattacctatgtagatagatgatatcagccttaaatatttaaattactggcgcttttcttgttccactgccatataggtaattcaagaaggcatcattaacaatttatgggtttcaaaatagatttccagcagggggagcccctgcttgggtaatagaackattggctctcttgttcctcttacctaacttcaaacccacaaactaaaaattttgaatagaattcattttcataatttttttcactcctagctgtacttgtgcactaagcaaaatatactttttaaatggtcaatgaaatgaaccaaatgactatttctatgtgtagaccccagggcag

SEQ ID NO: 471782 - DNA, 621 bp, Homo sapiens
ctgatttttctccatttcaaggcaccagaaatttttttttctttaatttgagaaaagggagagggaaagatcttctagaagtgtgtgtacaacaataataatgctataactacttgtcaaatgcttactaaagaaattagtataattctcaataccaagtttcagattttgatccatgtgttctgggctagattgaggaccttaaactggcctctctttattggacttctccagagagtcactcttactcctgactccacgaaagaaaagtttactgttataaaatttygtattttttttcaacgaccttgctcttttctcccatactcctctatataatctgccatttgggtgggaggaagctctagaggtctgtaatggagacagtaaagcagggtttgcaggaggaagagctgttgaggaatttttgcgggaacaggagttgtggtggccactctaggactgcaaggtaccccacaggacacacgggagacacacttcagactgagctgggggaacttgacattacaaaagtaaatgactcttctcagggagctttagagatttccaatggtaaggaaggatgagtacaaagaactaggaccagttgaacacacccag

SEQ ID NO: 471783 - DNA, 581 bp, Homo sapiens
tgatatgtagaaacaggtttggttgttgcaatttgggggacagtaatggtatccagtaggcagagggcaggaattctggtaaatatcttacaatgcacaaggcagcccccaagacaaagaactatccagcccagtgcccgccctcaatcaacaaagcatggtcttctcccaagtgtcaacagtgccaaggtttaggaatgctgtgctagatcactcatccaatgctcattaaagtgggtgtggctacaagcacaggcaaataggttttaggggtgaaggggaatggtacccagctgaytcaaacaatcgcacctagtaactatggtgattcctctgttactatcacaagttatatgaaaataagtctcttctgataaaatatataatccaaactgtagtcacagagcaagaagattggttaagcctgttttattatgaggaacctacattctgatttgtgtgttcaaagataataagtatgcatctttatccccttgagtctctgtttatctataatcctcacaactgccatttgcttggccatttttctcatttgcatgccccctccaaatgaaattcca

SEQ ID NO: 471784 - DNA, 526 bp, Homo sapiens
ctgtagacccagctaaatgtgtcagttgaaagtgattcagtccaagcttgtccaggaaacacacaactaaaattagttgtttgtgactcaacacatgtttggggatgcagaactgctttatatatgtcaggaagggaaaagaaaaccccacaaaactttcaatmatttgatgatgtaatacaatcttactcttaagatagtcagttgataaccagatcagttccaagcagtaggatcataaattctgaagttaaaagtataaaagtgcacagatactcaacaatcattgctattaatgctgctgcatcagatgtgaagaaaaccacatttgatagtcctatgtgaccacaataggaaaacagccccttttaaggagtgatatttttcaacaagttgctaagacattgagttaacacgtggcccacatactagaaccttcaattgagtttccagaatgtctcccgaagtggattgaatctgcaaacctgtcctcctggtagtgtagttcatgacctaatggaaagaa

SEQ ID NO: 471785 - DNA, 629 bp, Homo sapiens
actctgaattccctgctcttggcaacttacagtcagtgggggagacagacagtaaataacaaacatgcccacattccagtatttaatccaaattaatacaaattattgtaagctctataaaggaaataaaggtgacacaataaatgatgggaaggtgatgttggaagtaaagaagtggatgcaataaatgagtcataaaggattttgtaaatgataaaggatgacagggacagtcctagcaagccattttgaggaggtgacgtttgagctgagacctaaaagattaaaaggaagtcatggggccgggtgcgktggctcatgcctgtaatcccagcactttgggaggctgaggcaggcaggtcatgaggtcaggagattaagaccatcctggctaacacagtgaaaccccgtctctactaaaaatacaaaaaattagctgggcgtggtggcgggcgcctgtggtcccagctactcaggaggctgaggcaggagaatcgcttgaacccgggaggtggaggttgcaagtgagctgagatcacgccactgcactccagcctgggtgatggagcgagactccatctcaaaaaaaaaaaaaaaaaaaaagtcaggggagaacattccaggcaatg

SEQ ID NO: 471786 - DNA, 633 bp, Homo sapiens
gcagctcactttagaaaaagtgcttgtttctcttttaaggttcttcctgtacagagagatttctgtgctttatcttgattttggatttcctttccccattttcaaatctggaatataagtgtcaagaaaagggatttggtcattcattcactcacttattgaggcattgtcctcagctgcatggccaaagctgaactgcagcatgaggacatccagcacttttcaggcttcagcccagaagtggctcatggtacttaatcacctttcttaggtgagatcctaggctcatggccacatctgacagcaagggaggctggggagtggagtgtgtctggctagccatgtgtgttaggctgcagttataccacagaagatggggagagtggattgggatggacagtctccattatacatgctattttcttactgtcttgacttgaggaggtaaacaaatattcaaattcataatgactctgtgtgccaggcactgttttagggttgagactaccagaatgagcaaaatctgtttacatatgtrtcataatactgctgtcaacccaaggctgttgacaatcaatagacaactaagtccattgtataacttcacataatggcaaactgtatgaagggaaa

SEQ ID NO: 471787 - DNA, 409 bp, Homo sapiens
acttcctgatttgttctccaccttctcgaagcacttgttgagggataggttgtgccggacagaattcttccagccatcgggtgctgtctgccggaacagagcaagacaagcattcaggccaggctcaggaagccagagcgggcttcaggtctgggttctagaacactcctgtttctcctctgggcacagagctgccgcccactctggggcttgttgtcctcctcagcacccatcccttgcttggtaccctttggtggtaggggasgggtgaacaggaaccttgaccccaagttattttcatctcaaatctgccttcatcccacccgcatcccttcctgacccctcagaggactgccgaggtgattcggaaagccagggctggtgggcgctacagaggccttctgaccca

SEQ ID NO: 471788 - DNA, 409 bp, Homo sapiens
acttcctgatttgttctccaccttctcgaagcacttgttgagggataggttgtgccggacagaattcttccagccatcgggtgctgtctgccggaacagagcaagacaagcattcaggccaggctcaggaagccagagcgggcttcaggtctgggttctagaacactcctgtttctcctctgggcacagagctgccgcccactctggggcttgttgtcctcctcagcacccatcccttgcttggtaccctttggtggtaggggacgggtgaacaggaaccttgrccccaagttattttcatctcaaatctgccttcatcccacccgcatcccttcctgacccctcagaggactgccgaggtgattcggaaagccagggctggtgggcgctacagaggccttctgaccca

SEQ ID NO: 471789 - DNA, 409 bp, Homo sapiens
acttcctgatttgttctccaccttctcgaagcacttgttgagggataggttgtgccggacagaattcttccagccatcgggtgctgtctgccggaacagagcaagacaagcattcaggccaggctcaggaagccagagcgggcttcaggtctgggttctagaacactcctgtttctcctctgggcacagagctgccgcccactctggggcttgttgtcctcctcagcacccatcccttgcttggtaccctttggtggtaggggacgggtgaacaggaaccttgaccccaagttattttcatctcaaatctgccttcatcccacccgcatcccttcctgacccctcagaggactgccgaggtgattcsgaaagccagggctggtgggcgctacagaggccttctgaccca

SEQ ID NO: 471790 - DNA, 528 bp, Homo sapiens
tctacctggctgacttctagtcctgcaagattcagcccaggcatgatctcctccatggtgttctggaatcttcactcacctgggctgaactagacactgtgttctctgtgctcttgcagcatctgggcttccctctgtcgtgaccccaccatatcatcatccacctgatgggctacaaggacagggactgtgcccagtgccttctagtattctcagtgccttacacacaacccagtatacagtaggaacacagcaggtgcttctgtaactaaccatgctcagtgtgtgccccttaagcacctatcaaaggacggtggaccattatgggaaggggcatcaagtgacctggtttgcagccccagcactgacaaatctagttgcgaaccactcctgaagcctcaatttgcgyatctgtgaaatgggataatactctctacccagtaatttcctcaaatgggggtccaagtgcacagaggggctttgggagggagaagccttctcattgggatggtgataatatcattttcc

SEQ ID NO: 471791 - DNA, 575 bp, Homo sapiens
caactccagaggagcaatttacatttataggctatgtgaagtttcccccaagatgcttgtgttgtgcagggaattgtggggcaatgctgagtcttgtgagtctttgagtaccagaagtccctctttcctgcatgaagcccccaagtctagagaagcctgacctcaggcctggaaggggacctggggcaagaatggaggcccaccccccttatagagcctctcccagggctggggaatcattagccaggaggcttcccagggctggggaatcattagccaggagagggcacccgtatcccctctccaggggccgggcacctgcccactctttatttgccaagggaaggggccgcatgctggggtttgttggayaatggggctggggaccccctcctcccttgcccatcccagttgccctgtccttgtcctctccacctcgtacaggctaagctcacactcttagtaccctaaagcttgggaagggtccctgaggtgggagtaggcggtggcctgggggaagaggcagctgctatttattcagcaactcttaggaacttagtattgtcatttttgtg

SEQ ID NO: 471792 - DNA, 522 bp, Homo sapiens
caacacagccttattaaggatttccatggttccacacagcatttctaccactttgttaaatcttctcagccaattcccacctaccaaagtgttagggtcaatgcctctaatgataatcaaaaaagagaaagaacattgaaagctctatcatggaattttgattttttttttaagattcaagcatagtggcttgcacatcagaagcctctaatgtacgagacaaaacaaattaattaaaggtaggaaaaagaaatgagtaaaaggaacaacggagaagaaagatgaagcaagattcagttggaaaagagaagagaggaagcttcaactcaagactcgtaagacttgaattaagattcaggcctaatcctggcttctcttctaggctgcatggccttgaacaggtcccttctgctttaggcacccagttttcccatctataaaatgagagaaccgcaatagrtgacctcttggatacctccctgatctacattttaattatgatgcctaaaaatcttcagtatt

SEQ ID NO: 471793 - DNA, 253 bp, Homo sapiens
caacagacctttgggcagaacacatattacctactcctcgtattttcgcgtagagagatttccctgtgggaacactcctggcccctctgtctacatcctcactcactcctgcttcctttttgggagaaggaactggccatgcaaggcatggtcytcctgggttccctctttggggtgtgcctgcctgaagagagggtacatcctcatgtcctcttggtcaggcgttaagtttagtagggccaactctatacaa

SEQ ID NO: 471794 - DNA, 603 bp, Homo sapiens
ttctattccagagcatagaaaatgatggaaagtttcccaatttaatcagagaggacagcctgatccttgttatgaacacagataaaaatggggtaaactatatgccaawctcagataccaaaaccctaaataagatgctagcttattgatgtgaacaatccaaaagtgcattttaaattagcccagggttttagagaaagaaaatctagcaatgtgaccaccacttatgttaacaattttaagacgaaaatctacatgatcatatcaatgcatgctacacaaaagcatttgggcaaaaaacccaacacccacccttgactttttaaactcttagtaattaggcataaacagaaatgtacttaatgtgatagaatacactcggtgaagatacagagggaatgctccctaaaaccaagcccaagacaaagattcctatttaacctcaatagtcaacactgcagcgagagtaatctatggaagacaaggaaaaaagtaaaaacatgagagacatctgttgtttaacagacaataagatcacctacttggaagaggcaaacgaatcaagcgaaaaactattaaaactgagacaggctttagtatgga

SEQ ID NO: 471795 - DNA, 486 bp, Homo sapiens
ctgcctccaagggttttagccacctagatcagtcataagctcaacattttgagttgtttgatttggytgaggctcctaacagtgggtctcaaccacacatcacattgaaagctttagaataactctgatgcctagcccatatcccagaccaatgaaataagaatttctgggactgggacccaggaatgagtattaaagctccccaggagattcccaattgcagatatttgagaacgactgtcctagggaaggccctaaattcaggcttctcactttgactaaaccccattgggttaaaaaatagcatcctcaaacattgcattgtgtcctgctaggacttagttgtcccagtggtgtttgatactgggaatgctgtgatgaaataccatgactagtgtgtagccaacatcaactgtccatggtccttacatctgccttttccctactttctgtcatttccccactgtggtacaaattgcttcgtgt

SEQ ID NO: 471796 - DNA, 623 bp, Homo sapiens
tgccatgcatcacataggactaagaattggtccttgcccccattgagtttaatgtaagacacaatggctgtcagcaggtatgagttgtagtgcacttaacagcgacttagtatttcagttgttttggacagcttccttagatagatattaatggaccaactccataaaggagttatttccttaatcatttgacaattaggagctgacgtgaagagatgagtaatgaagtaccctctgtgattgtactttggaggtagccacaggggtttyttatatctaatctgctgtagttgctctaagaagctgaagggagactgagaggggcaattccaaaaggaattctgcctttcctcatcacttgagaatggaagctaaccagtgactgggtttgtctccaaagagaatgctgagtactagagacactcttctgcctgatagagaaagtcctcacttggcatctgagccttatcaaaatgaagagacatttgatagacaggcagcctagtgtgagggaaggctttgatgtctggtggaattcctgatttaaattcagtgttcttagacaaccttgaatgttaggatcatcagtgtccaaattcagttgactccaattctgaaatgtc

SEQ ID NO: 471797 - DNA, 521 bp, Homo sapiens
ttaattctgaagacaagctttcgagtagaagtaacctctggtaaagcaagagaaggttaaggtttgctgaattgccaatgggatgaagaaggaagggagggctgtcttttcaggtagaatgcctaaggaagggaaacatggagaaggaacaattagagcaagtcaagaagtttcaagatttttgtcttctggccagcttggtkagatagtaattatgtttctgcatattggtcagcgttgcctatgtactttgctgtggaatagtaatcttggaaaaaaaccaaccaaccaacccacattaatctgtccatgtctgggcacagagtgtgcagaagcctgcgtgggccgtaagtctcgtctttgtcttggttggtgattttagtattggtgtttttgctggaattccaaaactgtaagagtgtaatcattcaccattagaattctgcaggtcccctcctgactctggactagctgagcttaggggcctgtcatccatctggccctgggcatatcatttgtac

SEQ ID NO: 471798 - DNA, 631 bp, Homo sapiens
gtcctgcttcaacgctggttgttccctttgtgaggcttcagccttcaaacatctgctttgtgtgggttttgagctccccacactggatacctttggggagaggatgcaaacgttacctttcacggcatctcacactgccctgcgtctgcacatagaggccgagaggtggggactcctacacttaggtttaattaaaggcaaactggtgggattccagcgaagggcaatccagacccaggaagctgtagggcagatggcatttacatggtcacctgtcttaatgatcccattcctcaaaagacagagctgggaatgacatgcatccacgctggtccttcccagtcattctatggatgggaatgatgaggacgtgacaggctaaggcaagggaaacagttttcctttatctcaactcttcaggagaggctgggatgattcaagggctgtcagtgtgcacagacctgggatggatttttaatgaaccggaaagcgttgtctgtcttcttaggtaaatgcaaatatccacgtagccaccattgtagatggcacttgacagatccagaggagaagggggcagggctttcttggactcctatgtgcrtttttttttctgacagaaaagaaactagaa

SEQ ID NO: 471799 - DNA, 519 bp, Homo sapiens
ccttccctctatccctactcctccatcttctaaggatgtaccagtatgatgttcaatatttaacaacatttagggctcaggtgctagtcgctcagaatggatacagcagctaacaagagcagacccagctataaacccacacagctctgccgtggtcaaccaggactgccagtggtataaatcctttgtgtcttcaggacattggctaccagtttktaggggaccctgtggtcctcatggacccaaagccactgcccaaagagggcttcatggaccatttaactactggataactcagtagcaaaggaagaatggagtctaatgtcagaataatacctgagaagctgctttagcttaggaccaatgccttctggtttccacaagagatcttgtccgtggtgcctgcttggggtcttggtatgataatagttgctctgagccttggctttttatgtgcttacctcccttcctttcagcttaaggttgtgtttctccaactcttgtatttcagccgaagga

SEQ ID NO: 471800 - DNA, 519 bp, Homo sapiens
ccttccctctatccctactcctccatcttctaaggatgtaccagtatgatgttcaatatttaacaacatttagggctcaggtgctagtcgctcagaatggatacagcagctaacaagagcagacccagctataaacccacacagctctgccgtggtcaaccaggactgccagtggtataaatcctttgtgtcttcaggacattggctaccagtttgtaggggaccctgtggtcctcatggacccaaagccactgcccaaagagggcttcatggaccatttaactactggataactcagtagcaaaggaagaatggaktctaatgtcagaataatacctgagaagctgctttagcttaggaccaatgccttctggtttccacaagagatcttgtccgtggtgcctgcttggggtcttggtatgataatagttgctctgagccttggctttttatgtgcttacctcccttcctttcagcttaaggttgtgtttctccaactcttgtatttcagccgaagga

SEQ ID NO: 471801 - DNA, 607 bp, Homo sapiens
ggcggaggccactgtcctccagcctgggcgatagagtgagactccgtcttaaaaaaaaaaaaaagtagacaaaggaaatacatagacagttctcaaaagaagatatacagacacccaacaaacatacgaaaaaatgctcaacatccctaattatcacgatgcccatttgaaggccaattgtgagctgttagcaarcccaccttgagtgtaatggtgtttcctctactgccatctagaggacacagactcaaataagcgtcattagttgcagtttctgaggtccaacttccaaatgatccttaccctttaccttttatagccactggcctcacttctttgcacatagcaaattcagacttgtgtacatcagttggcaaattaacattttgggtattgcaaatttgatatacctgacagctactggttcagtactggcaaagcctgaagtcttgtccttacagcaacggtagtgcaatcatttgactatttattttcactttctccatactttatacagagtggaaaacaagcaaattaaagtactgatacaagtgataaaaagcagtggtctcaaatgtaattgagacaaaaatagggacaatttaac

SEQ ID NO: 471802 - DNA, 533 bp, Homo sapiens
tcatatagaggcactcacttttcacttgctggacttggagggtttggtttgaggtctgtaaattctttctcgctcgctttctttctttctytctttctttctttctttctttctttctttcttttcttttctttctttcttttcttttctttctttctttctttctccttctgtctttctctctttcttttgtttcttttcttttctttttttttttttgagacagaatctcactctgtcacccaggttggagtacagtagcacgatcttggctcactgtaaccttcacctcccagttcaagctcttctgttgcttcagacccccaggtagctgggattacaggcatccacaacaacgccaggctaatttttgtatttttagtagagacgaggtttcgccaccttggccaggctggtcttgaactcctgatttcaggtgatccacccacctcggcctcccaaaatgatgatattacaggcgtgagccactgcgcccagctaaggtctgcaaattcttgataccatttcgtgat

SEQ ID NO: 471803 - DNA, 601 bp, Homo sapiens
taaacaactagatggagcaaatcaggattgctgagtgggcaaaattattctgtagcccatgtccataggtgccatcaagatcaaaaccaacaccaatgtaagttgtgaatgtaggctgagctatggaagatatgggaacatatgcctttgtctcttaagccacaagccctgattttcatttccaagtttctgcactgtgrtactgcctgaggtcctgggtttctgtaaaagagacaactgtcactctgtacagtactaatcctacactcatacacatttcttgcctttttactcatgtgcggtttaaactgctaggcacctcacagggttatccttcttactagttcaactgttagagtttattgagtctctcatatgtgcctgcaggttttcttagacctgtcaacaaacttggaagtgtatcaaccataaacccaataactaagtttaataagtactgactgtctcctagcatctctgttcaatacattatttttttcattgcattgtctcactccagccctgaaaggtaggtgctattataagctccactttgcagatgaagatattgaggctcagagagcacaaggaaatggcccag

SEQ ID NO: 471804 - DNA, 546 bp, Homo sapiens
caactgaattctgatgttttcacttgggagaatcgaattcccccatggatcctgcagggaaagtggtcctaatgttcaggacaggcaccccaatcaagctaggagccacctggatttggtgccttctgcctcagtgggtccctgtcygcaaagaagaaactagcagctactatgggccacacagtgtggtattgtatacattttgtccaagttgtcaacattttaaaattggaagcctggaaataaaaccctcaatttttgcagcttcagttgaaaagtcaggagatgaggctggcctgggctcgggttcctgcagggcactcgtctgctggtgcagacgcttggcgctccatcccagtttgcctcagttcccccagccctgtttcgtatatatttattttatgttctaggctcctgtaagcctttgagtttgcaatccttttgtgaggtgtggtaaaccctagttagccaaaatgtaattttttccttaggacatgagcccccgcagaaccaaataacagaaatcaccatgaaggagccaaagtc

SEQ ID NO: 471805 - DNA, 546 bp, Homo sapiens
caactgaattctgatgttttcacttgggagaatcgaattcccccatggatcctgcagggaaagtggtcctaatgttcaggacaggcaccccaatcaagctaggagccacctggatttggtgccttctgcctcagtgggtccctgtctgcaaagaagaaactagcagctactatgggccacacagtgtggtattgtatacattttgtccaagttgtcaacattttaaaattggaagcctggaaataaaaccctcaatttttgcagcttcagttgaaaagtcaggagatgaggctggcctgggctcgggttcctgcagggcactcgtctgctggtgcagacgcttggcgctccatcccagtttgcctcagttcccccagycctgtttcgtatatatttattttatgttctaggctcctgtaagcctttgagtttgcaatccttttgtgaggtgtggtaaaccctagttagccaaaatgtaattttttccttaggacatgagcccccgcagaaccaaataacagaaatcaccatgaaggagccaaagtc

SEQ ID NO: 471806 - DNA, 646 bp, Homo sapiens
agctgccagagtgtgcatctgcttattggcttcacgggagaaatgtctgtagtctggggacccctgagaaatctccaaatacttgtggcccgcgagggggccagggtgaggagaggtggacttagcctgagcactgctatcccagggtctccatactaacatgctgtcagactcatggagccaacagaccacctgctctctgaggggtcaaatactgaggctcttaattcctttgccctctggcgcaggacccttcctcctcccctcctgggcccacacattgctttttagggttcagccttctctggtcgctggtggttcctctcttctggcccagtttgacaacactttggggcgagttcgcacctggatcttgcagcaggcctctaacttgccccaagtgcttcccaaggcctgctttccctggaaggcagtgtgagatgcccaaatggaccatatggtttagagcgagagccttggagcctacagacaatgggaaagtgagaggcccaggtcagkggcggagctcggagctcgagaggctgcaaacctccctttcagcctaatgaagctgttgtctgggggtaatgatgcaaatgcctgggccctttcttgcccgtggtagtctagaacgtgatttgtcata

SEQ ID NO: 471807 - DNA, 610 bp, Homo sapiens
ctgtcatggtagccagaatgccatttttttctaagtaagatctttaaagtctgaaattctagcccacatgttgtttgctcagcatttttgttggacatccgtaacaacatttttaatcctacactgattgctttctcacccaagatgtttccgaaacaccattccaggtcctgcattagtgtcctgggattggtgtgcttggaatgagaagttaatgctactatcagttcacataaaaggttagcgaggtaaagatgccaccaacatgttagttcatcccatagctaaacatraatatattttgggttacctgatttagcacctaccttgtattaccttgtattcatgaaacaaaagcaagcatagtatctttctctcttcccattgttgcataaagccctccagtggctttctcttgcatttagaatagtctaagtcccttaccattgcttagtggggcccacgaaactttctgcatcttctaccttccttacctcgtaccattctctcctagctttagctgtatcagctttcttttcttttcataaaggctctgaactccatagggcctttgcacctgctcatggtttccagctttcagctcagattc

SEQ ID NO: 471808 - DNA, 610 bp, Homo sapiens
ctgtcatggtagccagaatgccatttttttctaagtaagatctttaaagtctgaaattctagcccacatgttgtttgctcagcatttttgttggacatccgtaacaacatttttaatcctacactgattgctttctcacccaagatgtttccgaaacaccattccaggtcctgcattagtgtcctgggattggtgtgcttggaatgagaagttaatgctactatcagttcacataaaaggttagcgaggtaaagatgccaccaacatgttagttcatcccatagctaaacatgaatatattttgggttacctgatttagcacctaccttgtattaccttgtattcatgaaacaaaagcaagcatagtatctttctctcttcccattgttgcataaagccctccagtggctttctcttgcatttagaatagtctaagtcccttaccattgcttagtggggcccacgaaactttctgcatcttctrccttccttacctcgtaccattctctcctagctttagctgtatcagctttcttttcttttcataaaggctctgaactccatagggcctttgcacctgctcatggtttccagctttcagctcagattc

SEQ ID NO: 471809 - DNA, 533 bp, Homo sapiens
ttttaggcaattaggtaacatttttcatttaggagaccacacaacagaggggagagaatagggagataagacctgtgttttgatttactaaagtctctgcygcagataaagcccagctttttggaacccttcaggcaattactatttcaggcttggcaagcacttgagtctgaaagtaactattgggcttgtcttggcaagactcaaagtcactgtagctgtaaggttgtcccaggcagcggtggaggggaaagtcagtggcaagaggaagccaggaactgtagagtcattaggagggctgttgcaggcttagagctcaaaggaggccaaattcagttctcccacaacatgttcttagagagggaatgcggtcagatggtgaaggcccaggcctgctgggcgggattctgcggttccctttctggcatctgtacttgtcagctctgtgggcactgtttacactccctgcctcagtatcttttcctgtaaaagaggagaaggaccgagggcttttaggtttgtgggagcaaagg

SEQ ID NO: 471810 - DNA, 442 bp, Homo sapiens
cacaccactagatcaccagacagtctaagccaataaagaaaaagtcaaggagtatgactttggcttccctttctctcggctgttctttaggctccttaactcagtatgctccaaagtgaacacaccttctctcctccatccccagcctcttcctctgtgactggtaytgctttctactcagttatcaagccagaatttgagtggcatcttagactcccacctttctattgcattctaaatcccatatgcattgactgtcatggagcccctgaatttcctttcccatgttggagcctcctctccattcctcctatccctaccttacggaaggcattcatcactcctcacttcgataaataattggtacctggcggtttcctggatccagtctcaccccacttcaatcaattttccacactgtagcctaagtgggttttccgaa

SEQ ID NO: 471811 - DNA, 614 bp, Homo sapiens
ccaaaacgtctgtggtgttctgctgaacgctaagattagatcttacatgtgagatcacttcaaagtccgaayttgaattattctactttattatacagcaagtcttctgtgaaagcttatttcatccactctctctcggaaggagattatagtcacgctctgttgctttaagcacataccatttccccagcgattaggtaactgaatccactgcatttattgggcttggttcctgccagcatcgggaagatggggaaaaaatgcaaatgccaacgtttcccaaagttaaaagtacacgaaacacgcactctttatcaggccttgcttctcctctttgatcagccgtcagaaactatcttcgccaggcagtgagggctgggcagtgtcagcacacactccctgccaatgacaggtggtaatagagagggtgcgagccccagcctcggcaggcggtcctgcctctgataatggccacagcattgaggtgataaccgttagtaaacactccgacagccggtgactccatacatcagcaaagagggccagataatcctgaactctcctggccagacaaaggcccttggccagcctgctgcgatttatatgtgtggcaa

SEQ ID NO: 471812 - DNA, 452 bp, Homo sapiens
ctttcaggcatttaaaaaagttttctcctgatttttcaatcatgctaaaatgacctgacaataaaaggaagtacttcttctccaaaggaatacaaatgctctttgtggatgacatcacctcttccaaagaaatgatcttccagtcaggagagaagctcagagctcacaaaatctgtcccaaacatccttgtcactggactctgcaggccttctaagtcaactcctcgacttcaacaaggattatggcacctaccccgctgttaccttctcaaccactcctgccaagcactaaaagtatgaygtcaggtgcatgaccaagccaacacctttggccttaaattcactgacctccagtccgcacaccaacgaccttcaccttcactccagcaactcactcaactcactcatcgtctacaattggcccttctaggattttaagcttagaaagccca

SEQ ID NO: 471813 - DNA, 475 bp, Homo sapiens
aaaatggaaatccagtcatagaaatatcacagcacaacctctcaacgctaccccttgccaagaggctgtgaaagaaaaaggaytttttttttttttttttttttggaattttgggtgatgctcttttaagagctagtgggacaaagtggaatatgttaccacttttggttctacttgagaccaaattccatgtgccctcatataatgtacttccaggatagccctgcttcaataaatagaacatcaaatattatactttgaattacaaatacatcaatgtaaaatgatttcaattttgaatatcctccattcatgctacatgactggttaagcaaaactgtgctgacatcatgacagacaattccactcacattttagttttgaatttctggtatatttatgattctagcttttcattttatatgctgggttatcttgtatcaacaatgtatataaaactgttcatgtttcctat

SEQ ID NO: 471814 - DNA, 426 bp, Homo sapiens
tagttatttacattttacagaataggaactaggttcagagagattaagtaacaaagtcacatgactacacagccaacctttgaattcaggcattctctttccacacactgtgaaggtgaaatcactaacctctactgccttgttttscactttgtttaccgttcctcgtagctatgtcagaggtggaagtgaatttttcactcccattttacagattgggcaactgaggtgcagtcaccttaagaaacttgtcttagagttggcttcattcaactcaaagatggaacaacaaagcctgcggatgagcaatttacaggaaagatttatgggcaacacctggaaaagtcatacattacttttgcccccctcccattggccagaactcagtcacttggtctcataaactgcaagggtgcctgggaaatg

SEQ ID NO: 471815 - DNA, 550 bp, Homo sapiens
tgtggaagcaggagtctctcagcaagtaatcttcaatcacttgcatgatgatgggcagcctcgttttatttttcattaaaacatttttaaattttggaattttgtgggtacacagcaggtgtgtatatttggggggcacatgagatgttttgatacacgcatgcaatgtaccacagtcacatcatggagtgtgggggtctccatccctttgagcattgatcctttgtgttacaaacaatccacttatactcttttagttatttggaaatgtacaattaatttattattaactatagtcaccctattgtactattaagtagaaggtcttattccttctttctgttactgtacccgttaaccatccccaccttccccccaccatcctctcattacttttcccagcctccggtaattatccttctactctctatgtccatatgttcaattatgttgattctagatttgatgggcatctttagaccaaagaatctactgcacttcaaattcttcatgtgtgtaatgagaatastgatggcactacctttgtagt

SEQ ID NO: 471816 - DNA, 432 bp, Homo sapiens
accccagggaaaacaatatgactgattcaagacaggcaaggccccaaattagggcttatcccaggaggccttttggctttacacataaaagaattcaagggcaatcaggtgttattagacagcaatcttttattaaaagggactgctccttgctgagcaggactaactattttgcagtgcacccagagttggcagtagcagcttatgggttgttggcaactgtatttatactcacttatacctattttcacttacatgcaaattaagaggtgagttaatgcaaattgaggagctggttattcagaactttctagaaaaagggrcagtaacttccaggttgttgccatggaaaagggcagtaacttctgggttgccatgacatttgtaaattgtcatggggctggtgggaatctcttatgctaatgagcagta

SEQ ID NO: 471817 - DNA, 586 bp, Homo sapiens
tgcggttctggtttgtgccttcttatcctgcagcgccaccacgcgtcctcacaggatcttacattttgtggaatgataatggatgtaatattcccaactctgcctgtatgcaccccgagactatgtaaggttacaacaccaccgttaatatcgccggactttagtgagcagacaactgcccaaaggagaaatcacattagtctttcaacaatgataactgagttttgggcaraaaggaaatatttaggtaatagtctagcttggcaaaaagaatttcaaatataattgtagttatcatggacaacatttagatctttatagttttatttccatgaaccataggaataattagtagctgtgaacctcgaacaaattatttaatctctctgctttagtttgctcctctgtaaagtgaggataagaacagtacctaccacatagggctgttgtgaattccccaccttaaacatgaggaatctaatgcaaatagatattaaccttaaaaataaggtatataccaagtataaagcaatttgatgccatcaagtaactgagtcttgatggcataaatccatcataagtctag

SEQ ID NO: 471818 - DNA, 426 bp, Homo sapiens
ggggacagtgcagtatggtggctcatagcctgcctccgcctcttactaactctggggcctggggctctgctaataatagttacaatctattgtactcttaatatgttccagatgtaggcagccctgccttgtttaattctcctgacaattctrtggaatagaaattatctccaatttacacaaagaaaccgagtcttaaagaggcttaagtgactttctcaaggccaaggggaagggaagcaaaatactttgagtctcagtttccccatccataaagtaggtacgataatgcccatctctcacagttgtggtggggattcactgaactaatgtaagcaaattaaactggcatagccacagacacatagtaggtgctcagtcaaaggaattcccttccccctcttcttggagatggagattgtgttg

SEQ ID NO: 471819 - DNA, 561 bp, Homo sapiens
cacaatgcagtcagagggaagggggtggactggcagaaaccagcttgtttctgaggctggaaaacagaactgtaggaaattaacaggctgagaaatgtctgctcggctcygcatttgttttgcaccctcagtctttctctctgcagctctctcctcctgcccctgcccctctcccactccctgccgctcagtgtgggcacctggggcttggcggctctgtgtctgggccttgcaggaaggtgcatcttcgtgtgtgtgtgggagtgtgtgcatgtgtgtgtgtgtttctctgtgtgtgtttagggatggcagacctgcccctccttcagaggcagcttagccagaaacgccagcggcagagacaactgtgcgggtggggatgctgagcgcagagccggcagagcccgcgggcaggcagagaagcaccacacaagaaattgattccattaaaaagtaatcttaaatttaataaaagttatgatttgtttatagccacagaacctacaggcaagagggaaggggggtagattctagtgatggataaacagaaagaaaaaaaaa

SEQ ID NO: 471820 - DNA, 579 bp, Homo sapiens
agatctctaatttaatccaaagctattccggaaggcagcagttttccctatttcttcaccagcgccctggggcaaaaggttaggaataatcggcttcaggaacttgaactcgccggcccctgagtctccggtcaaacacacctcgtagtggtagctctgggatagggtcccggtgccgctcacgtccaccagatgccctggaaaggggccctcgggcaccgagcagcgaccgaccgrggccgccctgctcctcctgcacagccgcactgccacgaacaggagcaccgaaaagaggaagagcgacgacaccgaggccaatgccaccaccaggtagacagtgagcgagtcggcctgggcctgggccggggccgcctccggcagcggcaggtagggctgggagaagccgtccaccaggagcacgtgcagcgtggcggtggccgagcgcggaggctcgccattgtccttgaccagcaccaccagcctgtgcttggccgcgtcgcgctcgctcagcagcctggcggtgcgcacctcgccattgtgcgcccacatgctgaacagcccgggctccgtggccttgag

SEQ ID NO: 471821 - DNA, 523 bp, Homo sapiens
ggacataccgtgggtgccacggaccagctgctgcgaggtacggcyggagttctgccgcctcggggaggcctgggtatcccgagaccagagatgctgccttctcaccttgggtgcctgggtctggcccagagcccgtcacacctgggctggtgcagtccaggtgaaacccgccctgccagccacccccaccatctcccggggtgtccctgctgggcctgcattctgacatcacgccttcaaactcaacggtgaggccgcgggaacacgcatctcatatgacgctggagccggaagatggggcttggggctttcagcccttcctctccctctctcttttctcactacaatgttgtgccgccatcaccaccatcctctccagaactttctcctcttcccaaactgaaactctgtccccatgaaacactcactccctgtccccctccccagcccctggcactcactcatcctacttcctgtctctgtgaatctgacgactctagggacttcccaggagtgggatcac

SEQ ID NO: 471822 - DNA, 467 bp, Homo sapiens
aatataatgtacgtgaaacctcattcattcattgatttytttttttttctttgaaacatggtcttgctctgtggcccaggctggagttcagcagtatggtcaccactcactgcagcctcaacttcctgagctcaatcaattctcccacttcagcctcccaagtagttgagaccacaggttagccatgcctggctaacttttactttgtttttttgtagagatggggttttgccatattgcccaggctggtctcaaactcctgggctcaagcaatctgcctgccctggcctcccaaattctgggattacaggcctgagccattgcacttagcctattcattgattttcttttttaaaatttttcatttgtttttattatattttaccattcattaatttttaataaacatttacaatatctgatattcataggcatcagacatgtgacaaacatcattctaggtgagg

SEQ ID NO: 471823 - DNA, 435 bp, Homo sapiens
attaccataactatattttatgattaactgaatagcttcattagcaatttcttcatcaggtaatttcatggttattttccaaatgaaatctattcccatcaacttcagcttttstacattctgttcaaaagaaaaaaacaaattatatagcacaccaggatcacaaaattacagatcattatttcctgttacatcttgagtccacaacacttcagttcaacatgaatcaaggcttcaggacctcagctatatgaaaacactgtcatactgatatggaacttgaaaacaaaaacccaccaaccacagaagcaccagcaacctctgtgggagctagagtaagtatggagagttttcttcatatgtccctaaacccaaagcagacatacacatcgacaggctattgaagcagacacacaggaggaataagctgggccc

SEQ ID NO: 471824 - DNA, 310 bp, Homo sapiens
acctagggggcacaggagggttgggccctgtaggtagctgcatcaggaaccaggaactcgcacctgcatgaaaaggggccaccaggtgtgaatggcactgagggactggttcccagtttctgctgctcctaattccaccacatcgtagctccagtggtygtagtttgcgtgatgccccgaggctcaggacctccacccaagtgcggaaccaccgccgggagccagggactgtgctgtccgcagccctcacccccggggccccagtttctgcaaagagaggctgcactttggagggtgggtgggtgtgagt

SEQ ID NO: 471825 - DNA, 551 bp, Homo sapiens
gggcgcatcggccccgcctcgaggccggcggctccctgacgacccccgggacaaacggggaaactgaggcacagagtcagacgcaactctctgctccttttttttttttttttttttgagacgatctcgctgtgttgcccaggctggagtgcagtggcacagtcctagctcattgcagcctcaacttcctgggctcaagggatcctcctacctcagcctcccaagtagctgggactacagatgcacaccaccacgcccgggctaatgtattttctggagagatgggggtgtctctttatgttgcccaggctgatctcgaactcccagactcaagtgatcctcctgcctcagcctcgcaaagtgctgggattataggtgtgagccattgcgccaggcccaactgyacttctttagagggctgcccctaagatctcagagcctggatcttactcagccttcctcggcacgtccctggttagtgcagcttgctgggccaataactgctaaaaagtgtagaatgagggagtcagaaagcaaggtgcccagagaaa

SEQ ID NO: 471826 - DNA, 629 bp, Homo sapiens
gggaaaaggaggttaagatgagatcctcttcccaaagcttgataggttcaaggcatatattataaagcttaaggagagatgtggagaattggaaaaaatatccctcccccctgcatattaggaaaagaaatggacaatgcacaagtgcacaccctctgttgaacctatcagaaagctgaggcctcaggacaacactaaccccaaatctggagagtgacaggggtctttgggggaagcagggggcgtggcacttgcttagctragggcagaagtcatcagacactggtaggaaggattcagctagagtagtggatgcatgagtgaaggctgagaacaggctggtgaaacgatgtgaagcccatggagctgcagaaatgaaggcaggtgggtagcctcttgcaagcttcttctcaaaccccaccaggcactcacagggaagacagggaaggatcttgagaaagtttcctttgtgcaggccttgggaagggaaaaaataaccaccacaggagaggcagaaaactctactcagactattctcttctatctctcctagggagcaaaagccttaatttgcaggacaaaggccatcaaagactgttgttgcacttagcgcattaagaaagcccatt

SEQ ID NO: 471827 - DNA, 629 bp, Homo sapiens
gggaaaaggaggttaagatgagatcctcttcccaaagcttgataggttcaaggcatatattataaagcttaaggagagatgtggagaattggaaaaaatatccctcccccctgcatattaggaaaagaaatggacaatgcacaagtgcacaccctctgttgaacctatcagaaagctgaggcctcaggacaacactaaccccaaatctggagagtgacaggggtctttgggggaagcagggggcgtggcacttgcttagctgagggcagaagycatcagacactggtaggaaggattcagctagagtagtggatgcatgagtgaaggctgagaacaggctggtgaaacgatgtgaagcccatggagctgcagaaatgaaggcaggtgggtagcctcttgcaagcttcttctcaaaccccaccaggcactcacagggaagacagggaaggatcttgagaaagtttcctttgtgcaggccttgggaagggaaaaaataaccaccacaggagaggcagaaaactctactcagactattctcttctatctctcctagggagcaaaagccttaatttgcaggacaaaggccatcaaagactgttgttgcacttagcgcattaagaaagcccatt

SEQ ID NO: 471828 - DNA, 614 bp, Homo sapiens
cctcacttcctcctatttttacacaaamtgcctccaccacccttcaaaccctgaatcttttattttattttatttttgagatagggtctggctctgtcacccaggctggagtgcagtggtgtcttcacagctcaccgtagcctcgatctcctgggtccaactgatcctcctacctcagcctgtgagtaactggaactacagatgcatgatacctcacctagctaattttttaaaaaaaaatttgtaggctgtgtgcggtggctcacacctgtaatcccagcactttgggaggccgaggcaggcggatcaagaggtcaggagatcgagaccatcctggctaacacggtgaaaccccatctctactaaaaatacaaaaaataagccgggcgtggtgtcaggagcctgtagtcccagctactcgggaggctgagacaggagaatggcgtgaacctgggaggtggaaattgcagtgagccgagatcaccccactgcactccagcctgggcgacagagtgagactctgtctcaaaaagaaaaattacatttaaaaatgtatatatggctaatgactgctgtaccgaacaaaccagtccccaaaagcaaatgaaataaca

SEQ ID NO: 471829 - DNA, 644 bp, Homo sapiens
ctgcaataacttcgtttacttctttttcttctaaaacatgttggccaggtatggtggctcatgcctgtaatcccagcactttgggaggccgaggcaggtggatcacttgagaccaggagtttgagaccagcctggccaacatggcaaaacccccgtctctactaaaaacacaaaaaattagacgggcgtggtggcatgggcctgtaatcccaactagtcaggaggctgaggcaggagaactgcttgaactcaggaggcaggggttgcagtgagctgagtttatgccactgtgctccagcctgggcaacagagsgagactccatcaaaaaaaaaaaaaaaaagaaaagaaaggaaggaaggaaggaaggaaggaaggaaggaaggaaggaaaacattatgtcaaggatgtgagtttcaagaaggcagtgactccagcaccatgcctggcacatagtaggtgctcaataaagattccttctacaatggaaggattagtcatgaaccctcaggaaaaaaaaaaatagctttgtgttcccaagtcctgcctggaagcatctggctgtggacgccaatagagatattagggggagaaaaaaaaaagggtccaaattttggttgcctcctcctgcctttaattattttgt

SEQ ID NO: 471830 - DNA, 644 bp, Homo sapiens
ctgcaataacttcgtttacttctttttcttctaaaacatgttggccaggtatggtggctcatgcctgtaatcccagcactttgggaggccgaggcaggtggatcacttgagaccaggagtttgagaccagcctggccaacatggcaaaacccccgtctctactaaaaacacaaaaaattagacgggcgtggtggcatgggcctgtaatcccaactagtcaggaggctgaggcaggagaactgcttgaactcaggaggcaggggttgcagtgagctgagtttatgccactgtgctccagcctgggcaacagagcgagactccatcaaaaaaaaaaaaaaaaagaaaagaaaggaaggaaggaaggaaggaaggaaggaaggaaggaaggaaaacattatgtcaaggatgtgagtttcaagaaggcagtgactccagcaccatgcctggcacatagtaggtgctcaataaagattccttctacaatggaaggattagtcatgaaccctcaggaaaaaaaaaaatagctttgtgttcccaagtcctgcctggaagcatctggctgtggacrccaatagagatattagggggagaaaaaaaaaagggtccaaattttggttgcctcctcctgcctttaattattttgt

SEQ ID NO: 471831 - DNA, 602 bp, Homo sapiens
gttgatcagcactaggtgctgggacaagagccagcctggcctaacaaaggagtatggaattgccttgagctctcaggaccagaccaaccatttttgtatcactcaacatagatgaacaatacagaaactgaccccagattcatcactttacaaccctttcaaaatatccaaataaataaaatgtctccatttactcaaatgtttagttttaaaatacagattgtattgaaaaagtctgatatattattttctccatagtacatgttgcaaactaattttttttagcaaaaatagctaacacttagtgaatatatactttattctaagcactctccaagctgccttctcacttaatcttcacatgaacccaattagtacatactattgttattaaggttgttaaaatgggaaaartaaggtgtggaaaggttaacatgacatacctagggtttcatggctaatatgaggatgagtcagattagaaactggtaagtatggtattacaacctatcatttattatttcattaacgtcgtcacgcttaccatgctggctaaattaagttatctgaaagactattttgttcttataagagtgttggcg

SEQ ID NO: 471832 - DNA, 558 bp, Homo sapiens
tgaaaccccatctctactaaaaatacaaaattagccaggtgtggtggggggcacctgtaatcccagctactcgggaggctgagacaggagaatcgcttgaaaccaagaggcagaggttacagtgagctgagatcgcgcccttgcactccagcctgggcaacaagcacgaaactccgtctcaaaaaaaaaaaaaaaaaagaatgcattacacatacatatttattatatagtatattcattctacaaataaatatataatgtataggcacacacatttccacatacaattaagtacaaagaaaatattacagaccccaatgtataatgatttgratttcacaaacattaccattctgccatatttatttatataattttagatactgttttaaagaaatgaaatattatagatacagctaaacgttctacaccccagccacaaatcccaccttccaggccagacattgccagagggaatctacctttactcttttccatcagcaaagttaattaccccagcatcctttggtgaacagttcatcccttcctcacaaatct

SEQ ID NO: 471833 - DNA, 558 bp, Homo sapiens
tgaaaccccatctctactaaaaatacaaaattagccaggtgtggtggggggcacctgtaatcccagctactcgggaggctgagacaggagaatcgcttgaaaccaagaggcagaggttacagtgagctgagatcgcgcccttgcactccagcctgggcaacaagcacgaaactccgtctcaaaaaaaaaaaaaaaaaagaatgcattacacatacatatttattatatagtatattcattctacaaataaatatataatgtataggcacacacatttccacatacaattaagtacaaagaaaatattacagaccccaatgtataatgatttggatttcacaaacattaccattctgccatatttatttatataattttagatactrttttaaagaaatgaaatattatagatacagctaaacgttctacaccccagccacaaatcccaccttccaggccagacattgccagagggaatctacctttactcttttccatcagcaaagttaattaccccagcatcctttggtgaacagttcatcccttcctcacaaatct

SEQ ID NO: 471834 - DNA, 587 bp, Homo sapiens
ctaatgattgaaataacccagcctgttccttttaccaaatttggggcaagagtaaagtggagactcctagaccttgccttctgtggcaaggaggactctttccacctccactcctgtgagccaccttggtcacctcttgtgctttggggtggtaacacttataaaacagcatatctttgtgagggacgtccaagagagagactctagcaggccctagaagcaggcttgaggctgtcttgacagaaaatttcccaatgtcaggtacctggagctkagtggggtggggatgaggggaggctgctgtaggtggacatgaacctttggccttgggggttcctcagtccatgaggattgtggcaggaggagaaagagtgagcctgttaaatctccagttacagggcaagaccctgggtgcccaaatctaagggtgatgctataaataacattacaaatgaggttatatatgttcattcatttattcttcaaatatattttgactttctacaatgtcttatgaagtatgctgggtaccaagaatatgcaggtggctaattatgcaagatgatgtgaatgctttttaaataaaa

SEQ ID NO: 471835 - DNA, 484 bp, Homo sapiens
tgcctgtgtgaggaaacacggtaattatgctgacccattcattgtcactggctatggagccgagtgagccagacaagctccctctcagccacaagcagcttttacaataattcttggaggatttagatgttgagatataacatgaaacagaagcttggcaagagagagagaggggagcacgtgctgttaagagcgtggagccaggattccattttgtaccctcttcattacagggagaaaatggatttcctgaggcaggatatttacaaggyttcctaggaggttctttgggctctcccaagcagggcacattgggggacttcttattttgtgaaaagaacacaggaaggactgaaaatcaattcctggcttaaatagtgccttcctggaaggctaggtacccttggccaaaaaaaaaaaaaaaagagagttccacaggtcatgctttgggccagaggcttcatggagaaagggctggaggatt

SEQ ID NO: 471836 - DNA, 519 bp, Homo sapiens
ttaagttctagctccaaacaaaaatggaaaggtttttctttttttaaaaaaatccagtaatttcagagtttcgcagaaaaaaaaaaaaggtgggtgggtggtgggtgggggagaaagcttccatcctttcggtcactgatagaaagaccaaaacggccacttaatttgtcgaatctccagttctcatatacacatacatttatccctgaaacacacatttgggattgacccttgtttcagtatgaaatgcatgttgatattaaatactgctgtttagaagtgaataaatctacattttggacaaacagtttcttctaggacattctcatttgaaatgcattgaataggaaaacaaaaatttctaattaatgtacaagtctaatcaccatgctccacatggaagagtaatttttcactgttcatttgcttggtttaatctcaacactgacattacagaaacrcaatgtcctataaatctctgctcatttgtttctttaatattcatattccattgaactg

SEQ ID NO: 471837 - DNA, 551 bp, Homo sapiens
caggtacattataaaatagcaaattccctcacaattgcaaaatgctggcagaagctactactacactcaatagcacttctgttgataatcaggtcctggtatatacttaatgaatgactaacatttacccttctccggagctacttaatttccattatataaaactatatttcatggacttattcctacctgaaactattttgtgtggctatttgacacttttattcactctttatttgaacaccagtyccatgatagcaggaatttgacgtcttttcagtgcctagcacatggaagttcaatatatatttgaacaaaggaatgaataaagtgttatcttttgataagccaaagcacttcgaagctggaaagactttcctaattatctgcattgattctaccgagactgggagggtggggtgaaattgacttgcgtgtggacacaaagctattaagtggatgaacccagacctcctgactccccatcccaggcccttgtatacaggcattatacaagtatggcttaagttcaaccctctaataactgaata

SEQ ID NO: 471838 - DNA, 656 bp, Homo sapiens
gtttatgaattttgccagctcagtaatgttttagcaatagcataccacttggaggtttttcttgtttattccattcaaagagatgttgcatcttaacagcatacaaagcaatatctagcagcatttgggtctgcttagatttagcagtgagctgagagagcagtttatatttgcttttgatttctccatgtgagtggaatgcaatgattatttccagcaactttgaaagtcatattgtgaaaaccagagaaatacaagtgagaaagcaacacaggtgcatttaagaaaaaccgagtgcgagacagtcaagtcgatgatttgtttctggaagccactgacccatttacaatttacttcaagctcagaaataaagcctataaacttgccccaaataatggatatgagttagtaaaggaaatatttcaaatgtagcttaagcttcggtctttaggaagacaggttctgatttcttcctgatactattgtattcaagtcttgsaattttttaactcaaaagagacttacactaaaacaatgtcatatccaatggtgagggaatctacatttttaaatagtggattgcttcctaacatctaatgatcagttggtctgaatcagtaagaaatttaagcttggtgacagtgcaaatacattgt

SEQ ID NO: 471839 - DNA, 656 bp, Homo sapiens
gtttatgaattttgccagctcagtaatgttttagcaatagcataccacttggaggtttttcttgtttattccattcaaagagatgttgcatcttaacagcatacaaagcaatatctagcagcatttgggtctgcttagatttagcagtgagctgagagagcagtttatatttgcttttgatttctccatgtgagtggaatgcaatgattatttccagcaactttgaaagtcatattgtgaaaaccagagaaatacaagtgagaaagcaacacaggtgcatttaagaaaaaccgagtgcgagacagtcaagtcgatgatttgtttctggaagccactgacccatttacaatttacttcaagctcagaaataaagcctataaacttgccccaaataatggatatgagttagtaaaggaaatatttcaaatgtagcttaagcttcggtctttaggaagacaggttctgatttcttcctgatactattgtattcaagtcttggaattttttaactcaaaagagacttayactaaaacaatgtcatatccaatggtgagggaatctacatttttaaatagtggattgcttcctaacatctaatgatcagttggtctgaatcagtaagaaatttaagcttggtgacagtgcaaatacattgt

SEQ ID NO: 471840 - DNA, 618 bp, Homo sapiens
actgagggcaggtgacagactcatttctacaatcctaggctaaaactgaaatctaaagcacatgttcaccctagtgccagacacctaaagtgctttcagacccagaratacgagtgtgtcatggtgctattatttgcagaagtgtttgactgggccacaaggggatcatttcattcagttctgtttaaaatcatgtagccaaaaactaaagaagcatttggctctgtgtgaagacttttgataatttacacacttctattattataaggcaggatgtgtgtgtgcttggaacagggggcgttgggtgttgtatatatgtcacattccttttggcaagtaatgcatttaatctacgtggaattttagtacaacacagttgattagcatagtagattatctttttcacatgacaaatctgaggaatatccttagtcaatgagttgcatcattttgagagtgtcttataacatgtgaaaatagcatagcatttttttcttatggtgcatgctcagagtcaaataagtcattctggttatgaatagagttctaaatcttttacaatccttattccttagtttgtgggttatcttaaacttttgtaggatgatttctgtgtga

SEQ ID NO: 471841 - DNA, 618 bp, Homo sapiens
actgagggcaggtgacagactcatttctacaatcctaggctaaaactgaaatctaaagcacatgttcaccctagtgccagacacctaaagtgctttcagacccagaaatacsagtgtgtcatggtgctattatttgcagaagtgtttgactgggccacaaggggatcatttcattcagttctgtttaaaatcatgtagccaaaaactaaagaagcatttggctctgtgtgaagacttttgataatttacacacttctattattataaggcaggatgtgtgtgtgcttggaacagggggcgttgggtgttgtatatatgtcacattccttttggcaagtaatgcatttaatctacgtggaattttagtacaacacagttgattagcatagtagattatctttttcacatgacaaatctgaggaatatccttagtcaatgagttgcatcattttgagagtgtcttataacatgtgaaaatagcatagcatttttttcttatggtgcatgctcagagtcaaataagtcattctggttatgaatagagttctaaatcttttacaatccttattccttagtttgtgggttatcttaaacttttgtaggatgatttctgtgtga

SEQ ID NO: 471842 - DNA, 643 bp, Homo sapiens
cattcaggatgcttcaagacagaagaaaactttctggggactctagaaatagtgtacactttttacatcatttctgtgagtttgcaaaacactggccaagttgccataaaactcatcaaaagccttcagggaaaaactaaacaaagatataaaagaggactgctttcctggctaattcaccatggcttgcaaccatcatgagacctcatctttttgacctttagcaacaagttaaaactgggaagcaacccgagggcttggagattcaggacttggggcaaaaagatccaggtttgagttctgcttttatgatgtccttgctctcatgacttggacagagcatgctctctgagcctcatcttcctcatttgtaaagcagtagttttctgactgagccctacctaactcaaggtgcattcaagaaagccaggtaaatattaagccacctacagatagaggagattatgatacatggcttctkagattgtatttcacaaaccaatctctccctccttgcccagacttttggtctgcagaggcaattgaaaaattccattctaatataatcacatgcagctctaccgatcaaattacagatgcttttggagttgagatctaatttatgagttacagatgtagttca

SEQ ID NO: 471843 - DNA, 456 bp, Homo sapiens
tttacttccttctctcatccaactagaaataaatgaatccgttgtcaatcataaactgttatgggcatttatgttttccaactcaaccatcccatactcgtcactaaatgaaaatgcagcaaaacagtaagatctcacagtcctactgaaagaggctgaaggcttctgacaaatctcttggcaattctgcaactgcagasaggtcccctcagcttcttggggattctgtggggtcagaatggagacaaaagctcacttcaaaggacaaagaaatgtagcccagaatatgggacttcacagaagatctttcaaaaattccgagcttaggacacctcagtatatctctgaaatgatcagtctcttatcttcatgccaataaatatttaccacacaaccaaaatctccattttcaaatcgcagaatcccaggttgtaaggtctgggctaatcccagtgc

SEQ ID NO: 471844 - DNA, 560 bp, Homo sapiens
atgagaagccacagaacttgcttttttttgcccatggatacctgtcatacatcagaactatgcatacataatacgtacacaaatccaacactgtggcatctaaaagactcagaccatttacccatrgcaaatcagatcacatcatcttttctctagcccaccaatgccattcaaaacctcttcctattctgaaaacctcttcctattctgaaacccaacagcagatttgagggaaagcagaatagcagccactctcggagtagagaagacacagtaagtaagtcccacttttggtgatgaaattctcctgccctagaatacctcctctaaaaaaggagctgtaggcacattctctttaatgcagagctcaaggccatccttctcttagaaatttcatttctcctttgtttgtctactcctgctctaccaaaatcactaagaatttttattgtgctttgaaatcaccatggcaccccagctatactttaccccataggaggaaaaacaaattgtatcccttatgagattttcaatacccttccatgaagcagggttgaaca

SEQ ID NO: 471845 - DNA, 560 bp, Homo sapiens
atgagaagccacagaacttgcttttttttgcccatggatacctgtcatacatcagaactatgcatacataatacgtacacaaatccaacactgtggcatctaaaagactcagaccatttacccatggcaaatcagatcacatcatcttttctctagcccaccaatgccattcaaaacctcttcctattctgaaaacctcttcctattctgaaacccaacagcagatttgagggaaagcagaatagcagccactcycggagtagagaagacacagtaagtaagtcccacttttggtgatgaaattctcctgccctagaatacctcctctaaaaaaggagctgtaggcacattctctttaatgcagagctcaaggccatccttctcttagaaatttcatttctcctttgtttgtctactcctgctctaccaaaatcactaagaatttttattgtgctttgaaatcaccatggcaccccagctatactttaccccataggaggaaaaacaaattgtatcccttatgagattttcaatacccttccatgaagcagggttgaaca

SEQ ID NO: 471846 - DNA, 581 bp, Homo sapiens
ttttttaaaattctgcatgcatggatacagcactttcccacttaggctaattcagactatctagacatctttaattttcacaaattgattgcacacactttatagggtattgttattgcatgcagcaagcctgagactatgcctcatatacagaaggttctcaataagtgggagtatgtttcctaagttcctttgcttatatggccccttagctccctgtactttccctattataatacatatcacactttattggaaatggaccaattagccacaaatcaatttactgcatgacaactttgctgaataatcaaatcactaaaatgcagaaaagacaattagatgagacttgctgaaggatcagttagaggaatggccaattgggaaacttcttctaaatattaaatattacctaaagttttaatgtagctggcagcatgtgtaggttgagaagtggggatagaaaaatgaaaggcrctggtgacacctccttgtacccctgaacttgcttctaattggtaacttgggtagcaacctgccccacagagaacagtttcaacagcttttgcagattgttcatt

SEQ ID NO: 471847 - DNA, 628 bp, Homo sapiens
cgtgtccccactgcctggtgtgcggtgacattgggtgatggcrgggcgttggaccacaggactggtgtgtgaggtgccgcctagagatggggtgacctggtgatctgggagtgatctggggagcccaggctggagacggggagggtagctactgcagctcctgccctggtgccgcacttctgtcccgggaggtggcgctggcccagactgtcccatcccatgcctcagggccccctcctgctgcactgggccagccgtgcttgccagtcccagcgggttctcggccccgcgacagcctccttgctcagagctcttgggcgatgcggctgggttggacagagcagatgctggccatgcctccactggggacatgcacagggcctggggtctgtggggacgtgaggaacggtctgacgatgacgacacacccagcatcagcccgcctccacctggaggcccaccagcacctggcccgggacccaccctctctccagaacctgtcgctgtgccccggacggtaggaccggtgatgggtctgaaaggcagctccatccactcctggccgtgcgactttggggacctggcttcctgcctaagccccggtttccctctctatagaatgggctga

SEQ ID NO: 471848 - DNA, 497 bp, Homo sapiens
ggatttgaacatcagtctgttaagattccaggtgtctaasttcttacccacgactgagccgcccctgcagaagcggagggcttacccaacatacgggtacactggcgctcacagggcctagctggtgtctgcagggtgcctggccagatgtctgtgaccctctagggcagcagccaagggaagggcccaaagagagaccccagggcctgggtgtgttttggggccactgtttgtctccatagcactggcccagcccaggactggggccaccagcatcgacacttcatctgctcctggggtggggtctctgtgatgccaccagtgtttcttccctctctttgcagatgcagagcaaagcggcagtccccggacagggatgggctctgaccaggaggacagcaagcccatcacgctgggtgagtctgggggcagcgtggcggtgaagggcggagggcgcagccctgtcctcgtcttttatttgggaatcatttgcttgg

SEQ ID NO: 471849 - DNA, 497 bp, Homo sapiens
ggatttgaacatcagtctgttaagattccaggtgtctaagttcttacccacgactgagccgsccctgcagaagcggagggcttacccaacatacgggtacactggcgctcacagggcctagctggtgtctgcagggtgcctggccagatgtctgtgaccctctagggcagcagccaagggaagggcccaaagagagaccccagggcctgggtgtgttttggggccactgtttgtctccatagcactggcccagcccaggactggggccaccagcatcgacacttcatctgctcctggggtggggtctctgtgatgccaccagtgtttcttccctctctttgcagatgcagagcaaagcggcagtccccggacagggatgggctctgaccaggaggacagcaagcccatcacgctgggtgagtctgggggcagcgtggcggtgaagggcggagggcgcagccctgtcctcgtcttttatttgggaatcatttgcttgg

SEQ ID NO: 471850 - DNA, 464 bp, Homo sapiens
cattctgtttacttatacggtgacyaagccatctgctagtcattcccctattgatgatcattcagggtgttccctattgtttgtgactacatatggtgtggcaaagaatatctttgaatatattcatttcccacatgtatgggtatcttggaaagaaacacatttccagatgtggagttgttgggtcaaagggtgagtacattttaaattctgttaggtgctactttattttttaattttttatttttttttgagacaggatctcattctgttgcccaggcatggtggcacatgcctatgatcccagctacttgggtggctgaagctcgagaattgcttgagcccaggagatggaggttgcagtgagctgagatcgcaccagtgcagtctagcctgggtgacatagcgagactctgtctcaaatataatgcaacatggtgtccatggtccaggtgaggctgagc

SEQ ID NO: 471851 - DNA, 464 bp, Homo sapiens
cattctgtttacttatacggtgaccaagccatctgctagtcattcccctattgatgatcattcagggtgttccstattgtttgtgactacatatggtgtggcaaagaatatctttgaatatattcatttcccacatgtatgggtatcttggaaagaaacacatttccagatgtggagttgttgggtcaaagggtgagtacattttaaattctgttaggtgctactttattttttaattttttatttttttttgagacaggatctcattctgttgcccaggcatggtggcacatgcctatgatcccagctacttgggtggctgaagctcgagaattgcttgagcccaggagatggaggttgcagtgagctgagatcgcaccagtgcagtctagcctgggtgacatagcgagactctgtctcaaatataatgcaacatggtgtccatggtccaggtgaggctgagc

SEQ ID NO: 471852 - DNA, 566 bp, Homo sapiens
caaatctccaactgttccttgcagcgaggagcggtcatgtgactagcgtctggcaaatgggatgctggcgttaagtggtgccgcttgcggactgctcttttgaaaggaatggatgtttgctcctttgccccctctctcttcctgctggctggkatgcaggtgcagtggcaggagatgaagccgcccccaggactcaggggtggaagccgtgggaggaaaaggacacggcctccaggcctgggcacatcactaggcccaaccatttagagtttccagtcccccttgtcgtaaggatcagctcagggatgggcccagtcagcaacagagctgggacttggccagacactgaggtccaggggctctgcttcagcaggtgctaagcagaagggacagcggtctggagctgttacgggtgctaggccgaagggacagcggcctggagctgttacaggtgctaagccgaagggacagcggcctggagcggttagaggcatcttatgtacctcaccgagaaaacctgactaaaaactgtcaacatagagatgagcagagacagggaggaattc

SEQ ID NO: 471853 - DNA, 576 bp, Homo sapiens
gtgtgattgttcacgcctgtaatcccagctacttgggaggctgaggcaggagaatcacttgaacctgggaggccgaggttacagtgagccgagatcgtgccactgcactccagcctgggcgacgagagcgagactccatctcaaaaaagaaggaaagtacatagggattcaatgtttccagccaggaaacatttcatacaaatgtttgtgttcaagaataactttgcatggaatagcggaaatctgtattgaaaattgttctaagaaaatgtcactttttgcctaggtacagtggcttacacctgtattctcagtactttgggaggctgagatgggaggatcacttgagcccaggagttcaagaccagyctggataacatagtgagacccccgtcttagcaaaaacaaaacaaaacaaaacaagacaaaacaaaaaaaaccttagctgggcatggtggtgagtgtctatagtccccactacacaggaggctgaggtgggaggattgattgagcctggaagtttgaggctgaaaatgagctataattgaatcactgcatcccagcctgggcaacaga

SEQ ID NO: 471854 - DNA, 593 bp, Homo sapiens
cctgagttcaagaagctatgtgggctcaggatgtaaatacataaaatatgtcatactgattcccacttacccagtccctctgtaactagatctcatgagttggaatgctgcaaccctccatgggctcctttatcttaaaaaaagagatgtagcagccgggtgcggtggctcacgcctgtaatcccagcactttgggaggccgaggcgggcagatcacgaggtcaggagatggagaccatcctggccaacatggtgaaaccccgtctgtactaaaaacacaaaaattagctgggtgtggtggtgcgcgcctgtaatcccagctactygggaggctgaggcaggagaatcacctgaacccgggaggcggagattgcagtgagccgagatggcgccactgcactccagcctggctacagagctagactccgtcccaaaaaataaaatagaataaaatggccaagaatcagggagagaacctgtgctgctgcctgtacagatgcccagcgcccgcccaacaccacacagaatcagaatctgcagggactgagcacccgtggtctggcatctgaagccaggccatcttggttcacatc

SEQ ID NO: 471855 - DNA, 613 bp, Homo sapiens
ctgcctgtctgacctagagccagaacacaccccttgccccctccaatccagcragcaagaccgggcgggtgggtgctacaatcagccactgtctgtgctgttccttcctcccagggtcccgtcctcctcctctcatctggcagcttcaacctcagctcggccagcacctcccctggggagccttcttggattactgcaggcccggtcaggagtcccttatgcccccaccgcagcctgggcgtccccagaacactgggctgagatacctgcttatgtggctctcagcacagaggtcaagggacagccttggttccctgggacctcagacttcttctcggtgtgtggtgacccttgagaaaacggagctcccaacatcactgcctgctctcggatttggaggggttctacctctcggaagcacccccatcactgcagagcagataccctctcggtcttctccaggcagctttgggatctgagccagcctggaagagctgtccctgcccactgagtcccccgttagaaaatgtcttgcaaatgcttgcaatctctcctttggacgaagcttccccacctttttctcagcaaaggggcagagacacaggaaggacac

SEQ ID NO: 471856 - DNA, 485 bp, Homo sapiens
attctcctgcctcagcctcccgagtagctgggatcacaggcgtgcgccaccacgcctggctaatttttgtatttttagtagagacggggtttcaccatgttggccaggctggtctcatgctcctgacctcaagtgatacgctggcctsggcctcccaaagtgctgggattacaggcatgaactaccacacctggcccagggtgattttttttttgtatgtgaaaatgatattctgttcgaatcatggctgttcctcacatgacttgtaactactgagcacacgcagcccaggcctcttctcgcctgtggtaggatcttccgtggcaaggctgtgccttgggcgtttatcacccaattccctgtggacacttcggttgcctccattttttcccaacctcacccaatgccatggtgaatctccatgctgacatctcccaggtccccttggggaagcatttttgtctctcactggtgtccagtgaagg

SEQ ID NO: 471857 - DNA, 609 bp, Homo sapiens
cagagtcttcctagtgttctctaatggctgggaaagttggatttactcccaacaaggaggtcacagagatgtccagggagagkgttcctagaaatgcacacatggggctaaaacccatgtctaagattcttagttttcctttatgcagcactatgagactttaattttatagacataactgaagatgaagctgcctggtgctatagtattatgtctcccaagcctcagatatttatagaccatctctataatgttttctacagtttgtaccatctttattattattgacttcatacattttttctaaataaatttactttacaaaacacccttgtcccagcagcgtgcaatggcttacattgtaatcccaggtacttgagaggctaagatggggggatcacttgaagccaggagtttgaaacaaaacatccccgtcctttgcaatattgtccatgaaattaaaggttttgtgaatttgcttaaaattgtttctaacatgcattaaaataaacatataactattaaagtttcttaaaagcttatttatgttccacctaaagtcagttttgggaaacactgatacagtggaataaccatggactttttata

SEQ ID NO: 471858 - DNA, 609 bp, Homo sapiens
cagagtcttcctagtgttctctaatggctgggaaagttggatttactcccaacaaggaggtcacagagatgtccagggagagggttcctagaaatgcacacatggggctaaaacccatgtctaagattcttagttttcctttatgcagcactatgagactttaattttatagacataactgaagatgaagctgcctggtgctatagtattatgtctcccaagcctcagatatttatagrccatctctataatgttttctacagtttgtaccatctttattattattgacttcatacattttttctaaataaatttactttacaaaacacccttgtcccagcagcgtgcaatggcttacattgtaatcccaggtacttgagaggctaagatggggggatcacttgaagccaggagtttgaaacaaaacatccccgtcctttgcaatattgtccatgaaattaaaggttttgtgaatttgcttaaaattgtttctaacatgcattaaaataaacatataactattaaagtttcttaaaagcttatttatgttccacctaaagtcagttttgggaaacactgatacagtggaataaccatggactttttata

SEQ ID NO: 471859 - DNA, 565 bp, Homo sapiens
gccccagaaaacctggcatgccttaatgcttgagagccccattccatttcttattaatctcttgaaagtgaagaaaattttacaaatcctgccagagaatgtcaggcatttgtaccagtgttttagatggtggcaaccacgctagtggctgttaatyagccattttgtgcccgtcatttagaatgtctatttttttgtgttctgggatgattttcagaagcaagcaaggggaaaagagtcaaaccaaataaaaagaaatccagataagagcattcacaagaattttaacccaggcatgcagatttttaaagtatttaaattaggcacacaggccaaaatggaagtaaattcaccagaatagacttgcctcacaggcagaatgtaaattttgtagaatccagagtacgtgatctagaaagatatacgcctttctctcagaaaggacttgctagaaaagacaaaaagttttttttttttttatcatcccaggagaaatgtatggtcttttactaaggcagccttatccaaatcagattccaaataaagtcaagagcttctaccaaaa

SEQ ID NO: 471860 - DNA, 612 bp, Homo sapiens
tgaacactcctacaccacccagccaagrggtgtttctctgagccttttttttccaaggatatcccagagatgggtgatgataacaatgggtgtttgagcagacatagcagaggagaccaggaaaaagtctagaggtgagtttagtactcagactgcagggcctccaggtggggcagctctacccgggtgtttgatggtgactgacaagagctagtgaccgccaggaaagtgcagcagagtccagaagaagatagagaaagggtgagtgagacaagcaggggctggctgaaaatctgaggattctcaatgacataacaagaacaatgaagacaaattaggagaagagatgtgtgttatgttaggaaatttacaaagagctccctgtccccagctcctgtgcagtcagcaaaacggaggaaatcccaacacaggcatgagaaatgctttcttccttttctctcgacctacggaaacacaacaagagtttgatcaaattcatctaaactaggcagagtctaagtgagatgccagtggctggtgcagttcccattccaagggaccccaccttatgacaatggtgtcatcatgaggacacaggtgtatgtggaatgg

SEQ ID NO: 471861 - DNA, 612 bp, Homo sapiens
tgaacactcctacaccacccagccaagaggtgtttctctgagccttttttttccaaggatatcccagagatgggtgatgataacaatgggtgtttgagcagacatagcagaggagaccaggaaaaagtctagaggtgagtttagtactcagactgcagggcctccaggtggggcagctctacccgggtgtttgatggtgactgacaagagctagtgaccgccaggaaagtgcagcagagtccagaagaagatagagaaagggtgagtgagacaagcaggggctggctgaaaatctgaggattctcaatgacataacaagaacaatgaagacaaattaggagaagagatgtgtgttatgttaggaaatttacaaagagctccctgtccccagctcctgtgcagtcagcaaaacggaggaaatcccaacacaggcatgagaaatgctttcttccttttctctcgacctacrgaaacacaacaagagtttgatcaaattcatctaaactaggcagagtctaagtgagatgccagtggctggtgcagttcccattccaagggaccccaccttatgacaatggtgtcatcatgaggacacaggtgtatgtggaatgg

SEQ ID NO: 471862 - DNA, 493 bp, Homo sapiens
ctcccacccactcccaggaagtcctcccctcacctgtgagcaggagcccctgccagggaatgcacactctgtayggacaggctgaaggggaccccatggtctctgctgcctgcttgtcctctgtggagaagagcttgggctccaggaactctcttgtcagggctgctgtgactgtcagctctgctgtccttcctacctctgtgctgagcctcctcccagggcaggagcactttccaagatcacatggtccaggggtggggtctctgctcaggagtcctctgtcccctcccctctcattcctgcctcttttgtccctcttcctctttcccttttgtctatattcagttcccgatacaaagctttgagtagcaaggctgatggacccctgtcccctgggaggacaaccaacctttcccagtgctgacctatgctgtgttctggccttgggtctgtcacaccagggggattatttcccttgtgacagagaaaccca

SEQ ID NO: 471863 - DNA, 360 bp, Homo sapiens
tgggggtggtttggcttgaaggggacagggagggtactcctgcattaaggacaacatgagcactttgagaggtaggcaagaaacggatgtatctggggatgagagaggcaggttgaataaatgcactgttgaatgagaagacggaggcctctgggttggaagggaaggcaaattagtatgatgtcatctggctgggaaaagctgattgggagaggtaggtgggattataggggcagcgttttgcagttcctatatatccctgtttctcaaactgtgatagtatacctygggtctggggtggggtgaaaaacaaaacaaacatggcagatttgggcgtgtccaattttctcattggtggag

SEQ ID NO: 471864 - DNA, 621 bp, Homo sapiens
ctgcaagcacttatttccctcctatgaaatccttcaataggtccttgttgtccgtggactctcatccaaattcctactttagcatttccccaagtgttttacttctttaaatcttcctccccacccattgccctcctacctaagttctatgtttagtgttcctgtactttcctcccacctcatgctgttccatcaccttggaatgccttcttctacactttcatctccagaaattcctcccagccaaactcccatggaacttcctccttgaatcttttccagtcctacaaccaaccagatgtgagctttctttctcactcccccaaattttcataaaactccaatttcttttattgttcttgccatattttgagtaatagtgatttaggcatatttctcatttcttctaactgagggtgggcagaggcaatgtcttactcaactttgtgcctcgtccaaaacttagcacagcaccttgtgcacagaaggtacttaacactrattatggaaagaagttggaagctctccactagtactgacatatgcagctactatggcctgagtatatttttggtattagtgggttacaaaatattttaggggtttgatggtttataatcc

SEQ ID NO: 471865 - DNA, 609 bp, Homo sapiens
ctgggaagggacaggtcccagtggcggagggagcatgtgtactttatgtgacccaacagggcacaaagagaccagtgagaaggcacctggaagcagaattgcttcgatgactggacgtcttwccaccgactagttagatccttgctcatacagcccactccccaaccctaggaggggctggatggccaccaggggagggactgtgccctaggttgagggctgtgccagtttcattcagttctaaaattctgtgattttcatgaaagtctgagagttgttgcaaaggtgaaaccaaacaggaagcacaggtagcatggctgagccagtggtgggtgagagcaagccccaggttcgccacccaccgtgtctgtgtgttggctagaggctagcgcacagacactcagtaatccagaggggcaggtgaggaagctctagtattctaggtatgcagagtacatctgcatacacatagccaggaggtggcagtggggctgacacatggtgagcctggctgaggtcctgcttccgcctttcatcccactgccttccccgaggccacatgcctctcaaatactctgaaggattcattctgtcattatctgaagtagc

SEQ ID NO: 471866 - DNA, 600 bp, Homo sapiens
tcataaacactgattgaatgaagaagactgaattaaagggaagtactgagcgaatcagaaaacttactcttccacatgtgttgggacctgcaggactggatctgtgcaaaagaacaacaaagccatcatcagaaacatcccaaaatgtcaagattcccagaggcttcccaggaccaggccaagttgtaccggtaataactttctccctccygttaacctacatgggctagtgcacgtgaaggttatatgcatttttgtatcaccgtgcatatcttttagaaaacatatccacaatgatgcaaatgtaagctcttggatagttactgaggctggatagagaactgagaccagaacagaactgctttcaagaaacttgcatataacttgggggatggatgcagaacgaagaaccagtcaccacacaccgtggacaaggggtcagagcatcactatctgacacctcaaagacttctaaaaccttaatcattaccttgtccgatgcctggagtagctctacatattcccattaggaaaagtaaaatgggtttaagaactaactttgattggccagtaaatggacacacctctttggagcggcaa

SEQ ID NO: 471867 - DNA, 600 bp, Homo sapiens
tcataaacactgattgaatgaagaagactgaattaaagggaagtactgagcgaatcagaaaacttactcttccacatgtgttgggacctgcaggactggatctgtgcaaaagaacaacaaagccatcatcagaaacatcccaaaatgtcaagattcccagaggcttcccaggaccaggccaagttgtaccggtaataactttctccctcctgttaacctacatgggctagtgyacgtgaaggttatatgcatttttgtatcaccgtgcatatcttttagaaaacatatccacaatgatgcaaatgtaagctcttggatagttactgaggctggatagagaactgagaccagaacagaactgctttcaagaaacttgcatataacttgggggatggatgcagaacgaagaaccagtcaccacacaccgtggacaaggggtcagagcatcactatctgacacctcaaagacttctaaaaccttaatcattaccttgtccgatgcctggagtagctctacatattcccattaggaaaagtaaaatgggtttaagaactaactttgattggccagtaaatggacacacctctttggagcggcaa

SEQ ID NO: 471868 - DNA, 600 bp, Homo sapiens
tcataaacactgattgaatgaagaagactgaattaaagggaagtactgagcgaatcagaaaacttactcttccacatgtgttgggacctgcaggactggatctgtgcaaaagaacaacaaagccatcatcagaaacatcccaaaatgtcaagattcccagaggcttcccaggaccaggccaagttgtaccggtaataactttctccctcctgttaacctacatgggctagtgcacgtgaaggttatatgcayttttgtatcaccgtgcatatcttttagaaaacatatccacaatgatgcaaatgtaagctcttggatagttactgaggctggatagagaactgagaccagaacagaactgctttcaagaaacttgcatataacttgggggatggatgcagaacgaagaaccagtcaccacacaccgtggacaaggggtcagagcatcactatctgacacctcaaagacttctaaaaccttaatcattaccttgtccgatgcctggagtagctctacatattcccattaggaaaagtaaaatgggtttaagaactaactttgattggccagtaaatggacacacctctttggagcggcaa

SEQ ID NO: 471869 - DNA, 600 bp, Homo sapiens
tcataaacactgattgaatgaagaagactgaattaaagggaagtactgagcgaatcagaaaacttactcttccacatgtgttgggacctgcaggactggatctgtgcaaaagaacaacaaagccatcatcagaaacatcccaaaatgtcaagattcccagaggcttcccaggaccaggccaagttgtaccggtaataactttctccctcctgttaacctacatgggctagtgcacgtgaaggttatatgcatttttgtatcaccgtgcatatcttttagaaaacatatccacaatgatgcaaatgtaagctcttggatagttactgaggctggatagagaactgagaccagaacagaactgctttcaagaaacttgcatataacttgggggatggatgcagaacgaagaaccagtcaccacacaccgtggacaaggggtcagagcatcactatctgacacctcaaagacttctaaaaccttaatcattaccttgtccgatgcctggagtagctctacatattcccattaggaaaagtaaaatgggtttaagaactractttgattggccagtaaatggacacacctctttggagcggcaa

SEQ ID NO: 471870 - DNA, 532 bp, Homo sapiens
tgcacattgaaggccatcctgcatctgaggtacttggtgaatgtggtggacggcacgccctgaggagggcgaggagtgcgaggagtggcacggatgcctggggaggtgggtagctgtgactgttgtcccaagttgtctctgtttctcacccaatatgaggccttttttcttccaccattcaaggctcaaaggatgtgtgggcttgagcaccctgcgctctgcaaatcttcctgtccctgatgccagagagggctccaggygaggtctggaggaacttaaagtgaaaagaatgtctccagtgtcatttctaatagagcttatttggatcttctctcttttcttggttaatcttgctaatggtctatcaattttatcttttcaaagaaccagcttttttttttttttgagatggagtcttgctctgttgcccaggctggagtgcagtggcatgatctcagctcactgcaacctccgcctcctgggttcaagtgattctcctgcctcagcctcccaagtagctgggactataggc

SEQ ID NO: 471871 - DNA, 532 bp, Homo sapiens
tgcacattgaaggccatcctgcatctgaggtacttggtgaatgtggtggacggcacgccctgaggagggcgaggagtgcgaggagtggcacggatgcctggggaggtgggtagctgtgactgttgtcccaagttgtctctgtttctcacccaatatgaggccttttttcttccaccattcaaggctcaaaggatgtgtgggcttgagcaccctgcgctctgcaaatcttcctgtccctgatgccagagagggctccaggcgaggtctggaggaacttaaagtgaaaagaatgtctccagtgtcatttctaatagagcttatttggatcttctctcttttcttggttaatcttgctaatggtctatcaattttatcttttcaaagaaccagcttttttttttttttgagatggagtcttgctctgttgcccaggctggartgcagtggcatgatctcagctcactgcaacctccgcctcctgggttcaagtgattctcctgcctcagcctcccaagtagctgggactataggc

SEQ ID NO: 471872 - DNA, 587 bp, Homo sapiens
gggagggtactggaggggaagggcacagcaacagcacatggcaggcacctatgaggaacaaatgaaggccgcctggactccaacagaggggaggggaggggatgggaggctgggcatggtggctcacacctataatcccaacactgtgggaggctgagttgggtggatcacttgaggtcaggagttcgaaaccagcctggccaatgtggcaaaaccccatctctactaaaaatacaaaaattagccagacgtgcaccagcctggtacaagtcccaactactaaggaggctgaggcaggagaatcatttgaacctgggaggcggagtttgcagtgagctgagatggtgccactgcactccatcctgggcgacagacaaagcgagactctgcctcaaaaaaaaaaaaaaaaaaaaaaaggttggggaggagagtgagggccaggcccatgtcccaggggcctgctgacctacccccctggcccgcccctcgcaggtgctgggcctgtcacagggcagcgtsagcgacatgctgtcccggccgaagccatggagcaagctgacgcagaaggggcgggagcccttcatccg

SEQ ID NO: 471873 - DNA, 492 bp, Homo sapiens
ccctgctccttggtgaagatggtatccacagaagcagagtcaaggatgcttccatgagtctgccgtcagcatcaggacccactgcaggtaaaatggatgggattgcagtgtgctagggtgatggtcygtgtacctgcacccatactcagcatgcaccttgcagacagtctctccacaccagccccacagatccccacccacccccaggcagtctctgcactaaacccactggcccaggacagccgtgccctgcggccttacctggctgtttcacagtgacttctgtgcgcccagaaacctcctctgccagcttgtaccaggcgtagttggggctcagcagccactcctccacgtggcagtagtagctgccgctgtcgctgacctcggctctctggacggtgaggctgaacaggccccccgacacatgcctctcaaactggagcctggctctcaggccctcctcctcggcgtaagtaccgtattcaaaggcgg

SEQ ID NO: 471874 - DNA, 492 bp, Homo sapiens
ccctgctccttggtgaagatggtatccacagaagcagagtcaaggatgcttccatgagtctgccgtcagcatcaggacccactgcaggtaaaatggatgggattgcagtgtgctagggtgatggtccgtgtacctgcacccayactcagcatgcaccttgcagacagtctctccacaccagccccacagatccccacccacccccaggcagtctctgcactaaacccactggcccaggacagccgtgccctgcggccttacctggctgtttcacagtgacttctgtgcgcccagaaacctcctctgccagcttgtaccaggcgtagttggggctcagcagccactcctccacgtggcagtagtagctgccgctgtcgctgacctcggctctctggacggtgaggctgaacaggccccccgacacatgcctctcaaactggagcctggctctcaggccctcctcctcggcgtaagtaccgtattcaaaggcgg

SEQ ID NO: 471875 - DNA, 492 bp, Homo sapiens
ccctgctccttggtgaagatggtatccacagaagcagagtcaaggatgcttccatgagtctgccgtcagcatcaggacccactgcaggtaaaatggatgggattgcagtgtgctagggtgatggtccgtgtacctgcacccatactcagcatgcaccttgcagacagtctctccacaccagccccacagatccccacccacccccaggcagtctctgcactaaacccactggcccaggacagccgtgccctgcggccttacctggctgtttcacagtgacttctgtgcgcccagaaacctcctctgccagcttgtaccaggcgtagttggggctcagcagccactmctccacgtggcagtagtagctgccgctgtcgctgacctcggctctctggacggtgaggctgaacaggccccccgacacatgcctctcaaactggagcctggctctcaggccctcctcctcggcgtaagtaccgtattcaaaggcgg

SEQ ID NO: 471876 - DNA, 552 bp, Homo sapiens
ctgtccgtggaggctggctcgatttgcattttgtgtttttctatgacctgggtatatctgcatgactcctttcattccctattgattcatcctatcgtgtccgtgaaaccttcagcttctccactttcaaacggctcttggggagacatcctcccattaatctgtcaatgtcaacccactgacaccctttacagtgtcatgaaarcagccacggcttaggatgtggcatatgtgttccatgaatcatgcttttaattttctctaatttctgcttgcccattctcagattccttgtgggtcgggcctcttctttctggccctaggcctgtgtgctgatgaggcaggtcgcgcatgcacacgctggttctagctgccagggggccccaccctgggaggctgtgagtcacccttaacacctggcgtggtgttcttcacagccgccctcttgactctagctcagattctgcgccctcgaggtgcactgggtaagaacgcagctctgcacgcagcatctggagcctgaaacgcacgtcatggagagagaatgtgcag

SEQ ID NO: 471877 - DNA, 577 bp, Homo sapiens
caggctaagccagccacatcctggcatctcagatcccgagttcctcaagtgccctcctccgtcccactctgccacccccatccccaatagcacatcccaggtggtgtcatcrcccaaaagaatttcatctccaaaatcgctggatcatcacaggtctccagaccttccggctctgctgtttaaccatttcccagtgacacttcctccacctctggggaacctctcgcccgtggattcctctttccttgccctgtgattgtccgctccacactgacgtgtcctccctacacagcctaggtcctgtgcttgaccctcttaataattctcttgtccttttgtcttcttttacacctgtctggtgaaatcccacccatccatcatcttctgcctcatatccaggccactgaccactgctggagaaaagtcactcaactttcaaaagtgatgccgctgaaaggccacagcctctggaattcctcagtgctgccccgcttctttggtcaacgctgtcttcctcctcaaaccgtcttccttctccctaatcttcacgccctcctctcttccacctcacgccata

SEQ ID NO: 471878 - DNA, 577 bp, Homo sapiens
caggctaagccagccacatcctggcatctcagatcccgagttcctcaagtgccctcctccgtcccactctgccacccccatccccaatagcacatcccaggtggtgtcatcgcccaaaagaatttcatctccaaaatcgctggatcatcacaggtctccagaccttccggctctgctgtttaaccatttcccagtgacacttcctccacctctggggaacctctcgcccgtggattcctctttccttgccctgtgattgtccgctccacactgacgtgtcctccctacacagcctaggtcctgtgcttgaccctcttaataattctcttgtccttttgtcttcttttacacctgtctggtgaaatcccacycatccatcatcttctgcctcatatccaggccactgaccactgctggagaaaagtcactcaactttcaaaagtgatgccgctgaaaggccacagcctctggaattcctcagtgctgccccgcttctttggtcaacgctgtcttcctcctcaaaccgtcttccttctccctaatcttcacgccctcctctcttccacctcacgccata

SEQ ID NO: 471879 - DNA, 577 bp, Homo sapiens
caggctaagccagccacatcctggcatctcagatcccgagttcctcaagtgccctcctccgtcccactctgccacccccatccccaatagcacatcccaggtggtgtcatcgcccaaaagaatttcatctccaaaatcgctggatcatcacaggtctccagaccttccggctctgctgtttaaccatttcccagtgacacttcctccacctctggggaacctctcgcccgtggattcctctttccttgccctgtgattgtccgctccacactgacgtgtcctccctacacagcctaggtcctgtgcttgaccctcttaataattctcttgtccttttgtcttcttttacacctgtctggtgaaatcccacccatccatcatcttctgcctcatatccaggccactgrccactgctggagaaaagtcactcaactttcaaaagtgatgccgctgaaaggccacagcctctggaattcctcagtgctgccccgcttctttggtcaacgctgtcttcctcctcaaaccgtcttccttctccctaatcttcacgccctcctctcttccacctcacgccata

SEQ ID NO: 471880 - DNA, 612 bp, Homo sapiens
ctatcactggctagctgtacgaccttgggcaaactgctcagcccctttaggtgcctcagtttcctcatctataaaatgaggatgattgtagaattacctcagagaattaaatgaatataataaagtgcttagagcactgcctagaacacagtaaatgttctgtaagtctttgctgttataatttctgataagaccacaaacattaggatttttttctgacatgagcctcagtagcacactgtttggtgtgacggaggtggttctcttagactatgtccaagggggcttgttactgcatgtggccaggtcaccaaggtgaaccttgttaaaactccaattctcgttcaactctggcagcaaagactccaaggagaccattaaggtgacactctggggtatttcaggaatgttctctgtatcttgatgtcccagctgaataggcctggcaggttgcccatagcaaaacttgcacggaggccgaacttcatctttgatttcctctgctctcccttgacaggttctgccaggctgtttgaccttaggcaagtcactctgccttttgkaggcttagctttcttgcccatgaacaggggccaatgataataccagtct

SEQ ID NO: 471881 - DNA, 453 bp, Homo sapiens
gtggtgggagaagagtttatgtgtggcaaagccatcttaggccactctatagaggagtccactttgatatagctaatttattcccaggtctctctttcctgttccaaaccaacatttaatgctggtactgtatttttacagtactttattgaggaaaaatttacataccaaaatgcatacatcttgagtgtacagctaggatgaatttttatcatgcggccaccacccatatgaagatttagttatagaaatagttgccttgtgcccctttctagttgataacctggccagcgttaacctctcctctgataagaaattcactgtcatttgtcttggctttcatagacaaggtattgttttctctggttgtttcaaggttttttckttctctttagttttcacaagtttaattatgatgcatcttggagcagatttctttgggtttatcctgtt

SEQ ID NO: 471882 - DNA, 587 bp, Homo sapiens
ccctttcccatgattcttcccttaggatgggctgcccatgtgtgcagtgcccttcttatgcctgggaagtgagaacatgcagtgtgcttaggaagctgtatgcatgcccatctgaggctcttcttcccttttccagtggagtgcccccggaaagtcatactccaccattttgtctcttaatgcagatgcctaggaagtggcttcttcccaggcatctgcattcaattaacactttattttttattttttgagacggagttttgctctttttgcccaggctggagtgcaatgacatgatcttggctcacagcaacctccgcctcccgggttcaaatcattctcctgcctcagcctcccgagtagctgagattacaggcatgcaccaccatgcccagctwattttgtatttttagtagagacagggtttctccatgtcagtcaggctggtctcaaactcccgacctcaggtgatccacccacttcggcctcctaaagtactgggattacaggcgtgagccacctgccctgctgcaattaacactttagtgcaacaggtgtggcccttgaggaaatggcctctccctggc

SEQ ID NO: 471883 - DNA, 522 bp, Homo sapiens
ccagcacctgataggcagtaaactccaaatccttatttgctgttactcttattatgtggtccttcttgggctctcagtgtgccaccagaaaaagatagrcagagtcttggtgtaggacaaagcccttggtaatgtccatgacatctggtggggtgtggttatgtggactattgccagaatgaaagtcttaccctcactcgaccaagaaaaacacacaaagtccagagggtataagccatttccttcctgcttcgtttgaccaactttctgtccatatcgaactcccattactagatgcctgggaggctgttttctctctgacccccttccttcttgtccgcttcccaccctgggatcgtcttggtcttttcaggctcttgcttctccccacagagtcgcagctccaccttgaagggcttccgtaggcccaaccctgggcactgcaggtcttgccaagtcttctgagtgaaacctccatatgaccaaaaacccttgctttgtcattatctacagcctcttaaa

SEQ ID NO: 471884 - DNA, 522 bp, Homo sapiens
ccagcacctgataggcagtaaactccaaatccttatttgctgttactcttattatgtggtccttcttgggctctcagtgtgccaccagaaaaagataggcagagtcttggtgtaggacaaagcccttggtaatgtccatgacatctggtggggtgtggttatgtggactattgccagaatgaaagtcttaccctcactcgaccaagaaaaacacacaaagtccagagggtataagccatttccttcctgcttygtttgaccaactttctgtccatatcgaactcccattactagatgcctgggaggctgttttctctctgacccccttccttcttgtccgcttcccaccctgggatcgtcttggtcttttcaggctcttgcttctccccacagagtcgcagctccaccttgaagggcttccgtaggcccaaccctgggcactgcaggtcttgccaagtcttctgagtgaaacctccatatgaccaaaaacccttgctttgtcattatctacagcctcttaaa

SEQ ID NO: 471885 - DNA, 522 bp, Homo sapiens
ccagcacctgataggcagtaaactccaaatccttatttgctgttactcttattatgtggtccttcttgggctctcagtgtgccaccagaaaaagataggcagagtcttggtgtaggacaaagcccttggtaatgtccatgacatctggtggggtgtggttatgtggactattgccagaatgaaagtcttaccctcactcgaccaagaaaaacacacaaagtccagagggtataagccatttccttcctgcttcstttgaccaactttctgtccatatcgaactcccattactagatgcctgggaggctgttttctctctgacccccttccttcttgtccgcttcccaccctgggatcgtcttggtcttttcaggctcttgcttctccccacagagtcgcagctccaccttgaagggcttccgtaggcccaaccctgggcactgcaggtcttgccaagtcttctgagtgaaacctccatatgaccaaaaacccttgctttgtcattatctacagcctcttaaa

SEQ ID NO: 471886 - DNA, 436 bp, Homo sapiens
tacaaattgcactgatccaacaaccaatgaaatgttggcaaaaagttcaaattatcattagtcagcgaaagactctaatattcaccaagaaatcaaacaaattcatagattatagtacaatatagatagtttgggtaatgaacactaagatccttgttgctgtaagactgaaaattacaaaaaacccatgaagaaaacacaaatgaccaataaggagttttagcctctaggtaaattggtacattgtcttgtagatggtcttcctcctgtaacatagtctatcaaccaaacagtgaggttaactttaaaaaataaaaaaaaaatttggcattggacaatttgaccttctgcttttaaaaaaaaaaaagccagtacaattttagccaatttgttygccaaaagtgcatactgataacagattagtctgcatggcaca

SEQ ID NO: 471887 - DNA, 500 bp, Homo sapiens
ataaatacataaatagatgagtaagtgtgcaagtacataatacaaagcttagcctgtaaggtaccaggacttggtgtttcaggaagtacctctatgtctctctaccctttgggtgatcttccactcaaagatcctttgaatatgtagaacctttggggtcttgctcttacactggctatctttactgggaatcactcattggagtgggtgtccagcagccttgcttataccccatgaactggtcattttggccacatttttwtggaacagagatggacatttgacccaataagttttcattcgatttttacaactcggagtttgaaattgaggctaagagagtctacctctttgcaggtcagttgctagaacagtaacacataaactgaggagctatgacaaaccatacgccatcatgtggaccacagaagcaggtctgagaggaaaacaaagaggctttcagaaagagaaaatattcccttcctagttcaaggtcctag

SEQ ID NO: 471888 - DNA, 368 bp, Homo sapiens
ccaacatcaggcgcatgggctctccaggccactctgcactgaagcaaattgcgccattctgtatggtgcttgttcatacacactgcccacagggctctaataatttagaggcactggactgagctcctgagggcaggagcattcatctctgtggccacatgtttggtccagtgtctgacaaataacattcaacttgtaggaacaagtgagagcagagcatcctttctcaggaacaaggcccatcccctggtgagctgctccactggagtcccaggtccctaacctgtggcctaggtagaccttaggatttgcctcactgatgccaatgagttgctgctgcttrcttttgaaacaaagtgttggcatgt

SEQ ID NO: 471889 - DNA, 622 bp, Homo sapiens
tgtagctggcaggtggaaggggcacaggtgggtgggaagytcattagtcatacacctgacccagcttctccaaggacaacaggccagagcacagagaccattcctggtgacagtgtgacacctcctcctggagaagggggaaggagaaggcagtgcaggtgagctgaggcaccgtaacggaaggaaggggcctctctgcccagccctcactgcagggtagcagccttactggcaaggttctcaattagagtccaccagacgtgactctgaggacctatagtaaggcagtgcagaactgagccaaaatgagatgtcccgaagaagaggaggttttgtggaggtttcaagagtggtctgtaaaagatgatacacagaagatggtgaccagccacttccatcctcactgaagtgggcttagattgcagcatgagggaaacattcacggctgtgagacctcagatagggaaatagaaaaggctatgaatatttgagggctctttaaagattttgctcaccaaaatgatttgtgtgttgttctggaagcagtgaaatggattgataaacctcccagaatcctttctagcctatactcccatatcctcccaggaggggtggccttggt

SEQ ID NO: 471890 - DNA, 465 bp, Homo sapiens
cacctggaggagcctcagcaaaagttaagtggtctctcccagagaggaaggcattcttctgttctctaaggagataattgcagtctgaaacagtgggcaattacccagccttagcctggcatctyatctgcaggacctcctctgctggcctgcatttctgcaggaagaaacaagtacccttgacttgctggagagctgcttagccctggcatccatctttaagggcctgtattagtggtttgtcctcatttagtaattgtgctcgaaacgttgttgagataaaagtcaagccactcttggctgcatgtgcaaaaccagctcagccaaaggttccagcctctccatgcccatcctcagtcagtatccctgccagccatgcttgctctggggtcagctgatcaaggcccactccctgctagggaactgtgttgggattggggactcactgaactctttggccagtcc

SEQ ID NO: 471891 - DNA, 465 bp, Homo sapiens
cacctggaggagcctcagcaaaagttaagtggtctctcccagagaggaaggcattcttctgttctctaaggagataattgcagtctgaaacagtgggcaattacccagccttagcctggcatctcatctgcaggacctcctctgctggcctgcatttctgcaggaagaaacaagtacccytgacttgctggagagctgcttagccctggcatccatctttaagggcctgtattagtggtttgtcctcatttagtaattgtgctcgaaacgttgttgagataaaagtcaagccactcttggctgcatgtgcaaaaccagctcagccaaaggttccagcctctccatgcccatcctcagtcagtatccctgccagccatgcttgctctggggtcagctgatcaaggcccactccctgctagggaactgtgttgggattggggactcactgaactctttggccagtcc

SEQ ID NO: 471892 - DNA, 465 bp, Homo sapiens
cacctggaggagcctcagcaaaagttaagtggtctctcccagagaggaaggcattcttctgttctctaaggagataattgcagtctgaaacagtgggcaattacccagccttagcctggcatctcatctgcaggacctcctctgctggcctgcatttctgcaggaagaaacaagtacccttgacttgctggagagctgcttagccctggcatccatctttaagggcctgtattagtggtttgtcctcatttagtaattgtgctcgaaacgttgttgagataaaagtcaagccactcttggctgcatgtgcaaaaccagctcagccaaaggttccagcctctccatgcccatcctcagtcagtatccctgccagccatgcttgctctggggtcagctgatcaaggcccactccctgctagggaacygtgttgggattggggactcactgaactctttggccagtcc

SEQ ID NO: 471893 - DNA, 530 bp, Homo sapiens
cccaatcagatgctataaagctgtcacttctcttgttttttattgtttattcagttataaaatgtcgaggggaaactagataatctcgattcccttacgattccttaattcaaatttcttactactgcttccacccagttcccygctacatccataaatcattcatcattatttagccattcaggtccttatcagtgaggtatagctagttttaatttgtgctaaggtgttaatgggcaatgttttattaatatgatacttcatcctcaacatctacttctacaacttcagttaccatctcaaaccatcactctcctgaaagtagaaccagattcagctttaaacacctgctgtcaagaaggcccagacatctgtcagcaaagacccttgcctggtaagactgcccttctcacccctggcccagtcttggagagaggataaccactgctggtaaactgggggtggagataaatgaaaatacagaagagtagccagccacagggtcttcttggatcccagctgtggggcag

SEQ ID NO: 471894 - DNA, 627 bp, Homo sapiens
aagtctccaatcctgaaatacagacaaagaagcaaggatcattagggagatagactttcccttcttgacagcaaccacttacagactgaagataggaagagtgtcttttaaagactagtgttagttggrgccattcatgactattttcttatttctttttaattctttcctcttttataaccccagatctagtaatttctccattaacaacataaaaacaagagtcaaagagaactacctaaaacttcagggtgagccaagggcaggtttctataagcatttcaatggaagataacaagtaataagaatttcttagcaccaaataataagtgcacatgcatgagtcagtgcaataggaaggagacagagcaagaagggaaaagagaaagaaagtggggatgaaagagaaagagagagaactaggatgtctgtttaatttaggaaagagaaaacaaactataaaatcagattcaagaacaaaaagatgaagccccagcaggaagaaccagttaggactgatgatagaaagtgggttaaaagacacagtctaaacagtggctttggagtcaaacagacaggaatgcaaatcccagtttgccatatactaactttgtacaaattatctct

SEQ ID NO: 471895 - DNA, 649 bp, Homo sapiens
cttgtttcattggaaggttagggggaataatttytcatcgctagcaatatagacaaatgactatctggacccacacagttaaccagcccatttctccacactggtgcagtagtcacctgtggaaaaaaaaatagaatttactaatttgggcttttcaaaaaacattctttttgtagaaggagattctaaagttatttatgcttagccatagtattcaggcaaatgttcatttctcctggtatcagtattttaaatgaacattccatattttaataaatgaaccacaagaaaataatcccacatataaaaggtgggggctggaaagagcgttaatggcatctaaattatagccagtcctgtgtgtgtgtgtttttttttaatggggtaaaaaaaaaaatcaaatgcaatcccatcttgttttaggaatttgagaactaataaatgcatcttaatagatagtgttcctttcaaacatgtgagttctttaacaaaaatgaaataaaccaggtgtctgtgatatctaattaatcactgctggccattacataggttttgttgtttggtgcagggaggggacttttgttcgcttgtgacacaatgtagtcaatgcactagcaattgtgtatatttaaacttgattattttaaat

SEQ ID NO: 471896 - DNA, 572 bp, Homo sapiens
ctgaagatattggcaacctcagccttcctccatatcctccagagaaacctgagaattttatgtatgattcagactcctgggccraggacctgatcgtgtctgccctgcttctgattcaatatcacctggcccagggaggaagaagggatgcacggagcttcgttgaagctgctggcaccaccaactttcctgccaatgaacctcctgtagctcccgatgaatcttgccttaagtctgctcccattgtaggtgaccaagaacaagcagaaaagaaggacctaaggagtgttttctttaatttcatccggaacttacttagtgagaccattttcaagcgtgaccagagccctgaacccaaggtgccggaacagccagttaaggaagataggaagttgtgtgaaagaccgttggcgtcttctccccccaggctatatgaggatgatgagacccctggtgccctttctgggctgaccaagatggctgtcagccagatagatggccacatgagtgggcagatggtagaacatctgatgaactcagtgatgaagctgtgtgtcatcattgctaagtcc

SEQ ID NO: 471897 - DNA, 572 bp, Homo sapiens
ctgaagatattggcaacctcagccttcctccatatcctccagagaaacctgagaattttatgtatgattcagactcctgggccgaggacctgatcgtgtctgccctgcttctgattcaatatcacctggcccagggaggaagaagggatgcacggagcttcgttgaagctgctggcaccaccaactttcctgccaatgaacctcctgtagctcccgatgaatcttgccttaagtctgctcccattgtaggtgaccaagaacaagcagaaaagaaggacctaaggagtgttttctttaatttcatccggaacttacttagtgagaccattttcaagcgtgaccagagccctgaacccaaggtgccggaacagccagttaaggaagataggaagttgtgtgaaagaccgttggcgtcttctccccccaggctatatgaggatgatgagacccctggtgccctttctgggctgaccaagatggctgtcagccagayagatggccacatgagtgggcagatggtagaacatctgatgaactcagtgatgaagctgtgtgtcatcattgctaagtcc

SEQ ID NO: 471898 - DNA, 549 bp, Homo sapiens
gtttgagtctggagaacacgcacacttaccccagatgcttcacactgaagtgcgggaattaaaaagaccatccctacaaccttctcttctctctcctctctgccttctcgctcgcttgctctctctctctctctctctctctcattttctcttcctcagtgcttttgattgtctcctcttgattgagaaaagtggaccaactgctgttaatcattaagtagcaaagggtggcacaagaggctagaattatttagaaaatttcatcatcataggaatcagaagataaggaaaaacaggctttctctgcttaattaagtggtatttacatggtattagcaacgcttgcaactgggtcgctatatttatctgatgactgggaaaacacacgattacagagcatccagattaggctatatcaagcctaaacaagaaactgtatggtctttgactttggtcttaraaagactacacgtgctacttaaagtgtagtctgtggacctacaacattggcatcacctgggagctttttagaagtgcagaatctcacac

SEQ ID NO: 471899 - DNA, 549 bp, Homo sapiens
gtttgagtctggagaacacgcacacttaccccagatgcttcacactgaagtgcgggaattaaaaagaccatccctacaaccttctcttctctctcctctctgccttctcgctcgcttgctctctctctctctctctctctctcattttctcttcctcagtgcttttgattgtctcctcttgattgagaaaagtggaccaactgctgttaatcattaagtagcaaagggtggcacaagaggctagaattatttagaaaatttcatcatcataggaatcagaagataaggaaaaacaggctttctctgcttaattaagtggtatttacatggtattagcaacgcttgcaactgggtcgctatatttatctgatgactgggaaaacacacgattacagagcatccagattaggctatatcaagcctaaacaagaaactgtatggtctttgactttggtcttaamaagactacacgtgctacttaaagtgtagtctgtggacctacaacattggcatcacctgggagctttttagaagtgcagaatctcacac

SEQ ID NO: 471900 - DNA, 616 bp, Homo sapiens
ggaaaggaacttcaaggtcactgagaatattatttgtgtaatttgatacatgtttccaaattgccttccatagagcttgtaccaattaacacacctattaaaacagtgtaagaggactatttcctcacactttaaccaacagtgcatgctamaatttttaatttgctaagttgctttactttttgtcttattaggaataagggtgagtatctttgcatataagaccatttgaatttcctcttctgtggattaatttgtcataacttctgcccatttttctttttttaacttattttaggttcaggggtatatgtgcttgtttgttatataggtaaactcatgtcacacgggtttgttgtacagcttattttgtcacccaggtactaagcctagtactgacccaatagttatttttttctgagtgtcttcttcctcccacccttcaccctcaagtgtctgttgttccctctttgtgtccatgtgttctcatcatttaactcccacttctgataacacgctgcatttcattttctgttcctgagttaatttgccaatggcaatggcctccaactgcatccatgttcctgcaaaggaaatggctgtgttcttttttatg

SEQ ID NO: 471901 - DNA, 616 bp, Homo sapiens
ggaaaggaacttcaaggtcactgagaatattatttgtgtaatttgatacatgtttccaaattgccttccatagagcttgtaccaattaacacacctattaaaacagtgtaagaggactatttcctcacactttaaccaacagtgcatgctaaaatttttaatttgctaagttgctttactttttgtcttattaggaataagggtgagtatctttgcatataagaccatttgaatttcctcttctgtggattaatttgtcataacttctgcccatttttctttttttaacttattttaggttcaggggtatatgtgcttgtttgttatataggtaaactcatgtcacacgggtttgttgtacagcttattttgtcacccaggtactaagcctagtactgacccaatagttatttttttctgagtgtcttcttcctcccacccttcaccctcaagtgtctgttgttccctctttgtgtccatgtgttctcatcatttaactcccacttctgataacacgctgcatttcattttctgttcctgagttaatttgccartggcaatggcctccaactgcatccatgttcctgcaaaggaaatggctgtgttcttttttatg

SEQ ID NO: 471902 - DNA, 521 bp, Homo sapiens
ttcccctgctcattatcttttacttctctgaaagacgctcttaatcacagccctttggtatgtggccaggggaaaagaatgaaatgagccttaaggtatggcaggtgtcttcaaggcctgtgacacctcatkagacacactaggacttaccaaagaatgtctgtctcctggaggctgtctgaatgaagccggctggcggcagacccagcaccttaataaggataattcaattggttcattctttgtgggagcacagattcaaaggctgaggggtggagcgtactttggccaagctttgccttctacagataaggattcaaagcattaagtaataacatctggtcagtagcagagcaaacccagagcctgggccttttaactcctaatccagggctggtttcatatcctaagaatcaacactggccatgttattctacacaaacatcagcaccaactaggggtgggccaccacccttgatagcagccagatgtcattgtcaaagcaaataaactagtacaca

SEQ ID NO: 471903 - DNA, 562 bp, Homo sapiens
actcccattacaccatcacagcatcaaatccgccagcaacctgattataaaggaggtgtgactgtccctgctttattgataacgaactccaacgtgggcactgtcgtaggaaagtgaatctaagtgagccaagtttataacaaacaaacaaaacataagacaaatataagactaagttttcaaactgtcagattgatttggggtagacagcttctgagtcttgtgacttggcaagrgagttatcaagttagaaagggagcatatcaagttagaaagggagcatgcaaagtctgtattcaatatagcatgtgcacttattgtatagaaagaaaattctcaacaggtgaggatgaacagactgaagtcgaagaaatggaacacggtagttatttccgcataactggggtttctggttacctggggaggggcagggattctgtaaccacttttctgttgtttaaattggttattgtcagaacataattctgtgatttaaaacaaaatagagatttaataaaaataatgtttatatcctgcctgcttcccaaatgtgtttgtggta

SEQ ID NO: 471904 - DNA, 562 bp, Homo sapiens
actcccattacaccatcacagcatcaaatccgccagcaacctgattataaaggaggtgtgactgtccctgctttattgataacgaactccaacgtgggcactgtcgtaggaaagtgaatctaagtgagccaagtttataacaaacaaacaaaacataagacaaatataagactaagttttcaaactgtcagattgatttggggtagacagcttctgagtcttgtgacttggcaagagagttatcaagttagaaagggagcatatcaagttagaaagggagcatgcaaagtctgtattcaatatagcatgtgcacttattgtatagaaagaaaattctcaacaggtgaggatgaacagactgaagtcgaagaaatggaacacggtagttatttccrcataactggggtttctggttacctggggaggggcagggattctgtaaccacttttctgttgtttaaattggttattgtcagaacataattctgtgatttaaaacaaaatagagatttaataaaaataatgtttatatcctgcctgcttcccaaatgtgtttgtggta

SEQ ID NO: 471905 - DNA, 403 bp, Homo sapiens
ggggttaactaatgaaaatgaaaaaagtgatgccagcataatagagatggcttgtgagaaggaagagaatattaaccaagacttaaaagagaatgaaacagtaatagaacacagcaaacagctttctgatcctgacaaatctttgcaggatgaggtctcaccaagaagaaatgacttcatttcggtaccgagtattcaacctttggatcccatatcagattcagatagtgaaaactctttccaggagtccaaactagaaagccagaaagacttggaggaggaagaggatgaggaagtaaggwgatacattatggagaaaattgtacaagctaacaagcttctatagaatcaagaacccgtgaatgataaaagggagtgaaaatttaagctcaaggacaaatta

SEQ ID NO: 471906 - DNA, 640 bp, Homo sapiens
aaaagctggtcccaaagtccctgtgttgtatatctttaacacagcctgtgtatatctctaatcattgtattcaccatattatttttatctttctgtctcttacattagatagtaagcaacctgaggacagggaatgttcactaattgttcctggtacccaggacagtgactgacacaaaacagatcacaaatgtctgttgaatggtacgtgttctctatagcgaacctgatagaagccraaagaacacaatattaaataaagttcagtaaacgctgtgaaaatgtactccagagctacttttttggatcctagcttgaaaaagaataaaacctagaggatctggggcagtgaattccaaacttcagaatgactgtggtttctgaagcgcagacttctagctacttcccagaaatttgaattaggaacaaactacaatttttcagagccccaaagcaattcagatacacagttagttagttttggggctcactgttctaggataattccatatctacagaatatgagagcttgaaagcacccttctagtatttggatacaactttctcaaattgtagatgaggcaacttgggctcagagaagcgaagcaccttgttcaaaatcatactggtagtggtgaca

SEQ ID NO: 471907 - DNA, 566 bp, Homo sapiens
gccaataaccacacctatggttacagttgttatcctattctaaaggagccattgtatgtcgtgctatgggatagaggcagataatttgtcttttgggtttttaagtctcygaattgcagaaatccatattcaaaactgatgtagagactagcacatgtcactccttaatataaaaactactacgcactgctagagaacctagcatttcagcttgataccaggactgggtaggactttggggttatcttccttagggagtaggtaagtgtattttgcctgggggagccatggttcttctcaacttgaacctaacagcaataatttgggtatatatattatttgtgggatgttacagctttagtcttgttttttctctcgctcttacttgagccagtttgcccagtttgaatgattttttgaagccataacttcaattaaacttttgccctaaatgacttattccattcagaggaactgacaatggacatgactgccctgtgcttgatttgttccatggcatgagctgaagcactcatcagtctttcttgtataaaggtcttttaagt

SEQ ID NO: 471908 - DNA, 617 bp, Homo sapiens
gaagccccaccagcactaggggcttagggccaacctctgaacaaatactgcttgaacaataaactactctgactcagaggcaactactaggaagccaggattaaaaataaaatcatgcacatccctggtaatctggaagactatgtgcatacctaaggctgtgctctctcaggagttaccacagagaagaaaatccaagctaccagtatgtgggtcaaaacgtaaactccctgaattgtgattgcagcctccatgccacawatatcaaggaatctaatcaaccaaggaggtttaaatccaatctctgatgaataagtggcttatgatgacccagaagcaacccctgggtagccaggctaaaagagaaaaacaagaagagaaaagaaaaaaaaaaaaaagatcaagatcatgagcattaaaggctgaacactgcaggagaaatagattttgtagactctgcaaattagtttaactaggttaccaattgaataaataaacaacgaagcaaattacaatgacatctactcctgggttatatacagagttactagatgctttgtctaaaatgataagtttttaataagaaattatgagacatacaaagatacaggaaaggg

SEQ ID NO: 471909 - DNA, 617 bp, Homo sapiens
gaagccccaccagcactaggggcttagggccaacctctgaacaaatactgcttgaacaataaactactctgactcagaggcaactactaggaagccaggattaaaaataaaatcatgcacatccctggtaatctggaagactatgtgcatacctaaggctgtgctctctcaggagttaccacagagaagaaaatccaagctaccagtatgtgggtcaaaacgtaaactccctgaattgtgattgcagcctccatgccacatatatcaaggaatctaatcaaccaaggaggtttaaatccaatctctgatgaataagtggcttatgatgacccagaagcaacccctrggtagccaggctaaaagagaaaaacaagaagagaaaagaaaaaaaaaaaaaagatcaagatcatgagcattaaaggctgaacactgcaggagaaatagattttgtagactctgcaaattagtttaactaggttaccaattgaataaataaacaacgaagcaaattacaatgacatctactcctgggttatatacagagttactagatgctttgtctaaaatgataagtttttaataagaaattatgagacatacaaagatacaggaaaggg

SEQ ID NO: 471910 - DNA, 583 bp, Homo sapiens
atttagatggagtgatcagggagggcttctccaaagacatgacatttaagtggagaccagaaagaagtgagggagcaagtgatgcaagtatattggrggaagagtgctccaggctgaagacacaagtgtaaaaggggttgaagccacagagagctttccatgtccaggaactccccaaaggccagcatggctgaagctgaggaggggagagaagtgtcagtcaatgaggactcagagggaggtactagcccaattccatggggctggtatggacccaggctgggagtttagacttgatacttagtgcaatgaggtgtctttgacgcaggcaaatgacgcatgtggatttatgtgttttttttgtttgtttgtttgtttaaatcactctgcctgtgcatggagaattgtctgctgggggtgaagtgagtggtatgcaggtaaaccagctctctaggtggggaaaaaggccttggtttgtaatgcctgctaattcctgtggtgtaaatgctcccaccatggccagtttcaaactaccaacaattcgacaatggactcttcaaagccctgaaaatataagcagtca

SEQ ID NO: 471911 - DNA, 376 bp, Homo sapiens
gtaaaaatgattcttagacatgtgaaaaaaatgttcagtttgactcatagtgagaaatgcaggccaggcgcagtggctcacacctgtaatcccaggactttgggaggctgaggcaggaggatcactagaggccaggatttcaagaccagcctgggcaacataacaagaccctggtctctattaaacaaaaacaaaaacaacaaaaaaaaaaaaaaagaaaagaargactttaaacaaattaaatttagaaggttttttgagcaaagaaacaatgaatcaggcagcaccctgaaccagtaaaggttcagagagctctacccagcaacctgggtaggcagtacttatagacagaaaagggaagtgatgtacagaaaca

SEQ ID NO: 471912 - DNA, 547 bp, Homo sapiens
agccgccctggaggttataatctcagttactcagaaagggaaatcaggaaagagaacgggtgatttgttctaggtttgggtgtaaaccctgcctccacctttgatyggaaattccaaaaacctgcaaatgctcctcagcgccactctggggcgtcagaagtcatcagctcaggcgctttagccactgccagtctccttccagtctagagagggagacaactgtcctcaaacctgtagccaatcaggtcccgcccctttacttgaccaaagaaaaaaggcccagaagtcacagtgaggcccatcctgagcctttgtgtgattgacgggcacttcgtccaatgagaagcaagccatagttatccctggcgagtgcagccagcacggctgttccctccccgggtctgcaaggccccgcaaagggactgacttgtaagcggcagggttgttgagttgttcagtgcacctgcctttcctcagcccctggccctcggaggcccttctggagactcagggccatgcctctctcctagctcctggtgcccaggtt

SEQ ID NO: 471913 - DNA, 547 bp, Homo sapiens
agccgccctggaggttataatctcagttactcagaaagggaaatcaggaaagagaacgggtgatttgttctaggtttgggtgtaaaccctgcctccacctttgatcggaaattccaaaaacctgcaaatgctcctcagcgccactctggggcgtcagaagtcatcagctcaggcgcttyagccactgccagtctccttccagtctagagagggagacaactgtcctcaaacctgtagccaatcaggtcccgcccctttacttgaccaaagaaaaaaggcccagaagtcacagtgaggcccatcctgagcctttgtgtgattgacgggcacttcgtccaatgagaagcaagccatagttatccctggcgagtgcagccagcacggctgttccctccccgggtctgcaaggccccgcaaagggactgacttgtaagcggcagggttgttgagttgttcagtgcacctgcctttcctcagcccctggccctcggaggcccttctggagactcagggccatgcctctctcctagctcctggtgcccaggtt

SEQ ID NO: 471914 - DNA, 547 bp, Homo sapiens
agccgccctggaggttataatctcagttactcagaaagggaaatcaggaaagagaacgggtgatttgttctaggtttgggtgtaaaccctgcctccacctttgatcggaaattccaaaaacctgcaaatgctcctcagcgccactctggggcgtcagaagtcatcagctcaggcgctttagccactgccagtctccttccagtctagagagggagacaactgtcctcaaacctgtagccaatcaggtcccgcccctttacttgaccaaagaaaaaaggcccagaagtcacagtgaggcccatcctgagcctttgtgtgattgasgggcacttcgtccaatgagaagcaagccatagttatccctggcgagtgcagccagcacggctgttccctccccgggtctgcaaggccccgcaaagggactgacttgtaagcggcagggttgttgagttgttcagtgcacctgcctttcctcagcccctggccctcggaggcccttctggagactcagggccatgcctctctcctagctcctggtgcccaggtt

SEQ ID NO: 471915 - DNA, 547 bp, Homo sapiens
agccgccctggaggttataatctcagttactcagaaagggaaatcaggaaagagaacgggtgatttgttctaggtttgggtgtaaaccctgcctccacctttgatcggaaattccaaaaacctgcaaatgctcctcagcgccactctggggcgtcagaagtcatcagctcaggcgctttagccactgccagtctccttccagtctagagagggagacaactgtcctcaaacctgtagccaatcaggtcccgcccctttacttgaccaaagaaaaaaggcccagaagtcacagtgaggcccatcctgagcctttgtgtgattgacgggcacytcgtccaatgagaagcaagccatagttatccctggcgagtgcagccagcacggctgttccctccccgggtctgcaaggccccgcaaagggactgacttgtaagcggcagggttgttgagttgttcagtgcacctgcctttcctcagcccctggccctcggaggcccttctggagactcagggccatgcctctctcctagctcctggtgcccaggtt

SEQ ID NO: 471916 - DNA, 601 bp, Homo sapiens
aacttggtacttctctattacattaatatataaattcccatggttcacctcacacatttttgggtgtgcctattatgccaaactactgaatgctgtaattcttaagaaaataaaacacagtatggccgggtgggtggctcatgcctgtaatcccaccactttgggaggccgaggcgggcagatcacgaggtcagattgagaccatcctggctaacgcagtgaaaccccatctctactaaaaatacaaaaaattagccgggtgtggtggcgggcgcctgtagtcccagctacacgggaggctgaggcaggagaatcgcttgaatccaggaggcggaggttgcagtgagccgagatcccgccactgcactccagccagggtgacagagcaagactccgtctcaaaaaaaaaaagaaaagaaaacacagtgctatgttcaaagcaataatcaaatatcactggtcaagatttcaaagtaaaaaacagaacttatatatacccatttccaaataacagctttttaaatatatatwacattacatacattattaaactggtctatgcagatatttctgaccacaacctaataacttatttagataa

SEQ ID NO: 471917 - DNA, 373 bp, Homo sapiens
gcctcctccccgccccacaccccgcagccctggctccgggaggcggcggaggggggaggggactacagctcccggcatgccccgcgcccggcctccccggggccgagggagggggcgccgcgcggcgagtggggacctcgctgggtcccggcgtcggcaggggaccccgggagggcgccggaaccctgtcgcgcctgcgtcgcacaaaggccgaagggccaggaaagcactgtggggagtcgctccccgtcctggcccgtgttccaccgcccgggtgggcgagccctggcaccgccaccaacgaggcggcccgcggctggcagctccgctggggccgcgrggtcgggggcggcgtggcgtgggaggcccggcc

SEQ ID NO: 471918 - DNA, 610 bp, Homo sapiens
gagccaagctgtggtcgaggccacctccccagcatgctgttctgccagagctcactttcttgtcttcctggtgcattggctacctggttcttcctagaaactgtcctgcttttttgttttccccccagcattgcaagttgtactcagggcccctatgattcatgtccaaaccctgccttccatcttctggggggagtactcaaagtagagaatgtgcaatcagattgggctgagctggccttgtcccttttgtggagatgatgacatggaggattgggtgggtttgggaaagatgtacgaggtgggaatgtgctgagacaagctaaatgccactgtggttagaagtctctgttttctagcaattgtgaagcagtgggactgcccctctttctagaagtcaaaacaaaccttagaaaaccagtgcaaatgagcctttctgccccgtatttctcaasacccactgctttgcttgtaaccaaagtcctctacagagagataccagttcctagcccgggctctggtcactctcctgaccagacagaggaaggacaaattcctttcccttatcaaagccaaggatctgacttaggataacagaatcttgggttgg

SEQ ID NO: 471919 - DNA, 610 bp, Homo sapiens
gagccaagctgtggtcgaggccacctccccagcatgctgttctgccagagctcactttcttgtcttcctggtgcattggctacctggttcttcctagaaactgtcctgcttttttgttttccccccagcattgcaagttgtactcagggcccctatgattcatgtccaaaccctgccttccatcttctggggggagtactcaaagtagagaatgtgcaatcagattgggctgagctggccttgtcccttttgtggagatgatgacatggaggattgggtgggtttgggaaagatgtacgaggtgggaatgtgctgagacaagctaaatgccactgtggttagaagtctctgttttctagcaattgtgaagcagtgggactgcccctctttctagaagtcaaaacaaaccttagaaaaccagtgcaaatgagcctttctgccccgtatttctcaacacccactgctttgcttgtaaccaaagtcctctacagagagataccagttcctagcccgggctctggtcmctctcctgaccagacagaggaaggacaaattcctttcccttatcaaagccaaggatctgacttaggataacagaatcttgggttgg

SEQ ID NO: 471920 - DNA, 578 bp, Homo sapiens
tttctcttgaggggagacagagtactctggtgtatttcagaatggttcttttcgctctttacctgctaggaatacaaggggactttcctctgatactcactgtaagaacctggtggagctcctgcagtaaaactcacaaaaatgtggttacccctctatgactgggtctcaccggagtgtttaactctcaaacttgtccacactgagcctgcagtaatttgtcagttacagttcagttttccaaggcgggcgttgcttcctgcagtggtttctgtgagtaggttccggctccagttaggttgtaactctctgtattcacctgtctgtctctccaattttgggggcagcagtttaccctgtgatttcacatgcctgatagttttaaggagaattattgattttttcagtttgttcatctttttacttattaggacagagagkcaacttccaaaccccttacataccggtctggaaacttgaagtctgtaataactttttcatcagtctggctcacatcctcctttgaccttcagagtagtccttaagcaagtcattgctatttctgccacagtgttagg

SEQ ID NO: 471921 - DNA, 578 bp, Homo sapiens
tttctcttgaggggagacagagtactctggtgtatttcagaatggttcttttcgctctttacctgctaggaatacaaggggactttcctctgatactcactgtaagaacctggtggagctcctgcagtaaaactcacaaaaatgtggttacccctctatgactgggtctcaccggagtgtttaactctcaaacttgtccacactgagcctgcagtaatttgtcagttacagttcagttttccaaggcgggcgttgcttcctgcagtggtttctgtgagtaggttccggctccagttaggttgtaactctctgtattcacctgtctgtctctccaattttgggggcagcagtttaccctgtgatttcacatgcctgatagttttaaggagaattattgattttttcagtttgttcatctttttacttattaggacagagaggcaacttccaaaccccttacatacyggtctggaaacttgaagtctgtaataactttttcatcagtctggctcacatcctcctttgaccttcagagtagtccttaagcaagtcattgctatttctgccacagtgttagg

SEQ ID NO: 471922 - DNA, 596 bp, Homo sapiens
ctggagttgaacctgggcagtgccgttgcagagcctctctgtcttcttccaaggatgaagggcaaatcagaactcttcctctaccgtctttatgcccatttactgagtttcttataataaagattattgttattattataascacctttcagtgtttctgtcttaccctcacatcttcacttttcccctaatctcaagatagagtggaggggaagaaggggtacagaaaacatagacattggagctaggatagagtagtaaggatcccatattatttggtgagtttttaaatattcttttttctcaactcttattttagaatcagggggtacatgtgcaggtttgttacaaaagtatatttcatgatgctgaggtctggaatatgaatgaaaccaccacccaggtactgagcatagtacccagtagctaggttttcagcccttgcccctctcattctctcccacccctagtagtcctcagtgtctgttgttaccatgtttatgtctatgagtacccagtgattggctccctcttataagtgagaacatgcaatatttggttttctgtttctgtgttaacttgcttcggataatggc

SEQ ID NO: 471923 - DNA, 596 bp, Homo sapiens
ctggagttgaacctgggcagtgccgttgcagagcctctctgtcttcttccaaggatgaagggcaaatcagaactcttcctctaccgtctttatgcccatttactgagtttcttataataaagattattgttattattataaccacctttcagtgtttctrtcttaccctcacatcttcacttttcccctaatctcaagatagagtggaggggaagaaggggtacagaaaacatagacattggagctaggatagagtagtaaggatcccatattatttggtgagtttttaaatattcttttttctcaactcttattttagaatcagggggtacatgtgcaggtttgttacaaaagtatatttcatgatgctgaggtctggaatatgaatgaaaccaccacccaggtactgagcatagtacccagtagctaggttttcagcccttgcccctctcattctctcccacccctagtagtcctcagtgtctgttgttaccatgtttatgtctatgagtacccagtgattggctccctcttataagtgagaacatgcaatatttggttttctgtttctgtgttaacttgcttcggataatggc

SEQ ID NO: 471924 - DNA, 608 bp, Homo sapiens
gccttttaaggtctgatttgccttttgattactcccaccatgtccagttgttgctgtcactacacagtttgggaggtagtggcctataatttcaggagaacctctctttctgaggatatttattatttttctttcttgtgtttcaaaacagggttgtgataggctccacaggtctgagaagtgcagctctaacaggtctataatggccatcctcagcctgggaacttctttatttttgtctttttaaagcaatatgattgcacttggtggttacagtcatccccacttctgaagagccaagtatcatatctaatgtgtaagaaaatagcccgaactttgcaagggcaaagcagagtagtggatttgcttgactaaagttaagaaggtgagtggggaagtcaggagagatgaggatgggaaaacagatggggcatgccaaattgtggtacaaaagaaattatamatgttttactttctgcaactaaagggatctgcttcatggattacccaggtttccctggctcctacctggccatcgtacaatcaattagtacagaaacttgccatggacacaattatagacaattcttccatctcattgtgagccc

SEQ ID NO: 471925 - DNA, 425 bp, Homo sapiens
atgagctttgttttgaccctcagcataacgtctacgccctttcttcatcttttctttaactcctttcatctgattcctttgacactttaccatgcaatcttgaacatgttsttctatagggatgcttctatagggatattcatctgtttcccagtctagtttgtaaaattacgtacgaccacagatggagaaactgaggcttgagatcttgccagagctcataccattctttccatcagccaaacagaagagcccagctttctggaaaagcaagagaagtggctaataagaagcattcagtggggggcatccatccttttctgggattggcctccatagtagcaaaccatgcagaaagatttgtaaaagatggactcatggaaggagggctaggaaaaaggatctcttctgtaaagagcacagca

SEQ ID NO: 471926 - DNA, 425 bp, Homo sapiens
atgagctttgttttgaccctcagcataacgtctacgccctttcttcatcttttctttaactcctttcatctgattcctttgacactttaccatgcaatcttgaacatgttcttctatagggatgcttctatagggatattcatctgtttcccagtctagtttgtaaaattacgtacgaccacagatggagaaactgaggcttgagatcttgccagagctcataccattctttccatcarccaaacagaagagcccagctttctggaaaagcaagagaagtggctaataagaagcattcagtggggggcatccatccttttctgggattggcctccatagtagcaaaccatgcagaaagatttgtaaaagatggactcatggaaggagggctaggaaaaaggatctcttctgtaaagagcacagca

SEQ ID NO: 471927 - DNA, 556 bp, Homo sapiens
tgtaatagaggtactcatttctctaaagaaattcaaagactttttttcattattgcttatttcaaccctgtaaaactagccaatagtaaaactagccaataataaagaggcaaaagacttctaataaactatatttattcaggcaaaaaagttactctgatttatgtaaaaagttgtcatattagcaaccaaaacaatttttgtaagttggtttaactytatgctgatcagaaaattcagtagatcggattctcttcagtctctaacgttctgtcatttcatccatatgtaacatgcacactttaggtgcatcaactctatacctcactgatactaatatgctttgtcaagtatctaattacaagagactaaaaagaaaaaatatgcattgcggccaggcgcggtagctcacgcctgtaatcccagcactttgggaggccaaggcgggcagatcacctgaggtcaggagttccagaccagcctggccaacacggcaaaactccgtctctactaaaaatacaaaaattagctgggcatggtcgctgtaatcccagcc

SEQ ID NO: 471928 - DNA, 215 bp, Homo sapiens
tggaaatgacttcatacaggaagttgatttttaaaaaagtaggccaggtgcagtggttcacacttgtaatcccagtattttgggaggctggggcgagaggagtgtatgagcccaggagttccagaccagacaagcctaaggaacatagcaagaccccrtctccacacacacacaaatttttaatgagctggcaaacaccctgggaggtggtccca

SEQ ID NO: 471929 - DNA, 603 bp, Homo sapiens
gggcctgtccagcctcacttgaccaagaaccgaagtcccaggagaaaggaaagtgaggccaggatggtgacagggtggagaagctgggcccccagtgagcccccacagagggtaggacacagagggacaagtgtgaggggcagtaactgcccgtaggaayagtggccatgggagagacaccgtggtgcccacaccccagtaggtcctcagtaaaactaacatccacctgggccgcacaggtagccctgccaccctccagggcccaggattctttgagtgagttttagaacgcctctgaaatctggggagatatgacagcccacagcaatttgcattttttgctttcctgttatcagaggtgactaaactctggccttcaggccaaatccagccagcagactcctatgtgcagctcactagctaagaatggtttttacatttttaaagtgttgagtaacaggagaaaatctggggtgagaggaagagagatcatatgccccacaaagcctagaatatttacctgatgaagaaaatgttgccagcccctgacccagatggatttagcagtggaagccctggccaaccaagtgtgagtcagggtgg

SEQ ID NO: 471930 - DNA, 603 bp, Homo sapiens
gggcctgtccagcctcacttgaccaagaaccgaagtcccaggagaaaggaaagtgaggccaggatggtgacagggtggagaagctgggcccccagtgagcccccacagagggtaggacacagagggacaagtgtgaggggcagtaactgcccgtaggaatagtggccatgggagagacaccgtggtgcccacaccccagtaggtcctcagtaaaactaacatccacctgggccgcacaggtagccctgccaccctccagggcccaggattctttgagtgagttttagaacgcctctgaaatcyggggagatatgacagcccacagcaatttgcattttttgctttcctgttatcagaggtgactaaactctggccttcaggccaaatccagccagcagactcctatgtgcagctcactagctaagaatggtttttacatttttaaagtgttgagtaacaggagaaaatctggggtgagaggaagagagatcatatgccccacaaagcctagaatatttacctgatgaagaaaatgttgccagcccctgacccagatggatttagcagtggaagccctggccaaccaagtgtgagtcagggtgg

SEQ ID NO: 471931 - DNA, 579 bp, Homo sapiens
atgggtgggggagggtagctgattctatttataacttctggccggcccaagattcccacccgcattccaagattctgactcacaaggacctggtgaaacctgttgatagatttccaccaaatggatggtttctgcagagcttgacattcctctctctaagatagctggggtccagtgctcatgagaagtaggagacttggccatggasctctctaagggaccctcctcaccttctccttggggctcctggaggcatctgagcagcttctagggattagggcatgctggctggatggacaaggacggggcaccattccctggttcccagtctagggcctaccaagctctggggatggaaagcagccctttctgaatcactcacccatcctgctcccagcaagaaaaaagcatcagctctgtgacaggagctaattcccctaagctgcgctatcacttaccattcacttggcgatttgtcatttactaaccccagacagtctttcatggtttaatttctcttacgtgtcttgtcccttagtctacgttgtatcacgcaagccatatgaaacatctcagtga

SEQ ID NO: 471932 - DNA, 388 bp, Homo sapiens
gcttccagagatgcgggaacacctcctgaggttgggtgaagatgrcattaagcagtggaggattcttcctatttccctccccccaaccgccccaacacacacatgctcacatacgattctagcctgggtccttgaaagccctttgttcagcccaagattgccctgttcccagggatttgtccagctccaggcctgggagctcagacttgtctggggagtgactgggtcacgtggagctggaactgttcagaccaggagcttctcgccctgcagggagctctggagccaaggtgccacagtccttcacctgggggtgacccaggcctctttgagaacccccaaggctaggccacaccaggacaggcacccagggctgccccttggagtc

SEQ ID NO: 471933 - DNA, 640 bp, Homo sapiens
cgggaacacctcctgaggttgggtgaagatgacattaagcrgtggaggattcttcctatttccctccccccaaccgccccaacacacacatgctcacatacgattctagcctgggtccttgaaagccctttgttcagcccaagattgccctgttcccagggatttgtccagctccaggcctgggagctcagacttgtctggggagtgactgggtcacgtggagctggaactgttcagaccaggagcttctcgccctgcagggagctctggagccaaggtgccacagtccttcacctgggggtgacccaggcctctttgagaacccccaaggctaggccacaccaggacaggcacccagggctgccccttggagtcgggacagaagcgtgtctgcatgttgagctcagagtgggtttggctgactcttctggggctggtagttcttagttcttttattttctcagccccaacagaccggaggaatacaacatgctcacgaaagtagtttcccgaggggtgacgacggggaagtagagcataccccatggagagtgaaccgggatacgggagactgggcaggagggggcctgtggcttggaccagcccccagactctagttctgatcgatttctacttatgc

SEQ ID NO: 471934 - DNA, 545 bp, Homo sapiens
tgggcttccagagatgcgggaacacctcctgaggttgggtgaagatgacattaagcagtggaggattcttcctatttccctccccccaaccgccccaacacacacatgctyacatacgattctagcctgggtccttgaaagccctttgttcagcccaagattgccctgttcccagggatttgtccagctccaggcctgggagctcagacttgtctggggagtgactgggtcacgtggagctggaactgttcagaccaggagcttctcgccctgcagggagctctggagccaaggtgccacagtccttcacctgggggtgacccaggcctctttgagaacccccaaggctaggccacaccaggacaggcacccagggctgccccttggagtcgggacagaagcgtgtctgcatgttgagctcagagtgggtttggctgactcttctggggctggtagttcttagttcttttattttctcagccccaacagaccggaggaatacaacatgctcacgaaagtagtttcccgaggggtgacgacgggga

SEQ ID NO: 471935 - DNA, 515 bp, Homo sapiens
ggcttccagagatgcgggaacacctcctgaggttgggtgaagatgacattaagcagtggaggattcttcctatttccctccccccaaccgccccaacacacacatgctcacatacgattctagcctgggtccttgaaagccctttgttcarcccaagattgccctgttcccagggatttgtccagctccaggcctgggagctcagacttgtctggggagtgactgggtcacgtggagctggaactgttcagaccaggagcttctcgccctgcagggagctctggagccaaggtgccacagtccttcacctgggggtgacccaggcctctttgagaacccccaaggctaggccacaccaggacaggcacccagggctgccccttggagtcgggacagaagcgtgtctgcatgttgagctcagagtgggtttggctgactcttctggggctggtagttcttagttcttttattttctcagccccaacagaccggaggaatacaacatgctcacgaaa

SEQ ID NO: 471936 - DNA, 640 bp, Homo sapiens
cgggaacacctcctgaggttgggtgaagatgacattaagcagtggaggattcttcctatttccctccccccaaccgccccaacacacacatgctcacatacgattctagcctgggtccttgaaagccctttgttcagcccaasattgccctgttcccagggatttgtccagctccaggcctgggagctcagacttgtctggggagtgactgggtcacgtggagctggaactgttcagaccaggagcttctcgccctgcagggagctctggagccaaggtgccacagtccttcacctgggggtgacccaggcctctttgagaacccccaaggctaggccacaccaggacaggcacccagggctgccccttggagtcgggacagaagcgtgtctgcatgttgagctcagagtgggtttggctgactcttctggggctggtagttcttagttcttttattttctcagccccaacagaccggaggaatacaacatgctcacgaaagtagtttcccgaggggtgacgacggggaagtagagcataccccatggagagtgaaccgggatacgggagactgggcaggagggggcctgtggcttggaccagcccccagactctagttctgatcgatttctacttatgc

SEQ ID NO: 471937 - DNA, 640 bp, Homo sapiens
cgggaacacctcctgaggttgggtgaagatgacattaagcagtggaggattcttcctatttccctccccccaaccgccccaacacacacatgctcacatacgattctagcctgggtccttgaaagccctttgttcagcccaagattgccctgttcccagggatttgtccagctccaggcctgggagctcagacttgtctggggagtgactgggtcacgtggagctggaactgttcagaccaggagcttctcgccctgcagggagctctggagccaaggtgccacagtccttcacctgggggtgacccrggcctctttgagaacccccaaggctaggccacaccaggacaggcacccagggctgccccttggagtcgggacagaagcgtgtctgcatgttgagctcagagtgggtttggctgactcttctggggctggtagttcttagttcttttattttctcagccccaacagaccggaggaatacaacatgctcacgaaagtagtttcccgaggggtgacgacggggaagtagagcataccccatggagagtgaaccgggatacgggagactgggcaggagggggcctgtggcttggaccagcccccagactctagttctgatcgatttctacttatgc

SEQ ID NO: 471938 - DNA, 549 bp, Homo sapiens
catgttgcactccatgatgggtgaacatggagacaggtgagacatatcttcctgattacatttatgagagagcagaattctgcccagcctrctctgaacaggctgcacttctccaggcaaggggactcaccttcccagaggcaggcagttctataactttccctccttggacccctacacctccattggtggagcagtgtacctggctcctctctctgcttctatgcttgttggggacagtgatagttcccaccagtgatctcagggccaaggctgcctgattcccacctctgcccttggctgactatgtgacatgggcatgttgcctctctgtttccatagctttaaataaaatggggccagcaaggaagctcaggaatgggtcttggcaatggcaaggctttgctgctcacctcgggcctcctctgagtctctgtcccgctcctcctcctcttcctcgaatgccctctgcctccattgccgccaggaatgttcccctttcccctgagccggagagcatgctcctgggcttgacggtgctcatccctc

SEQ ID NO: 471939 - DNA, 549 bp, Homo sapiens
catgttgcactccatgatgggtgaacatggagacaggtgagacatatcttcctgattacatttatgagagagcagaattctgcccagcctactctgaacaggctgcacttctccaggcaaggggactcaccttcccagaggcaggcagttctataactttccctccttggacccctacacctccattggtggagcagtgtacctggctcctctctctgcttctatgcttgttggggacagtgatagttcccaccagtgatctcagggccaaggctgcctgattcccacctctgcccttggctgactatgtgacatgggcatgttgcctctctgtttccatagctttaaataaaatggggccagcaaggaagctcaggaatgggtcttggcaatggcaaggctttgctgctcacctcgggcctcctctgagtctctgtccygctcctcctcctcttcctcgaatgccctctgcctccattgccgccaggaatgttcccctttcccctgagccggagagcatgctcctgggcttgacggtgctcatccctc

SEQ ID NO: 471940 - DNA, 336 bp, Homo sapiens
gccgtttcctgcgtatttaggtggctaagcaggctgtcccagccacacggcctcaggcaagttcttaacctctgcctctgtttcctcatctgtacaacagggagagctggatattcacctggctgggactctcagaggcctcaggctatgaggggcyggtagggggctttcctgctctcatttgttgtcatggcgatcctggcagatggggaactgcccccatttcacagaagacactggggccccaaagggttggagaatgggctaaggtcagagcaggaatgtggccagggcctggcccacctagctgacccctgctccacagtcaccgcacca

SEQ ID NO: 471941 - DNA, 424 bp, Homo sapiens
caggggtggagtagggcatcttcttcctgtgcccaatctttcctcccgtgttttctagtttctcacaggactggggcaggggtcagtggggaggcaggtggactgccctgagcaaacttccagagaaataccaggccaattttccctttaagggatgrggaaaccaaagctgggaggattgggagggtggagagctgcagctcccttgagctgtctgggtctttgtgcccagcctggaatctcacctgaggctcagggtgcccaccaggtacgtccaccagcccaggggcctcagccacctgccgggagcggcgcaggaagacaaggaagtcatcggctgtggctagtgcagcgcccacccccagtgggtccgccagataggcctgcgtgtcaccccagtcggtggcaccctgctgtcgcagcc

SEQ ID NO: 471942 - DNA, 582 bp, Homo sapiens
tgtcccaaagtttttagtcaagatgcttaatgtagtcaaaatatcaagtaatattaaagaagagtagtttttatatttatcaaagagtacctaggatagaaaacttgctgacacttttgaatccttaacactttgttttcctgttaggcacagattaaatcatgtaagaattggtgtgatatagtataaaaaataggcaaaaaagaggagaaaggaaattagtctctactaattttccagcaccgtacttggcactttaaatattgtcacatctgatactcaaaaagttcgagaggtctgtattgttaacaccattttgtagaacctcaactgaggctcagtgtagtagttatctattactgcattacaaatcaccacaaacctagtgacttaaatcaagatacatttgttatctcacagtttctgtgggtcaagaatttggccgtggcttaaccgggtcctctgctcatgcaaggyagccattcaagttgtttatccagggcaggggtcatcagaggctggactgggagaggctcttttccaagctccctcaggtccttagcagaattcattttcttgcag

SEQ ID NO: 471943 - DNA, 566 bp, Homo sapiens
ctgcgtcacagcctaagagagtggggctttcacagtgtagccccagcaccagtaagagaaaaacagctccaagcctataccctgctgggcctttggggaaacatcttcggagaccttggtagaattgattctaaagtatgattctatactctcttccctgtccatccctctcaaaagtgaatgcactgttcatccatcaagtggaaactttgtggggcccaggagtcacacgttgcccttaagagtgccctggaacctatagaagaagatgacattagaattctaaccattgaaagaacaagagcacagggggcagctactratgtcacccaggaccatagaaacccatcaggcttcacacccccaccatcaagaagaaccccctccagtcctattacctgccctcttcatcccaccctgcttctttcttaatctgaactcccactgcttctctccacgcctggtttttctctgttcctttagggaccagctcccctatgccatcaaactcctaatgggaggctccctccacctcctgcctcctgaggtggctgattcccttaaga

SEQ ID NO: 471944 - DNA, 639 bp, Homo sapiens
ttggtttgccattttacattttccattgaagctcaaagaggacaaacagcttctctaaagtcaggcaactactctgcagactccaaagccctgtcttctagcaccctagtgtttcttcaagggtcacctaatttagaaaatgctataatttacatctcagtggcctctctagtccgacatccctaaagttcattgcactgagctacttgaaggaagaacggtastttctcctgatggattttcctgggtgttgtaaataaaatgagaagtctttgtttgagcacaatattctctatttcacgcctagatttggtcaaaaattcccttctgagcatcttaaatcatgtacaatttgatataacattttgtgggaaatcaattgacttatcaaataactattgtgcactcactatgcaccagacaatgtggcaggtggtgggaccacagaggccattaacctgtagtagtggcgtaattaacatctgcacagggagagggtacatgaaggaggggcagtcacttctacatgggggagtagagtaatttggaaaaggctgcataggagacctgatgttgagctgattcttgaaggatgagaggtgtcaacacggagaaagggggagcaggtgactgattcca

SEQ ID NO: 471945 - DNA, 639 bp, Homo sapiens
ttggtttgccattttacattttccattgaagctcaaagaggacaaacagcttctctaaagtcaggcaactactctgcagactccaaagccctgtcttctagcaccctagtgtttcttcaagggtcacctaatttagaaaatgctataatttacatctcagtggcctctctagtccgacatccctaaagttcattgcactgagctacttgaaggaagaacggtagtttctcctgatggattttcctgggtgttgtaaataaaatgagaagtctttgtttgagcacaatattctctatttcacgcctagatttggtcaaaaattcccttctgagcatcttaaatcatgtacaatttgatataacattttgtkggaaatcaattgacttatcaaataactattgtgcactcactatgcaccagacaatgtggcaggtggtgggaccacagaggccattaacctgtagtagtggcgtaattaacatctgcacagggagagggtacatgaaggaggggcagtcacttctacatgggggagtagagtaatttggaaaaggctgcataggagacctgatgttgagctgattcttgaaggatgagaggtgtcaacacggagaaagggggagcaggtgactgattcca

SEQ ID NO: 471946 - DNA, 317 bp, Homo sapiens
tgtgggaacagactggtgtaagtacaatgatggttccttggctgtaatgtcagtggcattttttttttttttttatggagaaatgacctggatgcaaacataagaagttcagtctaatgatgcataattcctactagaccaatgcaaatctgcaacaccagcctcaggagagcctgtctgcctttctcggccacctctgctgttgtagayagtgcttttttcagccaacagctcttaggtggagcaacactcactttaaatcagctttcaaagagctactcatccaagggaggtcaactcaaaagggctcaaattgg

SEQ ID NO: 471947 - DNA, 487 bp, Homo sapiens
ctaccacccgcattgataatcaaaagaaatacgctctagtcctaatgcctcttcagtaggaatgtttcggaggctgaacgatcaggatccaggaggctaacattccacaccagctcggtcattgatttaccatacggccttcggcaagccgagggccctttctgaagctcaggttcctttattatgaaataagaataataatctctcctttaccaagttgctatggctataaaataataaataatgctttgtcaatagtaagtgccaaattgatgttagttgtcactattatcaaacagtgtactgcccagtaaggcaagaataataagctaactaactaattgtattaatattaatctccttctcattcgctcagaccactcygactccttctgatgtctcaagcaagctgcctttgggacctgaataaaaactttatcactaagtcaacagtaagttctaagttggttttgttttgttttttata

SEQ ID NO: 471948 - DNA, 538 bp, Homo sapiens
tcctgaaaattactaagtctttcttccctacttaacagggaagtaatgtcaaatggttgaaatttgcacggaattctactagcctggagggtgctcctgaagtaatcttacaaacttggcaattagtccagcagcctaaatctttgtctcttggtagatgagtggcagcaatttttgttttttcctacagaacttgtacttgacatcagttagcctaactcagaccctgaccttgcctttgtatttggggaagagtctgatcttcaagatggacccaacctcaatagaaacaaagtaygtgtgaaagttcttacccaacccttttcttagtgtgttctatttcatctttaatgcagatctttaatctcagacgttcatcagaaaggggtaacatcaaatactccaaatctgagcaacattcaactcatttgttgttgttctggggttttgttttggttttggttgagacagaggtaaaaagcccagaaaagccatagagagaattttaaatgctgctctcccactaatggttatacct

SEQ ID NO: 471949 - DNA, 397 bp, Homo sapiens
agcatgccccatcccacctggggcaggcactcatatgcagattaggcatgcatttcagccacaaaaaggggcaaaggagattaacttgcacaatacagaaaaagacctttgctcacaatttttggaataatctgttccaatgcgggggctcactggtctattttcacctttcaaagcagcttcttacttttccagagaaaatcttgggccagatttctgtttyatgattttctggttatttttatgattgagatattcttagttttcgccaggtcagaaatatgtgctggatcccacatgacaaaacgtcgtgcataaatgtctagaaaccgtcagtaaggatatttacaaacccaaggcggggactttccccaagatcagataacatcagttcttt

SEQ ID NO: 471950 - DNA, 605 bp, Homo sapiens
ctggaaaagaggtacaatcaggaatttctgcatgttaacactgtaatccatgctttggtgggctgcacaacctgttgtaaggctaggaccacaccaacagtaataagtgtatatcccaaattctcagcccttgcattgtatctcctagattctcctctacatacttgtagaagtctctgtgcttctcccttatttgtrgatgaacacatctcatccctgaaagccccataagggtgccctgtctctgtccaggtgtagcctgttgagggtgagggtctggggcattaccccagtgactttccactgcccgtgaagggcctggtgttgctaagtagccaccaatgggcctcttcctgtcccacagtcacttcagaaaatcctggagtagacatgataccagcccaagcaaaagctgtctccaacaacacacacacacacattccacaatgttgtctctttccttaatccccagtggagtcatagacccaaatggtggaaaaacagtccttttccttcaagaaataagcatgactggatgctgaaattgtctgcagagtgtaatgaggcagaggatttcatttaccagggtgtgaacagaactgccc

SEQ ID NO: 471951 - DNA, 605 bp, Homo sapiens
ctggaaaagaggtacaatcaggaatttctgcatgttaacactgtaatccatgctttggtgggctgcacaacctgttgtaaggctaggaccacaccaacagtaataagtgtatatcccaaattctcagcccttgcattgtatctcctagattctcctctacatacttgtagaagtctctgtgcttctcccttatttgtggatgaacacatctcatccctgaaagccccataagggtgccctgtctctgtccaggtgtagcctgttgagggtgagggtctggggcattaccccagtgactttccactgcccgtgaagggcctggtgttgctaagtagccaccaatgggcctcttcctgtcccacagtcacttcagaaaatcctggagtagacatgataccagcccaagcaaaagctgtctccaacaacacacacacacacattccacaatgttgtctctttccktaatccccagtggagtcatagacccaaatggtggaaaaacagtccttttccttcaagaaataagcatgactggatgctgaaattgtctgcagagtgtaatgaggcagaggatttcatttaccagggtgtgaacagaactgccc

SEQ ID NO: 471952 - DNA, 605 bp, Homo sapiens
ctggaaaagaggtacaatcaggaatttctgcatgttaacactgtaatccatgctttggtgggctgcacaacctgttgtaaggctaggaccacaccaacagtaataagtgtatatcccaaattctcagcccttgcattgtatctcctagattctcctctacatacttgtagaagtctctgtgcttctcccttatttgtggatgaacacatctcatccctgaaagccccataagggtgccctgtctctgtccaggtgtagcctgttgagggtgagggtctggggcattaccccagtgactttccactgcccgtgaagggcctggtgttgctaagtagccaccaatgggcctcttcctgtcccacagtcacttcagaaaatcctggagtagacatgataccagcccaagcaaaagctgtctccaacaacacacacacacacattccacaatgttgtctctttccttaatccccagtggagtcatagacccaaatgrtggaaaaacagtccttttccttcaagaaataagcatgactggatgctgaaattgtctgcagagtgtaatgaggcagaggatttcatttaccagggtgtgaacagaactgccc

SEQ ID NO: 471953 - DNA, 662 bp, Homo sapiens
tttatgcaatcagatcctacaactgctcccactgactcatttaagctgggacacatgtattcggcatcggcatctgtttaaatagcacttattgccatagtagctaggcacttggacaagcctgctatttttgcaagaaaatgaaaaaaaaaawgtagatgaagtaaatagaggtcggtactaaggcctgtagtaatcatcttccttggcaggcagagcaggagggttagaatcaggtcaaattgtccccagtaaaaggcgtcagtcatctggaatgtttttattatcccagacagaaataggtcacctcagcacactcaaagttggccaattagaccgaagttcttgtgcagtaagaaataaaggaagtagatgcttagcagaagacctctcccctcccaaaggaggcaaaacaaaattcctggagaagataaacacatcaaagcctcagatgctaaaagttacctccctcaacggcaatttgcaggctcctgttaaggtgcttggtggtgtactatacagaacttacgcaaactcggctgtattccatctgcgttaatgcccagcaaaatacacttagaaataacataggtcaggatagcagatagattttgtctacattgagaaggattcatggactcagtttagtgagagagaaatgg

SEQ ID NO: 471954 - DNA, 662 bp, Homo sapiens
tttatgcaatcagatcctacaactgctcccactgactcatttaagctgggacacatgtattcggcatcggcatctgtttaaatagcacttattgccatagtagctaggcacttggacaagcctgctatttttgcaagaaaatgaaaaaaaaaaagtagatgaagtaaatagaggtcggtactaaggcctgtagtaatcatcttccttggcaggcagagcaggagggttagaatcaggtcaaattgtccccagtaaaaggcgtcagtcatctggaatgtttttattatcccagacagaaataggtcacctcagcacactcaaagttggccaattagaccgaagttcttgtgcagtaagaaataaaggaagtagatgcttagcagaagacctctcccctcccaaaggaggcaaaacaaaattcctggagaagataaacacatcaaagcctcagatgctaaaagttacctccctcaasggcaatttgcaggctcctgttaaggtgcttggtggtgtactatacagaacttacgcaaactcggctgtattccatctgcgttaatgcccagcaaaatacacttagaaataacataggtcaggatagcagatagattttgtctacattgagaaggattcatggactcagtttagtgagagagaaatgg

SEQ ID NO: 471955 - DNA, 662 bp, Homo sapiens
tttatgcaatcagatcctacaactgctcccactgactcatttaagctgggacacatgtattcggcatcggcatctgtttaaatagcacttattgccatagtagctaggcacttggacaagcctgctatttttgcaagaaaatgaaaaaaaaaaagtagatgaagtaaatagaggtcggtactaaggcctgtagtaatcatcttccttggcaggcagagcaggagggttagaatcaggtcaaattgtccccagtaaaaggcgtcagtcatctggaatgtttttattatcccagacagaaataggtcacctcagcacactcaaagttggccaattagaccgaagttcttgtgcagtaagaaataaaggaagtagatgcttagcagaagacctctcccctcccaaaggaggcaaaacaaaattcctggagaagataaacacatcaaagcctcagatgctaaaagttacctccctcaacggcaatttgcaggctcctgttaaggtgcttggtggtgtactatacagaacttacgcaaactcggctgtattccatctgcgttaatgcccagcaaaatacacttagaaataacataggtcaggatagcagayagattttgtctacattgagaaggattcatggactcagtttagtgagagagaaatgg

SEQ ID NO: 471956 - DNA, 676 bp, Homo sapiens
agagctatacctcatttacattcaaaatgattcagcatgcaaaacaagacatagaacaatatgaaaaccatttatttaaaaagccaaaatataaacatactaaatgtagctgggctgttccaggcactgcagctgggcacagcatctacatgagagctactcctagtagctaaggcaaaaaagaaacactttgctttacattgcttccattgttcgataaagaaagcacataaattcagtaggagagtagcattttcctgtccagaaattctttaggtaatttatgatacaagaaacattaagaaacatcccttaataagccttatatttttttcatggcacacaatacattgttctttatttttatgatacagctgtatagtacatacatatctttaattacttctttaatgttcattttcccaattagattgtaaactcatgataaatgaaggattatttctgttctgtttacctctagaacctggctcagtttttacatagtcaatcaatatttactgaatgaatgaataaactgctttgttaaggataaaatttraaaccccaaaattcctctccccaagtagaatgcttgctcacgtgcataaggtgacttgtaaaggtgtctgttcagcactgtttgcaatgaccatgacagcaacagaaaggaaaacac

SEQ ID NO: 471957 - DNA, 575 bp, Homo sapiens
acacccggtacccacagagcatgacattaagttgaaaacatttaaatagtagtcagaccaatcacctccccgccattcacaactctccagtgattgcatatcttttcaagtaaagccacagcctagctgtagactacaaggttctgcactattagctcctctcaccccttatcagagggaggccttggtaaccttcggtgtcctgccccattctgcatttctgtatgtttcacctgcccacctgctgccccaggtgatgtccacagggactcatgctaattgagccccaacagcaggcwgctctaggcattaggtaagaaacacacttaaacctttcagccctgagcaggagcaactctttattaccctagtttacagatgatgaagctgaggcccagagagatgcaaccacatccccaaggtcccagggcatgtggggaagcctgcctggatctcatccagatatgggggagccagcagccttcctgctgggacagctgtttacaggagctcttgtcatgctctgtgggtactgggtgtgtttgctccaagatgaggtggatgatgatagcagc

SEQ ID NO: 471958 - DNA, 575 bp, Homo sapiens
acacccggtacccacagagcatgacattaagttgaaaacatttaaatagtagtcagaccaatcacctccccgccattcacaactctccagtgattgcatatcttttcaagtaaagccacagcctagctgtagactacaaggttctgcactattagctcctctcaccccttatcagagggaggccttggtaaccttcggtgtcctgccccattctgcatttctgtatgtttcacctgcccacctgctgccccaggtgatgtccacagggactcatgctaattgagccccaacagcaggctgctctaggcattaggtaagaaacacacttaaacctttcagccctgagcaggagcaactctttattaccctagtttacagatgatgaagctgaggcccagagagatgcaaccacatccccaaggtcccagggcatgtggggaagcctgcctggatctcatccagrtatgggggagccagcagccttcctgctgggacagctgtttacaggagctcttgtcatgctctgtgggtactgggtgtgtttgctccaagatgaggtggatgatgatagcagc

SEQ ID NO: 471959 - DNA, 652 bp, Homo sapiens
tggagctttaggggaaaacattttcttatctatgaaatttgcatggtgcttctccaggcccataacaatggatgagggagaaattggaacattttttacattttgctgcaagcagagagtatttataattacgctgatttaacctctagttcacttttcctgacaaaattcagatccatgaaggtaagtctgccaaagcccaaatagattcgtggatatcacacttggctgctgaccctaaaaaatgcagaaatgttgggttaaaattatgaatggagtatgaattgagtatgtcttcaaggactaaatgtgtcttattcatttaggctggtaagaggcaagactggtaagagagagggcgtctccatagctgaactcctggctcatgtaatttattttgtattgataaatatattccagtatcctggagtgaaaatcgtgaaaataaacaggcattttcaattcttttgcaggaaaacattagcttgcttttgcrtgggggagtgagaagggagatgactttatagagaagactgatcagcattagaataaaatatttatctaatagtctgagatttctctttaggagaaaggacttttccatcagcaaaagaaatgcatatgtatcagattatcttaaagagattcatac

SEQ ID NO: 471960 - DNA, 593 bp, Homo sapiens
tgaattgcaacccctccccacaaaaaaattcatatgtggaagacctcattcycagtgtctcaaaaggtgaccatatttagagacagggtctttcaagagataattgacttaagatgaggacattagggtgggccctaattctgtataactggtgtccttacacaaagagaaaatttggacacatgtggacagagggaagatgatgtaaagatacagagagaaaatagccatctacaagctgagcagagagaagcctggaacagagccttccctcacagccttcagaaggattcaaccctgccaacaccttgaactcaaacttctagcctccagaactgtgacacaataaatttctgttatgtatgccaccaagtctgtagtactttattacagcagccctagcaaactaatataagatggaattgaaaaataggagaattggttgaagcagttgagccctcagggggcgaatctgataagggccttctcgttgcatcataacatggtggaaggagtcatatggtgaaacagaggtaaagtgagtgagagagagcaccaaactcacttttataacaaacccattcgttctacaa

SEQ ID NO: 471961 - DNA, 597 bp, Homo sapiens
aaggaaaactgtctccaatcaagaactctaccatcagccaagttttgagttaagtgtgaaagcatgcttaagacattttcagacttgcagaacgtcaaaaatatatttcccaactaccattcctcaggaagctactggatgacaggcttccccccagcccccgcctccaaatgaaggagtctaaaagaaagaggaagatatggtgccagagaaactttggaactggtgataaaggtagggctagtaacagaagtactgggcttaagaaaaagcaaacttaaatacatatatatatatacaataatgtgaaaaaattatctggagcatgtctttcaaactttaatgtgagtcatttggagggctggttaaacctgagcaagctttctgggcagaaattgttctgtayacatgttattgagggatatggaggttaattagaaaaaaaagtggttatatccagggaagaaaaactggagccacaggggctgggggtggggaggtgcagtgcaggaaattattgctaatggctgcagtgggtcctagcaggaagacatctggccctgtataacaggggtcagcaaattatggccagggagc

SEQ ID NO: 471962 - DNA, 597 bp, Homo sapiens
tgttacccaggctggtctcgagctcctcggctcaagtgatccacttgccttggcctcccaaagtgtggggattacaggcgtgagccactgcgtccagcaaggcttcctttccctaaaaaaagaatcaccacagaatttctgaagataaccaacccattttctatattttacattattccatttaaaaattcaattctatattcatcttcttcagcaatcgtttttgggtcgaagataagcacactgaaatacttatccaagccattggttttacatttttatacttgcccatccagcagacaataaaacagaaagagaaacttttcaaaacccaaagagatccccctctctcagggctgctgtgtacgggtacacaggttgtgcactgtacaacttcaggaggcacacaccatatggacagtaatgtgaatcatagcccttcattgatgcaacaaggtgggactgctctggtgctaggtgttgcagaagaaatagagaagcctgccttcacttgtgtttctarcatgagtgctggtgacccacgagctctgtcgtgaaacaccccacagccaactctaacggttatcacttcaaagc

SEQ ID NO: 471963 - DNA, 597 bp, Homo sapiens
tgttacccaggctggtctcgagctcctcggctcaagtgatccacttgccttggcctcccaaagtgtggggattacaggcgtgagccactgcgtccagcaaggcttcctttccctaaaaaaagaatcaccacagaatttctgaagataaccaacccattttctatattttacattattccatttaaaaattcaattctatattcatcttcttcagcaatcgtttttgggtcgaagataagcacactgaaatacttatccaagccattggttttacatttttatacttgcccatccagcagacaataaaacagaaagagaaacttttcaaaacccaaagagatccccctctctcagggctgctgtgtacgggtacacaggttgtgcactgtacaacttcaggaggcacacaccatatggacagtaatgtgaatcatagcccttcattgatgcaacaaggtgggactgctctggtgctaggtgttgcagaagaaatagagaagcctgccttcacttgtgtttctaacatgagtgctggtgacccacsagctctgtcgtgaaacaccccacagccaactctaacggttatcacttcaaagc

SEQ ID NO: 471964 - DNA, 444 bp, Homo sapiens
tgtgctgaggttcagaaacctgctctagaccaatgtttcccacaacctggctcctatggatcaaggataaaggcatttgggagagaaagtkttcacacttaaataaaattatctgtagctgctcatttacaagtgacagctttctgaacagtctgtgactcatgatgatttttcaatgattcccattagtattctcatcaaccccaatggcacatttcaccttgtttacatttagcatttaagcagagtaactcatcaaactattgaaccaacaatcattgtattagttgccccaactgagatattgtttctccttggtgctatcaagtccatggtttgtcacaattcaatccgagcttccaaatctgcagccatttacccacccaaagaccaggggctttaacttttactgttttatagtccatcagctttggttctgtgtta

SEQ ID NO: 471965 - DNA, 657 bp, Homo sapiens
ttattgttacttttaaaatttaatttaaaaagccattttgaaataaaagttttaagcggtttttatggaacatttactctgaatttggataaatccactcaggtgatgttaacgccataacagagtcagcaaatccatcctgacttggtccctctctgccagcttcctggttctcatttgggctgacattggacatgcaatatttcagattccacggaatcacccatgtcatgttatcataacagtcataattagagcagtatccaaagataccaaaacatgccagggacgtcagctaacaattactcctgctcccttttaagaatggagtgcggtgatccccacagacccgggaatccactcttggattcaaagtctcacttgaaaaacckctctgttacatgaggaaatctaaagtgctggaatatggtttacaaaaattaaattggcaaggaatgtggcaataaagttgtctaatgtgttccagggtgatggtggggagatgatttaaagtcgccaagggcaagagtggtttaaaatcggctgctgagcagtgaacactttcagagctgtctgagttttgggttgggtgtgcagcattttagttcaaaggctgtagtccatttcagggtttgacaggaagaagtaagaggccag

SEQ ID NO: 471966 - DNA, 488 bp, Homo sapiens
tttcttggaaacacgatgcaagtttatgtgccagcttgagcagggttgtggttgtttggggggatakaaatgactggaggcatgtaggcagcacgcaaatagaggcctggggagcagcctctaaaacacagtgggcccattctcccctctctttgcccactagcataaaagaagaagagctggaggaagcctggttacctggaatactgcttccccctctgcccacctcatttattttgctttgcaacctccttccatgttctcacacacataaaaaacaaaaacatgtgtatgtgctcaggtaagtgcactttggccagagaggaccagcctggagtctaacgccaccccatgggctgaagggatgcatgtctcacccacacagagccctcaccatgggctgcaggtgagaagttctggtctaacttgcagcagaaatggtaatgtagtcaactcaaagcaaatgtgtgaaaaacaggaactcaatt

SEQ ID NO: 471967 - DNA, 310 bp, Homo sapiens
gtgaggcttcctcatgtggctcaggccagccctgctgtagttcatctgggcacacttcaattaaactattcatttgctaatgcttcttagggtgctgtttatcagcagctctgttgccaagcccygagccccaggctctgcaatatcttgggggggcacaaaaacttattttccttgatttgccactaaaatattccccgaccaagatgatccatcgtagttatattgaacacttaagccaattcttgcttaagtggaaagcctcacgcaaccttgtcttaaaattccttgctgtggtgcaatctgttgg

SEQ ID NO: 471968 - DNA, 526 bp, Homo sapiens
atccctggcgcctgctgcttcactgtgttctgcaggagttccactgccctgaatctctgactctgtgcccgaggtctttttctggaattgtggaaggtgctctgctatgtgggaaacaagctggaagttccgggaatcacacttcccagaagctacacccaaccagtgattgacaggagttgaagtaaaaacatcatggctttcttaccccttaagtggaatattttatactatttttcagaatttccccaaggagttaagctgtaattgcccatcacggcagccgggttaataaggtatctgtatctgscagaattaaatgagacggcagaatcacatagtaatttgagcaggaaaagcttaatataaggaattatcatgtaattatagagttgttctataattatgtaatattatattctaagctcctcttatacaatataggagaggatttgcagtaacaagggattagatagcaagatgtaagagaactctgaagaatataggactagtggatataaggaac

SEQ ID NO: 471969 - DNA, 526 bp, Homo sapiens
atccctggcgcctgctgcttcactgtgttctgcaggagttccactgccctgaatctctgactctgtgcccgaggtctttttctggaattgtggaaggtgctctgctatgtgggaaacaagctggaagttccgggaatcacacttcccagaagctacacccaaccagtgattgacaggagttgaagtaaaaacatcatggctttcttaccccttaagtggaatattttatactatttttcagaatttccccaaggagttaagctgtaattgcccatcacggcagccgggttaataaggtatctgtatctgccagaattaaatgagacggcagaatcacatagtaatttgagcaggaaaagyttaatataaggaattatcatgtaattatagagttgttctataattatgtaatattatattctaagctcctcttatacaatataggagaggatttgcagtaacaagggattagatagcaagatgtaagagaactctgaagaatataggactagtggatataaggaac

SEQ ID NO: 471970 - DNA, 570 bp, Homo sapiens
ggctggccagagctagtcctgagctccaacctggggagcacatggaatattgaatgagcacctcatgaggtcatccctacatccagatgacttgttttactttcagaagtgttacaaccttttgataaatgagaggttctatcaagggggaatttgatcagatgttttagatytgtccccatttcagttgcttcctatgtcccaaatgttcagatttggggagagaagtctatgcttgtccaatgttggaagctgagatgggttctctcatggatcatataggccccatatgagtttttcaggtctgaatgaagagggaagtgaagcctctagtttgatttctgttttcttcaactaggtcagagcttcagcagctttccaggggtgaatatgtagcccaaatatgaaagatgccaatgtccaagctaactgcaatagggagattcaattatctccagaaaattcacagaagaaacgctcacgatcaacacacacattaaaaatcgtttctaccccactttcacctgggtggctactttgtctctaactggccgttttgtccaggagagc

SEQ ID NO: 471971 - DNA, 538 bp, Homo sapiens
tttaaatatttccctttcccttttcttttcattagggttctaccaacaagcagttttgtttctgaagtgaaggacagttatatgtatattttttatgaataaatatacatttgtaaagaagcaaaatcaagaataggactaaatatttatgagaattcaagtcaaaatgaaaaatttatcttttactaccttataaaactctttaaatgatacaaatttttgaaaaataataatttgagtcaataagacatcacaatacctgttcaatgagtaaaagattcacaagcaaaatatcaagaagatattttattactaaattcaagaaaatatttatcacactaggtatttatctttgtataggctaaagcaataaaaacaaaataaagccccaaatggctaaattattaactgaaaataatcaaatctgttttatttccacaatgccagacactaaaayttagaaaaatgaaaatcattgattctgttcttatgttgtgaaattacctaggtttctgctttgtttcaacaaatctttaag

SEQ ID NO: 471972 - DNA, 695 bp, Homo sapiens
tttatgactttccataaaagctttcagacaaaatttgtcttagattttgcttgtggcgtggtgggacaggagtataaacctcccagaactccctgaggaatttactgtaatcgwaaagagggaggatgctgcctgaaatttcttgtgtaaatcaatgtttgggaggtatattttagggttaataagcccattaataattaaagaaaacatatttaagatttgcatttccttaatttccttttctgtgtgtgaaactcatggataatttaaatatttacttagaagatacagtttgaatgttttattcccaaatctggttgtcagtatgtctgcttcaaatatttttatcctgcataatagagaattatatatatatttgagacagagtctcactctgtcacccaggctggagtgcagcggcacgatctcagctcattgcagcctctacctcctgggttccagccattctccttctcagcctccccagtagctgggattacaggcatgagccaccatgcccagctaatttttgtatttttagtagagatggggcttcactatgttggccaggctggtctcaaactcctgacctcaggtgatcctcccatcttggcttcccaaagtgttgggattacaggtgtgagccactgtgcctggagagaatattcttatggagttttgctgaatgtccttct

SEQ ID NO: 471973 - DNA, 695 bp, Homo sapiens
tttatgactttccataaaagctttcagacaaaatttgtcttagattttgcttgtggcgtggtgggacaggagtataaacctcccagaactccctgaggaatttactgtaatcgaraagagggaggatgctgcctgaaatttcttgtgtaaatcaatgtttgggaggtatattttagggttaataagcccattaataattaaagaaaacatatttaagatttgcatttccttaatttccttttctgtgtgtgaaactcatggataatttaaatatttacttagaagatacagtttgaatgttttattcccaaatctggttgtcagtatgtctgcttcaaatatttttatcctgcataatagagaattatatatatatttgagacagagtctcactctgtcacccaggctggagtgcagcggcacgatctcagctcattgcagcctctacctcctgggttccagccattctccttctcagcctccccagtagctgggattacaggcatgagccaccatgcccagctaatttttgtatttttagtagagatggggcttcactatgttggccaggctggtctcaaactcctgacctcaggtgatcctcccatcttggcttcccaaagtgttgggattacaggtgtgagccactgtgcctggagagaatattcttatggagttttgctgaatgtccttct

SEQ ID NO: 471974 - DNA, 608 bp, Homo sapiens
tgggttctcactggttctagtgcagacttgtgtgaacagttgaggcaactactaagtccttggtctctcagcttctttcgttaacaaaaagtttccttagttgggtgtcgtggcacatgcctgttgccccagctactcaggaggctgacgtgggaggatcactggagcccagaagttcgaggctggaatgatccaagatcatgctactgcactccagcctgggtgacagagcgagaccctgccccttaaagagaagaaagaaaagtttccttcccagagcatgttccctctgttccctgtgggtcgcatggagatcctggaattaatgtgaccaagctgggctggcctttacccagagccttagtctgcttggactttaatggatcccagctcgatggccccagggttaagagrcctcagtggacagagactggattggcagacagatttactcaaggatggggagggagggatcgcaagagtttgaagtggaaatgtgtgggctggcagtcctggatgctcatgaaaagcgaactctgaataagagaagaggagggagacagccactgaaatacattttaaacacatgtgaatcatgattcatgcaa

SEQ ID NO: 471975 - DNA, 513 bp, Homo sapiens
atgaggagctgaggctctgctggcagacccaggaatcaagcccaggtgttgctgatgccaaggtcaaggcttctcaggtttgggcttttagtagacttggaggagggaagaaaagctgcccccatgcagaactgatttatctgtccaggcttggtccatgaagcactgagactcctcctgagaagctgttcagaggaaggatggaggcttcaggagtggcccattcagggtgagcctgagctcaccctgatctgtaaggcaatgagcagcagcaacaggagtgcccaagaccccagcgtgctgaggttcagcagagggtgggacatggctgagacacaggtgcctgcatcaycctactccagggggagctatccacatcagagtgactgtgaatggctgcccctggaattgtgcagtgcacagtctgtgcaggtgtgcataaacgcccagcaagtacctagctgctcactggacaagctgcttatcttcttctagctctcatttccagcaaac

SEQ ID NO: 471976 - DNA, 596 bp, Homo sapiens
atcacgtaatgggagcagcgatcagggcaactgaaaaaggaaacgggccgagcccaacccagctctattattaaacttttctccagcactttctccccactcagccctttgccaccatattcctgagattgtccctgtgccaycccaaaggcacatggcctttgtaagctggtgtggggaggacggcacgggggcctgtgtcaattccatggaagcaccaatgggatttctttcttgtttggtgtcacagggtaattggtttttagaaagaactggggtgtctagctcagtaacccagaagccatagacgctttttcttttaggttacccttagaatatggtgagtatctttcaaacggacatgctctaggcaaagcctttgtgtagacaaataaatgaacccatgagggtttggctttgttggaaattgttagcattctcatccgtacagagatgagagcatgatttggtagagacgtagatcgtgtggcaacaagctggacacccctttgtacctctgatgtgggaggtcccagtaatcaggatgtatgcttgtgagttttcttgagttgaaagcaacccttctcttgcctgct

SEQ ID NO: 471977 - DNA, 596 bp, Homo sapiens
atcacgtaatgggagcagcgatcagggcaactgaaaaaggaaacgggccgagcccaacccagctctattattaaacttttctccagcactttctccccactcagccctttgccaccatattcctgagattgtccctgtgccaccccaaaggcacatggcctttgtaagctggtgtggggaggacggcacgggggcctgtgtcaattccatggaagcaccaatgggatttctttcttgtttggtgtcayagggtaattggtttttagaaagaactggggtgtctagctcagtaacccagaagccatagacgctttttcttttaggttacccttagaatatggtgagtatctttcaaacggacatgctctaggcaaagcctttgtgtagacaaataaatgaacccatgagggtttggctttgttggaaattgttagcattctcatccgtacagagatgagagcatgatttggtagagacgtagatcgtgtggcaacaagctggacacccctttgtacctctgatgtgggaggtcccagtaatcaggatgtatgcttgtgagttttcttgagttgaaagcaacccttctcttgcctgct

SEQ ID NO: 471978 - DNA, 397 bp, Homo sapiens
tgaaaaaggaaacgggccgagcccaacccagctctattattaaacttttctccagcactttctccccactcagccctttgccaccatattcctgagattgtccctgtgccaccccaaaggcacatggcctttgtaagctggtgtggggaggacggcacgggggcctgtgtcaattccatggaagcaccaatgggatttctttcttgtttggtgtcacagggtaattggtttttagaaagaactggrgtgtctagctcagtaacccagaagccatagacgctttttcttttaggttacccttagaatatggtgagtatctttcaaacggacatgctctaggcaaagcctttgtgtagacaaataaatgaacccatgagggtttggctttgttggaaat

SEQ ID NO: 471979 - DNA, 596 bp, Homo sapiens
atcacgtaatgggagcagcgatcagggcaactgaaaaaggaaacgggccgagcccaacccagctctattattaaacttttctccagcactttctccccactcagccctttgccaccatattcctgagattgtccctgtgccaccccaaaggcacatggcctttgtaagctggtgtggggaggacggcacgggggcctgtgtcaattccatggaagcaccaatgggatttctttcttgtttggtgtcacagggtaattggtttttagaaagaactggggtgtctagctcagtaacccagaagccatagacgctttttcttttaggttacccttagaatatggtgagtatctttcaaacrgacatgctctaggcaaagcctttgtgtagacaaataaatgaacccatgagggtttggctttgttggaaattgttagcattctcatccgtacagagatgagagcatgatttggtagagacgtagatcgtgtggcaacaagctggacacccctttgtacctctgatgtgggaggtcccagtaatcaggatgtatgcttgtgagttttcttgagttgaaagcaacccttctcttgcctgct

SEQ ID NO: 471980 - DNA, 375 bp, Homo sapiens
cccgggaagtgcctttccagcaagcagtgcccggagctggccacccacttcacatagcttattccaatctaattctcacagcagtccaataggaaggggatgatattctcactctgcatacgagaggtttgcaagctcacaccaccaggataagctggagccgggagtcctgtttgggtctgtgactcccaagcccttaccacctgcactttcacccggcatagaatgttctcgtcctccatctgcccctagtccacccaccctttagggactgcctccttcaactggcttccatgactgcgacagtgattgcctcctctgagcgcccgtarcgttgactgggcaccagtccatcccacctgggagtggtagatt

SEQ ID NO: 471981 - DNA, 493 bp, Homo sapiens
ctgagcagttgcacttgctcacacctgtaagcccagcaacttggagctgaggcaggagaactgcttgagtccaggagtttgagaccagcctggacaatatagcaagacctgtttctcaaaaaataaaataggaaaaaaagagaaaatgtggctgaggccatccaaagcgccagcccaaatgttggggtctaagaggaacrtgtgtgtgtgtgtgtgtgtgtgtgtgtgtgtgtggtggggggtgggcctggaaggagaacagaattccagaactacacgcccaagacaggcgtccactgagcttcaagctgggactattaagaacttagttggaatgggctgagtcagggcagcacccagagagggcagcagggcctggccagcaggctggggggatgggggccaggtgccccatggggagacacagagcaggggactcagaggatgctcagtggattcaggtatagggaggtgaccaattgccacttcttcc

SEQ ID NO: 471982 - DNA, 491 bp, Homo sapiens
tccctgtgctgcagggactactggcctttaagggctcctcagaaccaagggtctgggtcagaagaaaggttccaggtgagggcttctgccttccctcttgtgctgtccagaggtgagkcctgtcctccctcaacaagatgacctggtggaaggaaggaggcagcggagaccacgcggcttggctgcctgcctgtgggcagacctgcaggtgtgaggggcggaagcttggcctgaagcctgaggccaagctgaaggccaagcctgctggggggcacagagccagacaggacacagtgggctcgccaacactgcagaggaaaggggttctctctctgggcccaacagcactggtcccgcaagcctcaggccccctaagggctggtcggtgctgcacagagagagtgtctccaccccaggccatggtacgtgcccggttcactgtcccaccacgtgcctccatccagctacgttggtcaggtctaggatgtgcc

SEQ ID NO: 471983 - DNA, 611 bp, Homo sapiens
ttgcaggttgctatagtaaggacagaggtaggtggctctcggtgaacagtggccatttgtgttctaatcaggccccaggaggaatgcagggggctgtttccctgtgctgcagggactactggcctttaagggctcctcagaaccaagggtctgggtcagaagaaaggttccaggtgagggcttctgccttccctcttgtgctgtccagaggtgagtcctgtcctccctcaacaagatgacctggtggaaggaaggaggcagcggagaccacgcggcttggctgcctgcctgtgggcagacctgcaggtgtgaggggcggaagcttggcctgaagcctgaggccaagctgaaggccaagcctgctgrggggcacagagccagacaggacacagtgggctcgccaacactgcagaggaaaggggttctctctctgggcccaacagcactggtcccgcaagcctcaggccccctaagggctggtcggtgctgcacagagagagtgtctccaccccaggccatggtacgtgcccggttcactgtcccaccacgtgcctccatccagctacgttggtcaggtctaggatgtgccactcggctctcggggacctcag

SEQ ID NO: 471984 - DNA, 417 bp, Homo sapiens
gggtccaggtgtcctgccctcctcttcccagttggtgacgctgtgctgagcctcgcagaacacagcggcttcccggtcgctcagtcccaggaggggccccttgaagctccaggttccctcccctgggaggagttgcctggagggctactgagatttgttcaggacctgaaccccatcctttccttccgtgtgtttgttagggtgtttgctttggcagaagctttaaggtagaaagtggggtaatcctgaggaacagaattttcatctaaaggggcaaaaatcagattatgcaagaaaggaaaaaaccatggctcccaggggagtcggaggctatgagaaatgcagccccggagaggagcagtgtggatcyggccgacggaggcctgctctctgccagggcacctgcaggccacacaa

SEQ ID NO: 471985 - DNA, 596 bp, Homo sapiens
ccccgggctgcagtcccaatagtgcactgctgagcctggcgctcacctgcagggtagatggcacctcagtgccacacctgagcctctgagctctccaggagggcataggcaggcatgtatcaggcaccactgctcaccctgctygtgagtgacgtttttctgagcaccaggcaagcacttctccccggctctgtccatgctgccattgccttggtttgactgaatcttcaaggacaggcttgtcatgctaagggccattttccactttgaggcattcttttcttggttctctggttttaaagagcacttgataaaataaatcagagcactgcttccccctctgtcttccccatcccatctacccttataacaagagcagaatctcatggggcataccgaggggtggagctggaaaggaacataaaatcaccttccaaacccagctcagtatccaagggaaaccttccttggagctgtctctccccactcctcagcaaaccattctgtcctctgtaccagctccatgtcttgcccatgtttttgtaattatactcatcactgcctatttgttttatttgctaccttgtgtgtcctct

SEQ ID NO: 471986 - DNA, 596 bp, Homo sapiens
ccccgggctgcagtcccaatagtgcactgctgagcctggcgctcacctgcagggtagatggcacctcagtgccacacctgagcctctgagctctccaggagggcataggcaggcatgtatcaggcaccactgctcaccctgctcgtgagtgacgtttttctgagcaccaggcaagcacttctccccggctctgtccatgctgccattgccttggtttgactgaatcttcaaggacaggcttgtcatgctaagggccattttccactttgaggcattcttttcttggttctctggttttaaagagcacttgataaaataaatcagagcactgcttccccctctgtcttccccatcccatctacccttataacaagagcagaatctcatgggrcataccgaggggtggagctggaaaggaacataaaatcaccttccaaacccagctcagtatccaagggaaaccttccttggagctgtctctccccactcctcagcaaaccattctgtcctctgtaccagctccatgtcttgcccatgtttttgtaattatactcatcactgcctatttgttttatttgctaccttgtgtgtcctct

SEQ ID NO: 471987 - DNA, 596 bp, Homo sapiens
ccccgggctgcagtcccaatagtgcactgctgagcctggcgctcacctgcagggtagatggcacctcagtgccacacctgagcctctgagctctccaggagggcataggcaggcatgtatcaggcaccactgctcaccctgctcgtgagtgacgtttttctgagcaccaggcaagcacttctccccggctctgtccatgctgccattgccttggtttgactgaatcttcaaggacaggcttgtcatgctaagggccattttccactttgaggcattcttttcttggttctctggttttaaagagcacttgataaaataaatcagagcactgcttccccctctgtcttccccatcccatctacccttataacaagagcagaatctcatggggcataccgaggggtggagctggaaaggaacataaaatcaccttccaaacccagctcagtatccaagggaaaccttccttggagctgtctctcccmactcctcagcaaaccattctgtcctctgtaccagctccatgtcttgcccatgtttttgtaattatactcatcactgcctatttgttttatttgctaccttgtgtgtcctct

SEQ ID NO: 471988 - DNA, 443 bp, Homo sapiens
gccttccgccactgccactgaggtctgtatttctcggaggggccctcctgttctcacccccctcttgctgtgctaactgcacctcctgttgccgacgggttccagaacgcagaggaaaactcccgcatctccatcaccttcttccgcctgttccgggtcatgcgtctggtgaagctgctgagccgtggggagggcatccggacgctgctgtggaccttcatcaagtccttccaggtagccgcccctcatgtctgcggcccggggaatcrcagggctgccgcgtggcccagaacacagctgacacaaggaggagccctccactctggggccctgctccttcctctgtgtggcagaactcggccgctctgcctggctccctgtttccgcaccgagaggcctagacgaagcatgtggtttccaaggcaggctcagagccccagaag

SEQ ID NO: 471989 - DNA, 527 bp, Homo sapiens
ggtgtcatggagaccacgagatacggaggcccgaaactcagccctgaacaagggtggacacacatgtttgaggttgttgggatgaaaactacyaatgaggtgataggacgggttgttcagagtgaagtggaaaacaagaccaagggctgaatcttgggaaatggacacacagaagaataagaccaagcaagcaaaatagacaaaggaatgttaagagaacaggcagcagcgccagcctggaagccgcgggaggaggaatttcaggacagagctgtttatccatgcattcgttcaacagtctgcccagcttggtgctaaggctaggtggtggtgacacacaacagggaggaaattgacaccatcgtgctggagctcacagtctagtgtgggagagacactatgcaaataaataggcaactataggattggggtaagtgttatgaaggaaaagtaagtgtaaagtcgggctaataacaaaggtttctaatttggactggcaggttaggaaaggcttctttgcagaatta

SEQ ID NO: 471990 - DNA, 586 bp, Homo sapiens
gtggaacacttcctcaggaaagcctggagtgaatgccgccactctcaagccccacttttaaaaggatctccctgctgtgcctgtgttattatcaaaacagagaactgtgaacaccacctgctcccaataaatgttgtttcccctgggaaccgctgaagctcagaattacctagccattgatgtcaggtctgggggaggaaatgtactagatgagcctgggacaacttaaaagggaagaagttaacaaaggcttctggggtcgagtccaaaggactcaattctggagccaacttgaagaagctttcactggacaattagggaaatctgagcttcaataagaaaaaaatggcaagtaattaagacacaggaaatgctaagagtccttgagttaataatgatacttcaggctgggcgcggtggctcatgcctggaatcccagcactttgggaggctgaggcgagagaattgcttgagctcaggagtccaagaccagcataggcaacttggtgaaaccccatctgtatattattttaaaamataataatgctacttgaaaggaaaaaagcctaattggaagatgctgggg

SEQ ID NO: 471991 - DNA, 577 bp, Homo sapiens
tagtcccagttacttttgggaggctgaggtgggaaaattgcttgaacccgggaggataaggctgcagtgagctgtgatcacaccactgcactgcagcctgggcgaaagagtaagaccttggctctattaaaaaaaaaaaaagtcttggctgggcacggtggctcacgcctgtaatcccagcactttgggaggccgaggcaggcggatcacgaggtcaggagatcaagaccatcctggctaacacggtgaaaccccgtctcctctaaaaaaaaaaaaaaaaaaaaaaaaattagccaggcgtggtggcgggtgcctgtagtcccagctactcgggaggctgaggcaggrgaatggcgtgaaaccgggaggcggagcttgcagtgagccaagatcgtgccaccgcactccagcctgggtgacagagcaagactcttcctcaaaaaaaaaaaaaaaaaaaaagtcttgtgtggcatgaggttttgggggacaagatgttctttcttgattttcagtgtttcataatcccacctccacattttacttgtgtaatgatgagtttattcattgaatgagacct

SEQ ID NO: 471992 - DNA, 533 bp, Homo sapiens
aggagaaattgactccctttcttaacagtttgagtgtaatgtgcgtagaaagaggaataatatttatgatagccatctctggaaactatcataacaattagatctcttattaaaaaattaatataagcatttgataaaaaattcaaatcgtgtagatatatctactgcatccaatgctaagagatctttgtgatttatgcactgtgcacttgcattgcatagagagagggaagatgtgggatttctttttgcccaaatagaaacatactatatatgctcttctgcactttatttttatatgggggcaggatgtaggtctgattaacttttgcatttctgccatactgccaagtctatttgtggaaatgtgttttttagtaatgttttccaaaggtattaaattaggagacacaaactccaatgcccatagcagcctaacaagtgayataaatgagtgtcagaaaccaggctaaggcaattgggagtggtggggactgcggtgtcctgaagatctaatgccacctctgaggcaa

SEQ ID NO: 471993 - DNA, 467 bp, Homo sapiens
gatgactaaagtgggcatcagacctgaggatggtcagtcttctggttggctcatgacctatgacgtactgcaaatggctggcctggctaattttctctctctctctctctccctctctctctctytgtctctctttctctctctccttccccccccacctcttctgtctctctctctctctctgtcctctcactcactccctctaaagaaactcaaaaatttgaaccaatagaattggtcagctagtggtggaatctaaaccaaaaatctcatgatgtgtaggatgttgaaaagaccatgatggtcaggtaccatccagagtaaagggagaaaaaactgggtaagcagaggaatcagaggaaccaagtgagggtagacctgatagacacacagttaactggccatttacatcacagaggataaggcaacgatccatgaactcagtgaacaaaaatacaaagagtacc

SEQ ID NO: 471994 - DNA, 606 bp, Homo sapiens
atgactaaagtgggcatcagacctgaggatggtcagtcttctggttggctcatgacctatgacgtactgcaaatggctggcctggctaattttctctctctctctctctccctctctctctctctgtctctctttctctctctccttccccccccacctcttctgtctctctctctctctctgtcctctcactcactccctctaaagaaactcaaaaatttgaaccaatagaattggtcagctagtggtggaatctaaaccaaaaatctcatgatgtgtaggatgttgaaaagaccatgatggtcaggtaccatccagagtaaagggagaaaaaactgggtaagcagaggaatcagaggaaccaagtgagggtagacctgatagacacacagttaactggccatttacatcacagaggataaggcaacgatccatgaactcagtgaacaaaaatacaaakagtacctccgttgtgctgggtgctgggaacacagcagtgaacaaggtaaacactttccttgtagcctaacaggaacgtagagccaaatgaacaaacctgcaaacacaaacatttgtagtgagtggtatgaagagaaagaaacatac

SEQ ID NO: 471995 - DNA, 591 bp, Homo sapiens
ctgcccccgcccccggccacacgcacattctggggcccctcgatcctggaggttggccataccaggcccggctcccctgtttgcatcccctcggcgtctgggcgcgggaaggctccgtgcaccccgcttctcccacggccacgcggagccctcggcttcgtggcctgcccctggcgtctggaggagacaccgcgagtgaggcccgagggagcctctggggactcgcagcagccgaagcccgcttgggcctcggaggcctcctctacgctgggcccgaagtgtcctcccacccctggcgtggacccggagaggcccgaccgcggccgccctccgcttagccccggccgccagcagcttgccgggggcggcgtgcgcaacaaagggtggcatcgcagcggcgcggacagggacagcattgattcaatattagcttttcattccagtctattgtrcccatctgagataatattgactctgaggtgagagcccacagacaacagggcttgtctaacactccgctgcagggcgctcgaagggaagagaaccagaaagggcgagttaaagagagtgcgaataaaagctgctcgcgcg

SEQ ID NO: 471996 - DNA, 638 bp, Homo sapiens
gttcaaggtcggggtatgagaaggtggagacctgctgtgttgtattgtgctgttttaaaagcatgcttttctgtaagccagggcccatggagtagaaactgaaatttagcttctcataaattctgcagagctaccagggaacagtaatcagcaaggataaaatctgaagggaaggtcagtgaggcaggtaagagctgctgcatccatattacctaaaacacacaaaactccacgaaacaggactggaaaagcragcaagggtggaaggcaagaatcatcccatgagagtagtgttagattgcctgtaggaaaaaaacaaaaaaaaaccttgtcagccccaacagctactttaattgtgtgtgcatgttgtgctagtctgtaaaataagagttgagcacgttctatgtactttgtggtctctcttcataataccctgttgctgtcaaagtaattcactatttttcctagaaaaggcatggtgttgctgtgttcatttgtgcctgatccaaagaatcagtatggttgcctttttcttctattaggcatttacatgctacctggttgttaggcctgaaaataccagatggagcttggaaacagagcagacactgttgtcatagaaacgagatgctatccca

SEQ ID NO: 471997 - DNA, 638 bp, Homo sapiens
gttcaaggtcggggtatgagaaggtggagacctgctgtgttgtattgtgctgttttaaaagcatgcttttctgtaagccagggcccatggagtagaaactgaaatttagcttctcataaattctgcagagctaccagggaacagtaatcagcaaggataaaatctgaagggaaggtcagtgaggcaggtaagagctgctgcatccatattacctaaaacacacaaaactccacgaaacaggactggaaaagcaagcaagggtggaaggcaagaatcatcccatgagagtagtgttagattgcctgtaggaaaaaaacaaaaaaaaaccttgtcagccccaacagctactttaattgtgtgtgcatgttgtgctagtcygtaaaataagagttgagcacgttctatgtactttgtggtctctcttcataataccctgttgctgtcaaagtaattcactatttttcctagaaaaggcatggtgttgctgtgttcatttgtgcctgatccaaagaatcagtatggttgcctttttcttctattaggcatttacatgctacctggttgttaggcctgaaaataccagatggagcttggaaacagagcagacactgttgtcatagaaacgagatgctatccca

SEQ ID NO: 471998 - DNA, 527 bp, Homo sapiens
tcactttgactgccttagacttgaacaatgcgtttttcaccttgggagcgaggtttcttacataagatacgaggctgaactgtcccaataaacagagaatgaacttcaatgtgatgtcaaaattagcactgttagagctaccaaatagaaagtagattcgaaattaattttttctaggttaccgtatgcttcttacatgtccagtgtctttttgaaaactccactttatagtactcgaaagctataattttctttataggtggagagaatcaaaacattacaaatttgtaaaatgaaaattctggtataaagtagttaaaatatatacagagaatactaatgaaataattagtctggtaaaaattaatcatgctgtaaacaaytgtctttaaaattattaattagcctacttgactataattacaaataaacaatcttaaattactttgtttctacagaactgttactttattagcataacaaaactacaaaagttatttttataagaaacttctaatataaaaata

SEQ ID NO: 471999 - DNA, 638 bp, Homo sapiens
aaataattctagtccctggtctaccttctatagtttaagcagcaaaggggttgtagggacgtttaaagggagaatataagaacaaaagactagaacacactgcctctcttgccacctaaaaaagtcatgcaaatttctcactgtcattttattcagtgaagcaggaatctcactcttaagcctgtggaattcattaaatttgttttctttctgaataaaaataaatgggacccatagacatctttgtttttttccaaaccggcccttgtgcagagaaggttgttgttgctaattttagtccttgtratgtatggtggaatttattcatgtatttgcagataatactggactactggaaaatcaaactagtttgatcaaactagtttggggtatatcccaacacattgccaacacatgtttcttgggtgatgcattatgaatgcattatccaaggatttatctaatctttgtttgaggtggttgttactttcaggttcttagggtaatgagtttggaaagttgtaatttaagctgtacttcctttttcattcccaaaccatgacttttcttttttttaaataatagagacagggtctcactatgttggccaggttaatcttgaactcctggcctcaagc

SEQ ID NO: 472000 - DNA, 571 bp, Homo sapiens
tgacacagacactggacacacattgatgtcactagatccttttttcctctggcttctttcacattaaagagtctctatttttagtacaggacgaagggtatttatagctgtagttttccaaagatcagacactgtgccaggtatgtggttaagacaaggggcaccccgcctgataaagtgccatgcattcccgggagccagggtgatttttcctctaatgacactttccyggtggcttccctgctccattccatcattttgatccatgtgccaaattcctgggcttgacacatgtaaagagataattcacatgatccccagcttgtttttgactctgtttcttaaaaaaatgcagtaaaactttatagtatgaccagcatgactcaatgttgtttctggatttcaaaatattgaggttagatgtgctaatggtttgctccggagctacttttacaaggcaaagccagggcccctcttgccagcacatccgagcaagaaacagcaatgtgttctcagcgctaacctttccccccagagcacgccatgtcttcagctccagaacccggagagt

SEQ ID NO: 472001 - DNA, 486 bp, Homo sapiens
tgcatctagaactttccattctctcattgataactaatcttttctatctaagccttgccttgcctcggtcaccagttttgcctagccttttttttttttttttttttgagggacaatttagtatggacatggagtcttcttcatcgttccaccaaggcaggggcttatggccttagattcacatacttgccagacaagctggtgtggtacctgctgatttccttatttmaatcatttctggcctcttctttctccagggaaaggctttttaaatggcttcagagaacagttatcggatatctgtatctccaggactgaactgtttctgcttgtaagctcatgggatgcatttgcatagtagttttttactgctccttgggagacccaaccaacctttgagaaggctgcctctgtgtacttgggaatcagacacacagatttatgagagcactatcagcttccggggcctgtggcagcagataaaat

SEQ ID NO: 472002 - DNA, 486 bp, Homo sapiens
tgcatctagaactttccattctctcattgataactaatcttttctatctaagccttgccttgcctcggtcaccagttttgcctagccttttttttttttttttttttgagggacaatttagtatggacatggagtcttcttcatcgttccaccaaggcaggggcttatggccttagattcacatacttgccagacaagctggtgtggtacctgctgatttccttatttcaatcatttctggcctcttctttctccagggaaaggctttttaaatggcttcagagaacagttatcrgatatctgtatctccaggactgaactgtttctgcttgtaagctcatgggatgcatttgcatagtagttttttactgctccttgggagacccaaccaacctttgagaaggctgcctctgtgtacttgggaatcagacacacagatttatgagagcactatcagcttccggggcctgtggcagcagataaaat

SEQ ID NO: 472003 - DNA, 518 bp, Homo sapiens
catgtcacaagtggtcattctatgggaaaacagccaaaaaaaactacaaaatcaagcctgaaagagtttctacaatgttttcacataacttagcaatgaggcataatatccattcctgcacacaggttattatttaaatatagctctaatcgagtgtaacaaattttcttagctacaaaggaactctgatctaattttacattagttctttctctcattgttaccaactggatatgccargagaagattacatttactgtatatcaagttgaaatactggcacatgatataaataccagctacatctttgcacgtaacatggaagaaaaatattttcttgattaactaaattggagctattcaatcaattcagatatagttgcatcaaaactagccatttcttagaatatcaatattttaaaatactattagcctgagaccttaaactgagaaaatcccttatataaggcaaatggtaaaatctgaagaaacaggggctagaaataagaaatgacagc

SEQ ID NO: 472004 - DNA, 576 bp, Homo sapiens
tgccagccctggaaattcaggggactgggatacaggccatgggagccacctggggctatgtacaaatgggatggaatttcccacaaagtgcagtggtaactgtctcagcgacttccctggtgtgtcctgaaacgtacaatgtatcctacatttacccaggctcttcctgggagcaactctttgtgcagggactcttctgtgggtagcctctggggggcttttaaatctggcttcttggtttgaacaaaagatggcagagagagagggagagagagagagaactctggatcagagggtgggcacttacttaattccaccaaaaagttcctgattgctctccagaaaggctgcaccagtccccatgcaccccaaggaaagtactctcatttmgctatattttcaccaacaaatggtctcacccaacttcctattgttgccagtgctccaggtgtagggctgtgtctcaacctcattttaataggcatttctctgattactagcgtatgagtgtctcttcatgagcttggtagctatttgggctcccccttctgtgacctatctgttccaatcctgtgc

SEQ ID NO: 472005 - DNA, 542 bp, Homo sapiens
aattattgttcacagctgactgaactatgtagggtactgtgattaatttcctttctttttgcaaatttaattttcctggagttagtcgttgccttgtcctttcattttcttaatgttttatgtagtgtttatgaatatatccaccaaagtttctggcaaagatgaaaaattctccaattgcagtcaagtgttggcaaacctgatctttctgtgtatttgctcgtttgtggatgtctgtcctaggtcttcagtctagacttccttccccatcaccccagcatcttctgtgcctctcttctgtttcctgtattccttgcccttgactgacttcctccttattgcagagcatagcctcccacagcatagcctcccacagcttcctgagagtgtgcgtggcaggtaaaggtctctgagaccctgcatagttgcaaatattttacccttatcctacactttgttgactttgtctgtatgtataattcttggttggaaatcatttcccttgggagttttcgggccacygttctgttgtcttctagcat

SEQ ID NO: 472006 - DNA, 638 bp, Homo sapiens
atgaaatctgttgcacgcatatattcattgcagcactattcacaatagcaaagacgtggaatcaacccaaatgcccrtcaatgatagactggataaagacaatgtggtacatatacaccatggaatactatgcagccataaaaaggaatgagatcatgtccttttcagggacatggatggagctggaagccattatcctcagcaaactaactcaggaacagaaaaccaaatactgcatgttctcacttacaagtgggagctgaacaatgagaacacatagacacagggaagggaacaactcacactggggcctgttggcaggtggggttgggggaggaagagctttaggaaaaatagctaatgcatgctgggcttaacacctaggtgatgggttgataggtgcagcaaaccactgtggagcacgtttacctatgtaacaaacctgcacatcctgaacgtttaccccggaacttaaaataaaaataaaaataaatgaaacctgagaattcattctttttaaggttgcgtccaaaggtccctacttaaaaataatcaaaatggcacatactcaacaggggacagtacgttctagtggaaagagttggacaaggagttaggagacttgaattctagcttga

SEQ ID NO: 472007 - DNA, 638 bp, Homo sapiens
atgaaatctgttgcacgcatatattcattgcagcactattcacaatagcaaagacgtggaatcaacccaaatgcccgtcaatgatagactggataaagacaatgtggtacatatacaccatggaatactatgcagccataaaaaggaatgagatcatgtccttttcagggacatggatggagctggaagccattatcctcagcaaactaactcaggaacagaaaaccaaatactgcatgttctcacttacaagtgggagctgaacaatgagaacacatagacacagggaagggaacaacwcacactggggcctgttggcaggtggggttgggggaggaagagctttaggaaaaatagctaatgcatgctgggcttaacacctaggtgatgggttgataggtgcagcaaaccactgtggagcacgtttacctatgtaacaaacctgcacatcctgaacgtttaccccggaacttaaaataaaaataaaaataaatgaaacctgagaattcattctttttaaggttgcgtccaaaggtccctacttaaaaataatcaaaatggcacatactcaacaggggacagtacgttctagtggaaagagttggacaaggagttaggagacttgaattctagcttga

SEQ ID NO: 472008 - DNA, 638 bp, Homo sapiens
atgaaatctgttgcacgcatatattcattgcagcactattcacaatagcaaagacgtggaatcaacccaaatgcccgtcaatgatagactggataaagacaatgtggtacatatacaccatggaatactatgcagccataaaaaggaatgagatcatgtccttttcagggacatggatggagctggaagccattatcctcagcaaactaactcaggaacagaaaaccaaatactgcatgttctcacttacaagtgggagctgaacaatgagaacacatagacacagggaagggaacaactcacactggggcctgttggcaggtggggttgggggaggaagagctttaggaaaaatagctaatgcatgctgggcttaacacctaggtgatgggtygataggtgcagcaaaccactgtggagcacgtttacctatgtaacaaacctgcacatcctgaacgtttaccccggaacttaaaataaaaataaaaataaatgaaacctgagaattcattctttttaaggttgcgtccaaaggtccctacttaaaaataatcaaaatggcacatactcaacaggggacagtacgttctagtggaaagagttggacaaggagttaggagacttgaattctagcttga

SEQ ID NO: 472009 - DNA, 614 bp, Homo sapiens
cattgacagtgctggtctacaatacaccattctgtatgcctgaaagtgtattaatgatgccttccaggctccctgtaagtttcgggagaggttgttttcatkttctttaggactgggcagggctgaattttttttttttaaaagtagaagaaaactgaaacataatgaatcacagtagcaggccgttctcattataagaaatgagtattaggattatgaaaccccttgggggatgtaacaaaaacaacaaaacaagttctcagcttttaggaaaatattgccctgaaaggttatctcttgtaaccctgcttccacagattataattcagcagttgctgtggacgtctttagcctcaggcttcattacattggtgtggagagagagaaatatgtggttctctctcctccttcagactcttaaatcatacctggcatccgcctccagggaaaaatttggtgctgggatttatagttgtttattgtttgtgcttccagcatgtggactgtgcattaatttgtttctcagggtcaattttggtatcatcattgccagcagacatttgtgagaataactcatagtttaggatttatttattgataagcgtattccacaa

SEQ ID NO: 472010 - DNA, 614 bp, Homo sapiens
cattgacagtgctggtctacaatacaccattctgtatgcctgaaagtgtattaatgatgccttccaggctccctgtaagtttcgggagaggttgttttcattttctttaggactgggcagggctgaattttttttttttwaaagtagaagaaaactgaaacataatgaatcacagtagcaggccgttctcattataagaaatgagtattaggattatgaaaccccttgggggatgtaacaaaaacaacaaaacaagttctcagcttttaggaaaatattgccctgaaaggttatctcttgtaaccctgcttccacagattataattcagcagttgctgtggacgtctttagcctcaggcttcattacattggtgtggagagagagaaatatgtggttctctctcctccttcagactcttaaatcatacctggcatccgcctccagggaaaaatttggtgctgggatttatagttgtttattgtttgtgcttccagcatgtggactgtgcattaatttgtttctcagggtcaattttggtatcatcattgccagcagacatttgtgagaataactcatagtttaggatttatttattgataagcgtattccacaa

SEQ ID NO: 472011 - DNA, 513 bp, Homo sapiens
ttttaagcccaaactattagaattctaaacatcttgtcatgttgctgtaatgcatagttaaaattcagtgtacattttttactttgcatatgtttgaatatttctatgataaacaataaaaaaatagtataatgaacctcaagtacccatcgcccagcttcaacactctgccattcttattttttctaaatttctacaycctctcttatttttaacagttgtttttaaggcataattgacatacattgaaatgtaagaatcttggctatagaagttttacagatagatacacctatgtcacccatagacctctatcacaatattgaatattttcatatctccagaaattctcttgtgttctttgtcagtgaatcctctcactcccagacaatcaaggtcctaattagattagccttttctagaacttcacataaattgactcatatactacgcactgtttcgtgtaaggctttttccactcagtgtaaggtctgtgtgatgcctccattttgt

SEQ ID NO: 472012 - DNA, 513 bp, Homo sapiens
ttttaagcccaaactattagaattctaaacatcttgtcatgttgctgtaatgcatagttaaaattcagtgtacattttttactttgcatatgtttgaatatttctatgataaacaataaaaaaatagtataatgaacctcaagtacccatcgcccagcttcaacactctgccattcttattttttctaaatttctacaccctctcttatttttaacagttgtttttaaggcataattgacatacattgaaatgtaagaatcttggctatagaagttttacagatagatacacctatgtcacccatagacctctatcacaatattgaatattttcatatctccagaaattctcttgtgttctttgtcagtgaatcctctcactcccagacaatcaaggtcctaattagattagccttttctagaacttcacataaattgactcatatactacgcactgtttygtgtaaggctttttccactcagtgtaaggtctgtgtgatgcctccattttgt

SEQ ID NO: 472013 - DNA, 603 bp, Homo sapiens
tgtttctttctcttcataccactcactacaaatgtttgtgtttgcaggtttgttcatttggctctacgttcctgttaggctacaaggaaagtgtttaccttgttcactgctgtgttcccagcacccagcacaacggaggtactctttgtatttttgttcactgagttcatggatcgttgccttatcctctgtgatgtaaatggccagttaactgtgtgtctatcaggtctaccctcacttggttcctctgattcctctgcttacccagttttttctccctttactctggatggtacctgaccatcatggtcttttcaacatcctacacatcatgagatttttggtttagattccaccactagctgaccaattctattggttcaaatttttgagtttctttagagggagtgagtgagaggacagagagagagagagagacagaagaggtgggggggggggaaaggagagagagaaagagagacaragagagagagagggagagagagagagagagaaaattagccaggccagccatttgcagtacgtcataggtcatgagccaaccagaagactgaccatcctcaggtctgatgcccactttag

SEQ ID NO: 472014 - DNA, 598 bp, Homo sapiens
tagaaaaactttaaggaggaatcagcttaatgtgtcctgagggcagagtagagaataaagtaaggcgaggaaagccgaaggtaggtagaccaattaggaggcaatggcaggattaaagcaagagataacaatggcccagactggggtatttcaggggatggagagaagtggactggcttgcacaacaatttacgaggaatataaatgctgatttaaggcctcrgctatctaaaaacggtttgattattgttgtcccaggaaggggacccatcaaaatgaccttctgcgaagcctcacaactccagggtttagttcaggttctgaattgtagtgaaggagaatggaaattagcaaacagcctcaaatgaaagataagcagttttgagactggtaagtaacagtattaaagtgtaaagcagatagaatttacagctattgttagactctcctgaaagtgttattagagtcagtttttcacttccattgagaaagagaaaataaccaatattttgtgaagcgagcatggaaaaagtatgaggacaagatgaaaaagagacaccaggagttaggaccccaggattatgatccgggctgtgat

SEQ ID NO: 472015 - DNA, 598 bp, Homo sapiens
tagaaaaactttaaggaggaatcagcttaatgtgtcctgagggcagagtagagaataaagtaaggcgaggaaagccgaaggtaggtagaccaattaggaggcaatggcaggattaaagcaagagataacaatggcccagactggggtatttcaggggatggagagaagtggactggcttgcacaacaatttacgaggaatataaatgctgatttaaggcctcggctatctaaaaacggtttgattatwgttgtcccaggaaggggacccatcaaaatgaccttctgcgaagcctcacaactccagggtttagttcaggttctgaattgtagtgaaggagaatggaaattagcaaacagcctcaaatgaaagataagcagttttgagactggtaagtaacagtattaaagtgtaaagcagatagaatttacagctattgttagactctcctgaaagtgttattagagtcagtttttcacttccattgagaaagagaaaataaccaatattttgtgaagcgagcatggaaaaagtatgaggacaagatgaaaaagagacaccaggagttaggaccccaggattatgatccgggctgtgat

SEQ ID NO: 472016 - DNA, 584 bp, Homo sapiens
gggtcaggtctatttttgtggtagaatcacctacagttaagagaatccttggcttggaggttttcttcttttttttttgagacagggtcttgcactgtcgcccaggctgggrtgcaatggcgtgatcttggctcactgcaacccccgcctaccgggttcaagtgattctcctgcctcagcctcctgagtagctgggactacaggcgcgcaccaccacgaccggttaatttttgtatttttagtatagacgggtttcaccatgttggccaggctggtctcgatctcttgacctcgtgatctgcccgcctcggcctcccaaagtgctgggattacaggcgtgagccaccacgcccggccggcttgaaggttttcaagggctagagaggagccctgccctggctccttaggtacagccagaatcggcctttaaggtatgggatatctgactcctgcaggactggaactccacgtgcttggagggataagcatttatgatgtaaccactaagtagtcagagggcaggaggagtaacgctgttgctgggcaacctggcttagcttcgtggctttggttaaggtgctact

SEQ ID NO: 472017 - DNA, 636 bp, Homo sapiens
gtgtgatgagggtggaggtgtgaacgaatgcctcagagtgtgatgaaggtggaggtgtgaacgaatgcctcagagtgtgatgaaggtggaggtgtgaacgaatgcctcagagtgtgatgagggtgggggtatgaatacatgcctcagagtgtgatgagggtggaggtgtgaacgaatgcctcagagtgtgatgaaggtggaggtgtgaacgaatgcctcagagtgtgatgagggtggaggtgtgaatacatgcctcagagtgtgatgagggtggaggtgtgaacgaatgcctcagagtgtgatgagggtgkaggtgtgaatacatgcctcagagtgtgatgagggtggaggtgtgaacgaatgcctcagagtgtgatgaaggtggaggtgtgaacgaatgcctcagagtgtgatgagggtggaggtgtgaatacatgcctcagagtgtgatgagggtggaggtgtgaacgaatgcctcagagtgtgatgagggtgggggtgtgaatctcatgttccttcacatgaatggcatgaactgaaggcctctctctgtgtgagctgtccgtgacattaagcacattcctgtgttctggaggaaaggaaaatgattttcaaataaacacttgaccacataca

SEQ ID NO: 472018 - DNA, 511 bp, Homo sapiens
tttgagtaagtaacttaacttccctgtccctcagcttcctcatctgtagaataggagtaacgacacctgtctctccaggttgagaaaataggacacctagttcaggacctggcacattttaggtgctcaataaatactgatagattgaataattggactaatggtggcgtgggcaacccacagtcagtgaataaatgttaactgagcacctactawgtgtcaggctctttgtgctagatgttttctatgctccatcttcctgaattgctcacactcctgtaagagaggagagattcttatcccctaaggtcgcacagcaaagacgacgcaggggggtgggctgttagtgttccttgcccaactgtggaaagggagtcccagagagggcaggtcgcttgcccaaggtcacgcagaaagccgagggtttccgtcgcgaacccccctccccactcgctcagggctctccaatccgcagctctgcgtgcgggggcgcgcgcatccccccgccgtc

SEQ ID NO: 472019 - DNA, 534 bp, Homo sapiens
ttagccccgtgactttgagtaagtaacttaacttccctgtccctcagcttcctcatctgtagaataggagtaacgacacctgtctctccaggttgagaaaataggacacctagttcaggacctggcacattttaggtgctcaataaatactgatagattgaataattggactaatggtggcgtgggcaacccacagtcagtgaataaatgttaactgagcacctactatgtgtcaggctctttgtgctagatgttttctatgctccatcttcctgaattgctcacactcctgtaagagaggagagattcttatcccctaaggtcgcacagcaaagacgacgcagkggggtgggctgttagtgttccttgcccaactgtggaaagggagtcccagagagggcaggtcgcttgcccaaggtcacgcagaaagccgagggtttccgtcgcgaacccccctccccactcgctcagggctctccaatccgcagctctgcgtgcgggggcgcgcgcatccccccgccgtccgtccgtcag

SEQ ID NO: 472020 - DNA, 580 bp, Homo sapiens
caagaccagcctgggcaacatagtgagacccccatctctaccaaaaaaaaaaaaatcaatatcaccaatcttatattatagattatatagattactaaccacgtgtgcatccccagggcctagcacagggcttggcacatgttaggcaataaatatttatagaataaaggaaagttggcgggcatggtggctcacacctgtaatcccagcactttgggaggccgaggcgagcagatcacatgagatggggagtttgagaccagcctggccaacatggtgaaaccctgtctctactgaaaatacaaaaattagctgggcatgatggcagccacctgtaatcccagctactcrggaagctgaggcaggagaattgcttgaacccaggaggcggtggttgcagtgagcagaaatctcatcattgcaccccagcctgggcaacaagagtgaaactctgcctcaaaaaaaaaaaggaaagatacgtaaataaagttacattacttaaagataaatgttctgccaatttttatttggattttttttaaggccaaagaagatgttgaagaacacctgctttaaaatt

SEQ ID NO: 472021 - DNA, 549 bp, Homo sapiens
ctggcctctattagacttttttttttttcttgagacggagtctctttcgtccaggctggagtgcagtgggcgtgatctcggctcaccgcagcctctgccctccgggttcaagcaattctcctgcctcagcctctcgagtagctgggattacagacgcctgccattgtgcctagctaattgttttgtatttttagtasagatggggtttcaccatcttggccaggctggtcttgaactcctgacctcctgatccaccttccttggcctcccaaagtgctgggattacaggcgtgagccactgcgcccagcctgtaagactttttaaaaggatttttctggctgcagggttgaaagtaaagtgcagagtacggtgagaccactttagaagacttagaatattccagacaagaggagatggtgacagagaccagagtttgataggttagatatggggtataagaaaaagtgaggagttaagggtggtctcaagatgttgatctcaagatggtctggctaggtgcggtggctcacgcctgtaatcagcacttt

SEQ ID NO: 472022 - DNA, 486 bp, Homo sapiens
cagatgtgagcctctgtgtctagccaaattcattcattcattcttaaataagaaaatatttctgcaagtgacaggttgcaatttcatctttgctccacatgtcttattaattgtgaaatttttctagtatatgtgctgccaaagtgagcactaattgtggaatttttctaaaaatctcatgatagttttattttcagctaagtttctyatgttttacgaagtttttttatttttaaaaatctagttttcattattttgatcagaaaataaaagatgctcacttgtgaacttctattgaaatttaacttaaactggaattccaaaatcctcttttcatactaacgttattaacagcagaatcttagagtacttaccgcattatttcctcaccttcagggataagttcagtgtcagactctttgtttatcaactcaacagccattcccaatctctcccccacactccccagcagctagaattgaccca

SEQ ID NO: 472023 - DNA, 620 bp, Homo sapiens
ctcctcttttttttttttttttcagttgtattttccaatgttgcttaaacatctgcaatatattggttaagggcacgtactttgagtcagactgcttggtttgaattccaattctccacctactagttgtaagatcttgggaagtcaacctccctcagtttccatatctgtaaataggaataataacagtagctcctacttcacaytactgtaatgattaatgaatggacatgcacagtgcacttaagatagtgacaagcacatcaaacagcacattcatttatcccgtggtgacctggaagttacatatccagttgtatttctaacagtggctacgcttgtttagaaaaataaagaaacatctacctctctaacagcatcaagaataaaataatgcctgttaaatctggctcaaacttttcccattttagcaaattatccattgttggttggaataatttttaaatccagatcatcatgatgatgtttataaatattctctttcagtaattcttttgactttcataatgtttcatcagcatgtcaacaataattattttatttcatcaccagctgtttttctgattgatttctctccacaatttattttatgcgatgtc

SEQ ID NO: 472024 - DNA, 615 bp, Homo sapiens
tgtaaccagataatcaaacctagggagaggatgacaaaaatgcttgggcaggagcattcagaggatgtgtatttggttttgttaatattctatttcttacgttgagtacgtgtgggtttattctgttttattaaaaatttaaatatatttttaggttttaaaatgtattatggaatattagaaagtttgttttttatattacacctcctccttttctgatcatcagattattttcattgagaagatgcaatattctctaaaatattattgaaaatacaaaattgattacttttaaaaatctgttttatggcatcaactggtttcagggaaagaagggcgttgcccttgggttgttctccttattttgagctattgactgtggtcttaagtgggatgatttatccgtgtgcccaacttcacttgggaaggtgtgagttccagtggttgttggcagccgagatgggtagagaggcaggtgttcatttttgaatatgctacttttaggtaaaaaggcaaaagaaaagtttgtattttgccaggttaggcttctagtcaattgcgaggtgtagrcaggaagcttctgtgagttaaggaagctgtgcagccaggaccaca

SEQ ID NO: 472025 - DNA, 588 bp, Homo sapiens
ctggtggttggcatcctcaatgcccagcccagagtcttctgcaaggactcctgaagatggtggagatcattcaaaggcccatcaagatagaaaaaggctgtagtttgcttgcccatgtggccagctagcagatctctggaaactctctcygctgctgccacccccacatagatacttgtggaggcaacataaaccacagggacaatcccaccaatttattgaggtgctaaggaaatggaatacccaatgggtatcctccccagatcaaattgcttctcttatatcctaatccaggttcagataaggaacttctctctctctgttttaacttttaagttcagaagtacatgtgcatgtttgttacatatgtaaacttgtgtcattcatgtttgttgtacaaattatttcatcaccaaggtgttaagcctggtgatcattagttatttttcctgatcctctccctcctcccaccttctgccctccattaggtcccagtgtgtggagaagggggaatgcttatacactggtggtaggagtataaattagttcaaccattgtggaagacagtgattcctcaaagaccaaaga

SEQ ID NO: 472026 - DNA, 659 bp, Homo sapiens
tcattactacttacaagaagtactaaagaaagttcttcaggttgaaatgaaaggatatcagccagcactggaaagaagaagaagaagagagaaggaagaaggagagggagagggaggaaggaagaaggaaaagaagaagaaggaggaggaatgamaggacactaaacataagaaacatatgaaagtataaaacttgctagcaaaggtaaatgtatagtcagattcagaatagtctaattctgtaatggtagtatgtaaattgcttttaccaccagtgtaaaagtttaaagacaaaagtattaaaaatgactatagctgcaataatttactaatgaatgcacattataaaaatgtaaacagtaatattaataatattaaatgtaggggagaagaagttaaagtttttgtatgtgatcaaagttaagtttttatcaggttaaaatagtctattataacaatagaatgttttctgtaatcccatggtaatcacaaagaaaaaattctgtaggagatacacaaaatacaaagagaaaggaatcaaaacaaaatactataaaaaattattaaatcacaaaggaagacaacaatagagaaaagagcaaatgaattgcaaaacagaaaacaactagatggcaatagtaagtccttacctatcaata

SEQ ID NO: 472027 - DNA, 313 bp, Homo sapiens
ctgacaggacttggtgtgtgttgttcccctccctgtgtccatgtactcttattgttcaactctcacttatgagtgagaacatgtggtgtttggttttctgtttctgtgttagtttgctgagaatgatggcttccagcttcacgtatgtccctgcraaggacatgctgcacatatgcaccatggaataccatgcaaactgtttttaacagtttcacttttcaccaggttttgtcagtgccctatagacatagcctaagggcaaacctcaccatccctactactaatgctaattcaaacgtccattctagtttgc

SEQ ID NO: 472028 - DNA, 529 bp, Homo sapiens
cttgctgcactgaattaattttttcctggatgttcagatttgaaatgggctgggyagttgttctgcaaagctggtgtcgccctctcttttgctgctgaggctgggaaacttccatatagaatctctgggaaagctctaaaggggcgcatatccccccggatcataggttccctgcctggtctgcatgccctgtgtccccagcacactgcctgcctctctgggccagcccgggtgtgaggtggggactgaggaggctgctgttggctccgccccatgcccagcatgctctacacgagtggtcggtccacagtcacccacgctgcctgactcaccagctcctgcaactcagcctctggggctggggctcctatgggtttgtggtcttccattcagaccacaccaagctcccgcccctcctcctcctgggaatggagacagagggaccatatttgttcaaagcttcacagagtacagtgcctcagctctggtgagaaaagcactcatacttccttgcttacacagttgatgt

SEQ ID NO: 472029 - DNA, 529 bp, Homo sapiens
cttgctgcactgaattaattttttcctggatgttcagatttgaaatgggctgggcagttgttctgcaaagctggtgtcgccctctcttttgctgctgaggctgggaaacttccatatagaatctctgggaaagctctaaaggggcgcatatccccccggatcataggttccctgcctggtctgcatgccctgtgtccccagcacactgcctgcctctstgggccagcccgggtgtgaggtggggactgaggaggctgctgttggctccgccccatgcccagcatgctctacacgagtggtcggtccacagtcacccacgctgcctgactcaccagctcctgcaactcagcctctggggctggggctcctatgggtttgtggtcttccattcagaccacaccaagctcccgcccctcctcctcctgggaatggagacagagggaccatatttgttcaaagcttcacagagtacagtgcctcagctctggtgagaaaagcactcatacttccttgcttacacagttgatgt

SEQ ID NO: 472030 - DNA, 321 bp, Homo sapiens
ttctccacactgccagccatgtgacaacaatagtatctatctcagcaggagcctggctccaggacccacccctctgctatgttcagaagcccctccattcagagactggagaatccagtgttgctgggaaaatcccttttactttgtgctgagtttcagaagaggcctaccccatgctatgcctttcccacccctggaggcaaagacatcactcttccccagargttggcagtatctcacactgacactgaggcttgcagatggggcctgtgcttccttcctcagaaccggtctcagaactcagcccctgcccaccgttgc

SEQ ID NO: 472031 - DNA, 572 bp, Homo sapiens
gaaggatctggagcagcactccataatcaaacacttccatatttcttcagtgaaacatctggaaatcatctcacacaggttcaagagaatttgkggggggaggcatttatgaaaatgttataaaactggattgtggtaagagttacatatagctttttaaatttactaaaaatcaccaaattgtacacttaaaacaggtgaattttttgatatgtaaactatacttcaatacagctataaaaaatacagttctcagctttaaaaaaataaaagttctcacatcaattcaggtcacattttaccaaatggattaataaaaaacccacttcaattttagagatttctgaatttagagctacatatcagagaatatggactgtatctgtagagttctctgaacacaatggcagtgctcaatatgcaagtgtttttattatcattactactattttactcagcacagtgtttcccaaaaggagatctataaacatttttggtgggataattcttcattgtgataaaatcccacacactaaattccaacagcatccctcaatatttgtgacaattgc

SEQ ID NO: 472032 - DNA, 589 bp, Homo sapiens
gctttcatgcagaagacatggagtggaattactgggaggaatcaagcctaggagtcagggaaaacaatgccaatcctgccttaattggaggcgggaccttgggtgagttacctcttctctctgagccttgctttgttcatctgtgaaacgaacaggacagaccagattatttgtaaggttccttctagtggaaacatcccttggaggaaaatttgatgctagaaaataaatgacaagtaaaagagaaggtaacaggcatcttcctctgtctggaggtctgtggtctggagttgagtcactccaggctgggctaccctggccccagacccatgcacactgctacatgagtagacactgctatacctgtgcgtaccatayacacaccatgtgcacacagaggccacccggcccagggcttacctgtatagccagagaagaaccagctaaggagggtggggcaggtgaaatgccccctccagaaaaagtctaaggccagcaggagaaagaggcctatgctctggtggtgggggtccacttccaccaacagctcagcgaaaaacacactggccagagtcataggcagaattcc

SEQ ID NO: 472033 - DNA, 598 bp, Homo sapiens
aactgggaggctttcatgcagaagacatggagtggaattactgggaggaatcaagcctaggagtcagggaaaacaatgccaatcctgccttaattggaggcgggaccttgggtgagttacctcttctctctgagccttgctttgttcatctgtgaaacgaacaggacagaccagattatttgtaaggttccttctagtggaaacatcccttggaggaaaatttgatgctagaaaataaatgacaagtaaaagagaaggtaacaggcatcttcctctgtctggaggtctgtggtctggagttgagtcactccaggctgggctaccctggccccagacccatgcacactgctacatgagtagacactgctatacctgtgcgtaccatacacayaccatgtgcacacagaggccacccggcccagggcttacctgtatagccagagaagaaccagctaaggagggtggggcaggtgaaatgccccctccagaaaaagtctaaggccagcaggagaaagaggcctatgctctggtggtgggggtccacttccaccaacagctcagcgaaaaacacactggccagagtcataggcagaattcc

SEQ ID NO: 472034 - DNA, 575 bp, Homo sapiens
tgcagaaaacagctcttaatgtgaacaagcaaatccttccatttggcctctcactgttgctgttgccataaagacattacgtgctcctctgccatgccaagagggcagtgaacaaccggtgcaggtccctctgtgactcgcacactggggctgccaggactgcttcatgtctgtgagaatcaggcttgcttttctcagagctgctgagagccaccctgaggagggctgaaaacctgcaaacaaaggaatgaaagccagtgccgggagacccaayaagactgtcaggggtctgatcccctttttcctttaagtgccctccctactccaggctgaccataagggctgatactactgcttcagagagcatctcacaggggcgtccgtgccataaacagcctggacaaaattcacccaccattgtctatgaggcaccaaggggtgcactgaaaagacgtcgccaagcaaatcatgagcttttcagatttcctctaaccccagtcaatgcgtttgctctgatgtcaaaaccagaaacagccagtgacagactatttttaaaaatttcagaaaatgtatca

SEQ ID NO: 472035 - DNA, 643 bp, Homo sapiens
ctggtgagaagccttagctacctggagacaggcttcagctagagtcttttgttctgcttccagttgaaacagagaacagctaacagtgatgaaatcactaccacctagctaccgctcagtgtgtgccggcccctgtgctaaacactttcatatattatctatcatatattatctgattccgtcttccttcaatcatttcgctttataaaataggtattattatctcaatcttatagataagaaaattgagkcccagaagagttaggtgtgccacccagagtcacacagcaagtaactggcagagctgagatccaaattgatgttatctgactccaaaactagctagtcccctgcctctcatcaaaaggctcaggtgatacctccttgacctccgattgttatgaagttgttcctcctaaccctctccaggcttgcttcctgctccctgccataccctcattccatgctttctccatctgtagtccactggctggcagaagtagctgcagttagccagcagcggggtgaccatgacctgagaggaaaaggaaagaggaaaagaccaagtcataaagcctgctgccaccatggtgagccccgactggctcgggctcctgaacaccaacaccccaatgcaacctct

SEQ ID NO: 472036 - DNA, 545 bp, Homo sapiens
gggcaatgacctcagtaaaaagtgactatgcaatctctaccctccagctcagggagctggcagggatgtttgtctttacttggagttctgggtgggagaaggctcccatgagaaagcaaaaatctgcaaggctgtgttcaacaagactttggtgtccaaaaatatactatacacatgatgaaggaggacatcaatatagaaattggttctgggccacgatcctcattctgagaccttttgcggaagccaaagcccatgctgaccagcagggaccctatagccaagtggcccaggatttgcatttaaacagttcaggtaaagatgagctcaagagaaaaccctacagaccaccttgagaaatggcatgagagtcagcaaacatgttaaacacctgacataacaatggaagggatggaagcaccatgagagttacctcatctacacctgacctcctcgaacaaagctgcccccaagmcatcccaggacaaaagccggaaattccaaaaggaccaggcaccttacaacccagccccactccttgtttg

SEQ ID NO: 472037 - DNA, 550 bp, Homo sapiens
ttttccttagtggctaggagtgtgggctcagaaatcacactgcttgattcagtcatagtgccatatatattagctgtgtgaccttgggtaagtaacttaccttctctgagcttctgtttcttcctgtgcagaacaggaatcgtaatggtagctactattagggttactgtgaggattaaataggtgatccataaacagactggcacagtaaaatgtcattcaattgtcwcagttgttaaggaaaggagggctcacttgggaggtccagcatagcccaaagccatgctgtatgaagtcattacatcagttcactgataggtaagcagatgtttcctaattggcctgaattgtgccatcggtcagcaggaggaacagaaaacagcagccagaacttttcactgcgttggtctaatcagtacagcatactccttccttccagcttgtgatgtgattattcccttgtgcagaataagattcaggcttagtttaaatcccataactaagagcccattatgcagtgtactgagcagcaagtgggaagatcacaggg

SEQ ID NO: 472038 - DNA, 524 bp, Homo sapiens
ctgatggaccgtggcggggccggcgggcagggggacgctggctgcggataggrgtggggcaggcatcccgggggagtcgcggcgcgtgggagcacgcgttggtgtgtgcaggggcccgcagcagggggtccttaaccacacgcctgagtccgccttctgcacttgtgccttgggaagagctctgggcctctgggggccgtgtgccctcccgggacatggctgtccctcttcaaaatgtcactctcttcgcccaccctgaattccagtagctgcctcttgtgcacaagcatagccgacaggctcaaactcggcttagctagatgtggacaggtcgtggctgcctgccccacgcaacacagagtctgctaaatgcaggcacctgctgtgtgtggtgcacgttgttcccagtgggtcaggctgcctgtacagggaggtcctgtgttccctgggcacgtctgtgcatttgtggcaacatgattatgcaggccctgtcacctgtttgtgtgcccatccctgcacatgca

SEQ ID NO: 472039 - DNA, 607 bp, Homo sapiens
ctgggaggcagctcaggctgaatggagtctgatgttcccttgaggtcccttcgcttcgcttcaggtgcgttctgttctaggaatgaggtgcctgtgagacttttcctggtgatctgatcagatttgccctgctcctcggtgaaactgctttctagccttctgagaaatgctcctacgtctatctgctggttgaatgttgtaagtgttgtctctaagtggaaagtccacagtcgacaggggcctgggaattctgtccttaagctggtcttggaggccacagcactcaggagctctcctcagaccagcatccattggaatgagctttgcggaggttcaccaaagggtttccacagctaagggtagatctcccctcaacctcgtctctgtggtttctgagaacggctcrctttaaagttgtctctgcctggaatcaggattggggacaatcagcctgtggcctctgaccaagctccagaagcaagaagtctcttctcagactgctcgggtgtctgtgcgaccttcttcatcggaagtggcttttccccaggccaaacacctgctgcttccagatttcctcactgccgtgtgaactcatcttatgtttctg

SEQ ID NO: 472040 - DNA, 601 bp, Homo sapiens
cctggtcttctgaaaagcaaacttagaagccggtgatgtccatgatctcacagaatttcctaggaatgacagggacgtgtattcacaaagttactcttgactctttaaaagaagacaaccatgttttgctcccaygatatcccaaggggcacctagattgctgggggcctgtggtccgagaagtaatgccacctggaaaagtgggtgtgactggtttagggtccaggtctgagaactggggtaagccacttcgtgtcttagttcgcttatgtgtaaaacagagggattggaccagatgatcagtaaagaaacttccaatgttaagacttcaagggtaaatggctctttgatagagagggatcatagaaaagtaagatccacacagcttaacctcccaggggacaattaaaatgctttcatgtgaagtgaatgacggtgtggtagggtttgacgtgaacgtaatggcataggagggtcggagggcacgggggcctctcaacctcattctcagcaccagatgtagtgcctggagcatctgaagagggactaagagattccgtcctcaccccagctctaaagatgcctccaccatgagaaagag

SEQ ID NO: 472041 - DNA, 601 bp, Homo sapiens
cctggtcttctgaaaagcaaacttagaagccggtgatgtccatgatctcacagaatttcctaggaatgacagggacgtgtattcacaaagttactcttgactctttaaaagaagacaaccatgttttgctcccatgatatcccaaggggcacctagattgctgggggcctgtggtccgagaagtaatgccacctggaaaagtgggtgtgactggtttagggtccaggtctgagaactggggtaagccacttcgtgtcttagttcgcttatgtgtaaaacagagggattggaccagatgatcagtaaagaaacttccaatgttaagacttcaagggtaaatggctctttgatagagagggatcatagaaaagtaagakccacacagcttaacctcccaggggacaattaaaatgctttcatgtgaagtgaatgacggtgtggtagggtttgacgtgaacgtaatggcataggagggtcggagggcacgggggcctctcaacctcattctcagcaccagatgtagtgcctggagcatctgaagagggactaagagattccgtcctcaccccagctctaaagatgcctccaccatgagaaagag

SEQ ID NO: 472042 - DNA, 601 bp, Homo sapiens
cctggtcttctgaaaagcaaacttagaagccggtgatgtccatgatctcacagaatttcctaggaatgacagggacgtgtattcacaaagttactcttgactctttaaaagaagacaaccatgttttgctcccatgatatcccaaggggcacctagattgctgggggcctgtggtccgagaagtaatgccacctggaaaagtgggtgtgactggtttagggtccaggtctgagaactggggtaagccacttcgtgtcttagttcgcttatgtgtaaaacagagggattggaccagatgatcagtaaagaaacttccaatgttaagacttcaagggtaaatggctctttgatagagagggatcatagaaaagtaagatccacacagcttaacctcccaggggacaattaaaatgctttcatgtgaagtgaatgacggtgtggtagggtttgacgtgaacgtaatggcataggagggtcggagggcaygggggcctctcaacctcattctcagcaccagatgtagtgcctggagcatctgaagagggactaagagattccgtcctcaccccagctctaaagatgcctccaccatgagaaagag

SEQ ID NO: 472043 - DNA, 668 bp, Homo sapiens
gaaattggtagataataatagcactgtcctcatagggtgttatgaagattaaataagtgatatttgtaaaaccctcagacaagtgcctgacatgtaacacatgctatctacgtatttgtaaaagaaagtattactagtcgagtaggagaaacaaatccctttctagataatgtctcttaggctatgcaagggaagaaaaatgcagcataggagttagcttttatcagaaaagttttgaaataggagattttatagaaaccctggagaactgttaaatcttagagaaaacattagaagaaaaagcacagaaagtttaacaatatttatctcttccctaatgtcagcccagtttgttttygcagattggatctctctaacatggatggtcaattgcttttgttgtcaggtaacctgcagcacctgccctctggttcttccactgccccttctcagggatttttcttttgccacctttgtcttccaaatcatggggtattactaacaatgagtactacagcaaggtttggtagggcttctcatttaaaatccccagacatcttaacacttggtttatagtatatagcggagacattattacatccttgagcctgggtaataagtcacagagagagagcgatgcaccagttccatttattctggcctccctg

SEQ ID NO: 472044 - DNA, 635 bp, Homo sapiens
tcagattattcttcatccatcaggactttcattaatcacttcgctcaagcccctgaatggttgatgtaatttagccattccgtctaaaatttccaggtaataatcatattctttattatgttattttatcatgctaactagtatacaaatgaaattttccagttcaaacggactgactcttatatgctagaccttatactcttttttaaaatctcttaattcaaactctttctttattctggtgtcctcatccccttctgccagcctacgatctagcagaagttggagcttctcaattaagcttttctgataatgcttacatatgaattttctttcccagctctgaattccagtaactttttcacttgagtatatgctgctctggaatgtttgaatcttggctgtactgagtaccacacgtgtggcattgggaaggggatttgacttcctttgtgtctcagtttaaacatgtgtaaagtgtgcaaaggtaacagactctatctcagttgtgcaggttaaacaagttaatacatgtaaagcctgttacatamtatgggttcagtagcaattgtcttacattcttataattattctgcaaatgattctaacatgttagcccggcaatgttactgtat

SEQ ID NO: 472045 - DNA, 518 bp, Homo sapiens
ggggccctgactcctactgggcagctcttcccactgacccgctctgcctgtcacatccggctgcactctgcactctgcactctggccgacgtcctgcatcggtgcacatctacacatgcgtgtctccacacgtccacactagctcctcaggggcaaagacagaccccggcatcactgagctcctgaacttccacggaggaggtgctcacatgtctccctcatgtgcactgagtgaaaggggcttctctgcctgactctggggaagggagaaagagatgaagactccccagtcatttgagaycagagctgtccctagcctgatgtgggagaaggatagagaaattgaaagagacattcagagaggcagagaggctgatgcaccaccccagccaatggctgttaccaggcaactcccccagaggcatggattgcggggggagccgttcctctgggctctaagtcctgctaccttatcagactggccctgggccagcactgtacttgccacccctcctcca

SEQ ID NO: 472046 - DNA, 647 bp, Homo sapiens
ctgggggccctgactcctactgggcagctcttcccactgacccgctctgcctgtcacatccggctgcactctgcactctgcactctggccgacgtcctgcatcggtgcacatctacacatgcgtgtctccacacgtccacactagctcctcaggggcaaagacagaccccggcatcactgagctcctgaacttccacggaggaggtgctcacatgtctccctcatgtgcactgagtgaaaggggcttctctgcctgactctggggaagggagaaagagatgaagactccccagtcatttgagaccagagctgtccctagcctgatgtgggagaaggatagagaaattgaaagagacattcagagaggcagagaggctgatgcaccaccccagccaatggctgttaccaggcaactcccccagaggcatggattgcggggggagccrttcctctgggctctaagtcctgctaccttatcagactggccctgggccagcactgtacttgccacccctcctccaggaagtcacagaagaggaagaggaaatcgtcttgaactttccctctcttcccctgccccctccctgccatagtcccttccctcagccccattcctccttgtgggttccggggtgagcacctcctcc

SEQ ID NO: 472047 - DNA, 647 bp, Homo sapiens
ctgggggccctgactcctactgggcagctcttcccactgacccgctctgcctgtcacatccggctgcactctgcactctgcactctggccgacgtcctgcatcggtgcacatctacacatgcgtgtctccacacgtccacactagctcctcaggggcaaagacagaccccggcatcactgagctcctgaacttccacggaggaggtgctcacatgtctccctcatgtgcactgagtgaaaggggcttctctgcctgactctggggaagggagaaagagatgaagactccccagtcatttgagaccagagctgtccctagcctgatgtgggagaaggatagagaaattgaaagagacattcagagaggcagagaggctgatgcaccaccccagccaatggctgttaccaggcaactcccccagaggcatggattgcggggggagccgttcctctgggctctaagtcctgctaccttatcagaytggccctgggccagcactgtacttgccacccctcctccaggaagtcacagaagaggaagaggaaatcgtcttgaactttccctctcttcccctgccccctccctgccatagtcccttccctcagccccattcctccttgtgggttccggggtgagcacctcctcc

SEQ ID NO: 472048 - DNA, 581 bp, Homo sapiens
cttgtgccgtggccagccttcccaccaagaggtggagtctgcccgccccyggagttctgctggtcccatgacttgctgttaccagcaatcaacagacaatgcgtgtgtgaggcttcagggcctagatattaagaggtcttgtagactgttttcacctgaaaggctagtttccttgacagtgagaaaccacgcagcaggggagcccagctgacagccagcaccaaccaccggatatatgatgaagcttccttgagctgtccagggcctgcagagctaccagctgactgctaccgcattaataagcccaggcaagactgcagagaccagcccaaaaggctaacccgtagaactggaagcaaagaaaatggtgtttgtgttaatccactatattttggggtggtctatgcagcatagacctcagtgatgaatggaacaaaatccattcagcaagtctgcgcaactacggaaaagaataaggttgttctgaatgtactgatgtgaaaagatgcctaaagaacgggcaaaacagtaagttgaattcaattctattttacagtaattttttttttacaagtagaagg

SEQ ID NO: 472049 - DNA, 581 bp, Homo sapiens
cttgtgccgtggccagccttcccaccaagaggtggagtctgcccgcccccggagttctgctggtcccatgacttgctgttaccagcaatcaacagacaatgcgtgtgtgaggcttcagggcctagatattaagaggtcttgtagactgttttcacctgaaaggctagtttccttgacagtgagaaaccacgyagcaggggagcccagctgacagccagcaccaaccaccggatatatgatgaagcttccttgagctgtccagggcctgcagagctaccagctgactgctaccgcattaataagcccaggcaagactgcagagaccagcccaaaaggctaacccgtagaactggaagcaaagaaaatggtgtttgtgttaatccactatattttggggtggtctatgcagcatagacctcagtgatgaatggaacaaaatccattcagcaagtctgcgcaactacggaaaagaataaggttgttctgaatgtactgatgtgaaaagatgcctaaagaacgggcaaaacagtaagttgaattcaattctattttacagtaattttttttttacaagtagaagg

SEQ ID NO: 472050 - DNA, 587 bp, Homo sapiens
tgtagaggagatgggattattcagcataaaggacacaaaggtgactagtggtctgtgaagcagacacactgatagtgtccactgaggactaaacgcaagtaaacctgacaatgacgcaccaccctcttggggaagggacttacaaacgcatgaagtcactgcttatcataccaggcttctgaggaaatgtcattgcatttcccttctggaggagattctgaaaaatgctgaggttagatataggtagggtgactgtatccaggtttcgggggcacatcctacttactcctcttgtcctggcatagttcctaagtccyctttcactctcgaaatatcctggcgtggatgataaattatatgccattttaactgtgaacaaaggcaggactccaaacagctccttccaggcctggatgtcagcaactctgctggaatttctggatccccagggacttcaaaggatagcatgtcagtttatccccttgaaatcaccaaatcaaatcaaaaatgacaataggctaaaattaaagtcccagccaaccaccccaagtcaagcttcaggactgtgcctgctgaattgcgacacc

SEQ ID NO: 472051 - DNA, 499 bp, Homo sapiens
tggctgtggcagaatagcactgggccgcgccagccaccctcaccccgctcatcactgctggcagtgcctgaaaggacaactctcagggacaataacgggactcccagcctggctcctcccacatcccttccacttgtgttttcctgttcctttctccttccttgctttcgtcagtctcaaattgtaagcctgtctgtgatgcccagcacaacccacaagcctgaaccaaaaagaactcagtctaaagcagaccctcctccaccctcccagccctaaaggtgaggggtcgtgttgggtcactggtccagcctacagtctgaaaggaaggtgctgagcatgcgaccggyaggcctcctgtctctccgcccagacggggagaggaagcggggagaaactgctccaggtacaaaggaggcttcggaatgatccccctctgaaccctaaactactaaaaatgagtgtagtcgagcagccaactctcaggtgctcagtagtgttt

SEQ ID NO: 472052 - DNA, 596 bp, Homo sapiens
aacctcctggccacagccaagaggacactggtgcacccaacctcccgccgagactcctcaggccggcctcagccctgccgcctcctgccctccccgcttcagggtcctttgatttgaaaccagtgcccccaacgtggtcacggaagatggtcatggaatccacatccattgagatggacggaaactatccagagagttctgacagtgtccccgtccaacaactgtcaccgccacacctaaaacccaccccccaggggatggggcctctctgtgtgaaccgtcctgrgagtgcagcaggggcgcacgtggctgtgggtgcgtggcccatgcattcatcgggcctcacggcgtggccagcaccacagtgcaggggcttgagaggtagcacagggactgtcacatcttcagttccagggtccggcgatgttcctggctgagtccattgggacgctggcttcagaactgcccggggtacgtctctgagcactgcttccggcctgcctcccagacggcccccttgctcccccagtccctcccgaggctcacacagccagaccaggtcctctgaaaatacacagcatcttgggtttatttgg

SEQ ID NO: 472053 - DNA, 509 bp, Homo sapiens
accataaaaggcaggcctgaattttctgtaacttccattagagcagggtctccagggtacccataagcagaaaatcagggaaggaacagttttaggcattcatggagttcaaagtgagcaggggacagagatcttagccctgcttctgcactaatgagctgtgtgaccatgtgcgggcgattggtgggaggcctccgctctctctgggcctccactgtgaagccagagggctggactaggtagatgcccagggctctgcctgtgctgcggctctgctcttggagaggaccgggggtgcctgcaaggacgtgcttggaagatcctgaaagggcagcaatggctctggtkagctgggcaggacactggtgccaaggggagtgtgggaggcacacagcactgacagcagacagggaaggcaacaagggattatcctggctccctaacggagggcattcctcctgaaagcaaatggaagccatgcccagcaaacacagaccactgccaccggc

SEQ ID NO: 472054 - DNA, 612 bp, Homo sapiens
ctgaaaatcttgacacttctacctcccatccaacccaccatcmagccctgtcaactttacctcttaaacatgttttcttaatgccccttttttactctctctgtctccttctttctcttcctctctctctctccctgccaccctttttcaagctccagcagttcttgcctggagtattgcaacatccaactgttctgccctaatccactctagcaatccccgctatagagggaccttttaaaatgcaaatctgacctggattcacttctgcttaaagcttatgactggtttcctttaattcttggataagcacaaaacttctcggtatggctaaggctctgcttcctccggctccagcttcaactcacaccacactccattcaggtcgattagctcaaacccctcagatatttctcagcctttgtactcactgtgcttcctcctgccatccagcctttgcacgcctgattccctctgcttagaggagttccctcctttctttgtaaaaggcatcagatctcacaccaagctctcattacaaaagcctttcctgtcctacctctcaagatctcgttattgtaaatactcaaagtatcattaacctctaatgtt

SEQ ID NO: 472055 - DNA, 603 bp, Homo sapiens
ttgacacttctacctcccatccaacccaccatcaagccctgtcaactttacctcttaaacatgttttcttaatgccccttttttactctctctgtctccttctttctcttcctctctctctctccctgccaccctttttcaagctccagcagttcttgcctggagtattgcaacatccaactgttctgccctaatccactctagcaatccccgctatagagggaccttttaaaatgcaaatctgacctggattcacttctgcttaaagcttatgactggtttcctttaattcttggataagcacaaaacttctcggtatggctaaggctctgcttcctccggctccagcttcaactcacaccacactccattcaggtcgattagctcaaacccctcagatattyctcagcctttgtactcactgtgcttcctcctgccatccagcctttgcacgcctgattccctctgcttagaggagttccctcctttctttgtaaaaggcatcagatctcacaccaagctctcattacaaaagcctttcctgtcctacctctcaagatctcgttattgtaaatactcaaagtatcattaacctctaatgtt

SEQ ID NO: 472056 - DNA, 544 bp, Homo sapiens
aggccaccagacgagagcctctttcctcccaaccaaaggaaccacagaatcctagaatttcagggcttgaagggacctgagaagcccgcacgttcaaggctctgaaatgtccagggattatcccaaggtcacaaagcagaaatggagaggccaggattcagagctaggtcctctgaccctcaccctaatgctctttactctayccaagacaggacctccttgccatccgaaatgccactgtggcccattggtggcagcaacctggagtgctataccgagaaggctcagcaggctcagtctggttgcagagttaacagtgctgtgatcaagtagcaatatccacctgcagcaaaggaggagggttttgcagccggcacttgccaacctaccacgacactgctggctcccaggagtcaccgcaagatgcctctgcatcaccacgatccagcaacctctgggtgtcaatctcccctcgcaggcctgggacaagtgcaagggccagggagaggagctaacccaacagggaagagaagaaacagccaga

SEQ ID NO: 472057 - DNA, 503 bp, Homo sapiens
ccacaagggtcaagccccatccctacaaataccaagtacatccaaattcttcactggcacagaaatggtgttacatccactgggaacaaacctgcatccccaccccaaggcatgtgacaacagggactgctaatgagctttgtccgggtaactcattcacgccatcatcttgctctttccatagtcacttattaagcacaaactatgccaaaaactatgtccagcaccgcacaggatggtaaaatgccctgaggggccacccccatctgactcccgtygagcggagtgggcagccctgcctgggagctccagcctcctgcacccacgtgcccccttgttatctctgcctggatgcctcacaggcatctcacgcgtactaggttctcagcagaaatcttcctgctcaagctacagagaaccaagtgactctttcatccatcagtgaggcctgccagctctgcctccaactcccatctccagtccatccatctctccccacctcc

SEQ ID NO: 472058 - DNA, 612 bp, Homo sapiens
ggttccctggggaaaagtttccacttctgctgtcaagaaccacaagggtcaagccccatccctacaaataccaagtacatccaaattcttcactggcacagaaatggtgttacatccactgggaacaaacctgcatccccaccccaaggcatgtgacaacagggactgctaatgagctttgtccgggtaactcattcacgccatcatcttgctctttccatagtcacttattaagcacaaactatgccaaaaactatgtccagcaccgcacaggatggtaaaatgccctgaggggccacccccatctgactcccgttgagcggagtgggcagccctgcctgggagctccagcctcctgcacccacgtgcccccttgttatctctgcctggatgcctcacaggcatctcacgcgtactaggttctcagcagaaatcttcctgctcaagctacagagaaccargtgactctttcatccatcagtgaggcctgccagctctgcctccaactcccatctccagtccatccatctctccccacctccactgctacactgctatcattttctgttttcccagcagcccttctggctcctccaaacccattccccacag

SEQ ID NO: 472059 - DNA, 394 bp, Homo sapiens
tccaacaaagccaaaccctcatgggttcatttatttgtctacacaaaggctttgcctagagcatgtcygtttgaaagatactcaccatattctaagggtaacctaaaagaaaaagcgtctatggcttctgggttactgagctagacaccccagttctttctaaaaaccaattaccctatgacaccaaacaagaaagaaatcccattggtgcttccatggaattgacacaggcccccgtgccgtcctccccacaccagcttacaaaggccatgtgcctttggggtggcacagggacaatctcaggaatatggtggcaaagggctgagtggggagaaagtgctggagaaaagtttaataatagagctgggttgggctcggcccgtttcctttttca

SEQ ID NO: 472060 - DNA, 394 bp, Homo sapiens
tccaacaaagccaaaccctcatgggttcatttatttgtctacacaaaggctttgcctagagcatgtctgtttgaaagatactcaccatattctaagggtaacctaaaagaaaaagcgtctatggcttctgggttactgagctagacaccccagttctttctaaaaaccaattaccctrtgacaccaaacaagaaagaaatcccattggtgcttccatggaattgacacaggcccccgtgccgtcctccccacaccagcttacaaaggccatgtgcctttggggtggcacagggacaatctcaggaatatggtggcaaagggctgagtggggagaaagtgctggagaaaagtttaataatagagctgggttgggctcggcccgtttcctttttca

SEQ ID NO: 472061 - DNA, 615 bp, Homo sapiens
ccgaccatgctgcctgcacccaaaggcagccagcgtctgcgagggccctgacctcacttaagggagtttaatcagggccccatcagcactctgcccggggccaccctgcgccaaccttttccctgttccagcaggctggctgaacacggcctcctcagctaattagccttcattaagggagcgatccacaaggaataggctttccaatgggccagaatgtcactgctctgccagccataatttaaagtgatgggacagctctgctggcaagcatgaaaaatgaccattatcctaagtagcaattacgccagcagccccagccccgcccccacccctccacatcagacaggaacttgatttgggctgggaagagctgggcgggatcaggacttgctgccccaggaagggtacacatgaccccagcattcagaggtcccttttccagcccacccctatacgctcttctctactcacagtttgaagctccgagtctcctttgccccctgggaggggcttagaatcatttaatctctactaccagtattctaccagatggccccrggaggacccagagatggggctgactgaggaaaatgcccagatggttttcactgc

SEQ ID NO: 472062 - DNA, 410 bp, Homo sapiens
ggctgaggttgcagcgagccaagttcaggccacttcactccagcctgggagacagagagactccatctcaaaaaaaaaacaaaaaaaaaaaaaaaacmaaaaaactgaatcccgaatctgtctttaactccctctgctaccttgggcaaaacactttgtatatctgcttaaatcatcccaatcccataaaataacaatgtgcctgtgctctttactatagtcctttccagcactaactccacgttgtacttccaatattcatattaatccatatccaagtaatcattaaactagcaaggaggggttaaggaaagggtagctttccaaacagactaaacttgaaaacataagtgttacttctcaggcaaataagtgaagaccaagaagcacttctgggggaaaagggggtg

SEQ ID NO: 472063 - DNA, 564 bp, Homo sapiens
ctggtctcaaactcctgacctcaggctatccacccaccttggcctcccaaagtgctaggaatacaggcgtgagccacggtgcccaggctgggccatattatttttatttatttatttatattttttgagayggagtctagctttgttgccaggctggagtgcagtaacacaatctcagctcactgcaacctctgcctcctgggttcatgcgattctcctgcctcagcctcccgagtagcttgggattacaggcacgcaccaccacacccagccaatttttgtattttttttttttcagtagagacagggtttcactatgttacccagatgatctcgatctcctgacctcgtgatccacccacctcagcctcccaaagtgctgggattacaggcatgagccactgagcccggcctgtttttaaacaatcacaattcagcagcccatggttactcagattgtgaactgccttagggctgagtagctggtaaaggtgaaatccacgtttctgaattctgacctggtaaaccagcttcctcagaccttgtaatgaataagatgggtgc

SEQ ID NO: 472064 - DNA, 644 bp, Homo sapiens
ctataattacacatgcagtacccaatgatcttaagatgttatatgtaattactaaagtttaaactctgacaaacaattcaccataggaactataggagacacagaagcatgatgttaaaatttgccacatttcgtctttatctcagacatttagaagagatgattctgctcatgaagacatgaaaatactatggttactcaatatgcacctgttttttgagtgctggtgtataattaagcaccttgctaatcatagatgtctagggagtactagccaggcctagccaggcgccagttaggataagtaactggaactaggtttactgggagctctcacttgagtagtaggaggtgttgrttcagacctctggggaccagatgctgagacagaacgaggagtgcaatagatttactgcactggagagtaacgtttgtgaagagaaaaggggaaagtaaggattggacgtgaggcgctgtcagaccatgatgctgatcggacaaagtatctgccagcccactggagagctctgagcacagattgctcattacagaagtcagcattagtggatggttatgcctgggggccacccaaaaaatagtttgatgtgggctcaaaagctgaagcaggcctgaatgagttaaca

SEQ ID NO: 472065 - DNA, 598 bp, Homo sapiens
acccttcagggccctgcatccgcatggccacttccaacatcccaggaaacgtgctagacgtatgttcacaggttcttctatttttgtaaaattcgtgttataattaacacattttcatcactatcagttttgatcactgcttctttccagcccgactttatctgtgtcatacttcccttgtgttgggtgggggcagaaaaagtaggggcatctctgggatccaagtaagaggaaattgaactgagaatgcctttagtttgcatttagtggactatagttatgagcgtcacaactgcttctgtgygtagtgaaactgttcccagccatttggtgaggaaatatattccaggaatcttcttttgtccaccgtggcatcatgacctgaaggtgtgggtccagaaacactgccctacagcatcccatgcctgaagtatctgagcagtaacagaggaccaggttggaaatgtagaaagccagaagttactctgaaatgttctttcaatgatctgatgtgcaatattttgtattttaaaaatgcagtaaaacacacattaaagtttatcgtctgaaccatttttaagtgtacagtttagtggca

SEQ ID NO: 472066 - DNA, 598 bp, Homo sapiens
acccttcagggccctgcatccgcatggccacttccaacatcccaggaaacgtgctagacgtatgttcacaggttcttctatttttgtaaaattcgtgttataattaacacattttcatcactatcagttttgatcactgcttctttccagcccgactttatctgtgtcatacttcccttgtgttgggtgggggcagaaaaagtaggggcatctctgggatccaagtaagaggaaattgaactgagaatgcctttagtttgcatttagtggactatagttatgagcgtcacaactgcttctgtgtrtagtgaaactgttcccagccatttggtgaggaaatatattccaggaatcttcttttgtccaccgtggcatcatgacctgaaggtgtgggtccagaaacactgccctacagcatcccatgcctgaagtatctgagcagtaacagaggaccaggttggaaatgtagaaagccagaagttactctgaaatgttctttcaatgatctgatgtgcaatattttgtattttaaaaatgcagtaaaacacacattaaagtttatcgtctgaaccatttttaagtgtacagtttagtggca

SEQ ID NO: 472067 - DNA, 598 bp, Homo sapiens
acccttcagggccctgcatccgcatggccacttccaacatcccaggaaacgtgctagacgtatgttcacaggttcttctatttttgtaaaattcgtgttataattaacacattttcatcactatcagttttgatcactgcttctttccagcccgactttatctgtgtcatacttcccttgtgttgggtgggggcagaaaaagtaggggcatctctgggatccaagtaagaggaaattgaactgagaatgcctttagtttgcatttagtggactatagttatgagcgtcacaactgcttctgtgtgtagtgaaactgttcccagccatttggtgaggaaatayattccaggaatcttcttttgtccaccgtggcatcatgacctgaaggtgtgggtccagaaacactgccctacagcatcccatgcctgaagtatctgagcagtaacagaggaccaggttggaaatgtagaaagccagaagttactctgaaatgttctttcaatgatctgatgtgcaatattttgtattttaaaaatgcagtaaaacacacattaaagtttatcgtctgaaccatttttaagtgtacagtttagtggca

SEQ ID NO: 472068 - DNA, 623 bp, Homo sapiens
ggaatttacaaaatgcaaaactggaattgatcaatgtggtgttagctatactcttatgcactgaaaaccgaaccatcttagcagaatgcagaaaatgaggaagtagaacatgccctaagccaaagcacaccagcagcctatttgttggaggcaggagggtaaagtgggagtgagtgatcagaggccacgtactataaaatcacctaaaactttatggttgggggcttccasaaggctgacaaggaggggaaggccacttccttgagagtgcagattaaacgcttcacaggccaggtaagaaaagttagagaggttattgagtctccatcagcatttaaacaggtatttggaaagaaagatcagtgtttctaccccagttaaagtcttgcctactgactagagtcattttttgaaaattgaggtaaaaccagcataacataaaattaaccatttaaaaatgtacaattcagtggcatttagtatattcatgatgttgtgtaaacaccacctatgtcaggtttcaaagcattttcatcaccccaaaagaaaaccccgtacccattaagcagttattctccagtccccttcatcctggttcctgacagccaccaatctgctttctg

SEQ ID NO: 472069 - DNA, 625 bp, Homo sapiens
cagtttggccgttcctcaaggtagtcaagttacttaactgctctgtaaaatgaagttaatcacattcactttggacgaatgagttcatatatattagctataattatyatagcaattattattgtgcatattattactgattgggtcagattattagccctgtatccctaattcatttacttttgctactttggatgaatatttaaagtagtcttgaactgagatatgtatgtaaaggtcctatcacattggcatataccatgtgctcaataaacaaaagctataattattcatttctaaacaatttaaagattaaacttgcctcaaaacaaaacaaaacaaaaaaccaaggcaacaccccaagctgtgaggagctgagtctctcctaggtgcagggcagcacaggcactggctgcacaaggccagagaggttaggtggcggctctctttaaaccagaccagagagagcgtttctctccctgtgcagtcttcacatctttccagtccagtttgatgtctggaacctcatcatttgtctccggatctttacttaaggccccccgggaggaggtaaccaggataggcagagggccacattcctcctggatttccacagcatggaggc

SEQ ID NO: 472070 - DNA, 459 bp, Homo sapiens
gtgacctcttggaacctcagcttcctccttgttttttttctgattctgactctgattcctgtgtgctgaatccaggctgtagtgagctgtgatcacaccactacattccagcctgggtggcaaaaggaagatgagagagagacagagagagagagagagagagagagagagagagagagaagagagagaaataagggagacatcaacaccctggaatattgtgtagatgagttttaaaaaaaaaacaaggtagatcaagatgtattaacatgtatcagattgttaaatttctttaagaaataaagtcattgaaaaatagaaaaatacagaatatggttcaacttgagtttttaaaaatccatgggstggtgagaagcaaaacagacttcagtgtttttaccccacttctgtattgtctgaatcatctgaagagacgctgttcatgtatttcttgcataa

SEQ ID NO: 472071 - DNA, 444 bp, Homo sapiens
tttagttaaaagagattttgaagaagctgaactcagacaattgtgagcaagcttcagggatggttctggttattgagacaaggaacaagacgaatactagaacctgcgctgaggctgtggcaggctacggagaagaggaggcaatgatatctgctaggagagtgttgcattatggggctgagggactgggagggccatgggcattcctggggcttccagtttgggcactggagtgaatgatggactattaactgggagtgagcacagaaggagaagccagctcagagggaaaaggatcaggttctgttgaggacacgaagcgtgagatgactggcagatttctagaaacacggatgtgaagttgaggaaggaagttggacccataagtgccyagtcagaaatcctcagggcctggatggtgcttgtgcagagaacgaccagatg

SEQ ID NO: 472072 - DNA, 437 bp, Homo sapiens
gagcccaccaatctgccttcttcatgcctgcactgagcacttaaaaccttgcaggaggcggggcacagtgactcatgcctgtaatcccagcactttgggaggccaaggtgggtggatctcttgaggtcgggagttcaaaaccagcctggccaacatggtgaaaccccatctctactaaaaatacaaaaaawtagctgggcgtggtggtgcacacctgtattcccagctacttgggagtccaaggcaggagaatcgcttgaacccaggcggtggaggttgcagtgagccgagattgcgccactgcaccccagcctggataacagagtgagactctgtctaaaaaaaaaaaaagcttgcaggagaaaaatcactgagttgacaagtttataaccacacaccacggctgcatgttcctgctttgcttccccaagaagccc

SEQ ID NO: 472073 - DNA, 596 bp, Homo sapiens
taaaggaaactaaaacaacgtgataactacatgcaacatatgatcctgggcaggatgcagggggcagaggagtacagatagtccagatagatatcaatagtacagatagtactatttctgtaatagtacagacagtacgtatagtagatgagggaatacaaaaggcaatgtttgagacaactgacaaaatttaaacatggtctatggattacagaacagcattagctcaagattacatttctcaaatttggtcatttgtactgtagttatataagagaatatccagctgggtgcggtgattcacacctataatctcagcactttgggaggctgaggcaggcagatcacttaaggtcaggagtttgagaccagcctggccaacatggtgaaaccccatctctactaaaaatmcaaaaaaaaaaaaaaaaaaaaaaaattagccaggcgtggtggcatgctcctgtaatctcagctacttgggaggctgaggcagaagaatcacttgaacctgggaggcggaggttgcagtgagccaagatcacaccactgtactccagcctgggtgacagggcgaagctacgtctcaataaaaaaaa

SEQ ID NO: 472074 - DNA, 595 bp, Homo sapiens
actgcatggccaacatggcatgcatacggagggagatcacttgcttcagaagtcaggacttatgagccaaatgatggtcttcagggtggagctgctggctttgtgctcaaaagtctggacccattcttccaagtcatgtccttcacatgcttcccagaaaactgatgatggtaccttccagaatctctttactttctataattcagcttaggtagcctgttttctcccacggcaaagaccatttgaaagcactctagtcctacagttttcaggagtggcttagcaaatcctatttgtgtagcagtggttgattgaagttctggaaagatgtggtgctcttattatgcactgaattatcttcttctgggaagtattttatgtgcctgctgcaataaactgtatgtataaattcccctacaaaatcaccccccatatacagacatacccagaaacaatcacatcatgttctttgctcaagattgaacatgctgaaactgtgatgtgctactactcctaccagggggtagagrgtagtctactgctgtacttctcctctctggttactgatgcagttatctatagaagtataatgcca

SEQ ID NO: 472075 - DNA, 455 bp, Homo sapiens
tgctttctccctacctgcttttatagtagccatgtctttctctaatactctaccaattctgaaactgttcatgggtcccttttatccctggagaaggcttttaccctttggactttagtttacctagttacctgtgaactcagctctttgatagacccaagaaaagttataattttatagattatctgactttgtttcattattaggaaagtagcaacattctcttgagaatttatgcattgtaagtgaaagaaaaatccaggaaatcttatagagaatggcaatatggttatagatgagaatgtggaaaagatgaattttgaaatacttcctatcatagtacaaattgctacaatgattttagaaaaaagtatatctatacacatacacggagatcatatatatgsaaatacgtgtgtgtatttttcctgatgactctgcataataaacataaa

SEQ ID NO: 472076 - DNA, 455 bp, Homo sapiens
tgctttctccctacctgcttttatagtagccatgtctttctctaatactctaccaattctgaaactgttcatgggtcccttttatccctggagaaggcttttaccctttggactttagtttacctagttacctgtgaactcagctctttgatagacccaagaaaagttataattttatagattatctgactttgtttcattattaggaaagtagcaacattctcttgagaatttatgcattgtaagtgaaagaaaaatccaggaaatcttatagagaatggcaatatggttatagatgagaatgtggaaaagatgaattttgaaatacttcctatcatagtacaaattgctacaatgattttagaaaaaagtatatctatacacatacacggagatcatatatatggaaataygtgtgtgtatttttcctgatgactctgcataataaacataaa

SEQ ID NO: 472077 - DNA, 456 bp, Homo sapiens
gggtgatagcaaacctgtgataaaggcaatacaaaatattagtaaagtcacccaaagagtcaggcactgggtattgtggaaataaaactatataaacttagaattttttaaaaatatgacttttttaccttttacaaaacattctcttgctgaaatatgtgaagggtatattcagtagccaagagttgcatgactacttcacaccagttcatgatacaacaggtatacaggttttcttttataaccaastacaactcaagagtcttctgaaagtgttccagaaattgctttaaaactcaaaagtaaggggccaggtgcagtggctcacgcctgtaatcccagcactttgggaggccgaggcaggtggatcacaaggtcaggagttcgagactagcctggccaatatggtgaaactccatctctaataaaaatacaaaaattagccgggcgttggca

SEQ ID NO: 472078 - DNA, 624 bp, Homo sapiens
tttctcttttctcagataactttagctttcctgatgagtgtgttgataaagaaacctttccttacgggcttggttgtgtttctccttattgtcttttgggggatcctgggattcccagcattgtatacacrtcttcctgcatttttggaatggactttgtgtcttcttagcccctttgccttcactgttgggatggcccaggtaagagttaaggtaacactttcactttttacaaaccgttctacacagattccctcttaataattcacacaacatgctctaagcattccattctataacttttgtaaaaataaacatgtatgagacaggagtgactttaatttttctctctcagtgtaattagtttccccataagtcactaaatataggatcatacccttattattgagatgtttcagcttctacttctaattggttgtcccagagaacatttgtctcattcagtgctcaggaaacatgacccttaatgttatcacaagcatttaaaaaccaggaatttggaataaatatatctttattttttaattgctcatttctacatgaaactgaaccttgtctcagaaaagttaattttagttatgatatcataactataatatgcta

SEQ ID NO: 472079 - DNA, 624 bp, Homo sapiens
tttctcttttctcagataactttagctttcctgatgagtgtgttgataaagaaacctttccttacgggcttggttgtgtttctccttattgtcttttgggggatcctgggattcccagcattgtatacacgtcttcctgcatttttggaatggactttgtgtcttcttagcccctttgccttcactgttgggatggcccaggtaagagttaaggtaacrctttcactttttacaaaccgttctacacagattccctcttaataattcacacaacatgctctaagcattccattctataacttttgtaaaaataaacatgtatgagacaggagtgactttaatttttctctctcagtgtaattagtttccccataagtcactaaatataggatcatacccttattattgagatgtttcagcttctacttctaattggttgtcccagagaacatttgtctcattcagtgctcaggaaacatgacccttaatgttatcacaagcatttaaaaaccaggaatttggaataaatatatctttattttttaattgctcatttctacatgaaactgaaccttgtctcagaaaagttaattttagttatgatatcataactataatatgcta

SEQ ID NO: 472080 - DNA, 598 bp, Homo sapiens
ctgtaacctcatcaatatggattacaagagatgattgatagatagacagacgatatagaagacagatagatgatagctagatayagggggtcacagaatagcaaaaatcacaatctctgcttgcaaaaaggcagaaggaatcagttaaccctataaaatcctcaacagtctggacttctgttctcttaacatcacccttctacatctattcaagtgcagacatttctcagtgtggacatggccccacagttggcttggtgaggagatgagccctttgtcaaaggaaaaggacccatctcccttcaatccagtgctggactggcttttagactccatttatcccctttctccggtgcttttgtgctcaacctgcacaactttatgctggaatcctaaaaggcagcaacttacgctcttgttccaggtgacagctaatctcaatcaaacatctcctctcttttattttcctcattaggaaaaaaaaaaagaagggaggttgaatctgaaattctttgcagtgccagaaagctgcggttcttcaaatgtgtactgagcacttgttatgtgtaaggcattctgcaagattcactggtggaga

SEQ ID NO: 472081 - DNA, 570 bp, Homo sapiens
agatgattgatagatagacagacgatatagaagacagatagatgatagctagatatagggggtcacagaatagcaaaaatcacaatctctgcttgcaaaaaggcagaaggaatcagttaaccctataaaatcctcaacagtctggacttctgttctcttaacatcacccttctacatctattcaagtgcagacatttctcagtgtggacatggycccacagttggcttggtgaggagatgagccctttgtcaaaggaaaaggacccatctcccttcaatccagtgctggactggcttttagactccatttatcccctttctccggtgcttttgtgctcaacctgcacaactttatgctggaatcctaaaaggcagcaacttacgctcttgttccaggtgacagctaatctcaatcaaacatctcctctcttttattttcctcattaggaaaaaaaaaaagaagggaggttgaatctgaaattctttgcagtgccagaaagctgcggttcttcaaatgtgtactgagcacttgttatgtgtaaggcattctgcaagattcactggtggaga

SEQ ID NO: 472082 - DNA, 606 bp, Homo sapiens
tgggcaaagggttcacacaactctgtgtactatttttacaacttcctgtgaatctataattatttcaaaataaaaagccaaaaaagaggcatctatggataygcatgtgcttgtgcactcactgaaatttggtggaatgatacaaaagaaatcattaataataatatttgcctctgaagagtgggagtgggatgggttgggggtgagaatgctttctttgactttttatactcttttgtcctgatttcttcttgctgttgtgcatgtgtctcacttgaaacatcaccatgccaggcacatgcacgagatgttaggttcaccctgaggacatcgaaccttgacccaaagggaaagcggggatcaggtaacccctgagctgagacaggaaaccaggtgaagagatggctcaggggtggtgttaccacctgaattgtccccccctccaaattcatgttgaagtcctaatccccagtacctgagaatgtgactgtatttgggaaaagggctttaaaagaggtgattaacttcatccaatctgactggtgtccttagaagaggcaattaggacacacatagagccaccaagggctcatgagcacagaggaa

SEQ ID NO: 472083 - DNA, 388 bp, Homo sapiens
actgcttataaaatacttttatgggaaactataatttgtttgacaagaacctttgtaaaacttatyacagacaatcttgaaaagttacttaaaaacagaattgagactatactacatatacaattttataaactgctttatacttattacaaaggtattaaggatttttgagggtcatgagattactgccagatgatacttcagaaaaacagtatcaatttatactaggatcaacagtatttgagtggacttgttctataatactctcagaaacactgggttaaaaagaaaggagaaaataaaaataaatcttcagctaataaggctaatatgtactctcctcctgttttgtaaatcttcacttattagtgaggctcagtattttttt

SEQ ID NO: 472084 - DNA, 388 bp, Homo sapiens
actgcttataaaatacttttatgggaaactataatttgtttgacaagaacctttgtaaaacttattacagacaatcttgaaaagttacttaaaaacagaattgagactatastacatatacaattttataaactgctttatacttattacaaaggtattaaggatttttgagggtcatgagattactgccagatgatacttcagaaaaacagtatcaatttatactaggatcaacagtatttgagtggacttgttctataatactctcagaaacactgggttaaaaagaaaggagaaaataaaaataaatcttcagctaataaggctaatatgtactctcctcctgttttgtaaatcttcacttattagtgaggctcagtattttttt

SEQ ID NO: 472085 - DNA, 388 bp, Homo sapiens
actgcttataaaatacttttatgggaaactataatttgtttgacaagaacctttgtaaaacttattacagacaatcttgaaaagttacttaaaaacagaattgagactatactacatatacarttttataaactgctttatacttattacaaaggtattaaggatttttgagggtcatgagattactgccagatgatacttcagaaaaacagtatcaatttatactaggatcaacagtatttgagtggacttgttctataatactctcagaaacactgggttaaaaagaaaggagaaaataaaaataaatcttcagctaataaggctaatatgtactctcctcctgttttgtaaatcttcacttattagtgaggctcagtattttttt

SEQ ID NO: 472086 - DNA, 388 bp, Homo sapiens
actgcttataaaatacttttatgggaaactataatttgtttgacaagaacctttgtaaaacttattacagacaatcttgaaaagttacttaaaaacagaattgagactatactacatatacaattttataaactgctttatacttattacaaaggyattaaggatttttgagggtcatgagattactgccagatgatacttcagaaaaacagtatcaatttatactaggatcaacagtatttgagtggacttgttctataatactctcagaaacactgggttaaaaagaaaggagaaaataaaaataaatcttcagctaataaggctaatatgtactctcctcctgttttgtaaatcttcacttattagtgaggctcagtattttttt

SEQ ID NO: 472087 - DNA, 624 bp, Homo sapiens
acgcttctgcacaagtagagactgctataactttaaaatctcctaagagtgtttgtgctgcccattcttaaggacccagggattatggttattctctctgggaacacgaattcaaatctttccatcyttttccattagatttcagtctcccatcatttctattgattacttatcactctgaataggagaagagcatttaattacacatcagtagaaatgcatgagttataattccacctcagtcatctttaaatagcccagttgcttccattaggtacttgtaagactttaggaaaaacagtttccctgtggatttcttcttaattctccctcatctgtagtctacctggtagggctagttggtctctagggttcccttcagtttcagtttctgatctaatacatctttaagatgggaatgaactttctaacaaagcaggagttgtcaccttctttacacccaaacgagtgtttgggtgcctttcttaagatttcagatgccacagagatagttccttgagaggtgacatagcttaatggttacaggaaccaagtaaggagccagattgctaagactggaatcttgtctctgctacttaataggtctgtgactttaattaatta

SEQ ID NO: 472088 - DNA, 676 bp, Homo sapiens
atgttcaattccattagctactgcataacctaacactttactctccaagtgtacctcatattaatctgcttgtggaaggcagggtaactgcttaatccttacaagtaatgacacatcatatgctggttggccaggtctggaaaaatggtttcctaagggaactcaggctggaaggggtgtcatagcctagtcccacctgattgcatgggctgagaattacggaatggtgatatatcaaaagaaggaagaaaccattattggcaggtaaaagagtatagctgtcttccacactgaatgattgagatactattgcacacaagaaaggagtcagagtaaaaagaagttttaagtttcgatgggtctgaccatttaaaaatgttgaagtcattgcgaagacagasaatgctgaagctatcaaggaaataaaaatgaggccaaatagatttatacctaattaaatatgagttgaaatagaaaaaagcataaacaagccttttactaactgaaccaacttaaccacatgaggagagttcataatagaagatttagatgaatatttcctgttataaaaggattttatgtaattattaactgaattcccattaatagttacctaagtttatgggttgaataatgagttggcttgcattctctcatttagcaataaacagtaaac

SEQ ID NO: 472089 - DNA, 630 bp, Homo sapiens
aaagatgattggcaattttggctgctgcaggcaacaggttttaactgaatgtattactccattttcacgctgctgataaagacatacctgagactgggcagtttacaaaagaaagacatttaatggacttacagttccacgtggctggggaggcctcacaatcatggcagaaggtgtaagccacgtctcacttggtggcagacaacagaagagtgagagccaagtgaaaggggtttcccctgataaaaccatcagatctcatgagacttattcattaccacaagaacagtatgggggaaacggcccccatgatttaatcatctcccrctgagtccctcccacagaatgagggaattatgggagcaacaattcaagatgagtcttgggtggggacacagacaaaccttatcacagaggttcccttttttgtgaaactaagccatctttctggtaccttggtgcagcacttttcccctatgaggaggctgttttatacctgtgccacaagatctgatgttccatgtttttctatgtatactagaactaaaaaatcatacctaaaagcaaaggttttctttcatctccacagtcagcttggctagagaaaataactcccatgaattcccaaag

SEQ ID NO: 472090 - DNA, 630 bp, Homo sapiens
aaagatgattggcaattttggctgctgcaggcaacaggttttaactgaatgtattactccattttcacgctgctgataaagacatacctgagactgggcagtttacaaaagaaagacatttaatggacttacagttccacgtggctggggaggcctcacaatcatggcagaaggtgtaagccacgtctcacttggtggcagacaacagaagagtgagagccaagtgaaaggggtttcccctgataaaaccatcagatctcatgagacttattcattaccacaagaacagtatgggggaaacggcccccatgatttaatcatctcccactgagtccctcccacagaatgagggaattatgggagcaacaattcaagatgagtcttgggtggggacacagacaaaccttatcacagagrttcccttttttgtgaaactaagccatctttctggtaccttggtgcagcacttttcccctatgaggaggctgttttatacctgtgccacaagatctgatgttccatgtttttctatgtatactagaactaaaaaatcatacctaaaagcaaaggttttctttcatctccacagtcagcttggctagagaaaataactcccatgaattcccaaag

SEQ ID NO: 472091 - DNA, 575 bp, Homo sapiens
tttatggccagagaatggccatgcaaatagttgacaatagaataaaaaatgacattttgtgagacttggaagctggcctttcttttttctaaaagagattgaggtttctaaaagctagcttttatggagggctgtgcagttatgattgtagttttacagaacaggtgcataagtgaagggtgagacagaaaacaaaatgctggctgtttgtcaaatcctgaaagtgaatgggacaaaaatcatgtttgaaggaggatgtcattcaggagaccttgtacatcttagagtgtcctcttaccagatgaagtggaggatgaggttgaattgtggggttaggtgacagtgggtacatacttctctgcctcagtttttgktttttttaatctgtaaaaatggggattgtggcacttgggatcttttggtgaggagtgtagttacctggaaagctcttaggatagtgcctggtacatagtgattcctgcatcagtgtgagctattataattatgggaatagaaaaaggtgccaccctggacatccagagtggggagatgttttccagtcagggtccaggcag

SEQ ID NO: 472092 - DNA, 554 bp, Homo sapiens
tagttgcaacacagaatctgataaggaataaatactcaaagtattaaattggtacaaaagtaattgcagtttttgccaataaaagtaatggtaaaaaccacaattacttttgcaccaacctaatatataaattcctaaaacacaatgaaaccaatttaaaaatggkcaaaggacttatatagacgtttatctaaagatatacaaatggcaaggatattcaacatcactaatcattaggaaaatacaaatcaaaatcataatgagatactatctcacacccattatgagggctatttccaaaaaaaaaaaaaatacccagaaaataaagtgtggatgaggacgtgaagaaatcagaactctttgcactattggtagcaatgtgaaactgtatagtcgctatggaaaaaagtatgtaggttcctcaaagaattaaagatagaactactatatgatccagtaattccacttctaggtatatactcaaaagaattgaaagcagatatttgtacacacattttcatagcagcattattcacaatgaccaaaaagtggaa

SEQ ID NO: 472093 - DNA, 534 bp, Homo sapiens
tggctctgaccctggcatgagcctaatctaagcagaagatgtcaggaaggaggtacggagtggcatgctttccctatttggtgccttcaaggctgtgctgcccttgggctgggctggcgaatggagaaagctggtgagacagtggatacgatgaagtcaacctgtgatcttaaactggaggggaaatactccttgtttatggcttagagatcccaccctgaggaagagtgctcagcaaactgagggcaaggcacactcatcaaagaacccactagttcgcagaatcagtcaagcaaagcgattgatgccgtcatcaaaggagtgatgttatacgcaaattacctagcttgctacagacactggcagcttttccttgcctctccaactgcaaaagcaaatcgcactctacctccagaaatgaaaagaagcactccctctccaggtacaaccccagtaaggyacatgggaaaaatataagtctcatccagtgctcagctctttccaaaagtcagacacccctcacgtcttctatcc

SEQ ID NO: 472094 - DNA, 629 bp, Homo sapiens
tcagctctttccaaaagtcagacacccctcacgtcttctatcccatgtgtggctatggcccactgtccacaggaggcatttctctgctagaaaggtagagctcttccagtcttcccagtcaaacaagaaggctcagcctttgtggtcctcaagtagcttgcagggagcaagaagtcgggaagtgggaaattccaattcctctggagtaaggagatgctgtttctttactggggaargagagtaagcaggtgcatatataacagccatgctgttagaagagaagatgtaggatttgagcacatgagaatgttttattaattttgtattttaattagatttttgggttttttttttctctagtctgtcttctgtgttttttttttctttttttttcctgcatgaaccaagaaagagaatggcattgagaaggtataaaagggttctttaatacttccacctccttggatatacagcaggagaaagaaagttggattactttatactgggccttaaaaaaaagtctggtacctttgtatatcatgagctgatgtgaatggtaatggcgccagcctcctggactaagattccaccagtttcccctgtgatgcaggccatcccccacccgcacc

SEQ ID NO: 472095 - DNA, 652 bp, Homo sapiens
aaaagcacaacacaggtgcttcacataaactcttcgatacgaatgaaatgagaaacttgggaaactgagaaagtttgattctgtcattccttctggacttaagagaaatgctatcrcagagctttctcaactcatgcattattgatttttacaggtgccacctttttctaaggagatatggggcactaacagccaaccacagtgtgttactctaatcagcaacaattgcggtcttatcctaatcagaacccattgtgcagttaggatgggccctctaaatgacaatcatctcaccattgttaaatagtgaatgcgccttaatatcatcacagcagaaaactgccccaaagtgttctcttgagtaatctactgaaagattaagcaccagcaggtaattggccttatctttctttgggaaacttatgagggacttgaagttgaataaatcaccatgaacaattgtaagaacaaatcactctgggcaatttgatatctttgtaccttcacacacatggggaagatcattttatagtaatgatttccatatcatactcagcgctgtgattctgttagagtgaattatgttcccctttccccacccaaaacagtgtacctgaattgactcagacctaagttttcctagagataagaa

SEQ ID NO: 472096 - DNA, 652 bp, Homo sapiens
aaaagcacaacacaggtgcttcacataaactcttcgatacgaatgaaatgagaaacttgggaaactgagaaagtttgattctgtcattccttctggacttaagagaaatgctatcgcagagctttctcaactcatgcattattgatttttacaggtgccacctttttctaaggagatatggggcactaacagccaaccacagtgtgttactctaatcagcaacaattgcggtcttatcctaatcagaacccattgtgcagttaggatgggccctctaaatgacaatcatctcaccattgttaaatagtgaatgcgccttaatatcatcacagcagaaaactgccccaaagtgttctcttgagtaatctactgaaagattaagcaccagcaggtaattggccttatctttctttgggaaacttatgagggacttgaagttgaataaatcaccatgaacaattgtaagaacaaatcactctgggcaatttgatatctttgtaccttcacacacatggggaagatcattttatagtaatgatttccatatcayactcagcgctgtgattctgttagagtgaattatgttcccctttccccacccaaaacagtgtacctgaattgactcagacctaagttttcctagagataagaa

SEQ ID NO: 472097 - DNA, 611 bp, Homo sapiens
attttctgtattttttatagagacggggtcttactatattgcccaggccggtctgaaacttctggactcaagcaatactgcctcggcctcccaaagtgctgggattgcaggcatgagccaccatgttcagcccattattttttaaaggaaaaaaaactttattgagctttatttatttatatataattcatatatcataaagttcaaaattttaaattgtacaatccagtactttatagtatatgcacaatgttgtatatcattcaccaccgttcaattctagaacattccctcccctcccagtcctggcaaacactagtctrctttctgactttttggatttgcatatcctggacatttcatatcattggaaccatacaatatgtggccttttgtttctttccctcatgataatgtttcaaagttcatctgtgcagtagagtatatcagaattctattccttttgatagccagataatattctattatatggatatacagtactgcattttatttattcatcaggtagttggaatccattgtttttgaatcattgtcaatcttcaatgataaaaagtctgaaattataatttggtacagagcagtttttg

SEQ ID NO: 472098 - DNA, 645 bp, Homo sapiens
ctgggttctggcgggggagggcacgtggagaggagaaaccaggccaggcacagtgactcacacccgtcatcccagcactttgcgaggctgaagtgggcggatcacctgagttcaggagtttgagaccagcctggccaacatggtgaaaccccgtctctactaaaattacaaaaattagcgggatgtggtagcgtgttcctgtaatcccagctactcgggaggctgaggcaggagacttgcttgaacccgggaggcagaggttgcggtgagccaagattgcgccactgcactccagcctgggtgacagagtgagamtctgtctcaaaaagaaagtaagtgaggtgaggagaaacctttgtgagcctggcactttccagctctgtcaacacagggctcggacttggcagtaggacagtgtcagagacttgggcctcacttccctaaggtacttcctggtccttcacaggaattcttggggtcatagtggccccagagcccttttggaacataaagtcctggaaaccatcgagtgtttgagggtttgatgcttcttggaattatgttgttaaaatggttctgggccccaagtggctgacaggtgatatggctcagcccagcccagaattagggaccaccaggttcaga

SEQ ID NO: 472099 - DNA, 407 bp, Homo sapiens
ctgggcaaagtggacaccaagattaataactccagagggaaccctccctggagcacaacacccagggcctatgggggtgttccctggtggtcctggccagtggtgctgcccttctttctacttccaaaatcccagaccactgctgctctgactatgggctccactccctcaacccattcttttattaaatgccttttctgcacttgctggagtgattatatggtttttgttcttggttctctttaatgtgatggatcacatttattgatttgcatatgttgagccatactggcatccctgggatgaatctcacttaatcatagtgaatgatctcttttgatgtgttkctaaacatggtttgttaatattttattgaggacttttacatctatgtttgttagtgatgt

SEQ ID NO: 472100 - DNA, 596 bp, Homo sapiens
tgagacttgggctaattcaatcaaggaagactcttggaaactgggtggtcagagggccccgggagggtgagtgtaatcaygttgtgagggtgatctgcctgtaacacccatcaccccattgatttccagtattaatctggtagcaataactatcaatctatatgtacttacataggagcttatagttcacacactgcatcacatacattggcacattaaaaaacttttttgctatctattgttactgaatagctaacacttgatgattcaaagagtttttttaggttttattttgtttttaattgacacataatagttgtacttatttatggggtacagtgtgatttttaaaggcaaaataagatgaaaaattgaaaaagttatctgaataattcaaacccaatactaatgtcatttgcatcattctgtgttagcagacaactttcaacttccaaattaacatcagcatatttttttgtaattcaatctttcagtaattaactatagtaacttatctgcattgttcgctatgtttttcttaccaggtgagtaaattttaaagatattttacatctctttaatcttatgatttcatt

SEQ ID NO: 472101 - DNA, 594 bp, Homo sapiens
ctttttctagatcctccatctccttaatcctttaaggtaactactgtaagattttatatatctattctaccagaatgtttaaaaaatgtatttgctataatgtatgtgcayatattctttaaaaaagcaatttacatgaatttaatcattctatacacgttattcaacatgtttttctcacttaacatagagagcctaatcaacacatagacaaatctaaatcatttttaagggctaaagtttttgtattaatttaccataatttatttaacatgtcccttatgggtagacatttggttaattttcaattttttggctatttaacagtacagggtacatctattcacattaatggtaaaattttaaattttggtagttttttgacaaattgcctatgtacttctactactagaattttatacttctactaaaaatatatatacttttctaattttgtacatttttaatagtatatgagacacttgttagggctgggttttatcaaacattttatttttttattaatgcacataatgagtatttttttttgagacaggatctcactctgttgcccaggctggagtgcagtggcgt

SEQ ID NO: 472102 - DNA, 594 bp, Homo sapiens
ctttttctagatcctccatctccttaatcctttaaggtaactactgtaagattttatatatctattctaccagaatgtttaaaaaatgtatttgctataatgtatgtgcacatattctttaaaaaagcaatttacatgaatttaatcattctatacacgttattcaacatgtttttctcacttaacatagagagcctaatcaacacatagacraatctaaatcatttttaagggctaaagtttttgtattaatttaccataatttatttaacatgtcccttatgggtagacatttggttaattttcaattttttggctatttaacagtacagggtacatctattcacattaatggtaaaattttaaattttggtagttttttgacaaattgcctatgtacttctactactagaattttatacttctactaaaaatatatatacttttctaattttgtacatttttaatagtatatgagacacttgttagggctgggttttatcaaacattttatttttttattaatgcacataatgagtatttttttttgagacaggatctcactctgttgcccaggctggagtgcagtggcgt

SEQ ID NO: 472103 - DNA, 581 bp, Homo sapiens
ctccctctgttgcccaggctggagtcctstggcagctcgctgcaccctttgccatccgggttcaagcgattctcctgcttcagactcccaagtagctgggactacaggtgcatgccagcatgcccggctaacttttttgtattttttagtagagacagggtttcaccacattggccaggctggtcttgaactgctgacctcaagtgatctgcccgcctctacctcccaaagtgttgagattacaggtataagccactgcgcctggtcaagaccagatttctttataagggatttgatatggacaatggtatacaaacaaaaatatgtaattgataaattcagcaaatatttagcacttcctgtgtatcaagtattattttccatttacagggctgtagcaatgaattaaacaggcatcttctcttccctcctggagcttatattctagtagggaaactgataagacaatcaggtatataagatgtcttttggaggtaagtatttggggaagaacacataagaagttatgggtgacggttttggagcataaatcataccacagagttgccctcccctggaat

SEQ ID NO: 472104 - DNA, 629 bp, Homo sapiens
tcccataaagtcctcagctcgttgcatacctcacaggcatggaaatccagattgtgcaaagaggtcaagaacctgaataattattccactcgtaaccaaacagtaatagacactccctttgaaattgtggaaattctcatttccacactaaagccaagggaacrcagccgggatgtgatgtcagcaggcaagaagactgaaagtggactttgattaattacctgattggttcctgccccacttagacctgaatgaagcaagtctgccacattgaaaggtttggggaattttaggtggaagaggggtgggatgggacggagaggctttatctagtctgaaccattcatagtttgggaaagtgcccaagtgaaaacaattgaacaccaaatcattttcccacgaggctggcagagttcttcatagactatcaagtttcaactgctttgtaaactctatgaagacatctttaaggccctacatttttccccctggagaaatgtcttcactccaagaggttagcctaggaagatatcattatcttcaagccacaacaaccaatcccctaggccccccatcctgaaattcttgaaccctgtgctccaccctaactcagctcaggaaactgataa

SEQ ID NO: 472105 - DNA, 266 bp, Homo sapiens
ttttgaagaaaaacaaagggcaattttcaggtcttcagagcaatgtggtctctgccccactgggctggccctgaccttcactccgggctggttgacctcacatacgtgtgtagctgtggctattcgtcacgttacgttgcccagcagagtagcttaccatggccattgagcatgccctctgcttccgccagtgtgctgttttatttcatttttgctgcaatgcrgaatgaagcagagtgggccaccaagcagcatcctcacaggca

SEQ ID NO: 472106 - DNA, 599 bp, Homo sapiens
gtcactgtccctttggagtctgaggtccacttcctgggagtctcttctgctttagatcattcatacaaatagcatctataatgcagagacatggggactgggctccacaccccaccctcagcagtcattgatgtttgagcttaagtgatagtctcttttttcaactcagggtgtgtggctccagaattttagatgaagcaattgttttggattcatgcaacctaaagaggttccctccaatgacctggggttaggtgttcatctcccctccaccacctctgcccagactgagcagataattgaggtgagtgggtcttgggtcaggttggcggggacagaggaatggtgagttwgcccagatatacaagacctttgctttataaatttacaagggaattgcctgatttgagaatttaagtggattccaaccctttgccctttcactgtcaaaaatactgtaactcttactttgcataataatgtttaattgtgtgccgcacatttcagagcatactgaacatgcatctcagggcagagaatggcgtgtgcaaagcaggaattttgcacttattagacacattcaattatgttcaagggta

SEQ ID NO: 472107 - DNA, 478 bp, Homo sapiens
cacagcaccaaggccagctccctccttccagggcacaaggcatgtctctgatggagcccagacycttggccggggtaggctgtgagtgatggggtcaggtgggcccccactggcttcccaaaaagagtgttgtttcctggagaagggtgggatttgctctgtgcatggaaaatgtctttctcacccttcatgtcgggacaacctcgttgctcccacccaccttcaactccagctccacctgagactgccggtagcaggggtcttgatcttttttctgaatctgaacctgacagcccagccctccgtgactggttgctgcccactctgaatccttcctgagggacgttgctccatttctgggtatccctgtattctcccctcattccaatcccacaggaaacttccagaagttccaaataccaaggaagcattcccaggtgagaagatggagggctccataggtgactgaagtttcagg

SEQ ID NO: 472108 - DNA, 478 bp, Homo sapiens
cacagcaccaaggccagctccctccttccagggcacaaggcatgtctctgatggagcccagacccttggccggggtaggctgtgagtgatggggtcaggtgggcccccactggcttcccaaaaagagtgttgtttcctggagaagggtgggatttgctctgtgcatggaaaatgtctttctcacccttcatgtcgggayaacctcgttgctcccacccaccttcaactccagctccacctgagactgccggtagcaggggtcttgatcttttttctgaatctgaacctgacagcccagccctccgtgactggttgctgcccactctgaatccttcctgagggacgttgctccatttctgggtatccctgtattctcccctcattccaatcccacaggaaacttccagaagttccaaataccaaggaagcattcccaggtgagaagatggagggctccataggtgactgaagtttcagg

SEQ ID NO: 472109 - DNA, 478 bp, Homo sapiens
cacagcaccaaggccagctccctccttccagggcacaaggcatgtctctgatggagcccagacccttggccggggtaggctgtgagtgatggggtcaggtgggcccccactggcttcccaaaaagagtgttgtttcctggagaagggtgggatttgctctgtgcatggaaaatgtctttctcacccttcatgtcgggacaacctygttgctcccacccaccttcaactccagctccacctgagactgccggtagcaggggtcttgatcttttttctgaatctgaacctgacagcccagccctccgtgactggttgctgcccactctgaatccttcctgagggacgttgctccatttctgggtatccctgtattctcccctcattccaatcccacaggaaacttccagaagttccaaataccaaggaagcattcccaggtgagaagatggagggctccataggtgactgaagtttcagg

SEQ ID NO: 472110 - DNA, 631 bp, Homo sapiens
aaagggaaaaagagagagaaaacacaaacaatattgggaacgagaaaaagaccaaaatgatatgtgggataatcattatttaacacctaagagaatatcatgaaagagtttatgcaaatatgggtgactttctgggaagtcactcaaaaagaaatagaaaacctaaatagattgtagccattaacacaattgataatggttaatcttaggtcttgatccaagtggattcagggatacttggatagctgataaagcattgtttccaggtgtgccatgagggcgttttggcaggagattggcatgtgagttggatcgagtaggaaagatccactctcagtgtggatgggcrccatctaatcggctggggcctggatagaacaaaaaggcaggggacaggcaaatttgctttctttcccctggaggtgggacaccacctttcttctgcccttggacatcagaacttcaggctttctggtcttcggactctgagacttgcaccagcagcctcccaggttctcaggcctttgacctcagaatgagagtagcgctgtaggtcttccctggttctgaggctttcagagttgggctgaggcacagtgctgttatacctgagtccacagcttgcaggcgg

SEQ ID NO: 472111 - DNA, 631 bp, Homo sapiens
aaagggaaaaagagagagaaaacacaaacaatattgggaacgagaaaaagaccaaaatgatatgtgggataatcattatttaacacctaagagaatatcatgaaagagtttatgcaaatatgggtgactttctgggaagtcactcaaaaagaaatagaaaacctaaatagattgtagccattaacacaattgataatggttaatcttaggtcttgatccaagtggattcagggatacttggatagctgataaagcattgtttccaggtgtgccatgagggcgttttggcaggagattggcatgtgagttggatcgagtaggaaagatccactctcagtgtggatgggcaccatctaatcggctggggcctggatagaacaaaaaggcaggggacaggcaaatttgctttctttcccctggaggtgggacaccacctttcttctgcccttggacatcagaacttcaggctttctggtcttcggactctgagacttgcaccagcagcctcccaggttctcaggcctttgacctcagaatgagagtagcgctgtaggtcttccctggttctgaggctttcagagttgggctgagscacagtgctgttatacctgagtccacagcttgcaggcgg

SEQ ID NO: 472112 - DNA, 574 bp, Homo sapiens
aatataccacaggggagagacagtaaggattgtggctgttgtggtaatccagtatggtgagggatgatggtgttttgtcttgggttacactgatagaggaraaagtaatgagaacctgtcgagttcagaataacatttagctgataaaacttgttgatgaattagaagaggattgtgagaggaagagaggagtcaaagatgattccaaccttaaaaacttcggaaaatgatactgccattgaccaaagtcaagaacaacaagatggagcatgtttgctggagaacagcacttggtctggaaccctgttaggtctgacatatctgttgggaggttgcatattcatttcagtgctttgggagagatggggactaggaataaaaaataggtgggatttaaagccacagaactaagagaaattcccgtggcagtgacagtgtctacagagagcaaaacagggtgaaaaagcttgggagaatctgccaaccataagctatgtgttaaactacacacatggacacagacacagatatcctgatacaagcccatgggcccttccatcctatcaaaaatcgc

SEQ ID NO: 472113 - DNA, 556 bp, Homo sapiens
ggcaatagtattggacagaaagctgctacatttgcagtgctgtcagtttccagaaaatggggatggtggaggtcaggactagcatgaggcaaatgaggcattcagggcacaaaatttcaggaggcaaaaaatttaaggaggtgctcaggtgcctgcccttataccacagggaaygaaagggcctccttaaattgtatgctccagggcccactcttactgcatcctagtgcctagttctggccccagggaaatgagttctattaggatttcaagaaagtctgtggatccagacatcaattctcttagtcatgacaaatgggcatgcaaaggtggaaaacaggattggtgaagagttgacagatttaccactaaaaaggaatagacctcattttcctggctaagaagaacaaagtgtgtcttggcttagaagacaggatcactttcccgagacaaaaagaggtacaagttataaaatccacccttgactcttctccctcttactcatgctattctcccttttccacacccagcccactgccaaattaaaataataaac

SEQ ID NO: 472114 - DNA, 501 bp, Homo sapiens
gataaaactttaggacattgtgctaagtgaaataagccggacacaaaaggacagatattacatgattccacacatataagttagctagaataggtgaattcatagagacagaaaatagaagagtggttaccagaagctgagaggrgaaattaacagagttaaggaatacagaatttcagtctgggatggcgtaaaagttctggggatatatggtggagatggttgtggaacaatgtagatgtacttaatgccactgaattgcacacttaaatggtttaaaatggtaagttttatgttatgcatattttatatacacataacagaaaactttcagagcataggcttccaataaaaataaaggaaggaagggaggagggaggaagagaagaaagacaaacagacagagagaaagaaagacatactgtccaattgtcagatacacctttagtttggggaatttatgatttttgtctcctacattgtgtcagcctccacactaag

SEQ ID NO: 472115 - DNA, 501 bp, Homo sapiens
gataaaactttaggacattgtgctaagtgaaataagccggacacaaaaggacagatattacatgattccacacatataagttagctagaataggtgaattcatagagacagaaaatagaagagtggttaccagaagctgagaggggaaattaacagagttaaggaatacagaatttcagtctgggatggcgtaaaagttctggggatatatggtggagatggttgtggaacaatgtagatgtacttaatgccactgaattgcacacttaaatggtttaaaatggtaagttttatgttatgcatattttatatacacataacagaaaactttcagagcataggcttccaataaaaataaaggaaggaagggaggagggaggaagagaagaaagacaaacagacagagagaaagaaagacatactgyccaattgtcagatacacctttagtttggggaatttatgatttttgtctcctacattgtgtcagcctccacactaag

SEQ ID NO: 472116 - DNA, 646 bp, Homo sapiens
gaccacggccaatttgtgttcattaagatgtttccatgaagaaccccttaagaaggggtgttggcccaagatatcattgatgatgagggatggggagatgctaaaatactaggcgttaactgaagtgctcagactgacagccttgtttattcccactgtgtaaccctcttcagtgcyagtggcccacgggtacagaagccaggcaatggttcggggccacagtttgctctggcatggggcactatgagaggtccagggggatgggcctgtcataatccaaacccatgcatgacagcctttttagataaagactttcttattctacgctttcactcgtaataatgaatgcactgatgtgaacactcacggccaaactccttggctttctgtaccccgcctgccactcctgaccaatatcccacacgtcggcctaggcagaatgccttgcagttccctgaacatattgtattacttgacgctgggtcttctgaggtatcaaaattcatcttgagcaccacatgctctgagatacctccccagcaccctgagaaatgactcagggtcttttctcagtcatttcagccgcgcatgctcgaaaactcatctgctaggctccggctccctgagggcctggttgcacctcatc

SEQ ID NO: 472117 - DNA, 492 bp, Homo sapiens
gtaactgagtaatttatacaaatagggaaaagggaacacaggttgaaacactttattttagcttggaagcacgtccatggggccaagtaatcaattccacaaatcattttcttgtctttttttttttgtcctggagacagggtctcactctattgcccaggctggagtgcaggggtgtgatcatggcccactgcagccttgacttcctgggctcaagtgatcctcctgccttagtctcctgagtgcctgggactacaagtgtgtgccaccaagcctggctaatttttaaatttttttgtagagacaaagaactgcgctatgttgctcaggctggtctcaaactcctgtcctcaagccatcctcccacctcaggtcccaaagtgctgggaagacagccgtgagccaccacacgtggccaggccaccattyttcacctagcctattccacctcgcacccattctagtccacccctgcaaaccatcctttaagat

SEQ ID NO: 472118 - DNA, 492 bp, Homo sapiens
gtaactgagtaatttatacaaatagggaaaagggaacacaggttgaaacactttattttagcttggaagcacgtccatggggccaagtaatcaattccacaaatcattttcttgtctttttttttttgtcctggagacagggtctcactctattgcccaggctggagtgcaggggtgtgatcatggcccactgcagccttgacttcctgggctcaagtgatcctcctgccttagtctcctgagtgcctgggactacaagtgtgtgccaccaagcctggctaatttttaaatttttttgtagagacaaagaactgcgctatgttgctcaggctggtctcaaactcctgtcctcaagccatcctcccacctcaggtcccaaagtgctgggaagacagccgtgagccaccacacgtggccaggccaccattcttcacctagcctattccacctygcacccattctagtccacccctgcaaaccatcctttaagat

SEQ ID NO: 472119 - DNA, 665 bp, Homo sapiens
tggcagcttcagtttggagtggggtatcaaaggcaactgtgtataaggaatagttatataactggtacccaatttctgagatgattttgacttaaacattgtgtatttcccagcatactgttggtttttctaattatgttgggaaattatgttactttcatttttttttttgctcgttgcccaggctggagtgcaatgccgcaatctcagctcactgcaacctccgcctcctggatttaagcgattctcctgcctcagcctcctgagtagctaggattacaggtgcccaccaccatgcctggctaattttttgtatttttagtaaagacggggtttcaccgtgttggccaggctggtgtcgaactcctgacctcaagttatccacccatctctgcttcccaaagtgctgggattacaggcatgagccaccacagccagccatgctttcacttttcaagaaagaagacaccattgttgccaaagattttggtaatttgagagatacaatgtatgttttctccatgtggatcttagtataattagatagtaaggatctgttraatttgaagtatctatccagaagtattttgggtacatgtttaaggattgtaaaacagtgtttctatttctggatataataaatgtatttgctaatataataaatg

SEQ ID NO: 472120 - DNA, 572 bp, Homo sapiens
ctgtgtgagctctcgctgtgggattggatagtcgagagaaacaagcggggccgggagtatgtggacgagtctgcctgtgagtaccatctgggtctgccgggccgggaaatagacacagtcacaccttccccatctcatgtaggagttgcctccaggtgctttttttcatttttattttttatttattttatttttttgagacagagctttgctctgtttgttgctcaggcaggagtgcagttgtacacccactgctyactatagccttggcctccctggctcaagcgatcctcccacctcagcctcctgagtagctgggactacaggtgcatgccactatgtctggctgattttgaaaaacaaaattttgtagagacagggtctcattatcctgcccaggctggtctccaactcctgatctcaagcaatcctcctgtcctctcctcccaaagtgctgagattataggcgtgagcgtctgcacctggccagaatgttttctttatcaatttttgtgttagtcctgtaaaacctctccatcctctaaatgtatgtcatcatattaatagatgaa

SEQ ID NO: 472121 - DNA, 446 bp, Homo sapiens
aaacgcctttgtgattgccaggggtcattttacacagagagctacgtgcagcgtcgtagctgagcatctgtgtcgtctgygttctctgtgaccttgaactcataattattgctcttttgttacctctgttaagcagtattcttggccgggcatggtggctcaagcctctaatcccagcactttgggaagctgaggcgggcggatcacgagttcaggagatcgagaccatcctggctaacatggtgaaagcccgtctctactaaaaatacaaaaaaattagccgggcgtggtgtcgggcgcctatagtcccagctactcgggaggctgaggcaggagaatggcgtgaacccagaaggcggaacttgcagtgagccaagttcataccactgcactccaacctgggcgacagagcgagactccgtctcaaaaaaacaaaaaaaacccag

SEQ ID NO: 472122 - DNA, 446 bp, Homo sapiens
aaacgcctttgtgattgccaggggtcattttacacagagagctacgtgcagcgtcgtagctgagcatctgtgtcgtctgcgttctctgtgaccttgaactcataattattgctcttttgttacctctgttaagcagtattcttggccgggcatggtggctcaagcctctaatcccagcactttgggaagctgaggcgggcggatcacgagttcaggagatcgagaccatcctggctaacatggtgaaagcccgtctctactaaaaatacaaaaaaattagccrggcgtggtgtcgggcgcctatagtcccagctactcgggaggctgaggcaggagaatggcgtgaacccagaaggcggaacttgcagtgagccaagttcataccactgcactccaacctgggcgacagagcgagactccgtctcaaaaaaacaaaaaaaacccag

SEQ ID NO: 472123 - DNA, 446 bp, Homo sapiens
aaacgcctttgtgattgccaggggtcattttacacagagagctacgtgcagcgtcgtagctgagcatctgtgtcgtctgcgttctctgtgaccttgaactcataattattgctcttttgttacctctgttaagcagtattcttggccgggcatggtggctcaagcctctaatcccagcactttgggaagctgaggcgggcggatcacgagttcaggagatcgagaccatcctggctaacatggtgaaagcccgtctctactaaaaatacaaaaaaattagccgggcgtggtgtcgggcgcctatagtcccagctactcgggaggctgaggcaggagaatggcgtgaacccagaaggcggaasttgcagtgagccaagttcataccactgcactccaacctgggcgacagagcgagactccgtctcaaaaaaacaaaaaaaacccag

SEQ ID NO: 472124 - DNA, 472 bp, Homo sapiens
ggctgaagcgatcctcctctctctgtctcccaagtagttgtgaccacaggcatgcaccaccatgcccagctaatttttaaattttttgtagaaacatggtctccttttgccccttgtctcagcctcccaaagtgctggaattacaggcatgagccactgtgcctggcccggccagtattctatctccgagctttggttgactccaacgcagttagcgtttgaggtaccttgttcgtctatggaccttatgggtcataacaacattgggagataaagatttgctgctgccaggactcggcgacattggacacgattctgcagagtcatcgaggcagcaggtgcttcacggggtgccgtggttgtcattgcacgtggcgtcactgccgctgcttcggttggtgtgggaaggtggcagcagtggttctgcctgcagtggggattagcctgatktccaagaaaagtgactgtgtat

SEQ ID NO: 472125 - DNA, 598 bp, Homo sapiens
tctactagacagaaggttgaaggccacaggccagcagaaaaatgtaggatatttggaattagttattgggatctagatgagtagagagtagttaaactcccatttacattctggtgtggatggcattatgggttgacaccataacttatacattgaastcctaacccccagcacctcagaatgggactgtcttgcaatgcacttagttaagttaggatgaggtgtgtcttagtctttcaaactatcgtaacaaaataccagagactggatggcttaaacacagaaatgtatttcctcatagctctgaaaattgggaattccaagctcagggtgctggccaacttggttcctggtgacgggcccccttcctaacttgcagttggctactttttcgctgtgtcctcacacggcagaaggagcacaagatctctctcttcttcttatgagattaggtctccacccttatgatctcatttaagtttaattagctgataaagccctatgttcaaatacagtcacattggagtttgagctcggatacatcaattttgggggtgcacagttcagtccacatcaagatcctactagagtagggtgg

SEQ ID NO: 472126 - DNA, 457 bp, Homo sapiens
catgtagttgcctctgacagcactggatatttggatgcacatcaagattaaatccgacaaagctcctctcaaggtggagagcagaactcaaggccttcctgtgaccagtctaaaatctcattagggacagagtttggagacgaatcctgtaggttgctaaatgaaaacgttagttgtctgcatgaacttcccagagatttgatgtgaaatttaaagcactaacacaaaaagaatgagacaccaaccattggaacggggatatttgggagtatttggaaaactagaacctccagatcccccaagtcctttaaaacaccccccactatgttcctcttacctgagaaagatgctcctcttttgaaggagagaattaagagttcccttcacagcccactatgtagcgttgcttgccccataacaggagttcagcrtgtgtggcttagactagagggagaag

SEQ ID NO: 472127 - DNA, 318 bp, Homo sapiens
gagaaactctccaaggttggggaaagaataacctggaagkattggaggcagtggtgccctgacactcacacaggacagaaaatagtacgtgctcagataagccactctcaaacaatctcatgattcatggacatttcatagaatacgcaaaagggccctatttttgtagtggggataattagccctaaaactgagcatagggataattataatcatagttaattataattaatattacatttccacccagtaaatctttaaagctagacctgaaggaatcagattatttccaggggccttaactgagtaccagaaaaa

SEQ ID NO: 472128 - DNA, 494 bp, Homo sapiens
tgggctttgaaggatgcaggacagtcaccccctggtgtttggggtttgtcctgagaaattttttttttttaagtcacacggccccatgaggactccactgttgcagtgtttgttaaaaataaacaaattgtaagcctgaagcctgtccttggatttcaaggactcagacagtgagctcagccataaaggaatgatcaatgttatcaaggagcaggtaatgacaaggggccaattatacaattataggggaatctgcttctttttctagggtgtggctgtttacccagctaaaggctctgtaagagggcataggcctcacattttctctaggaatcctgcttcctcaggagatcagtgagaggctggattrggtgtgaatctagattttgtcattagtatcagaagagaggcagttgcagacgaaaggaaaagccctgattatactggaaaaaaaaagaggggctcccttagaaggatgtgaattttgaggcagc

SEQ ID NO: 472129 - DNA, 521 bp, Homo sapiens
aggccagctgtttcagaatagccaagggcctgagtccatttagaaggaggaggccttcgctcagagccgagacagcaagagactttgggaggagggcagaggctcctgctccagtaaacagcacttgtcacagattggaagtggtcagcaattctgcttctgtgaggatgcagcagctgcaaggtccacagctctgaccacagggcctgtgggcagccccgggcagcaatgtcaacaggctcctatagagacagacagcagtggycaagtgagagcatccaaagggatgagcttggcattgcttaggaatacacgtgagacatctctgaagacagccggagtctgggaaaggacaacagcttggatcggggaaggggaacaggtcatctatgacaactgagagtccgcctacatctgaaggcaggtgcattagagaaatgcatgctgggcttcctgttcctcaggattgggcatgacaacagtgtccctacctgtcctcgctgttgctgttgtttgtttca

SEQ ID NO: 472130 - DNA, 587 bp, Homo sapiens
agtgaagccctgggagtgcagcatgaggaggaggaaaataaagtaaaacagggaactctgctattttaacagtttataaaattttgtctttaaaaccttttgtgactctaaaaacaatttctgaggaaggaggctgctgagtgtcgggaaatgtttagtgagctgagggccagagaccttgcttcccaccccctcaattatacctccctggccaccaaggacaggcttgggtttaggaggartaatcttaatgctaacagcggcaattcactacgtaataaaatgtaacgccgcgttccctccagcctctgagaggcctctgtggaatccacactcaatcacctactgctaagggccgcctgagctgtgggtgagaagagacctcctagatgggccttcaggttcttactgatttatgacatgggcgagtggattaactgcgttgcttccattttgtcaacagtaaaaaggagataatggtccattcctcacaggttttaataggaatgagtcaatactcataaagggttttatgaggaatgagtcaatactcataaagggtttaaaatggcacctgcacatagcgt

SEQ ID NO: 472131 - DNA, 538 bp, Homo sapiens
tctgctattttaacagtttataaaattttgtctttaaaaccttttgtgactctaaaaacaatttctgaggaaggaggctgctgagtgtcgggaaatgtttagtgagctgagggccagagaccttgcttcccaccccctcaattatacctccctggccaccaaggacaggcttgggtttaggaggaataatcttaatgctaacagcggcaattcactacgtaataaaaygtaacgccgcgttccctccagcctctgagaggcctctgtggaatccacactcaatcacctactgctaagggccgcctgagctgtgggtgagaagagacctcctagatgggccttcaggttcttactgatttatgacatgggcgagtggattaactgcgttgcttccattttgtcaacagtaaaaaggagataatggtccattcctcacaggttttaataggaatgagtcaatactcataaagggttttatgaggaatgagtcaatactcataaagggtttaaaatggcacctgcacatagcgtactttgg

SEQ ID NO: 472132 - DNA, 538 bp, Homo sapiens
tctgctattttaacagtttataaaattttgtctttaaaaccttttgtgactctaaaaacaatttctgaggaaggaggctgctgagtgtcgggaaatgtttagtgagctgagggccagagaccttgcttcccaccccctcaattatacctccctggccaccaaggacaggcttgggtttaggaggaataatcttaatgctaacagcggcaattcactacgtaataaaatgtaacgccgcgttccctccagcctctgagaggcctctgtggaatccacactcaatcacctactgctaagggccgcctgagctgtgggtgagaagagacctcctagatgggccttcaggttcttactgatttatgacatgggcgagtggattaactgcgttgcttccattttgtcaacagtaaaaaggagataatggtccattcctcacaggttttaakaggaatgagtcaatactcataaagggttttatgaggaatgagtcaatactcataaagggtttaaaatggcacctgcacatagcgtactttgg

SEQ ID NO: 472133 - DNA, 655 bp, Homo sapiens
cccctcaagattaaaagcagatctgttattaccataagacaaacccagtacattctgtatcatataggttgagttcaatgacacttaaccacttggagaaagaacttaacaaaytgcttcattttcaagaaactattcaccatttgaatttatctcagcaacatcttacacaacaaagaggtaaagcaacctgaatatcgttgtgcaaagaagggaatcagccaaacagggcatatatctgacttctggagcagtgttcaccagagaaagcttatggattcaggatcagtagcaggtaaccctgtcaccgtcgccccatcacattctggggcaatgcacagccatctcacaggatcagacaactgactctggaagccagatgtcccccagatgtgtggtgctgaggggtttttaagacttgtgtgacatggcagaatcttgtgtccagctctgtggggcggaatactaggcctttatataatcaggcatccaagccttaaaattacagctacaaggcataggaaggtcatagtaggattcatcacaccaagattctggtcaagaatgcactagcccctgccttggcatgatggggaagctgggttccaagttcagtagcttgttagtaccagaaacataaagtcataactgcttt

SEQ ID NO: 472134 - DNA, 661 bp, Homo sapiens
aatcagtcatcaaagtgaagaagagtcccttttactttcatgattcttaattagggggatcaatagaatagctgtcacattatagaagactttaaaatctgctaattaatcaaaagcaaagctcatcaaagcttggtgtgtactaattgtacttcattttctaccattagcagttacaaagctgaagagctttcctttttagttatactcttgtctaattaattcagcggtgccacagtcttgtttttatcataacacagttacacgtaatacccacaaccactaacacggaaaagacaccaggatcaggctctccagactaaattatgaygcctctcatcggaattggaccattatgtatccctgacctcagtttttctgcactgaggacagtggaggtcaattagaagtatataaaacactctgaaaaagaaccctgctacacatgagatcgtgaatttaaagtatcttagaatcaaatggctggaaagatggtttcaaaagccaaaggcactgtagcaatactgcattgaggcatgtcactaatccctagactttgtttttataaaatttaaagttattgttcctttcacttacattgtcttaacacctccttcccaaaaaaggcaatataatctacataacatctcaattttcaact

SEQ ID NO: 472135 - DNA, 626 bp, Homo sapiens
gtgaacatggcaacattgtaaacatgattatgagtccttggtaaaggctgggtgtgattgctcacccctataatcccagcacttttggaagcagaagcaagaggatcacttgaagccaggacttcaaggccagcctggacaacacagcaagaccccatctctacaaataatagtaataaatacttagcaacgaatgtagcatatagtgagtagtcaataaatgttttctgaggaaatggattaacgactatgtttgctcagagtatgcagggctgcaaaaygtaatcagcctaaatggtacgagctatctgatatgcatatactgtgtagtaccaatacatatctcctttatatttttttgtaaaatgacaggttatgttatttgggagcagtgactctcaagctaggtagcactttgtaatccatcacctgagaacctttagggaaaactacagatcaggcattggttttttaaaactccctaggtgattctactgtgcagagaagtcttatattgtagtgtactacccagattatacaccaaactggaacgttaaatcagaatctctagaagtagggcatgggcatcagcatgttcttaaattctctaggtcaatatctgtgtg

SEQ ID NO: 472136 - DNA, 643 bp, Homo sapiens
gctttctgcatggtaagcactgggcagcctggtgaacaaggcagrggtaaaataaggaaggtgatgattccttccatttatttagagtgttacgctaagaattcctctcctggagtgggatgcatttcagtgtggttttgcttcagtctttttttgttgctataacattagcttttttatttttaaggaattttgttatggcgagcattgcaccattggtcccatctcctgaaactttcactttgctttgactcactgataactactggcccgtctcaaggcaagatgaatccagtcccttgtcaagtgagagggatttactgacattatgcacaacaattctataaagatgcacttccttatgatcagggagaagctttcatcctttggagccttccttccagacccaacccttcttctgttctgggcctggccatttagagttgaaaagggatcaaatggggaaaagtcacttccacagggataacccctttatctggaggccgttaccacaatccaccacatctaattgcacttttcagcctggccttggtttctcattagagaatggcgaaactaggccactgaattccttcactccatttagaaagagctctcagcttgctgcccagtgtcacctctc

SEQ ID NO: 472137 - DNA, 643 bp, Homo sapiens
gctttctgcatggtaagcactgggcagcctggtgaacaaggcagaggtaaaataaggaaggtgatgattccttccatttatttagagtgttacgctaagaattcctctcctggagtgggatgcatttcagtgtggttttgcttcagtctttttttgttgctataacattagcttttttatttttaaggaattttgttatggcgagcattgcaccattggtcccatctcctgaaactttcactttgctttgactcactgataactactggcccgtctcaaggcaagatgaatccagtcccttgtcaagtgagagggatttactgacattatgcacaacaattctataaagatgcacttccttatgatcagggagaagctttcatcctttggagccttccttccagacccaacccttcttctgytctgggcctggccatttagagttgaaaagggatcaaatggggaaaagtcacttccacagggataacccctttatctggaggccgttaccacaatccaccacatctaattgcacttttcagcctggccttggtttctcattagagaatggcgaaactaggccactgaattccttcactccatttagaaagagctctcagcttgctgcccagtgtcacctctc

SEQ ID NO: 472138 - DNA, 603 bp, Homo sapiens
atccacttcacagtggtgctcaaaaagctgcccgtcactctcactccgctcaaatcgcagggagttgaggagcggacactcatagggggtgatgggcatctcctccttgaagacacagaccttgagcttggcaaagcgggccttccgctggaccgcacgcagccgggcgatctccacaatccgctccaagtggtctataaggatgaacacaacacctatcactagggtgaagaggcaggacagggcagcagagatgcacagagaaacagtcctgaagatggcaggatgcaggaggggaaagacagatttcccggggaagggactcagggggccaatgaagggsacaaacttaaacaagggtcacggttctccacagcaaagggaagccaatgggacgagggctgtccttctgaaatacaatttgctaactgtcataggccaggtaggcccaccttaacctgaatctccccagcgtgactgggaagggatgacactccatcgcatcttgagtaatctggatgaatgctgcccccggtgttctgatggagacctaaacactcacagatgccttgcagacctcctcccacatacccaccatcctgg

SEQ ID NO: 472139 - DNA, 641 bp, Homo sapiens
agagttctcttggttggctagaaacattaaggcatagtgaaatattaaaatatcccaaggcagtataggatttaaataatctgtaagagcaggggggcccggcgcggtggctcacgcctgtaatcccagcactttgggagacagaggtgggtggatcacttgaggtcaggagtttgagaccagcctggccaacatggtgaaacctcgtttctattaaaacaacaaaaattagctgggtgtggtggtgggtgcctgtaatcctagctacttgggaggctraggcaggggaatcacttgaaccttggaggcagagcttacaatgagccgagattgtaccactgcactccagcctgggcaacagagtgagactccgtctcaaaaaaaaaaaaaaaaaaaaaaaaaaaaaaaaaagagcaggggtctgcaaaacttttctttttttaagagacagggtctcagagtgcagtagtgcgatcatgctcactgcagccctgaattgtcaggctcaagctattctcccgccttagcctcccaagtagttggaactacagacatgcaccaccatggtcagctaattttttaattttttgtagggacagggtcttgctatgttgcctaggctagtctccaactgctcgctc

SEQ ID NO: 472140 - DNA, 641 bp, Homo sapiens
agagttctcttggttggctagaaacattaaggcatagtgaaatattaaaatatcccaaggcagtataggatttaaataatctgtaagagcaggggggcccggcgcggtggctcacgcctgtaatcccagcactttgggagacagaggtgggtggatcacttgaggtcaggagtttgagaccagcctggccaacatggtgaaacctcgtttctattaaaacaacaaaaattagctgggtgtggtggtgggtgcctgtaatcctagctacttgggaggctaaggcaggggaatcacttgaaccttggaggcagagcttacaatgagccgagattgtaccactgcactccagcctgggcaacagagtgagactccgtctcaaaaaaaaaaaaaaaaaaaaaaaaaaaaaaaaaagagcaggggtctgcaaaacttttctttttttaagagacagggtctcagagtgcagtagtgcgatcatgctcactgcagccctgaattgtcrggctcaagctattctcccgccttagcctcccaagtagttggaactacagacatgcaccaccatggtcagctaattttttaattttttgtagggacagggtcttgctatgttgcctaggctagtctccaactgctcgctc

SEQ ID NO: 472141 - DNA, 577 bp, Homo sapiens
gacatagagtttctggtctcctctgacaacttctttcttttcaccattaagaaaaactccaaataatttcaatttgcagctcattagcaccctatgcacagggagtgttgaaagagtttttctttttcctcttgatgaaagaagtccctggaactcaggacgccctcctcagaattctctcctttgttcttcccaccctcctccctcacctccctcatgccccaaagggagtggagtggaaagggaggaaagaaagacaaaaagcgaaacaggtgccccaggaagggcagcggaacccctcctcccacaaagccccttccctctgggcgtctctcccggcaagccccaagggtcccagcacgggaggaggacggcccctcggatctaatgagcggacctcacatccaaaaggggctgcgatgttggggtgcccctgccttggccagrgcagacactgccctctgctcacctgtgtgcaccagagaacatggtcgagggatgccgggttgataaggggagcccggccaaaccctcagtcacatggagtccgcctgccctgaacctcctcatttctcac

SEQ ID NO: 472142 - DNA, 437 bp, Homo sapiens
cccagttcctaacaggccacagactggtgtcagtccrtggcccagaggctgggggatgcctggtccagtgggaagacatgggtgggagatctgggatgcccatggacttttacagagtgtgagtttgggggcaaacacacttggagttggacctcagctctgctgctcactagccaatgatctcagctcacagtgcttaatgttctaagcctcagttttctcatctgtaaagtgggaatcatagcagcagttctcagggatttggtagggtaacccacgtaaacatccatcccagagcctgacgtgccatgagaggctccacagacactggatctcagcttctgccctggaaggaagccactgtccccagaaccacttccgggccagagtgaaggcagctggacagcaggaggccaggcatttgcaggggcggtgcc

SEQ ID NO: 472143 - DNA, 437 bp, Homo sapiens
cccagttcctaacaggccacagactggtgtcagtccgtggcccagaggctgggggatgcctggtccagtgggaagacatgggtgggagatctgggatgcccatggacttttacagagtgtgagtttgggggcaaacacacttggagttggacctcagctctgctgctcactagccaatgatctcagctcacagtgcttaatgttctaagcctcagttttctcatctgtaaagtgggaatcatagcagcagttctcagggatttggtagggtmacccacgtaaacatccatcccagagcctgacgtgccatgagaggctccacagacactggatctcagcttctgccctggaaggaagccactgtccccagaaccacttccgggccagagtgaaggcagctggacagcaggaggccaggcatttgcaggggcggtgcc

SEQ ID NO: 472144 - DNA, 437 bp, Homo sapiens
cccagttcctaacaggccacagactggtgtcagtccgtggcccagaggctgggggatgcctggtccagtgggaagacatgggtgggagatctgggatgcccatggacttttacagagtgtgagtttgggggcaaacacacttggagttggacctcagctctgctgctcactagccaatgatctcagctcacagtgcttaatgttctaagcctcagttttctcatctgtaaagtgggaatcatagcagcagttctcagggatttggtagggtaacccacgtaaacatccatcccagagcctgacgtgccatgagaggctccacagacactggatctcagcttctgccctggaaggaagccactgtccccagaaccacttccgggccagagtgaaggcagcyggacagcaggaggccaggcatttgcaggggcggtgcc

SEQ ID NO: 472145 - DNA, 588 bp, Homo sapiens
ccaccccagcatcacggcttctgtgccctccatgcctggaccacctcgcgcccgcttgtttacgctctgattcctccatggtcttgctgtacccagtaacctagcacgtagtagcacctcaggaaacatgtgttgaattaggacttcccataaaaacagaaagcatgaaggggatccagatggtgtcaagcattagctcttctaagctgcgtcagagtcgtgccccggagcacgtctcctgcagcagcatcgccccgtcacggcaccgcctcacagctcccaccacgacacatgcaacgtgcaaagaggacacagsgagctgcgacttccgtggctggtggcaaagaaatggggcagcactttcacagccatgccaggaacctaattcagccaacctggaaataactatcccagccacggccttgccagaagcccagctcagccaacctggagattgttatcccagccacagccttgccgagagcccaactcagccaacccagagatagctatcccagccacggacttgccagaagcccagctcagccaacctggagatcgttaccccagccatggccttgccaggaa

SEQ ID NO: 472146 - DNA, 533 bp, Homo sapiens
tttgaaatatcaaatctgtcttttatttatttattgcccctaccaccacattggtgttgaccttcaattacttgttgctaatcttcttgctcccagtatgatttcccattaccctggatctcattaatatggcttttattgttatttcttaacaacaagaacaacaacaacaatacatgctatattattttgtctctaatcagacagaacctgttaaaagatttatgatttttttcaacataactactttctsccagtcagacttgtgtctttattcctattccttgtgtattcctgaacacccttggttcatgtttcccgagaatctacaatcttagttcaaaaattcattttaccaataagcgcatcaaatctttttgtgagagacatacaggggaaaggaaaagtattttttttaagtcctagagaggctacccatacaaagcaaaatttcagcataactatccctggactctgggtcttataccctaggtctgaaatcctcctttatgccaacctattcttcaatatat

SEQ ID NO: 472147 - DNA, 675 bp, Homo sapiens
tgtttcaccatagacacattcctttyattttgctgtgtaaagcaattcaacccagccttctgactggtgctctagggcctataatttcatcggcaaatggcccatcaaagtgtttagttaaattttctccataacagaaattttcaagcaatgttttaaaatagtgactttttcttctttttaacaaataatgaagtgatacttttaaagttattcagctaacaggtataaagcagattatcctgcaaaaaaaaaaaaaagatgtatacattcctccaaccatactctgtgggaacagcagcaggactgccccgtgcatctttcagcaagcaggagatgcatccctctcttgtaccatttatattaggctttaattatctctctacataactgcagtccccaaatatgaaatgagttcctgatggcagaaaaagcttcatatcaatttttgtaaccccaggccctagtatgctctctggcacctaattatagcaatcagtgaatacttgatagggtcatcattcacttaacagatattccctggccacatatgagaaagtgacatttaagctgagatctgtaaaatgagtaagagtgagacatgtggaaaagaagatacgggtagttaaggctgagggagtggcacagaatgaatcaactagcaagttaatgaat

SEQ ID NO: 472148 - DNA, 675 bp, Homo sapiens
tgtttcaccatagacacattccttttattttgctgtgtaaagcaattcaacccagccttctgactggtgctctagggcctataatttcatcggcaaatggcccatcaaagtgtttagttaaattttctccataacagaaattttcaagcaatgttttaaaatagtgactttttcttctttttaacaaataatgaagtgatacttttaaagttattcagctaacaggtataaagcagattatcctgcaaaaaaaaaaaaaagatgtatacattcctccaaccatactctgtgggaacagcascaggactgccccgtgcatctttcagcaagcaggagatgcatccctctcttgtaccatttatattaggctttaattatctctctacataactgcagtccccaaatatgaaatgagttcctgatggcagaaaaagcttcatatcaatttttgtaaccccaggccctagtatgctctctggcacctaattatagcaatcagtgaatacttgatagggtcatcattcacttaacagatattccctggccacatatgagaaagtgacatttaagctgagatctgtaaaatgagtaagagtgagacatgtggaaaagaagatacgggtagttaaggctgagggagtggcacagaatgaatcaactagcaagttaatgaat

SEQ ID NO: 472149 - DNA, 675 bp, Homo sapiens
tgtttcaccatagacacattccttttattttgctgtgtaaagcaattcaacccagccttctgactggtgctctagggcctataatttcatcggcaaatggcccatcaaagtgtttagttaaattttctccataacagaaattttcaagcaatgttttaaaatagtgactttttcttctttttaacaaataatgaagtgatacttttaaagttattcagctaacaggtataaagcagattatcctgcaaaaaaaaaaaaaagatgtatacattcctccaaccatactctgtgggaacagcagcaggactgccccgtgcatctttcagcaagcaggagatgcatccctctcttgtaccatttatattaggctttaattatctctctacataactgcagtcccsaaatatgaaatgagttcctgatggcagaaaaagcttcatatcaatttttgtaaccccaggccctagtatgctctctggcacctaattatagcaatcagtgaatacttgatagggtcatcattcacttaacagatattccctggccacatatgagaaagtgacatttaagctgagatctgtaaaatgagtaagagtgagacatgtggaaaagaagatacgggtagttaaggctgagggagtggcacagaatgaatcaactagcaagttaatgaat

SEQ ID NO: 472150 - DNA, 524 bp, Homo sapiens
aatttcacaagtcaacatgtgtgtcctgtttgagctcacttgtcaagggttgttataaaacttggggtttggttctgcatcttcaagggactgtgggcaaaacaccagctcttggaataccaatttctttaactgtaatattggggctttggctaaatcactaaggtcccacctagctctaaaacttgaattttaaaaaatcctgcaattaggaaaaatctaacaarcataacttttcttgttcttcttttttacctatataaaaatgacattttaggagagtcataggaagcagcccagaactttttagctaatcaggaatactagaaagacaaatttatgttattcctttaagtaactcttaatcgagtaggctgtctctaactttactatgttggttctcttttttagatggatttttctgttttctttgtttataacaaatcttgatacaatatgtacctcataacaatgtttctgtcagtgatggaccacatataatgacagcttctaacacccagtga

SEQ ID NO: 472151 - DNA, 514 bp, Homo sapiens
gatatgttacttaagatctcaatacccttttccaaagacttctgggatgacttggaagtgatggttggatgaatccctttctgaagaagcttggcccaggaacctatgagagagccagcaatagtgccaactgatgcagtgctatctcctgcttctatatcttagcccccccagcattctgctgctggatgtgacacttgcatttgtttcagaatggtggcaccatcatttgtagtgatcacattgccttttccaccttraatcttttttcccattccttttggtccaaggcttgttttaatagcatcagcaacagctttggctgtgatgttgctgaaccagatctcagcctgcttgtcatatccctgacaggcacctttcacacagcagctggcagccctggtgggtgccctgctccatggtccaaacaacatctttacttgggcatgttaactaaaactttctccttatgtgttacatcttgttttgttttttgtttgttttgctgtcaggt

SEQ ID NO: 472152 - DNA, 587 bp, Homo sapiens
tgtgtttacatatttattgatgttattatgttattaatgtattcccactccatgaaactattagatacaaaagggccttgtcaattttgagggcttcgtgcccacctttgtatcccagatacatatcttagtgcctgttatatgaaagtaactmattacatatttggggaattaaaaaaaagaccatgaaagtgtaaaggcattgatattaacctgtatgcttgtaaatataaataaactgggactttaagaaactttaagaaaactttaagttttagttcaagtagttatggaaatctgagaggagcagactccaattaaactgggcattgacactatattcatatatacaaacaagtgaaaaaataatttcatgtttagtattaaagaaaaacaaatataacaaatataaagagtcaaaaatgaacatgccatgtataaatatatgagataacaaaatggggaaataaatatataacaatagtaaaattggataagcaaggtgtattagtctgttctcatgctgctaataaagacatacccaagactgggtaatttacgaaggaaagaggcttaattgactcaca

SEQ ID NO: 472153 - DNA, 588 bp, Homo sapiens
ctggcatgtcacttgctccctctcttgcaatgtgacacactggctcctgctttgctttttaccatgactgtacgcttcctggggccttcaccagaggcagatgctggccccatccttcttatacagcctgcagaaccatgagccaaataaacctgttttcttcataaattaccgagtctcaggtgttcctttacagccatgcacaatagactaatacactgcccttcctctcatgggagccaaattttgccttttttggtaagtctggtatagaggaaggtttcttgcttttccctgcargagtaggaaatctctaaggttacttacagaagatcctcagcccaggatcctttcttgcctctctgcttgtggtaacaatgtttggtttcaacttctctcgtctttagttcccttcccctggccacaaggaatcttcatgtgtgctcacagagagtgctgtccttcctcagtggcttaatgatttcttgtgtagcaaaaaactgtcttcagcaatttgtctttccttttgtggcatccccttctgtttttcagccctgtgccacaggaaagttttcttcagttccctgc

SEQ ID NO: 472154 - DNA, 613 bp, Homo sapiens
aggagtggaaaggacagtatcccaaatggttggaaattggcaatatgtagcagaatcagttgtggccataacttgatctacacatcagtcaactaatattacaacratgctgcttaacaataagaatgcaaaacttagcaatttaaagcaatgaacatttatttttctcatttatttatttatttttctcacagtatgtgcattggctgtggcttttacatctttaagctgttgattttctcagtttagcacaggctgtatattgagtttatatctgctctatgagtgcttcagttttcattaactaaaacctacccaaggcatattctcatggagaatcaccaatcacaggtgacaagctaaattatgtaattccatttaaagcttctgcttacataatctctgctcacattccattgatcaaagcaaatcacagggctagtcccaaaggaacagaggcagggaagtatactccgatccaaggaaaaagagagagggagagatgaacgaatgtttgctgaatacaatccagtttatcaaagtatgccctcttgttcacacatattcaccttcttccagcatgaaaaattctaggtctgggaaaggtcagctt

SEQ ID NO: 472155 - DNA, 613 bp, Homo sapiens
aggagtggaaaggacagtatcccaaatggttggaaattggcaatatgtagcagaatcagttgtggccataacttgatctacacatcagtcaactaatattacaacgatgctgcttaacaataagaatgcaaaacttagcaatttaaagcaatgaacatttatttttctcatttatttatttatttttctcacagtatgtgcattggctgtggcttttacatctttaagctgttgattttctcagtttagcacaggctgtatattgagtttatatctgctctatgagtgcttcagttttcattaactaaaacctacccaaggcatattctcatggagaatcaccaatcacaggtgacaagctaaattatgtaattccatttaaagcttctgcttacataatctctgctcacattccattgatcaaagcaaatcacagggctagtcccaaaggaacagaggcagggaagtatactccgatccaaggaaaaagagagagggagagatgaaygaatgtttgctgaatacaatccagtttatcaaagtatgccctcttgttcacacatattcaccttcttccagcatgaaaaattctaggtctgggaaaggtcagctt

SEQ ID NO: 472156 - DNA, 225 bp, Homo sapiens
taacttcttccttcaatttatacargctaaaaccaagattttgggatggtgaaatagaaaccaaattatgtggtttgattcccattcagaatattcaaactcaactatatctgcctggataaaatttaacattttgtcaaataatatggctgtatcctaacgtgcccttggtcccctgttcagacttgtgatcctagaatgttgcaatgcagtcttcatgaagca

SEQ ID NO: 472157 - DNA, 532 bp, Homo sapiens
ctgtgaaaacaggcttggaggttcaggaatctagtgcaccttaagcccctttatgccgaaaagggacttccagggctcttcaaccaccgctgaaaatggcttcaatctcacagcatcacaaggacctttcagtcaaaatggaacagaatatattatatgtctaaagatctcaaaatgctaccagatttctaactctcactaatatgctaaaaaaaaaaaaaacacaaaactgtctgatattgacagttggaatctctgaggagaccaagtaattcagtatctcttttctttgcccgagttctgaacaaattgacttaaaagagtagacagagtacaaaacatcacctttaatactggtaaagataatactgaatagagagagagagagagagagagagagagagagagwgtgtgtgtgtgtgtgtgtgtgtgtgtgtgtgtgtgtttcctgcaagtggtgggcttccttatgaggttcagtattattatgacacgtattttccccagcccagtcacagatagtgctaagagg

SEQ ID NO: 472158 - DNA, 637 bp, Homo sapiens
gatcctcccactcagcctcctgaatagctggaccacaggcacatctaccatgcccagccaatttttaaaaaatatttatagagaaaaggtctctgtctgttacctgggcttggttaatgttaattatttcctttttctgtttttaaacataaaatgaaactaaggaaacatagtacctttcaatagacagtgattacttcaataggaccccaaaataaactaattatgaaagacagagaaaatatgggctacattaaaatcaaggtattctcttcatttaaagggtatcatgaagaaagtaaaaaaggcaaagcaacagactaagagaagatgcatgcaaaacatatattcaatcaataactcacaccagaaatataaagaactataaatcaacagggaaaactcagaacacatgttggaaaaacgggcaaaagatgactactcttttttattttcacatccactctctgtacctgaggccaaaaagagaggtttgaggwagtgacaggtgtaagatgcagggatcaacattgtaacttttaaaaggagaaaatatattttctgttctgagaaaagaggagctcttttctctgctcctctctgctcttctacaaagtaaaaggcgcaggtcattgtg

SEQ ID NO: 472159 - DNA, 616 bp, Homo sapiens
caaattaaatacagaatcttctgtgctcaatgagctttttatctttgcttttgtttctagcagatggcacaatcaagaaggaaaagaacaataagctttacagcttgtaatagttactcagctattcaaaaaattagcatgttggactayaaaaaattgcatgttatgagaatttaggttaaggtaaagcaatatagttgtagctattgaaatctattactttattaattcaaatgtaaattatagcaccatttttactggcagctgggaaaattgctcagggtttgtttacgtaagagagagtttctcagaaaatgatttttatatactaaagactttaccccacctgagaggtctttattaaacattatctttttttaaagtaagcataattatctcagatctattacttcatatgacttttgaagctcctgccaaaaagaaagaaatatgcatcataagaatctgaatgttttgtagttaatttcccactacattctcttaggaagggaataagtctgtagacatctggcttttgaaatcatcacaacaaaataacatgctttcttggcttatctcttaattaatagcatcttgcctttattgcagaccagtt

SEQ ID NO: 472160 - DNA, 590 bp, Homo sapiens
atagtgggccaatgccttacctggagactctctgcccttaagtcatctcatcaaacatgcccaccttcattgcaaatatacctacaactgatctgacactggtaagcacagggaagcagcaggtccctagggagctatgagacacctggagatctaaccctcagcatgggccacccataagggaggtggaatgcagcccattaaagtcccctgtggacaaaggaaatatgggtgcagtgccaatcactgaaagaggtaggaccaatgcccaggaacaggcatggagagggagtcacctctcccacctgacactgttgcagatgcagcagttgttcttccaaytggaggccagagtgtgcactctgagaaaggggttttccacattttgctgaaactccatccctgctgtaagtgaacctgtgccacttgggcttgcataaaggatagggcccaacctcctctccctacacaatatagcaacagcctggcaagggagaacagacacgtcatggagttactatggattgggggaagagactctgcctgagcccattttggtggtagccctcagaggagtatatcccacagcc

SEQ ID NO: 472161 - DNA, 304 bp, Homo sapiens
cccccagcaatgcaggtgctttcacttgagatcagcctgagagccagccaactcttacgcctaagtgccatgtacgggacttcagcctgaactgtaccacagaataaaaaacctgcyaccagaagggcttaatgttagtccatgagttattgtgttagcttacatgtctaatacattgttacaacaagcaacatctgagaaagccagtgaacagaagctattcccaacagaggaacccatacagagcattggacccctgaaagcacccagcaacaaagccaaatgatcacacacaacatacacc

SEQ ID NO: 472162 - DNA, 549 bp, Homo sapiens
ttggatgagtcatacaaatggacatgaaagttgtacaacatgatgttggaatattgtgagttactggtgccagaaccatccaagttaagtcttgaccaatggcagtatatggcagagaataggagctggataacttgcctcaaagaggagagatttgtttgcttttattagaggagcgtagaaaggaaattattcaaaactggcatgctaggagaatgccacctcttgtctagtagataatctattttgtctttctttggagatctgaacttcatgtggtcttggaggaatagtccattttggtgtgtagttcctcatgtcagtggaatatttatcatatgctaggctgggccartagtacaatatgccccataggttgtgattggactgaagaatagttttgtaacccaagctatttcaactagaatccttttgcattgtagatgcactcctcaagaggaggataaagatgatgtgattctgatgttagcagcagccatattgcccattgcctagaagactgcaaaagaatcttgagaaaattaattc

SEQ ID NO: 472163 - DNA, 606 bp, Homo sapiens
tactgattccacaatgataagcttactgacttttgatttaatgtgtgtgtatgtgtctttggatacacaggtataaaaaactattcgtttatgaataacaaatttggaacaaaaaactagaaggtaggcaaaaagagcagataagtgatggacagatctaatctatatatgttcttaatgacatttattcttaatgaagactctgaatcagcaagaaaatttagataatatccactaactactgcttaataagtgggagatgtaatttcttttagaaagaagtccattaaaaattgtgtatatgtttttaaaaagttgttggtattttaagtggtaggctttattttttggcaaaattcactgacatggaacacctcatgcttccataaggctacataaaatgtttttataatacaggtyatgggaaacataatactaaattatgcatattatacggtaaagactatataaatacctaccttgatataatttgctctcagaacaggcctttctggacttgaacacttgtgaatagttgaggctgtaagtctggtgagggtgtgagaaaacaggataattctggctcccttagccccatttttatag

SEQ ID NO: 472164 - DNA, 597 bp, Homo sapiens
ttaaatcaaacaaataattgttgttttacttacttggctaatctgaacccataaatcaagcatggttttatgggtgaatgtgcagaaggtggacagagtcagacaggatggcacatgtttttgagtttattttctggccaactgtttttcagacttcaggataagtccttaagtcatggatatctatgtcatggatacattgtgagactttgaaagaaaaacaacataacactttcaggtgaaaggtgtgagccgttgaggcattaataagaaaagtgagatgaatattgaaagtactaytgtcaaaatcctgcctagaaacatcggaatgaatttctctgtctttgtacaaagctatctgtgctatattgtttcttcctctcttttcccttccaccccttcttgttttcttccccttctccttctccctttgcttcctcctactcttgtcctttctcttactctttctgcaccttcttttctttttccttttctttcttcttgtctctatgtctattttatattctctcctcctgccatcttttattcctagggttttatttttaagaagttggcaatggtgatggcaagtcagtg

SEQ ID NO: 472165 - DNA, 195 bp, Homo sapiens
gtggggagagaagagagatcaagagagcaaggagaaaatgttaaccagttagtctagcaaaggttatttgagtacttattctwctattcctttaggctttctgtggattttaaaatactcaaaatgttggaaacattttaatgtttaacaattattgcatttcaaataagaaaaaggacacattagtcaattaat

SEQ ID NO: 472166 - DNA, 610 bp, Homo sapiens
attcccaaggaatctccataaacaggcaccaaaattgtccactgttaaaatgaatgatgagaagctgtgtgttcttgaaaagcatctacatatgaaacataatgcacttcctttacccttctgtgaaaaaaatctacttcaatatatgaagcatggtcagaaaacagtttcagaatactttaaaaaaaaaaaagaaaaaagaaaaaaaccagagtttcaggaataaataagaatttagggctggcaggtagggagcctatccactgaaaaattaactaaaaagagaagtaagatttccacagaatactgaaaagtaatcatcgtttattttcagtttttcctccccaagatggacatatggctatagaggcacaaaaatgtcttaccattctaatatttaaattgtcasacttacttaagtcacacttatttaagtcaagataccttgccatagttgacttaaaccaaattgtgaagcataagacctccatttctttatcttcccccagaccaagacctgaaaagttacaagaggtggctcaggactcagtttatagtcatttctagaaacatctgcattttaaaaagagcaaaccaggacatggccttg

SEQ ID NO: 472167 - DNA, 624 bp, Homo sapiens
agaaaaagacaagatcatttcatgccccaaaatgatctgagcagaggtgcaaaggtgaggaagcctccagcaagttacaggaacagggagtcaaccactgtggcttgagcaatgtagccacatggagctgccttasggagagagcctgaaaagaggctggactcacagcacagaggccctcccttaaaagccaggctactgagtatatctttcagcccagaagcggtgtggagtcactaaagtttttaagcaggagagtaaaatgatgaaagctgaattttagaaacaatatgagtccctgtacacaccaggcacgtaatcaatgaggtagtctgaacatacagattttaactgccaggaaagacgcatcttgtgacctaaaacttacagaaaaaccactcccctagtaaaatccatctcacaacaactcactttatccttttaatttaattaagtgcaaagaaagaaaaggaaacaaggaatgaggctcagacacactaacattgtctctaatgtctctaagactctcatgtccttcctaaatcaaaatacatattccacagtaagctaaaagatataaaagcattaaatatttactcttcccatttgctattatttttcgct

SEQ ID NO: 472168 - DNA, 630 bp, Homo sapiens
actcataggattaaatagatgaagggactcagaatagtgtctcgttcatagttaagtgctcaagattctagttattactatagtccaattagaaatttttgaaaagaagtcttaagaaactgtcccaaatgaaacagaatggttgtctgtagggaaaagaaagagagatcagactgttactatgtctatgtagaaaggaaagacataagagactccattttgaaaaagacctgtactttaaacaattgctttgctgagatgttgttaatttgtagctttgccccagccactttgacccaacctggagctcacaaaaacatgcgttgtataaaatcaaggtttaagggacctagggctgtgcaggagtgccttgttaacaaaacgtttacaagcagtatacttggtaaaagtcatcgccattctctagtctcaataaaccaggggcacaatgcactgtggaaagccacagggacctctgcccttgaaagcggggtattgtccaaggtttgtccccatatgataccctgaaatatggcctcgtgggatgagaaagasctgaccatcccccagcctgacacccgtaaagggtctgtactgaggtggattagtaaaagaggaaggcctcttgca

SEQ ID NO: 472169 - DNA, 640 bp, Homo sapiens
ggcatacacatagcaacagagataaacatagatataatagatctagatataggaaatatggagagtaatgttttctttctccccagccaacaggaaagaattctgcatgggagtcagaacatttgtattaaagacctgattttactgggcaacagagcgagaccttgtctctacaaaaaataaacaaaactaaccaggcacagtggtgtgcacctgtagtcccagctacttgggaggctgaggtaggaggatcgcctgaaccctggaagtcaagtgtttctttctttcagcatgtcattaccaatygcacaggaccaaggaaaataaagccatgtatgtagggaaatatattatttttttgaactttagtcaaatggaacgttttgttttgggatggtaaacacatcttttgccttagagtatagataaaaggtctttgggttatggtagataaggccgggctaacacggctgcttcaagtaaaaataaggatgtgcttcaacatgaatggatttccactttccctattgagggcttgagacagaaagcctttgggcccgttttgctcagagaaggaaggagatgagaaagtctgaaagagaggaccagcctcgctactgggcaggaggtcagaagcctt

SEQ ID NO: 472170 - DNA, 541 bp, Homo sapiens
gctgcctccttcaaatatctctggccatggttcccatgatgaggttgtgttatcatagggaacatcaatgaccaaacaaaaaaaaggacaaaagaagccgggtgcagtggctcacgcctgtaatcccagcactttgggaggccaagacgggcggatcatctgaggtcaggagctcgagaacagcctggccaacatggkgaaaccccatctctactaaaaatacaaaaattagccgggcatgctggtgcatgcctgtagtcccagttactcagcggttggggcaggagaatcacttgaacctgggaggcagaagttgcagtgagctgagattgcacgactgcactccagcgagggtgacagagcaagactccgtctaaaaaaaaaaaaaaaggaaaagacaaaaggaaacttggttgagtagacattatgttgaccaataaattagaaactctacattctaatctagggtgaaagaaactctaatttgaggttggcacagaaactgctatgttgccttctttctacttctgcttatgaagct

SEQ ID NO: 472171 - DNA, 538 bp, Homo sapiens
tccacctcccaaagtgctgggattacaggtgtgagccttgagaactttccttaatatcctttccctccaggtcatatggaccatgctctgtttttttctcagagaacatagcttttcagatcctgacctgatttctcatggtggatgtggttgccttgtgagaaaacacctgacagaaaagacggaagaagtgtttatagctgtctccaggacagcagcttaatttcaccttttcaggcaaactgccaggaactgtcctagtcagcagaattggtgcccaycccagtctcctctgacgcaaatggtaatgaaacgttgctgtcatttatcaacatcaggtatcagcgccctgcatgtttggtgctaagtcattggcacggattagatacaaattgtccccttgaataaaagcactttatactcagatgaaaactattgatttccaatctactacccgaaggactctatcatcaggccacattgggtaacttgcttcaattttgacttttggatttgggcctgagatttcattgtcagg

SEQ ID NO: 472172 - DNA, 590 bp, Homo sapiens
tgggttggagttaggaatgtattcccagaggattaaccatagtaaaaccccctgatttcacacgaggatgaagaraagagacagaggaagataaggagatctagtgtgaatctgacccaatttctcgcagagctgtttgagtaaagttagggatatgagacactaaaggctaatttaggtttaagggacaggaagagaagtataaacagaagaagatgccaagcatgaagcgtgagaacaggaacacgttaggcacagggtaagaggatctgttaggaagaagcctgtggaaacctggctcacttttattggtaactggctggtaaaagagtctcaagaatagaataagaggtgcctggaactctatctctttgtgtgtgtgtaacctcacaattgatgcaatctagcgactttttaagagatgtttcccaatgggctgccctacacattgaaacagaccctgagattgcactgtggctctcgtcagtgaaatgatttttccttctgcggaggggaaaaggtcttataaacttctcatgtgtttggctgtcagaatgcagataatctttccaagttgagtataatgggtt

SEQ ID NO: 472173 - DNA, 442 bp, Homo sapiens
gaggtcattcctgagttgcagtatgttgagagggtaatatttctgtcttctctaactccccatactcccttgtcttccactctccatttaggagttttttgtgagttatgtccttgttgcttttgcctctttttctttctagccttgattgtgccagaagacaatgtccctattcacacactctttctgcttttctgtgggcaggaacatggaaggggtgctgatggacgtggactgtgagagcgtctaccccattgtgtaggcctctaattgaggcctggcctctgctgtgggtgaatttctgtactggaagtgagtggggctccttttacgtttctttaacaccaccctctcggtttctctcccacatgtgctgctgccctacttaaggcctccccatctccgtggaagtctctytgctgtctcttttcctctctcagct

SEQ ID NO: 472174 - DNA, 636 bp, Homo sapiens
agctcagacaggacactggcatctggcatctggggatcagatatcccactgagaggggcatgcaagcaccagctccagtgcctgggctggcatctgccctgcccggtctccaaagccatgtgtcctgggctagcccamctggcacagggatttcctgcaggactccacgtggccaggggatcagtggtgggaaatgggagaagccaaactcaggctccattggttaattctcttaaataagtctaatttgactttatgtctgatttcaaaatactcttccagatccctttctcagtaactgctcatgtcaaaacctctgactgggcacagcagctcacacctataatcccagtatgttgggagcaccagacaggaggatttcttgaggccaggaattcaagaccagtctaggcaacatagggagactcctgctctataaaaaaaaattataaaaaaattacccaggcacggcggcaagcgcctatagtccagctactcaggagggtgaggtgggaggattgcttgagcacaggaggttgaggctgcagtgagccatgatcatgccactgccctccagcctgggtgacaaagcaaactttatctcaaaaataaacaaatctctagttacatttcaga

SEQ ID NO: 472175 - DNA, 636 bp, Homo sapiens
agctcagacaggacactggcatctggcatctggggatcagatatcccactgagaggggcatgcaagcaccagctccagtgcctgggctggcatctgccctgcccggtctccaaagccatgtgtcctgggctagcccacctggcacagggatttcctgcaggactccacgtggccaggggatcagtggtgggaaatgggagaagccaaactcaggctccattggttaattctcttaaataagtctaatttgactttatgtctgatttcaaaatactcttccagatccctttctcagtaactgctcatgtcaaaacctctgactgggcacagcagctcacacctrtaatcccagtatgttgggagcaccagacaggaggatttcttgaggccaggaattcaagaccagtctaggcaacatagggagactcctgctctataaaaaaaaattataaaaaaattacccaggcacggcggcaagcgcctatagtccagctactcaggagggtgaggtgggaggattgcttgagcacaggaggttgaggctgcagtgagccatgatcatgccactgccctccagcctgggtgacaaagcaaactttatctcaaaaataaacaaatctctagttacatttcaga

SEQ ID NO: 472176 - DNA, 646 bp, Homo sapiens
tttattgaggtatctatacatcaatagatttggaatttgtcaaggagaggaaccacatgttacacatattatattttatttatttttattttttattttcctgagatagagtctcactctgttgcccaggctggagtgcaatggtgagatcttggctcactgcaacctccatctccccagctcaaacaattctcgtgcctyggcctctgagtagctgggattacaggtgtgtgccatgacacctggctaatttttgtattttttagaagagacagggtttctccatgttggcccggctagtctcaaactcctgacctcaggtgatccacccatcttggcctaccaaagtgctgggattacaggcatgagccactgtgcctgccccatgtattatgttttaatttattcaaaaaccatttgagcgtttactatgagcagtgaatgagacagtcacagtccctgccctcagagagctatgtcttagcgagagtggtgaggtctccatttctaggagacacttaaggagatgtacttttctccattctattcctggggccatggatggtgctaggttcagggcagaccctcagtgaatacttgcagattgaatgaatgaataaagagattctcttcccagactcatcac

SEQ ID NO: 472177 - DNA, 646 bp, Homo sapiens
tttattgaggtatctatacatcaatagatttggaatttgtcaaggagaggaaccacatgttacacatattatattttatttatttttattttttattttcctgagatagagtctcactctgttgcccaggctggagtgcaatggtgagatcttggctcactgcaacctccatctccccagctcaaacaattctcgtgccttggcctctgagtagctgggattacaggtgtgtgccatgacacctggctaatttttgtattttttagaagagacagggtttctccatgttggcccggctagtctcaaactcctgacctcaggtgatccacccatcttggcctaccaaagtgctgggattacaggcatgagccactgtgcctgccccatgtattatgttttaatttattcaaaaaccatttgagcgtttactatgagcagtgaatgagacagtcacagtccctgccytcagagagctatgtcttagcgagagtggtgaggtctccatttctaggagacacttaaggagatgtacttttctccattctattcctggggccatggatggtgctaggttcagggcagaccctcagtgaatacttgcagattgaatgaatgaataaagagattctcttcccagactcatcac

SEQ ID NO: 472178 - DNA, 578 bp, Homo sapiens
ggcacgtcaggacctccccacacacccacgtgatgccacaggtcgggggatgtgccggactagggagccctcctattgccttcctggcccaggatagaagaggggaggtaagtctggggacttcgaagccgggccccccaccctggctgaagtcagcttgacctaggtcttgaccctcatccagcaagggacccgacagacccaagggtccctagaatgtagggaggggytgggggtcactccagcccgggcctcccagaacaccaggcccgtgtgggtggcaccctgagttcagggaatcctaagggtatccttccagagacggcgtttccagggggaggactgcccacccttccagatccccggccccggctgtgactgccctgtttcacccctgctgtgtcccgtcacccgtctgtccactaactgtaccacaccagccattaaaagatgaaggcagacggctgcaccgccgcctgcaagcagagtttgtgcatggacgggagctgggactgccatctcgggatcccggtggaacttgggctgccccggataagccggtcctcagtcttcccatc

SEQ ID NO: 472179 - DNA, 586 bp, Homo sapiens
tattctaacaacatgtccactttgcaggggaagccaccctcccatctttctcagtccacgaataaaagggaggtgacctcactccttagccccagggatgagaatctgacccaggcccggtcgatcagactcacggcggtaggatcaatgaaaaccatgtggcccaagtcagttcacactagaacttgtgtgggaaaaccgggactgagaaatcgtacaatggtaagatttcttaagatggtaaaatacaatctccaaggagctagtgtgaagccagcacagatgacagcactgctgacagatactcagagctggagtcctgatgacatcgtttaaatggcacctggatccaaccatgcctgaaggccatacagttttcagttatgtgagcccacaygtctttattcttaagcagttagagttgggttttagtagccaaacaagtccatactgagatgttagatggcaggggagagttggggaggaggtatctcacctcggaccacggtgcctgggtagagacagcggtactgctggctccagtaggctgcaatcctggtcccttgtggcaagaagcgagtggcag

SEQ ID NO: 472180 - DNA, 586 bp, Homo sapiens
tattctaacaacatgtccactttgcaggggaagccaccctcccatctttctcagtccacgaataaaagggaggtgacctcactccttagccccagggatgagaatctgacccaggcccggtcgatcagactcacggcggtaggatcaatgaaaaccatgtggcccaagtcagttcacactagaacttgtgtgggaaaaccgggactgagaaatcgtacaatggtaagatttcttaagatggtaaaatacaatctccaaggagctagtgtgaagccagcacagatgacagcactgctgacagatactcagagctggagtcctgatgacatcgtttaaatggcacctggatccaaccatgcctgaaggccatacagttttcagttatgtgagcccacacgtctttattcttaagcagttagagttgggttttagtagccaaacaagtccatactgagatgttagatggcaggggagagttggggaggaggtatctcacctcggaccacrgtgcctgggtagagacagcggtactgctggctccagtaggctgcaatcctggtcccttgtggcaagaagcgagtggcag

SEQ ID NO: 472181 - DNA, 482 bp, Homo sapiens
cagtgagccgagatcgtgccactgcactccagcctgggcgacagagtgagactctgtgtcaaaaaacaaacaaacaacaacaacaacaaaaacaaatggtcaaggccaggagaggtagaaaagtaataaataaagataataatggtaaaatgttaccaagacaacaacagaagtcacagtgtccatatccaaaatgaaagtcaaagcaaagagcattaaaagaaacaaaaaatggcatgttctagggaaaaagaatatacagtttaatccccattttggggggggagactatatatatgtatgtgtgtttgtgtgtgtrtgtgtgtgtctgtgtgttttattttcttgttgctgctgaactctttaatgcaagtcatccttctggaatcagaggcatcttaggcgctgaaggaatgttagtggcgctgtccccttatctctgggatctgtcattaagcagatagctgcagctcctggtacat

SEQ ID NO: 472182 - DNA, 395 bp, Homo sapiens
aatgtgttttttttttataattttatagctatttttcagttttaaaaagtttatatatwtttatatatatttatctttatatatataattaaaaagttgactccatttaaaggcttatgatacaggggcagggcgagtctcttggtacaataaaactgtacaggttaagaagtgccacctccctcctgggtggggaggggccgggcgtggccgggcgagggtttcagcaccattggggttttctgtagtgtgagggtttggaccagggtgggcctgtgccgggccctctccacctggtgcctttgataccccgggctgcaaccccaccctgctgtgttccccaagtctaggccatcctgagagggtgggggcaaggcccctggcacagtcagtag

SEQ ID NO: 472183 - DNA, 395 bp, Homo sapiens
aatgtgttttttttttataattttatagctatttttcagttttaaaaagtttatatatatwtatatatatttatctttatatatataattaaaaagttgactccatttaaaggcttatgatacaggggcagggcgagtctcttggtacaataaaactgtacaggttaagaagtgccacctccctcctgggtggggaggggccgggcgtggccgggcgagggtttcagcaccattggggttttctgtagtgtgagggtttggaccagggtgggcctgtgccgggccctctccacctggtgcctttgataccccgggctgcaaccccaccctgctgtgttccccaagtctaggccatcctgagagggtgggggcaaggcccctggcacagtcagtag

SEQ ID NO: 472184 - DNA, 650 bp, Homo sapiens
acaggtgtctgtgccagcccagagcccagaccctaggaccaagcagatggtcacagagcactctctcttctgtgcaaggccaagccaccaccgggtaccaggctccatgtgggggcactcccaaatgaccacccatccttccatcagccctgggtgggcttttgccattttacaagaaatgggaggctcacagaggttgagaaatgtgatcaaagacacacagcatagccaggggttgaatccaggactgctgggacaccagggragtgacagttttcagcagagcacacgtgtgtgtgtctattgttgtgagtgtctgtgtgagcctggcagtggccacaggtgtcagagccgactcctcccagctccaaagacgactgtgtgccctgtccccaactctgacctcataatgatagctggaatccggtgggaatattgacaccatggaaattagcaactgctacaagtcagaacgctgggtgtgttaaatactgaccagtccagcactgactgacaagtgtgtgcatctacgtgagattgagtgtgtgtctttgtatgtgtgtgtctgggtctgtccatctgtgcggtgcctttatctcctgctttgctcatctgtctatccctatctgaatctgtgtgcacgcctctgt

SEQ ID NO: 472185 - DNA, 593 bp, Homo sapiens
aatatggtgaaagcccatctctacaaaccccacaacaattagccgcgtgtggtggcatggacctgtggtcccagatactcgggaggctgaggtgggaggatcacttgagtccaggagttcgaggctgcagtgagctattatggtaccactgcattccagcctgggaaacagagcaagaccctgcctcaaggcaaaaaaaaaaaaaaaaaaaaggatgctgtaggagttaggaccagagagatgttgtgctgttttaggtgaactttcgtgttactgatgatgaagtagagtatcyaagagtgactctgcacacccgagaaataccctgagtgtgtcccgtctcctggcagctcagtaccctttctgctccaccccagggtctacgtggtcatcccggggccaccacgttttatttgatcataaagttttttggtggctctcgcctctctgagacctcaacagaaaacagcagattgagatcagggtaattcaaggagggttatttacaaagggatggttcacacgagggaggacagggggtcaggaaccgcctggcactatggtgacctgggatagcagaaaaaagagctgtg

SEQ ID NO: 472186 - DNA, 650 bp, Homo sapiens
ctggcatcgggccaccccatcccatgcacagtgggaggccttggggtgggctccatgctaagggtgcccgggaagcccagagtgagcgtcagtttggttccttagaagcgcccctccccactgaatccccagtctgcatgggcctgggggcacccgggcccccatgcagcagcaggctggagggccggcctggccaagtgcttgcaaygtgctgggcaggaagggccggtcccggctgagactgccctgagggggacagcagggccataccctgatagctaagaggggcccctgtcctgggggcactgaggggttggaaggtggggctggaagcatgtgcacatgcatgcacacacgtgcatgcacacacgtgcatgcacacgggcacacacatgcacaaacatgctcacccgggcgtccacgtgcacacctggccccatgctcacgcctgcaggagcgctcgcatgcacacaacgcacatggtctccaaaccatggcagtgatggagaggggtccctggccgccctcggggcacaggtggccggtggccagcagagcccggcgggctcagcagagcacgggcatgccgtccgtggaaaagatcatgcctgtggtgggctcgtaggtgcgcgcgaggtagtacaggccct

SEQ ID NO: 472187 - DNA, 650 bp, Homo sapiens
tggcatcgggccaccccatcccatgcacagtgggaggccttggggtgggctccatgctaagggtgcccgggaagcccagagtgagcgtcagtttggttccttagaagcgcccctccccactgaatccccagtctgcatgggcctgggggcacccgggcccccatgcagcagcaggctggagggccggcctggccaagtgcttgcaatgtgctgggcaggaagggccggtcccggctgagactgccctgagggggacagcagggccataccctgawagctaagaggggcccctgtcctgggggcactgaggggttggaaggtggggctggaagcatgtgcacatgcatgcacacacgtgcatgcacacacgtgcatgcacacgggcacacacatgcacaaacatgctcacccgggcgtccacgtgcacacctggccccatgctcacgcctgcaggagcgctcgcatgcacacaacgcacatggtctccaaaccatggcagtgatggagaggggtccctggccgccctcggggcacaggtggccggtggccagcagagcccggcgggctcagcagagcacgggcatgccgtccgtggaaaagatcatgcctgtggtgggctcgtaggtgcgcgcgaggtagtacaggccctc

SEQ ID NO: 472188 - DNA, 621 bp, Homo sapiens
tgcttggcagggcctgggccgctgctctcagggacaggtgcccggcataggcggggaggcgctctctctcggtttacttttctacagcatacatttctggattggtgaaatattatctttgtctttagagggaacaataaagctattttcagcttgggaacaaatgcgtccaatggtaaataaacccccaatgccggtgctgggcaggcgggygctgtcgtcacagtggaggccgccagccttccttcccaggaagggcttggtctcagggtgggggcacagaaaggatgtacggagcccaggagcagaggggcaggaggggaaaggagacagggagcatcctggaatcacgaggctggacagacccgcaggttttacggatccagacactgaggcccagagagggtgagcaccctgccccaggacacacagcctgcaggtgcctggtcccacttcctggagctctgccgggcaccacggctccagggagtgctccggtgttttcccagcacttggcaacagatggctccaactctcacccacggacgccaaacattttccctggttaccctgctaatttgctcacagcctcctcttgtaaatagagagtacaaaggctcc

SEQ ID NO: 472189 - DNA, 621 bp, Homo sapiens
tgcttggcagggcctgggccgctgctctcagggacaggtgcccggcataggcggggaggcgctctctctcggtttacttttctacagcatacatttctggattggtgaaatattatctttgtctttagagggaacaataaagctattttcagcttgggaacaaatgcgtccaatggtaaataaacccccaatgccggtgctgggcaggcgggtgctgtcgtcacrgtggaggccgccagccttccttcccaggaagggcttggtctcagggtgggggcacagaaaggatgtacggagcccaggagcagaggggcaggaggggaaaggagacagggagcatcctggaatcacgaggctggacagacccgcaggttttacggatccagacactgaggcccagagagggtgagcaccctgccccaggacacacagcctgcaggtgcctggtcccacttcctggagctctgccgggcaccacggctccagggagtgctccggtgttttcccagcacttggcaacagatggctccaactctcacccacggacgccaaacattttccctggttaccctgctaatttgctcacagcctcctcttgtaaatagagagtacaaaggctcc

SEQ ID NO: 472190 - DNA, 620 bp, Homo sapiens
tgcttggcagggcctgggccgctgctctcagggacaggtgcccggcataggcggggaggcgctctctctcggtttacttttctacagcatacatttctggattggtgaaatattatctttgtctttagagggaacaataaagctattttcagcttgggaacaaatgcgtccaatggtaaataaacccccaatgccggtgctgggcaggcgggtgctgtcgtcacagtggaggccgccagccttccttcccaggaagggcttggtctcagggtgggggcacagaaaggatgtacggagcccaggagcagaggggcaggaggggaaaggagacagggagcatcctggaatcacgaggctggacagacccgcaggttttacggatccagacactgaggcccagagagggtgagcaccctgccccaggacacacagcctgcaggtgcctggtcccacttcctggagctctgccgggcaccacggctccagggagtgctccggtgttttcycagcacttggcaacagatggctccaactctcacccacggacgccaaacattttccctggttaccctgctaatttgctcacagcctcctcttgtaaatagagagtacaaaggctc

SEQ ID NO: 472191 - DNA, 577 bp, Homo sapiens
ctgctgcccacagtcccagaaagactttaccgcacctctccggcctggggtgtcctgggggatgaagctccaggaggccacctatggcttggggccccagtcccagaagcctggcctggggcgcacctctctggtcttcaggaagaggggcctggaatgagagtgggggcgtccagtggggcagcttaaccgggcagggctgaygggaccgcgggctggggagggaccggggcctggggaggaaccagaatctgcctggcctcactgtgtgacttgggtgagctcctctacctctctgagcctgggcttcccatctgtctgggatgtctcccctcctgtagtcactgtgaggttctgagcagaggacactcttagcccagagcctggcgcatagctggtgcggtgagcgccagcccctccctgttcctgcagagccctgccgttcagcgcacacaggctgccttgccctctccagagaggatcatggggcttaatttgttgattgaatttgcttgtttggcccagatggttgggtctcgttttctttttttctttcttttttttggagacggagtct

SEQ ID NO: 472192 - DNA, 577 bp, Homo sapiens
ctgctgcccacagtcccagaaagactttaccgcacctctccggcctggggtgtcctgggggatgaagctccaggaggccacctatggcttggggccccagtcccagaagcctggcctggggcgcacctctctggtcttcaggaagaggggcctggaatgagagtgggggcgtccagtggggcagcttaaccgggcagggctgatgggaccgcgggctggggagggaccggggcctggggaggraccagaatctgcctggcctcactgtgtgacttgggtgagctcctctacctctctgagcctgggcttcccatctgtctgggatgtctcccctcctgtagtcactgtgaggttctgagcagaggacactcttagcccagagcctggcgcatagctggtgcggtgagcgccagcccctccctgttcctgcagagccctgccgttcagcgcacacaggctgccttgccctctccagagaggatcatggggcttaatttgttgattgaatttgcttgtttggcccagatggttgggtctcgttttctttttttctttcttttttttggagacggagtct

SEQ ID NO: 472193 - DNA, 577 bp, Homo sapiens
ctgctgcccacagtcccagaaagactttaccgcacctctccggcctggggtgtcctgggggatgaagctccaggaggccacctatggcttggggccccagtcccagaagcctggcctggggcgcacctctctggtcttcaggaagaggggcctggaatgagagtgggggcgtccagtggggcagcttaaccgggcagggctgatgggaccgcgggctggggagggaccggggcctggggaggaaccagaatctgcctggcctcactgtgtgacttgggtgagctcctctacctctctgagcctgggcttcccatctgtctgggatgtctcccctcctgtagtcactgtgaggttctgagcagaggacactcttrgcccagagcctggcgcatagctggtgcggtgagcgccagcccctccctgttcctgcagagccctgccgttcagcgcacacaggctgccttgccctctccagagaggatcatggggcttaatttgttgattgaatttgcttgtttggcccagatggttgggtctcgttttctttttttctttcttttttttggagacggagtct

SEQ ID NO: 472194 - DNA, 577 bp, Homo sapiens
ctgctgcccacagtcccagaaagactttaccgcacctctccggcctggggtgtcctgggggatgaagctccaggaggccacctatggcttggggccccagtcccagaagcctggcctggggcgcacctctctggtcttcaggaagaggggcctggaatgagagtgggggcgtccagtggggcagcttaaccgggcagggctgatgggaccgcgggctggggagggaccggggcctggggaggaaccagaatctgcctggcctcactgtgtgacttgggtgagctcctctacctctctgagcctgggcttcccatctgtctgggatgtctcccctcctgtagtcactgtgaggttctgagcagaggacactcttagcccagagcctggcgcrtagctggtgcggtgagcgccagcccctccctgttcctgcagagccctgccgttcagcgcacacaggctgccttgccctctccagagaggatcatggggcttaatttgttgattgaatttgcttgtttggcccagatggttgggtctcgttttctttttttctttcttttttttggagacggagtct

SEQ ID NO: 472195 - DNA, 592 bp, Homo sapiens
cttgaacttctgggctcaagcgctgtccccacctctgcctcccaaagtactaggattacaggcatgagccaccatgccccgcatgcttaagtttctttagtgtatatatttaagagtgaaattgccgcttcagggtacaggtgagtctttaactttatcatcagatgcaaaattggctttcaaaaaggttaaatcgacttacgctcctatcatttttttttttttttgagacggagtctcgctttgtcgcccaggctggagtgcagtggcatgatctcagctcactgcaagttctccctcccgggttcatgccattctcctgcctcagcctcccgagtagctgggactacaggcccccaccaccacgcctggctaattttttttttttttaatgtttagtagagatggggtttcactgtgttagccaggatggtctcratctcctgacctggtgatccacccacctcggcctcccaaagtgctaggattacaggcgtgagccaccacgcctggcctacactcctgtcttgactttttaattttagtgaacttggtagggaggaatcacttgcaaattagttattttaatctg

SEQ ID NO: 472196 - DNA, 552 bp, Homo sapiens
cacttcttcaggggagtctcctgacaattaaatctcatgatcctcttcaccaagtttttattacctaatagtggattaattttaatgcagtagtcamctgttatctgtgggggatacataccaagacccccagtggatctgaaaccatggatagtagagaaccctatatatactacgttcctttgatctgataaccaagatgcttaccaagtgaaaacaggcaggtggcctgtacagtgtggatacactgaacaaagggatgatttatggtctgtatgggacagagcaagatgacaccagagttcatcaccgtgcttagagcagcataggatttaaaacttatgaattgtttttactggaattttccatttaatatatttgaactgcagttggccatgggtaactaaaactctgagaatgaaaccgtggataagggaggactactgtaatatgtatcaatttttgaagaagaggattaaattactgtgcatacagttattttcactgcaagaaagattttgcgaaggagtttcgttttggggcactgtttga

SEQ ID NO: 472197 - DNA, 356 bp, Homo sapiens
tgtgggtcaatcttggcaagtctcctygcagaacacactctcagtgctttcacccaccactgccacccggggccacgccagcaccatttcttgactcgattactgcaatagcttctcaaacaccaacaaccattcatcccagagatccatctcagattaggagtctcttccttcacaccctccagcagccacccagctcactttggttaaaaccaaaatccttaaataaccaacaggcacacatggtcaggttcttctgaccactcctcagccacgatggacttcgtcatgctcttgcacagaccaccctccccgaccaccccagggcctttgcacttattctgtattctcaaaat

SEQ ID NO: 472198 - DNA, 152 bp, Homo sapiens
cagctattgtcagtattccttcttttattccaaacccttcttattaaagatgaaaacttgraagccaaaataacttctctaggtcaggaaactcggctcttctgatgtagagactggaacctctgtactcagcctggctggtgccaacttgc

SEQ ID NO: 472199 - DNA, 152 bp, Homo sapiens
cagctattgtcagtattccttcttttattccaaacccttcttattaaagatgaaaacttgaaagccaaaataacttctctaggtcaggaaactcggctcttctgatrtagagactggaacctctgtactcagcctggctggtgccaacttgc

SEQ ID NO: 472200 - DNA, 504 bp, Homo sapiens
tggaaaaggaaagcctcggtttgtcttgaggttgtcagcagktgcaagacacgtaataaaatgcaatgtgttcctaattcattgcatatcctcagctttaaatttgggtagcaaaatgattactctagattcttcagccttgccttggcaagtatctgtacctaaaaagcagtttttctacctaatctctttttttgtttttgtttttcaatacactttaagcaaattgaagcttttgttcctggaggaaaagtggtttgatatgttcatctatcttttagtaaatttgggggcataacttttcctattctgaggaacttttctaagaagagtgcataaaagtttgttgttgtttttaaaggatgcaacattcagcctgtgtcatgagtttaattatacaatttaaaggacatatgtgcaatgcattttgcagatgtgtgccagatatatatgtgcagataatgggcaagtatatatgtgtgcatatatatatcgggagtacac

SEQ ID NO: 472201 - DNA, 504 bp, Homo sapiens
tggaaaaggaaagcctcggtttgtcttgaggttgtcagcagttgcaagacacgtaataaaatgcaatgtgttcctaattcattgcatatcctcagctttaaatttgggtagcaaaatgattactctagattcttcagccttgccttggcaagtatctgtacctaaaaagcagtttttctacctaatstctttttttgtttttgtttttcaatacactttaagcaaattgaagcttttgttcctggaggaaaagtggtttgatatgttcatctatcttttagtaaatttgggggcataacttttcctattctgaggaacttttctaagaagagtgcataaaagtttgttgttgtttttaaaggatgcaacattcagcctgtgtcatgagtttaattatacaatttaaaggacatatgtgcaatgcattttgcagatgtgtgccagatatatatgtgcagataatgggcaagtatatatgtgtgcatatatatatcgggagtacac

SEQ ID NO: 472202 - DNA, 529 bp, Homo sapiens
gcttgcagatgtggaaaaggaaagcctcggtttgtcttgaggttgtcagcagttgcaagacacgtaataaaatgcaatgtgttcctaattcattgcatatcctcagctttaaatttgggtagcaaaatgattactctagattcttcagccttgccttggcaagtatctgtacctaaaaagcagtttttctacctaatctcyttttttgtttttgtttttcaatacactttaagcaaattgaagcttttgttcctggaggaaaagtggtttgatatgttcatctatcttttagtaaatttgggggcataacttttcctattctgaggaacttttctaagaagagtgcataaaagtttgttgttgtttttaaaggatgcaacattcagcctgtgtcatgagtttaattatacaatttaaaggacatatgtgcaatgcattttgcagatgtgtgccagatatatatgtgcagataatgggcaagtatatatgtgtgcatatatatatcgggagtacactatataaacacaca

SEQ ID NO: 472203 - DNA, 504 bp, Homo sapiens
tggaaaaggaaagcctcggtttgtcttgaggttgtcagcagttgcaagacacgtaataaaatgcaatgtgttcctaattcattgcatatcctcagctttaaatttgggtagcaaaatgattactctagattcttcagccttgccttggcaagtatctgtacctaaaaagcagtttttctacctaatctctttttttgtttttgtttttcaatacacyttaagcaaattgaagcttttgttcctggaggaaaagtggtttgatatgttcatctatcttttagtaaatttgggggcataacttttcctattctgaggaacttttctaagaagagtgcataaaagtttgttgttgtttttaaaggatgcaacattcagcctgtgtcatgagtttaattatacaatttaaaggacatatgtgcaatgcattttgcagatgtgtgccagatatatatgtgcagataatgggcaagtatatatgtgtgcatatatatatcgggagtacac

SEQ ID NO: 472204 - DNA, 504 bp, Homo sapiens
tggaaaaggaaagcctcggtttgtcttgaggttgtcagcagttgcaagacacgtaataaaatgcaatgtgttcctaattcattgcatatcctcagctttaaatttgggtagcaaaatgattactctagattcttcagccttgccttggcaagtatctgtacctaaaaagcagtttttctacctaatctctttttttgtttttgtttttcaatacactttaagcaaattgaagcttttgttcctggaggaaaagtggtttgatatgttcatctatcttttagtaaatttgggggcataacttttccwattctgaggaacttttctaagaagagtgcataaaagtttgttgttgtttttaaaggatgcaacattcagcctgtgtcatgagtttaattatacaatttaaaggacatatgtgcaatgcattttgcagatgtgtgccagatatatatgtgcagataatgggcaagtatatatgtgtgcatatatatatcgggagtacac

SEQ ID NO: 472205 - DNA, 529 bp, Homo sapiens
gcttgcagatgtggaaaaggaaagcctcggtttgtcttgaggttgtcagcagttgcaagacacgtaataaaatgcaatgtgttcctaattcattgcatatcctcagctttaaatttgggtagcaaaatgattactctagattcttcagccttgccttggcaagtatctgtacctaaaaagcagtttttctacctaatctctttttttgtttttgtttttcaatacactttaagcaaattgaagcttttgttcctggaggaaaagtggtttgatatgttcatctatcttttagtaaatttgggggcataacttttcctattctgaggaacttttctaagaagagtgcataaaagtttgttgttgtttttaaaggatgcaacattcagcctgtgtcatgagtttaattatacaatttaaaggacatatgtgcaatgcattttgcagatgtgtgccrgatatatatgtgcagataatgggcaagtatatatgtgtgcatatatatatcgggagtacactatataaacacaca

SEQ ID NO: 472206 - DNA, 575 bp, Homo sapiens
actccagaggggggaacctgtgagacccgaccctgcccattccgccgcctccttccacatggaggtagggcgttggcttcatctcccaggactgcctaaggctccctgctccttccgggtttccatgcctgtttccacttagggtttcaaaataacagsctcggctgccactcacaaggctgactgcaggctcgcccccagccctggcattgccccaagcccagagagaggcctgcctgggcctgaaactgcatgctccctctgtttccctaactgcgggggagaatactggatgccggtgaacaagtctcctgggaagagacctccttcagtcccttccacctgcctcccttccccaagctttcaatccagtgtgtagtttttggtttaaccaaaatttgtaccacgctcatcttctgtttactccacagtagttaccctttactatgaagaaacatgagtttaaaaacactttaaaaaatagcaaatacaaaaccaagtaaaaccaggattgcaacagctaagcgaaacttgctgcatgggagaggccaggcaggtgggtctggggtggggag

SEQ ID NO: 472207 - DNA, 575 bp, Homo sapiens
actccagaggggggaacctgtgagacccgaccctgcccattccgccgcctccttccacatggaggtagggcgttggcttcatctcccaggactgcctaaggctccctgctccttccgggtttccatgcctgtttccacttagggtttcaaaataacagcctcggcygccactcacaaggctgactgcaggctcgcccccagccctggcattgccccaagcccagagagaggcctgcctgggcctgaaactgcatgctccctctgtttccctaactgcgggggagaatactggatgccggtgaacaagtctcctgggaagagacctccttcagtcccttccacctgcctcccttccccaagctttcaatccagtgtgtagtttttggtttaaccaaaatttgtaccacgctcatcttctgtttactccacagtagttaccctttactatgaagaaacatgagtttaaaaacactttaaaaaatagcaaatacaaaaccaagtaaaaccaggattgcaacagctaagcgaaacttgctgcatgggagaggccaggcaggtgggtctggggtggggag

SEQ ID NO: 472208 - DNA, 575 bp, Homo sapiens
actccagaggggggaacctgtgagacccgaccctgcccattccgccgcctccttccacatggaggtagggcgttggcttcatctcccaggactgcctaaggctccctgctccttccgggtttccatgcctgtttccacttagggtttcaaaataacagcctcggctgccackcacaaggctgactgcaggctcgcccccagccctggcattgccccaagcccagagagaggcctgcctgggcctgaaactgcatgctccctctgtttccctaactgcgggggagaatactggatgccggtgaacaagtctcctgggaagagacctccttcagtcccttccacctgcctcccttccccaagctttcaatccagtgtgtagtttttggtttaaccaaaatttgtaccacgctcatcttctgtttactccacagtagttaccctttactatgaagaaacatgagtttaaaaacactttaaaaaatagcaaatacaaaaccaagtaaaaccaggattgcaacagctaagcgaaacttgctgcatgggagaggccaggcaggtgggtctggggtggggag

SEQ ID NO: 472209 - DNA, 575 bp, Homo sapiens
actccagaggggggaacctgtgagacccgaccctgcccattccgccgcctccttccacatggaggtagggcgttggcttcatctcccaggactgcctaaggctccctgctccttccgggtttccatgcctgtttccacttagggtttcaaaataacagcctcggctgccactcacaaggctgactgcaggctcgcccccagccytggcattgccccaagcccagagagaggcctgcctgggcctgaaactgcatgctccctctgtttccctaactgcgggggagaatactggatgccggtgaacaagtctcctgggaagagacctccttcagtcccttccacctgcctcccttccccaagctttcaatccagtgtgtagtttttggtttaaccaaaatttgtaccacgctcatcttctgtttactccacagtagttaccctttactatgaagaaacatgagtttaaaaacactttaaaaaatagcaaatacaaaaccaagtaaaaccaggattgcaacagctaagcgaaacttgctgcatgggagaggccaggcaggtgggtctggggtggggag

SEQ ID NO: 472210 - DNA, 640 bp, Homo sapiens
tggaaaacttgacttcactaaaaattactgcagttacaaataaaggaagggggtatagtgtatttctaaaatgtgcatctggactaagatttagggagggttgagtgtgagcacaacttaattcacccccgaaagagaaggcttgtcggccagaaataacaaaataagaaaagcccagcaagttggcccccaggtccaagtactgcagattccagtgtatctttccatctcttcttccaacaacacaatgactgtraaacataaggagggaagaggaaagagtcttcctttacgtgacaaacccccttttcagatgttcagtgggacagtctgagtagcagcatcttctttcaagagcataatatagcggagcatgtgattgcatttccaacctataaatatccagctcctgaacactcatctttgagttctaaatggaataagccattattgccatattgtaaactgtaacagactggaatgttgttcagcaaatactactctccaccccatgccccctgcagggaagcatcttaacctgtcccctgacacctactgccaccctgactttgagactggtcatgtgacttacttggactaatgggatgtgcgtggacatgatgcaggcagaggccttgca

SEQ ID NO: 472211 - DNA, 536 bp, Homo sapiens
aaacaacagcaaagccaaagcaaaacaaaacaaaaagaaccttataaaagcgctgctgttgagcacactgasaacaacttggagcttgacatcgccacttgggggcgccctgggagctcagaaatgcaagctccgtccagccccgggagcccgggctgactcagggcagccccttccttctgactacacggtttctgtattcaactaaccacacgggaaatgagactgccttttagaagacttttgtttcctatgaaaaggaagactgctgcgctataaatgttttaaatgctctccgaaatattaaaatcaagtcagtaaatgaaccataactctgtcttctcatttattgaagagtcagatattccaggaggaaggggagggcagaaaatgaaactaatttccgtttatcatggaggatggacagatcagatagatgagtttgtgtgcaaataattcagtgattcagaagggattctggatcacttttcactgggccattggtgggtgggacacaacactggctgagagatagt

SEQ ID NO: 472212 - DNA, 536 bp, Homo sapiens
aaacaacagcaaagccaaagcaaaacaaaacaaaaagaaccttataaaagcgctgctgttgagcacactgagaacaacttggagcttgacmtcgccacttgggggcgccctgggagctcagaaatgcaagctccgtccagccccgggagcccgggctgactcagggcagccccttccttctgactacacggtttctgtattcaactaaccacacgggaaatgagactgccttttagaagacttttgtttcctatgaaaaggaagactgctgcgctataaatgttttaaatgctctccgaaatattaaaatcaagtcagtaaatgaaccataactctgtcttctcatttattgaagagtcagatattccaggaggaaggggagggcagaaaatgaaactaatttccgtttatcatggaggatggacagatcagatagatgagtttgtgtgcaaataattcagtgattcagaagggattctggatcacttttcactgggccattggtgggtgggacacaacactggctgagagatagt

SEQ ID NO: 472213 - DNA, 135 bp, Homo sapiens
aatttgtggattgatactatttgtggatygatagctgaactatttgccaggtttagtcgtttaattcaagtgataaatactgtatttgctcccataattccttctcgcccacacctcttataaagagatatttta

SEQ ID NO: 472214 - DNA, 298 bp, Homo sapiens
catcccctttcagtgcctttctcctgctttttacaccagcagccatttttcacccccttattgatctcaagatcattgagcaattagaatgtgccaggcactgtgttggcctctgtgggttctgcaataaaccaaacagatgttcatgatcarttccaaagaaagcaacctctaaggggacagcgtatttcaggtcatctacagcaggatagggggcctcgtggtggccttgtcttgatggatataggagtgggggttgcaaatcaccctgctgtggctaccacatataaccctgagt

SEQ ID NO: 472215 - DNA, 519 bp, Homo sapiens
gaaaagcccagacaagctgggttgtgagcttagaaagcttgtgaactgttccttcctttccatatatagggacacttgcctgttcctagactccacaaagagtcgtcttcaactcatacaggggaaaaataaaggaatgactgggagactagttgcagagtggatgaaatactaacaaatgggcaaaaaatggtctccggtgtccactctcatcccctttcagtgcctttctcctgctttttacaccagcagccatttttcacccccttattgatctcaagatcattgagcaattagaatgtgccaggcactgtgttggcctctgtgggttctgcaataaaccaaacagatgttcatgatcaatkccaaagaaagcaacctctaaggggacagcgtatttcaggtcatctacagcaggatagggggcctcgtggtggccttgtcttgatggatataggagtgggggttgcaaatcaccctgctgtggctaccacatataaccctgagtgcccagctggt

SEQ ID NO: 472216 - DNA, 655 bp, Homo sapiens
gctagtttttttcatagtatttctatctcaaaaatgcattttcccttatgaatgtgaataaatgtaaaaattgtctcagccaggcacggtggctcatgcctgtaatcccagcactttggaaggctgaggtgggcggatcacgaggtcaggagattgagacgatcctggctaacacagtgaaaccccatctctactaaaaatacaaaaaattagctgggcgtgttggctggcgcctgtagtcccagctcctcaggaggctgaggcaggagaatcacctgaacctgggaggcggaggttgcagtgagccaagattgtgccactgcactccagcctggatgacagagcaagactccatctcaaaaaaaaatcccatctgaaaaacaaggtagtagattatatgatccctgaggttattttcagytctaaaattctatttgatagtatatggccaattgaccttataaattggtaaattgtttagggtaagagcttttatcattctttccatttcagaatataaaaggaatgcaatgtttctcttaaactaaagaagaaaagaagactaaaactccatttgggggttaaaagtaaaaaatattatttttctacattaatatttataaatattaatcactaattacctgttttagaatct

SEQ ID NO: 472217 - DNA, 603 bp, Homo sapiens
tctcaagcgacattcttaaaagtggaacagctgggcccaaagatgtgtgtttccaaaatgctggtaagtgctaccctgtgtacaggcaggaccgactttccgtctcgagccatgcggggaggtgcccacttgccccactttgtagggctccccacagagctttgcttaccctgtctccactcactccaagtctttttcccccactcctacttccaggcagacatctcccctagaattgagtcaactgttttgacttcagacttgtgtttctttttaaagctttcactccataaattctgtggtatttccttcatgttccctatgtttaaaaactgcccgtgcagatgtctaagyggtgccttccttctctgctgaaggctcccagctgctctgtgctaagcctgacgtctctggcaaggactgaggcagaggctgaaacagaggctgaaagaggtgtcagcaggcacattctctttgccatgaaggatgctgggtaaagggacaatggagcttcctcagcaccatacaagtaccaagaaattctctaactttactcagcctcagagcaaccccaggaagtaagtgaccaatacttttcattcc

SEQ ID NO: 472218 - DNA, 607 bp, Homo sapiens
ctggagaagcaaacctggagaggctcccggctggggagagtctggagagtgtttagcggaagccctgataggagagagcgctgagaaaagcgaggacccagagagttgtgagctcccattcaagtgatggagtggcggccctcgrgacagtgtagacgcgaggaggagaagatcagggtggcgtggaagccagactccggcaggaacccagcgaccaccccgggggctgcatttccgcggcgtgcacggcagggcttcggtgcctctgacctcgtgtggctttccgaagctcctccactcacccgccctcctccggagcacggcgcgcgcccactccttcattcattcattccactcctacctccgcgagcgccaaccggctgtgagatgggcgagccactttgccagcgtggggctctctttcgggtcggttccctccccgccagcacacgcgcgaaccctcgcacctgggcacacacgcgcgcgcgtgcacacacacacacaaagttctgggggcccctctgcagaccggctcggctgcgctgggctcggagccgtgcgcccgccgggtccaggccggccctctcacccactacccggggcccgc

SEQ ID NO: 472219 - DNA, 584 bp, Homo sapiens
ctcccggctggggagagtctggagagtgtttagcggaagccctgataggagagagcgctgagaaaagcgaggacccagagagttgtgagctcccattcaagtgatggagtggcggccctcgggacagtgtagacgcgaggaggagaagatcagggtggcgtggaagccagactccggcaggaacccagcgaccaccccgggggctgcatttccgcggcgtgcacggcagggcttcggtgcctctgacctcgtgtggctttccgaagctcctccactcacccgccctcctccggagcacggcgcgcgcccactccttcattcattcattccactcctacctccgcgagcgccaaccggctgtgagatgggcgagccactttgccagcgtggggctctctttcgggtcggttccctccccgccagcacacgcgcgmaccctcgcacctgggcacacacgcgcgcgcgtgcacacacacacacaaagttctgggggcccctctgcagaccggctcggctgcgctgggctcggagccgtgcgcccgccgggtccaggccggccctctcacccactacccggggcccgc

SEQ ID NO: 472220 - DNA, 591 bp, Homo sapiens
gcaagggtgtgagggaatctttgggggctgtggaagctgttctaccttatgaaatggggctgggatggactgagkgactatgctgtgctctgtcatttgtccataagtactctctacatgctctaataaaacattttgttttactctatccaatgggcagaacctgtgatatgctgtcaagactatgggggaaggactctttagggaagaaaaccctattgtgactaaaggaaggaaccttctgtttggggcagagaggcagacttgtaagtcatgaccattggtccacagaactgtttcatcatgcaacggtgaaactctgtacccgttagacagtaactcctggtctcccttcccctcgcccccagcaaccgccattctactgtgtctttatgaatgtgactaccctaagtacctcatataagtggaatcatacagtatttgtccatttgtgactggcttatttcacttagcataatgtcttcaggttcatccgtgctgcactgtgtcagaatttccttccttttcaaggttgaataatataccatcgtatggatatgccacattttgtttatccattcatccactgat

SEQ ID NO: 472221 - DNA, 645 bp, Homo sapiens
ccagataggctccatttagctgtcctgaggcctgaggagattgtgactccagcatccctataatcaatttgtgatacatcagtactgacaatccctgtgggaatatctggtctagcaaaccctggagaaagagaccactgccccacaactgattgagctttcactcattcttagagattcatagtatttaggttgaaaaaaaaagctgctttaacaaaagactccctcatccccacttccaaaaatagaraaaaaattaaaaaaaataaaaacactaagctcaaaccagatgaaagtgtatttctctcacctgtaaccatctgaagtccgtgtcaccatgtgaatgctccatgcagtcattcagggaaccaggttccttctatcttatttctgccatcccccaggatagcacacttaaactcgagtgagcatcagaagtacctggaagtcttataaacacagattgctgggccccaccctcagagtttctgattcagcacatctgatgtagggactgagaatttgcatttctagttttcaagtggtgctgatgctggtgtttggcgggcagctacacttttgagaatcactgttcttaggtgttgctttcgtctttagggtcacagcacatactcattgttgcag

SEQ ID NO: 472222 - DNA, 645 bp, Homo sapiens
ccagataggctccatttagctgtcctgaggcctgaggagattgtgactccagcatccctataatcaatttgtgatacatcagtactgacaatccctgtgggaatatctggtctagcaaaccctggagaaagagaccactgccccacaactgattgagctttcactcattcttagagattcatagtatttaggttgaaaaaaaaagctgctttaacaaaagactccctcatccccacttccaaaaatagaaaaaaaattaaaaaaaataaaaacactaagctcaaaccagatgaaagtgtatttctctcacctgtaaccatctgaagtccgtgtcaccatgtgaatgctccatgcagtcattcagggaaccaggttccttctmtcttatttctgccatcccccaggatagcacacttaaactcgagtgagcatcagaagtacctggaagtcttataaacacagattgctgggccccaccctcagagtttctgattcagcacatctgatgtagggactgagaatttgcatttctagttttcaagtggtgctgatgctggtgtttggcgggcagctacacttttgagaatcactgttcttaggtgttgctttcgtctttagggtcacagcacatactcattgttgcag

SEQ ID NO: 472223 - DNA, 520 bp, Homo sapiens
gaaagagaccactgccccacaactgattgagctttcactcattcttagagattcatagtatttaggttgaaaaaaaaagctgctttaacaaaagactccctcatccccacttccaaaaatagaaaaaaaattaaaaaaaataaaaacactaagctcaaaccagatgaaagtgtatttctctcacctgtaaccatctgaagtccgtgtcaccatgtgaatgctccatgcagtcattcagggaaccaggttccttctatcttatttctgccatcccccaggatagcacacttaaactcgagtgagcatcagaagtacctggaagtcttataaacacagattgctgggccccaccctcagagtttctgattcagcacatctgatgtagggactgagaatttgcatttctagttttcaagtggtgctsatgctggtgtttggcgggcagctacacttttgagaatcactgttcttaggtgttgctttcgtctttagggtcacagcacatactcattgttgcagc

SEQ ID NO: 472224 - DNA, 602 bp, Homo sapiens
ttgaaaacaggcttgtcctggctgggcatggtggctcatgcctgyaatcccagcacttttggaggctgaggtgggagaactgcttgagcccaggagtttgagaccaggagaccagcctgggcaacacagcaagaccacacgtctctctaaaaaagaataaataaataaataaataagcagcttgtccttaacttgattcactattctctgctgcctttaattctgtttactttatttacttgcttaattaatctctttttttgactagtgcagaagtaaacttagccagggtccatatgtttggacaaaccatttataaagtgttgccattcatgaacagaacatgtgataaaattgcaaagaatttactacacaccacacacaaacccacccacccacacgcgtgcatgtgcacacatgcatgcccacagacacacaaatgagtacaagtaaaactcaagaaacctgaataagatcagtagattgtatcaatgtcaatatcctggttgtgatagtgtactattattctgatgttatactagatgttaccactgggggaacctgggtagggggtgcactggatctctctgtattatttctta

SEQ ID NO: 472225 - DNA, 567 bp, Homo sapiens
tgggcagttatcctgtacaaacctacagattcaaaattttgggattcttctcctgtggttcaacccttacctatcaatgggttttcattgcattgtctatggggtattaggtatgggaaaatgatgtatgtcttgacttaagtaataataactctgatctctgctccagaaactttgtgtttactttcaggttacaagaatgaatcaatatagagattaaaaacttaaatatttttaatgtaaaayacttcttaggagaatatacttaataatttctctgtacagaaatgattgtatgtatacttcaggtttaagctttaccttagtattcctaaaacttttcagattatatcagttttccttatagaggtgcttattgttagctgtttcatgttaaaggctactaatagtggaaaagtaaatgcttctgtaggatgtgattagctcactcgttgatagggttagacctgcactgaacacagtagattgcttaactgtcacttaaataatgatctcattgataaagggagaattagaagtggcttgttttaaagggtttccgagagt

SEQ ID NO: 472226 - DNA, 579 bp, Homo sapiens
atgaagtaaaatgaaaatagaagttcaaaagtgacactgaaagtggcagagattttaaagtgataagactgaaaaattgcagccaggtgagtcttcaggggttgacagtagattagtataaaacagctcatgtctcaagatacctaacagcatgaaactcaaaccctaggataaaggaaggaggaatggaaccaacaaatactgacatcagacacctggtgtcacctagtgttttgtggcatataacacaactaattctcatgaaaaaccattcattaggcagacaccatccatatttcgcaagtgcagaaacagagamccagagattaattaatttaccaaaagtcctagaggaagaatttgagtctaagccagtgcaaattaaactttaagaaatgtttaagggtgacaatggagatccttcagcttctgagaacaacactcagatgaagagggtcttccaattcatgagaggctgctaccccagtgatgattctcagctcaagttatatgtagtcataatgtacccagtcaaggaccggtagactaatacctcttaagcagatgacactgacgtca

SEQ ID NO: 472227 - DNA, 116 bp, Homo sapiens
acatgaaatatcgggggtgaatttcctcctatrgttgcttccagaggaggggtgatggattgttttattttgaatcagagtgagattgaaaggtaatggcttgagaatcaaacttg

SEQ ID NO: 472228 - DNA, 628 bp, Homo sapiens
ctgcactccagcctggatgacagagcaagaccctgtctcaaggaaaaaaaaawatatatatatatatatatataaaaatacatatgaaatatgtattatatatgtacatgaaagtttagtcaaattttcaaaaaactaaatttacttatttatttatttattgagactgagtctcgctctgtcacccaagctggagtacagtggcgtgatcttggctcactgcaacctccgcctaccgggttcaagcaattctcatgcctcagcctcccaagtagctgggattacaggcacgtgccaccacgcccggctaatttttgtatttttagtagagacggagtttcaccatgttggccaggttgctgtctaactcctgacctcaagtgatctgcccaccttggctcccaaagtgctaggattacaggcgtgagccactgcacccggccagaaaactagatttaaaattccacttcatttcaactattttgaccaaatatttgtttttttgtttgtttgtttgtttgtttgtttagtgagatgaatgattgcctttatttattttgagatagctttttgctctgttgcccaggctggagtgcagaggcttgattatacctcaccgcagctgcaa

SEQ ID NO: 472229 - DNA, 426 bp, Homo sapiens
gccggcgagactcagtgctttcttcactttgagcaccaaagtaagcgaggacagagatgaattacagcccctggaaaatgacrgcgtctgtgagtccatgtggacagcgatgagataaacaggagcagggctcttgttgacagtggaatgtcactcacagaccagcaagcatggagtggcactgactggaaaatcatctcgaaactgtcatgttaaacactggagacatcgcaaaaaccccaagggccgtgggaggcagccctcttcttcaaaaatctcagtgtaggctgggcgtggtggctcacacctgtaatcccagcactttgggaggctgaggcgggcagatcacttaagttcaagaccagcctggccaaaatggggcaaaaccctgtctgtagtaaaaatacaaaaattagccaggtatgg

SEQ ID NO: 472230 - DNA, 426 bp, Homo sapiens
gccggcgagactcagtgctttcttcactttgagcaccaaagtaagcgaggacagagatgaattacagcccctggaaaatgacagcgtctgtgagtccatgtggacagcgatgagataaacaggagcagggctcttgttgacagtggaatgtcactcacagaccagcaagcatggagtggcactgactggaaaatcatctcgaaactgtcatgttaaacactggagacatcgcaaaaaccccaagggccgtgggaggcagccctcttcttcaaaaatctcagtgtaggctgggcgtggtggctcacacctgtaatcccagcactttgggaggctgaggcgggcrgatcacttaagttcaagaccagcctggccaaaatggggcaaaaccctgtctgtagtaaaaatacaaaaattagccaggtatgg

SEQ ID NO: 472231 - DNA, 623 bp, Homo sapiens
tgtagtgggtatttgctggtggaagtgtgccaggcaygggtaatcaatagctacttaagccaagccgaacagaaactaagcccgaggaacactgagacccgaagaatctgtgctaattctctcgtcaccgtggtggaacgttccagtgatggtgcatggcgtggactcctcgcagccctcgagtgcctgtttggggcagtcagtggaggttgcctggtctcaactgggaaaggccaggctagatgcggggtccacgggaggacctgctctgtcgttcagagctaggctttgtgctctgctgtgtgtatggtagtgagtggaggagacacagtcctggcctcgtggagctgattcctagttcacttctctggggacaggaaacacaacgggaggacagggcatgagccggaacatcactgggaaagtcacttggaggagaggggaggccttgcctagtggaagaggcctttcgactgtccataagatggatgaacacatccacctggactagtctaacgatgtcctggggccaaaatcagggatttgggctgcggagaaatttgtgacaaaacagtttgatgctcagtcaaggtgagatactggcagtcactgacaactccacg

SEQ ID NO: 472232 - DNA, 588 bp, Homo sapiens
attatagttgattcaacctccttcttcacctctgtttttctgtgaaacatttgaaatccaggtgtgttcttttcaactscgagtctatgcttgttggaggttattgacattgttaaggtctaatttctaaatgtaaaaaacataacaaaacaaaatgctgtgaatggtaggtagtattgcattgattagctttttaaaaaattaaacttatttctatatcaaagatgatacaatgaaattatagaaaatttgtgaaaatagaaaaaatgataaaggaaatcaccaataatcactataacataaacgggtaacttttggtatattactttctaatatttcttctaaagaccttttaatatgtttgtaatagtaatatatgcatatgcattttcacttacccatccattataagtagtatccgtgttatttcataaactttatagctattacttaaaatcatttttaaggccacataatggtctatcaactagatgtaacacaatttaattaacaattttctgtatgctgtgattttttttaaatgccaagcttttactatttagtcacttcatcagagaaaactttcca

SEQ ID NO: 472233 - DNA, 588 bp, Homo sapiens
attatagttgattcaacctccttcttcacctctgtttttctgtgaaacatttgaaatccaggtgtgttcttttcaactgcgagtctatgcttgttggaggttattgacattgttaaggtctaatttctaaatgtaaaaaacataacaaaacaaaatgctgtgaatggtaggtagtattgcattgattagctttttaaaaaattaaacttatttctatatcaaagatgatacmatgaaattatagaaaatttgtgaaaatagaaaaaatgataaaggaaatcaccaataatcactataacataaacgggtaacttttggtatattactttctaatatttcttctaaagaccttttaatatgtttgtaatagtaatatatgcatatgcattttcacttacccatccattataagtagtatccgtgttatttcataaactttatagctattacttaaaatcatttttaaggccacataatggtctatcaactagatgtaacacaatttaattaacaattttctgtatgctgtgattttttttaaatgccaagcttttactatttagtcacttcatcagagaaaactttcca

SEQ ID NO: 472234 - DNA, 588 bp, Homo sapiens
attatagttgattcaacctccttcttcacctctgtttttctgtgaaacatttgaaatccaggtgtgttcttttcaactgcgagtctatgcttgttggaggttattgacattgttaaggtctaatttctaaatgtaaaaaacataacaaaacaaaatgctgtgaatggtaggtagtattgcattgattagctttttaaaaaattaaacttatttctatatcaaagatgatacaatgaaattatagaaaatttgtgaaaatagaaaaaatgataaaggaaatcaccaataatcactataacataaacgggtaacttttggtatattactttctaatatttcttctaaagaccttttaatatgtttgtaatagtaatatatgcatatgcattttcacttacccatccattataagtagtatccgtgttatttcataaactttatagctattacttaaaatcatttttaaggccacataatggtctatcaactagatgtarcacaatttaattaacaattttctgtatgctgtgattttttttaaatgccaagcttttactatttagtcacttcatcagagaaaactttcca

SEQ ID NO: 472235 - DNA, 683 bp, Homo sapiens
caaacactttctctcccctctcctggtggaacatgctaggacatcctatgaatatgtgctgggagtgttttatgagtgtgattttacctaaccaggaagtcaggaaggaggagaatgacctaatctgccatgttttctttatgagaacatcttcttggcaatgtgtggtttcaagaagtagctatagagttttaaagttgcccttacatcctgagtcaagaaatgctacctttcctgccattcatttcaatgaacctgtagtttattaagccagtatcattactttgaatttgatttgtgagcattacacaaaaagctgtatatgcctgtatttgataaacagaagcatctgactttgatttgcattactatakttggattcttcagtgattgcttgaaatggctcatgttgatccttatatatctttcttttcttccttccttccttcattcccttcctccttccttccttccttcttttttttctttcctatttttaaaaattattactttcagatgatgaaaagaagaaaaacaatgagagtgactagttaggaatcatctagaagctttaatatagaaacaaaaacaaaaataaatactcccatccatacacccattttttgcttgagaatctcaggggaactagttaaaacagttgctaggcagcctattcctcatct

SEQ ID NO: 472236 - DNA, 509 bp, Homo sapiens
ctgattttttttgtaatttttaattgagcttaatctctcctttaataatagcaaagaagatcttgaacattcagaatccctagacagtaaaatccttaacacagagagtgtgccggggacatggctacctatagttcagcagtgctgacaagctgaatgacactggataaatcatttaattttgatgtcccttagttaccttgccttgaaatgggaatgctaaaagtttcactacttcctttgcaaggtactgtgaatgtaaaatwgaataactagaaagctaaaatatatatgtaatttatgtatctgtaagtaatgtgtggaacttttaagccttgtatgggaataaaacaaatatacactgtactattctatgaacaaatctgttggccaacattctgatattgaatatttatacacgatataatgtcttcatttattttctggacagaatatatgagatttctcaacagaggatttcccgttctcttatttaagtattctcctcg

SEQ ID NO: 472237 - DNA, 630 bp, Homo sapiens
gagctgtgttattccatcccttgaatcaaaaatagcctcttgtctgtgtaagctggatatcattcctcagactggtttgcctaaggtaaggttaataatttctgcagagaggcgcacacttggttattcaaagcccatttgttagaaatgcttcctatttcagtgaatgattggtgccttgtcactggtgctccttgactccatagttataaagtttctaaaattcttggaccactatcatacaatccttctctcctggagtagcctttggaatttatttttcttcccaaagcagttcctgctatatagtctttcagtaacattccctgggacacttgttacatagacaatggtgccattttgaccttgatttcatcagactgagtaacaaagagtgattctcttgattttttttcagcatctttccacttcatttattctacacccttcattatccttcaaacgtatctttttcctctattttgactcttgcacaatcccgcattcctagagcaaaatagtcgtcttttcctccatatgtcttcctcaggacaattgagaggatttagttagagtatrcaatcccagcaactatagggcagctttagttgctccatgagtattttaagg

SEQ ID NO: 472238 - DNA, 624 bp, Homo sapiens
caacctttctgcatatcagcacaaacacctaatgaatgtattacaaatgttagtttcttagctctactaaatctraatcctttgaagtatctattttaacaggctctctggagtgatgatcctgatgtaactggcccctggagagacatttgggataatgtaagtttggtaactatttctttttttttttagtggtaatgaaatgtcattgagattttcttttatctttcttgttataagatgttaaatacactttgatgccaaaaaataaccagaattcttgatattctgcattcctgatgtttcatttcaattttgacaaaagaccatgagatctgcagagaaaaaaagaagagctatattttctataagcagtctgcagattggggagatacaaccttcaatgcaaactgaaaatgtgctctgaggagaggttgcagagttagagcttataaaggcacaaacagtagggcaagagaagggagttaggagagtgagaaatagaatgttttgactggatgagctttaagcccaaactcatcagtctttcttaattgactggtttcaggtgattaatttgttgacaggagatagtctgttggtgatcagttgggaaatatccag

SEQ ID NO: 472239 - DNA, 624 bp, Homo sapiens
caacctttctgcatatcagcacaaacacctaatgaatgtattacaaatgttagtttcttagctctactaaatctgaatcctttgaagtatctattttaacaggctctctggagtgatgatcctgatgtaactggcccctggagagacatttgggataatgtaagtttggtaactatttctttttttttttagtggtaatgaaatgtcattgagmttttcttttatctttcttgttataagatgttaaatacactttgatgccaaaaaataaccagaattcttgatattctgcattcctgatgtttcatttcaattttgacaaaagaccatgagatctgcagagaaaaaaagaagagctatattttctataagcagtctgcagattggggagatacaaccttcaatgcaaactgaaaatgtgctctgaggagaggttgcagagttagagcttataaaggcacaaacagtagggcaagagaagggagttaggagagtgagaaatagaatgttttgactggatgagctttaagcccaaactcatcagtctttcttaattgactggtttcaggtgattaatttgttgacaggagatagtctgttggtgatcagttgggaaatatccag

SEQ ID NO: 472240 - DNA, 459 bp, Homo sapiens
gtaactatttctttttttttttagtggtaatgaaatgtcattgagattttcttttatctttcttgttataagatgttaaatacactttgatgccaaaaaataaccagaattcttgatattctgcattcctgatgtttcrtttcaattttgacaaaagaccatgagatctgcagagaaaaaaagaagagctatattttctataagcagtctgcagattggggagatacaaccttcaatgcaaactgaaaatgtgctctgaggagaggttgcagagttagagcttataaaggcacaaacagtagggcaagagaagggagttaggagagtgagaaatagaatgttttgactggatgagctttaagcccaaactcatcagtctttcttaattgactggtttcaggtgattaatttgttgacaggagatagtctgttggtgatcagttgggaaatatccagctg

SEQ ID NO: 472241 - DNA, 624 bp, Homo sapiens
caacctttctgcatatcagcacaaacacctaatgaatgtattacaaatgttagtttcttagctctactaaatctgaatcctttgaagtatctattttaacaggctctctggagtgatgatcctgatgtaactggcccctggagagacatttgggataatgtaagtttggtaactatttctttttttttttagtggtaatgaaatgtcattgagattttcttttatctttcttgttataagatgttaaatacactttgatgccaaaaaataaccagaattcttgatattctgcattcctgatgtttcatttcaattttgacaaaagaccatgagatctgcagagaaaaaaagaagagctatattttctataagcagtctgcagattggggagatacaaccttcaatgcaaactgaaaatgtgctctgaggagaggttgcagagttagagcttataaaggcacaaacagtagggcaagagaagggagttaggagagtgagaaatagaatgttttgactggatgagctttaagcccaaactcatcagtctttcttaattgactggtttcaggygattaatttgttgacaggagatagtctgttggtgatcagttgggaaatatccag

SEQ ID NO: 472242 - DNA, 649 bp, Homo sapiens
cagtctatctcaagattgacaacaagaattagtttggcttcattgtgaaaaggtaggttcattgacacttttacatctttcagagaacacagagtgggtgaccattccctcacccagccatggccacctaattctgtttaacttggagcacctcggtgaggcatggggagtccatattatctgtcaactgggcgcatagttcaacgttgmacaaaagtgacagagcttgggtttataagtattttgtttacatgtaacatgatgagacaggcactaggtatattgttttttaatctcaaaattcaagctgaaagattaaacttgattattgttgatttatggaagtttggggtcatcttaagttctaaaaatttttgttttagaaaatttaacttatattttaataaattagtataaaattttgcatctagtttgttcaggtgatttctaacattttagtaaaaaatgtattaatcattaatgtattaatgatcttttaagagtctttggatcaagaacattgttaattagtgaattgctttcaattatgcgaaaatgagcagaaataaaatggattatatacagactatgttgcaagttaatatctggaagcctgattttatacctatctaatctatgcaaacaattt

SEQ ID NO: 472243 - DNA, 649 bp, Homo sapiens
cagtctatctcaagattgacaacaagaattagtttggcttcattgtgaaaaggtaggttcattgacacttttacatctttcagagaacacagagtgggtgaccattccctcacccagccatggccacctaattctgtttaacttggagcacctcggtgaggcatggggagtccatattatctgtcaactgggcgcatagttcaacgttgaacaaaagtgacagagcttgggtttataagtattttgtttacatgtaacatgatgagacaggcactaggtatattgttttttaatctcaaaattcaagctgaaagattaaacttgattattgttgatttatggaagtttggggtcatcttaagttctamaaatttttgttttagaaaatttaacttatattttaataaattagtataaaattttgcatctagtttgttcaggtgatttctaacattttagtaaaaaatgtattaatcattaatgtattaatgatcttttaagagtctttggatcaagaacattgttaattagtgaattgctttcaattatgcgaaaatgagcagaaataaaatggattatatacagactatgttgcaagttaatatctggaagcctgattttatacctatctaatctatgcaaacaattt

SEQ ID NO: 472244 - DNA, 649 bp, Homo sapiens
cagtctatctcaagattgacaacaagaattagtttggcttcattgtgaaaaggtaggttcattgacacttttacatctttcagagaacacagagtgggtgaccattccctcacccagccatggccacctaattctgtttaacttggagcacctcggtgaggcatggggagtccatattatctgtcaactgggcgcatagttcaacgttgaacaaaagtgacagagcttgggtttataagtattttgtttacatgtaacatgatgagacaggcactaggtatattgttttttaatctcaaaattcaagctgaaagattaaacttgattattgttgatttatggaagtttggggtcatcttaagttctaaaaatttttgttttagaaaatttaacttatattttaataaattagtataaaattwtgcatctagtttgttcaggtgatttctaacattttagtaaaaaatgtattaatcattaatgtattaatgatcttttaagagtctttggatcaagaacattgttaattagtgaattgctttcaattatgcgaaaatgagcagaaataaaatggattatatacagactatgttgcaagttaatatctggaagcctgattttatacctatctaatctatgcaaacaattt

SEQ ID NO: 472245 - DNA, 649 bp, Homo sapiens
cagtctatctcaagattgacaacaagaattagtttggcttcattgtgaaaaggtaggttcattgacacttttacatctttcagagaacacagagtgggtgaccattccctcacccagccatggccacctaattctgtttaacttggagcacctcggtgaggcatggggagtccatattatctgtcaactgggcgcatagttcaacgttgaacaaaagtgacagagcttgggtttataagtattttgtttacatgtaacatgatgagacaggcactaggtatattgttttttaatctcaaaattcaagctgaaagattaaacttgattattgttgatttatggaagtttggggtcatcttaagttctaaaaatttttgttttagaaaatttaacttatattttaataaattagtataaaattttgcatctagtttgttcaggtgatttctaacattttagtaaaaaatgtattaatcattaatgtattaatgatcttttaagaktctttggatcaagaacattgttaattagtgaattgctttcaattatgcgaaaatgagcagaaataaaatggattatatacagactatgttgcaagttaatatctggaagcctgattttatacctatctaatctatgcaaacaattt

SEQ ID NO: 472246 - DNA, 425 bp, Homo sapiens
aattctatctatccatatgcccagtgcccagggggcctaatactgcctcctttaaatatttccgtcatcatctcatgtccaygtagtattctttttgcctcccttcattgtggacactgcccttgaatgataccttgtgttttcaaatatataagagagaagggagagtacagtaggagctgaaaatagagagttctgaagtaataccttttaacttgctattaggactcttaactttactttgtgtggaataaaaagcattggaaagttttgagcagtggagaggtatgacaaaacattttagaagaatcagtatggctgccacactgagaatagatcatagcgtggtggtggccaaaacagagactaattagaggctattgccataacacaggtgacagatactggcttggagcaaagctgta

SEQ ID NO: 472247 - DNA, 425 bp, Homo sapiens
aattctatctatccatatgcccagtgcccagggggcctaatactgcctcctttaaatatttccgtcatcatctcatgtccatgtagtattctttttgcctcccttcattgtggacactgcccttgaatgataccttgtgttttcaaatatataagagagaagrgagagtacagtaggagctgaaaatagagagttctgaagtaataccttttaacttgctattaggactcttaactttactttgtgtggaataaaaagcattggaaagttttgagcagtggagaggtatgacaaaacattttagaagaatcagtatggctgccacactgagaatagatcatagcgtggtggtggccaaaacagagactaattagaggctattgccataacacaggtgacagatactggcttggagcaaagctgta

SEQ ID NO: 472248 - DNA, 425 bp, Homo sapiens
aattctatctatccatatgcccagtgcccagggggcctaatactgcctcctttaaatatttccgtcatcatctcatgtccatgtagtattctttttgcctcccttcattgtggacactgcccttgaatgataccttgtgttttcaaatatataagagagaagggagagtacagtaggrgctgaaaatagagagttctgaagtaataccttttaacttgctattaggactcttaactttactttgtgtggaataaaaagcattggaaagttttgagcagtggagaggtatgacaaaacattttagaagaatcagtatggctgccacactgagaatagatcatagcgtggtggtggccaaaacagagactaattagaggctattgccataacacaggtgacagatactggcttggagcaaagctgta

SEQ ID NO: 472249 - DNA, 425 bp, Homo sapiens
aattctatctatccatatgcccagtgcccagggggcctaatactgcctcctttaaatatttccgtcatcatctcatgtccatgtagtattctttttgcctcccttcattgtggacactgcccttgaatgataccttgtgttttcaaatatataagagagaagggagagtacagtaggagctgaaaatagagagttctgaagtaataccttttaacttgctattaggactcttaactttacwttgtgtggaataaaaagcattggaaagttttgagcagtggagaggtatgacaaaacattttagaagaatcagtatggctgccacactgagaatagatcatagcgtggtggtggccaaaacagagactaattagaggctattgccataacacaggtgacagatactggcttggagcaaagctgta

SEQ ID NO: 472250 - DNA, 639 bp, Homo sapiens
gcatgcagaaacaaaaatattttctctacagcttcactttgagcttttgctttatttttcatgaatttctgctatatactttattatttcttttattcttgtttacttggttttatctgtgtggtttttaagtttttaagttagatacttaccttgtttttggacttttatatgtatctatgcattgaagccataaaattcctaagttaagcttatgctatattccatggcactcttcaatgtaagtaaattttttgctgtcttgttaaatatttcaacactatttttawtaaagttatattgccatgttcagaagaaaaaaaatcgagagtcaaacaaagttacttttctttttattacaagtgctattaatatacataagaaattacaagttattacaagtgctattaatatacataagaaaaatataaccaacttcagccagtttctgatatgaattatacaaagtgacatgatcaagtgttaactactagttttaaatagctatggctattttgaaatacttaacgcttttcacaattgaaatacttattgatattttcgaagaatcataggcagttggaaaaaataacacagagatggttttataaatcttgcccagtttcttcctgataacat

SEQ ID NO: 472251 - DNA, 639 bp, Homo sapiens
gcatgcagaaacaaaaatattttctctacagcttcactttgagcttttgctttatttttcatgaatttctgctatatactttattatttcttttattcttgtttacttggttttatctgtgtggtttttaagtttttaagttagatacttaccttgtttttggacttttatatgtatctatgcattgaagccataaaattcctaagttaagcttatgctatattccatggcactcttcaatgtaagtaaattttttgctgtcttgttaaatatttcaacactatttttaataaagttatattgccatgttcagaagaaaaaaaatcgagagtcaaacaaagttacttttctttttattrcaagtgctattaatatacataagaaattacaagttattacaagtgctattaatatacataagaaaaatataaccaacttcagccagtttctgatatgaattatacaaagtgacatgatcaagtgttaactactagttttaaatagctatggctattttgaaatacttaacgcttttcacaattgaaatacttattgatattttcgaagaatcataggcagttggaaaaaataacacagagatggttttataaatcttgcccagtttcttcctgataacat

SEQ ID NO: 472252 - DNA, 639 bp, Homo sapiens
gcatgcagaaacaaaaatattttctctacagcttcactttgagcttttgctttatttttcatgaatttctgctatatactttattatttcttttattcttgtttacttggttttatctgtgtggtttttaagtttttaagttagatacttaccttgtttttggacttttatatgtatctatgcattgaagccataaaattcctaagttaagcttatgctatattccatggcactcttcaatgtaagtaaattttttgctgtcttgttaaatatttcaacactatttttaataaagttatattgccatgttcagaagaaaaaaaatcgagagtcaaacaaagttacttttctttttattacaagtgctattaatatacataagaaattacaagttattacaagtgctattaatatacataagaaaaatataaccamcttcagccagtttctgatatgaattatacaaagtgacatgatcaagtgttaactactagttttaaatagctatggctattttgaaatacttaacgcttttcacaattgaaatacttattgatattttcgaagaatcataggcagttggaaaaaataacacagagatggttttataaatcttgcccagtttcttcctgataacat

SEQ ID NO: 472253 - DNA, 496 bp, Homo sapiens
tcacaattctttgatgtgaaaccacatttctaattctgacccctytgctgagatcccatcatgcattttcaattgcatgtggatactttcatattcttgtctaaattccaacatgcccaaatccaaatatatactatttctcccccaaattcacaatttttacatgtgtgtgtctatagaactgaaattctttggagaagatgtgtttgatggttttcacactgctgataaatacatacccaagactggataatttataaagaaaaagaggtttaatggactcagagttccatgtggcttgggaggcctcacaatcatggtagaaggtgaaaggcacatcttaaatggtggcagacatgagagaatgagaaccaagtgaaagggggaaccatttataaaaacatcagctctcatgagacttattcaataccatgagaacagtatggaggaaccgcccctatgattcaattattcctaccaggttccttccacaaca

SEQ ID NO: 472254 - DNA, 636 bp, Homo sapiens
tcacaattctttgatgtgaaaccacatttctaattctgacccctctgctgagatcccatcatgcattttcaattgcatgtggatactttcatattcttgtctaaattccaacatgcccaaatccaaatatatactatttctcccccaaattcacaatttttacatgtgtgtgtctatagaactgaaattctttggagaagatgtgtttgatggttttcacactgctgataaatacatacccaagactggrtaatttataaagaaaaagaggtttaatggactcagagttccatgtggcttgggaggcctcacaatcatggtagaaggtgaaaggcacatcttaaatggtggcagacatgagagaatgagaaccaagtgaaagggggaaccatttataaaaacatcagctctcatgagacttattcaataccatgagaacagtatggaggaaccgcccctatgattcaattattcctaccaggttccttccacaacacgtgcaagttatgggaactacaattcaagatgatatttgggtggggacacagccaaaccatatcattccacctctggcccctccaaaattttatgtcctcacatttcaaaatcaattatgccttcctaacaatcccccaa

SEQ ID NO: 472255 - DNA, 572 bp, Homo sapiens
ttccagttcttatcatttccttgtgtgaattcaagtttttgacccatatcattttttttttttttgcctgaataacttcagacatttcttgtgaagtgcawctgctggcaatgaattctctcagtttttattttgtctgaagctgtctttatgccaagtgacagttttttcatttaacactttgtagatttcactccaatgtcttcttgcttgcgtggtttcagatggaaaatctgcttttttccctctagctaccttcaagagtttctctttatttttggttttcaacagtttaaatctaatatgtctaggtattttgttctgtttttaatatttatcctggttggtgttttcctagcttttttgttctgtggtttggtatctatcactacatttggaatactctcagccattattttttcaaatatttgttctgctctttgtctcttttgtttcagggattctagttacaaatatgtttgaaaatatgatattgtccacagttctgttcttccatgaagatatgctttctctcctgttctttctttctcatctccttgcattgcagtttg

SEQ ID NO: 472256 - DNA, 572 bp, Homo sapiens
ttccagttcttatcatttccttgtgtgaattcaagtttttgacccatatcattttttttttttttgcctgaataacttcagacatttcttgtgaagtgcaactgctggcaatgaattctctcagtttttattttgtctgaagctgtctttatgccaagtgacagttttttcatttaacactttgtagatttmactccaatgtcttcttgcttgcgtggtttcagatggaaaatctgcttttttccctctagctaccttcaagagtttctctttatttttggttttcaacagtttaaatctaatatgtctaggtattttgttctgtttttaatatttatcctggttggtgttttcctagcttttttgttctgtggtttggtatctatcactacatttggaatactctcagccattattttttcaaatatttgttctgctctttgtctcttttgtttcagggattctagttacaaatatgtttgaaaatatgatattgtccacagttctgttcttccatgaagatatgctttctctcctgttctttctttctcatctccttgcattgcagtttg

SEQ ID NO: 472257 - DNA, 629 bp, Homo sapiens
acaccagtatttgacttcatttttagtcttggctggatattttacaaggtataaaagcatccttatcttttgccctgggtattttaaatttgtgccaactttaacgccctgagaataactgtaagcaaagaaaattaattctcatgaacacctgatatrtaaagatgaagtgataaagaatttcttcacctgatatacaaagtgaaatgactggagcaaaccccaaggtgaatccctacatgctcctggtgctgacatgctctggtctgccaggctgtgttcccaagaagaagcaggaaagtgaggatgcctgtgcctagaatgtttagtgtgtggcaagggtagcttggtctgagcaggtgtcagggaaagaagtagtgggtcacagtgattccctgacaaccctttctgtagagtgcagcgttgtcagatctgaaatggctggccctctaaatactccagtgcccaggagatctggcaatatggtgatggttagaggagaactcttcctatgaagggtgaggtgtgggtgagtggtgacagtggcaattaacttcaatttctctccccttccctgttgcctcctatttcgtttttcagtagccctagtgatatgaggatatgtgata

SEQ ID NO: 472258 - DNA, 594 bp, Homo sapiens
ctgtagtcccagctactcgggagactgcccaggagaatggcgtgaacccgggaggcggagcttgcgtgagccgagattgcgccactgcactccagcccaggcgacaaagcgagactccgtctcaaaacaaaaacaaaaataaaaaacttgcactcattctccaagcccacatgttatccaattctttcagtacaccaaggcaagaaacccagggatacagaaagccctccgtccttgcaataaggcagggggtctaattgagctggctaaagcaagtcacctatggacagccaaactaaaaggrcaccttgtaacacaggcccactggggcctcaggagttataagcattcacccctagacactgctgtggggtcggagccccacaacctgcacgtgtgcatgctccccctagaggtttgaggagaggggcaccaagaagggagccacatccttatcgcacgccctgagagggaacaagaaaacttttcccgtttggacaccatgaatcaccaatgtgattctgcacaccaagggagcagaatctaagatgtcttcctgcaacattccagaagagctgcagggagggcaggctc

SEQ ID NO: 472259 - DNA, 594 bp, Homo sapiens
ctgtagtcccagctactcgggagactgcccaggagaatggcgtgaacccgggaggcggagcttgcgtgagccgagattgcgccactgcactccagcccaggcgacaaagcgagactccgtctcaaaacaaaaacaaaaataaaaaacttgcactcattctccaagcccacatgttatccaattctttcagtacaccaaggcaagaaacccagggatacagaaagccctccgtccttgcaataaggcagggggtctaattgagctggctaaagcaagtcacctatggacagccaaactaaaaggacaccttgtaacacaggyccactggggcctcaggagttataagcattcacccctagacactgctgtggggtcggagccccacaacctgcacgtgtgcatgctccccctagaggtttgaggagaggggcaccaagaagggagccacatccttatcgcacgccctgagagggaacaagaaaacttttcccgtttggacaccatgaatcaccaatgtgattctgcacaccaagggagcagaatctaagatgtcttcctgcaacattccagaagagctgcagggagggcaggctc

SEQ ID NO: 472260 - DNA, 604 bp, Homo sapiens
ctgtagtcccagctactcgggagactgcccaggagaatggcgtgaacccgggaggcggagcttgcgtgagccgagattgcgccactgcactccagcccaggcgacaaagcgagactccgtctcaaaacaaaaacaaaaataaaaaacttgcactcattctccaagcccacatgttatccaattctttcagtacaccaaggcaagaaacccagggatacagaaagccctccgtccttgcaataaggcagggggtctaattgagctggctaaagcaagtcacctatggacagccaaactaaaaggacaccttgtaacacaggcccactggggcctcaggagttataagcattcacccctagacactgctgtggggtcggagccccacaacctgcacgtgtgcatgctccccctagaggtttgaggagaggggcaccaagaagggagccacatccttatcgcacgccctgagagggaacaagaaaacttttcccgtttsgacaccatgaatcaccaatgtgattctgcacaccaagggagcagaatctaagatgtcttcctgcaacattccagaagagctgcagggagggcaggctccggctgggca

SEQ ID NO: 472261 - DNA, 609 bp, Homo sapiens
tgagcaaaccgctgtggttgcccacatggagaaggatgtggacaggcacagactcggagatagtttctgtgtaggttatcttgacaactctaacactgtggtgcctaatccagcaggcacagtggtacaccacctcatcttctttctctaagaamtttattttcaaagtggaagtggaagtgtgagcatttttacttacctcaagtttcttagtcttcccacctgagcaatcttgagcagagattgtcaagaagacatgtaataaatattctaagcctttgtttggtttctgccagtaccagtgtatgattttactgctaaagccttggatggatgccttccaagatatgtgggcactcttatttgctggtctggaaatagatatttcaggttgttccaactgcccaagtgcaattgcaagtgaagagaaattcccataagccaacgatacgtgaagaggtaataatacagaatgacttcaatctcttctgtagactgaaatgattagggggcaactcacaaacccagagggagaagaagataacagctactaccagtggcatgctttctgccagtctggttccccagggagaaggtaaccctgttcac

SEQ ID NO: 472262 - DNA, 609 bp, Homo sapiens
tgagcaaaccgctgtggttgcccacatggagaaggatgtggacaggcacagactcggagatagtttctgtgtaggttatcttgacaactctaacactgtggtgcctaatccagcaggcacagtggtacaccacctcatcttctttctctaagaactttattttcaaagtggaagtggaagtgtgagcatttttacttacctcaagtttcttagtcttcccacctgagcaatcttgagcagagattgtcaagaagacatgtaataaatattctaagcctttgtttggtttctgccagtaccagtgtatgattttactgctaaagccttggatggatgccttccaagatatgtgggcactcttatttgctggtctggaaatagatatttyaggttgttccaactgcccaagtgcaattgcaagtgaagagaaattcccataagccaacgatacgtgaagaggtaataatacagaatgacttcaatctcttctgtagactgaaatgattagggggcaactcacaaacccagagggagaagaagataacagctactaccagtggcatgctttctgccagtctggttccccagggagaaggtaaccctgttcac

SEQ ID NO: 472263 - DNA, 326 bp, Homo sapiens
tacagatatatgtatacacaaacatatatatgtacataatgtacttgtgcatgaataaatttattcttcttttctgttgcagatataaatatttctgattgtgccattttgattacccaactaggaaaagagasagagagacagagaataacataggcttttgaatgaacacctgaaatatcaaaagagcacattaaattcttttttaaaagtttctcacataatttgagcaaagagaaaagcaatctcaatagctcagaggaaattgcagaagattgctggtaaccaggcatcttgtctacccagtctttgcctccgaggacagg

SEQ ID NO: 472264 - DNA, 480 bp, Homo sapiens
gatactgagtggtgaatattaagcctaattttatatatatatttggactgagtctygctctgtagaccaggctggagtgcagtggcacagtctcggctcactgcaacctctgcctccctgttcaagtgattctcctgcctcagcctcctgagtcgctgggagtacaggcgcacgtcaccatgcttggctaatttttatatttttattagagacgggttttaccatgttggccaggctggtctcgaactcctgaccccatgtgatccacttgcctcggcctttcacaatgatgagattacaagcgtgagccactgcccctggccacacttatcagtttttaaaaatcccagtgttagccatacttgctgagttgaaagaatatgtgtcagaatttgcagagcttaattatgcaccttgagttattgtggacttattaaaagcctttgtgtgagctgtgaacctcctctgacttttattggt

SEQ ID NO: 472265 - DNA, 480 bp, Homo sapiens
gatactgagtggtgaatattaagcctaattttatatatatatttggactgagtcttgctctgtagaccaggctggagtgcagtggcacagtctcggctcactgcaacctctgcctccctgttcaagtgattctcctgcctcagcctcctgagtcgctgggagtacaggcgcacgtcaccatgcytggctaatttttatatttttattagagacgggttttaccatgttggccaggctggtctcgaactcctgaccccatgtgatccacttgcctcggcctttcacaatgatgagattacaagcgtgagccactgcccctggccacacttatcagtttttaaaaatcccagtgttagccatacttgctgagttgaaagaatatgtgtcagaatttgcagagcttaattatgcaccttgagttattgtggacttattaaaagcctttgtgtgagctgtgaacctcctctgacttttattggt

SEQ ID NO: 472266 - DNA, 616 bp, Homo sapiens
gggtagatgtagtcctccccactgttcccctcaaagcccccaccccagactgctctgaggcatggtttctccatttcacccatctggaaatgtatcacctggctgaatgtacctgtctgcccttaacctgctgtgtcgcttcaaggctggtgaagaagctagtgcagtgcttctcgttcttccctgttccactatttttaattctcatttaacctatatattttttaaggaactcaggytaaacgttctatgtgttaagcctgagttcttaaaaacatttagaagtgtatctagtatattaactcaaatacatttgtatttagaatgttttaactcaacaatgaaatgagtcacagaaaaagaagccagtcttattttaagggctaataatgcagaaatcaagagtttcctacagagcataaattagctgatatttccttagtatttttcaccagtgcttcccaaatttcccagtttacagtctgctttgtaggagtaagaaagattcttgagctctcccttcccactagtccacaggcccttaccgatcccccaaatagattatcaatcagcagtaattgtttttttggggggatggggagtagagcctgtcaac

SEQ ID NO: 472267 - DNA, 597 bp, Homo sapiens
aagtaggtttaatactccagggcttctttccaatgttaatgagtaactagatttgtctcttggtgctgagccaaatgaggaatctagaagcccaacagtgattattggccaagcaccaagccaccctctacctcattttgcaaataagagatgagaggagacctctgtcacagagatatttggaaaatgtcttatttggttgaaactgcttagtgattgttttcatgacatggtctgtacttatttaggtaattgccttaccccctcctttcttccccacaaccccctgtcttggagggaaaagctctcagtctctctgttgttgccttggacttctcaaggacaaggacttttttactcctctgtttcctggcatctagcacagagagctttggtattcttaataagtatttagagattgatagaattactagcagttctgcctgacagatgtctgaatatttgccttttgtaaagctttaataagtsagttctatgggaagaaaatgtggagctcctcagactagagagagctgctcagaaataacctgcagttctgcaattagagggtgagagctcgggtctgggtggcccagg

SEQ ID NO: 472268 - DNA, 485 bp, Homo sapiens
tttgcatagtagatggagaacagaatttatttataaagctctcgataaacttcttaaatgaagtaagtgcttgcagctatagtgttggcctcaccaacactatgggccatgagctggaacatatggagagaatgggagagaaaaaaaaatcagttacagtcttaaaagtgagataacaaaataacaatatatggcaatatagaaaataatcatatgaaaagtactggtgacaagtgcttgtaggattttaagcaaatatatatatttttgatgatagtgtatttgttcaggttctggctggaaacaacattcatctcaaattgttcaratgaagagacattgatgcagtggttctcagtcttggctgtacattggaaatgcttggggagctttgaaaagtatacatgcctgtgttctaccctcagaggttctgcattagttggtctggtttgtggcctggctgttgggatttcttaaaagcttcc

SEQ ID NO: 472269 - DNA, 566 bp, Homo sapiens
atacactcgcataaaatattatatttacatagacctttacattttgagaagtattttgtaacattaacttagacaagcctttctctctgcacagtctcagcaccactcttctgtggataaaagatttgttaggcatccttggtggatctctctttttcattgagtcttcattgttttgccaattcaagttactattattattttttagtcctattctgtctctgatttgaaggaattgttctacatcaagtctccttgtggtgcatgggatttattctttagattgaattaattagaaaatatacaagtaattttggcttataaattgataaccctrtaaaaatcttgccttgttagaaagcgacagaagaaattataggcgaggctgagatctaaaaggagagctccagaatggaggcttggaccaggggcagaccaggagcttatcaagatacaattgaataatcaaagggtggagcctggacaaaatgtttacttgtctggtaagccttaaatgtttacattggccaattgatcccctttcatcttctcttgcccactaggag

SEQ ID NO: 472270 - DNA, 613 bp, Homo sapiens
taacctaattagctcattttcagtcctttgaatttaacatgtcctcatgtatgttgcctcctctcttgaatgctctcttctaccttcagatctctgcttggatacaaaagttgctattcattctgttcctctgcctcarcaaagtctttcatctcctgcctaggtcaaatcaatcctcattatatctctcctttttagcacatctgtgtcccaattttttgtgtttggatggaaaatttggtattcattccattcctcctcctcaagaaagtctttgatctcctgcgttggtcaaatccatccatcttaggctctcattgtctctctcctttttagcacgtctttgtcccaattttatgtgttagtgattctcttcttgcctgaagctttatgccacaataccagatatcatgttacatcatctgtttttgctcagaattccatcctgaatatgtgtcatgttactgaaacctgaggagctgctcagtacatattttattgtcaaggagaggggagctaagcaagatttgtacagattttgaataagtaaaagtataaggaatagaacctcggtttctggaactatttgttgctgagtttctgcaagtgtttc

SEQ ID NO: 472271 - DNA, 244 bp, Homo sapiens
ctggaggaggtcccggggaaggcagaatgcttgccaacaggtgagggggagaggggagccaggtactccttgatgatgcactagaactgccaaatkgctgtggcttcccctctgccctcaaaatctcccgtttgtcttttgtggtccaacctaatgagaaacatacagaagagggaatcctgggaacatagttcagcttagtcaagttgacacattataaagccatgatttcaaaataggtttc

SEQ ID NO: 472272 - DNA, 244 bp, Homo sapiens
ctggaggaggtcccggggaaggcagaatgcttgccaacaggtgagggggagaggggagccaggtactccttgatgatgcactagaactgccaaatggcygtggcttcccctctgccctcaaaatctcccgtttgtcttttgtggtccaacctaatgagaaacatacagaagagggaatcctgggaacatagttcagcttagtcaagttgacacattataaagccatgatttcaaaataggtttc

SEQ ID NO: 472273 - DNA, 467 bp, Homo sapiens
cataatttcgacatgccagtaaccagatcactttggtcttaaccctacaccttaatggagtcagtcagtgctccctggtggtctttttaccatatttttttttccagtaaaaaattgcctgaatgtcatcctttagtagtttcttcgaaagtgactcatgggaaccacactccctaagcgcttgcaggttcaaagatgttttctgctgtcttatttatgatgcatggtacagactgctataaaatacacgttttctctttaggactttgtagactttgctctactgacttcaagggtcgattgaggctgtgagccaggctggtattttcccgttaagaggtaatttggtctcttgatctacctgtccaaaagattctttctttctctctgaygttcagtaacttcactcagatgaggctccatatcaatggttctgtaaatatttccctctaagacatactgttatg

SEQ ID NO: 472274 - DNA, 652 bp, Homo sapiens
ccatgttggccatgcccaccatccctgctccctggaggataaaagggaagagactttgaacaagactctgtgtgtgtgtgtgtgtgtgtgtgtgtgtgtgtgtgtgtgtgtgtgtctgcctttctctcttcttctgtctccctctttccctctgtctctttctgtctctgtccctttctctttctgtctgcctgtccctctgtctctgtctctccatctctcatcactctcccccaacctacagaccacaaaggttttccccaccactttaccatgggcagaagcattcacggggtctccactatacatccatggagaagtaggaagtcaattttggactttgaatcgcactgtagtttctaatccatcagtcacaaagcagtttttattcatacttgatacttatgtttctrtgtgacacaatttagcactctgaggacaagggatttaattatttatccctttaaatcttaaccacaaagcttgtcttgttatctgccatatctccagtgacaagcatagtccccggcatatagtgcaggctcaatatatatgtaaaatggtagatatatgtcttaacatgcatgttctaggaaagtaattgagtatgtaaatgcaagcattgggcacacaattttatgtgaaatgtcag

SEQ ID NO: 472275 - DNA, 406 bp, Homo sapiens
cctacagaccacaaaggttttccccaccactttaccatgggcagaagcattcacggggtctccactatacatccatggagaagtaggaagtcaattttggactttgaatcgcactgtagtttctaatccatcagtcacaaagcagtttttattcatacttgatacttatgtttctgtgtgacacaatttagcactctgaggacaagggatttaattatttatccctttaaatcttaaccacaaagcttgtcttgttatctgccatatctccagtgacaagyatagtccccggcatatagtgcaggctcaatatatatgtaaaatggtagatatatgtcttaacatgcatgttctaggaaagtaattgagtatgtaaatgcaagcattgggcacacaattttatgtg

SEQ ID NO: 472276 - DNA, 620 bp, Homo sapiens
gcagtggtccatattcatctgtctgtcaaatggatggctcctcaggaaaatctattttcaggactacaggattatattgctaacagggagaagggacggaagatcaaaattctatggctgagcatggagttggcccaacctcccaacactggccacaggaagtgagggatggggaatgaggaccaagyggaaaaagcacgtggccaatgacagagagaagctgccacgctgagctcagtgaaatggaaattgcccaaagcctggataataagggagtggtgtcttcacaccaataggtttaaattgaacattagggactgaggacttctgtgcccatggtcagagaaggcaggaagaacaggcatttgctggcagcaggtgccacagtgaaccagcctagcggttcctctgccccatgctgtggttgtagggatagtagggaaggatttgtgcataatccccccttcacctcttgacacgattcaaagtccaaagcctcatcatcaccttctcttctgccagtcttaagttcttctactggaagtttaaccgatttcattcttattaacaaccattgttattttacagtgcatataacctacagcaagcgagcatggcag

SEQ ID NO: 472277 - DNA, 499 bp, Homo sapiens
cttaacctatttggagattcagaaattgattgtttcataatttgtctgtttgttttgtctattgctggaaatgytcacggaatagagagtggagaaaggtaggtggaaatacaaaggggaagagggtagaaaataagtctagagaagctgtaaggaattaccaggaatgcctagtccacaagtccccagtgagaaaggagtgggggagaagagtttccactgacttttcagggccactctcatgtgtgtgtttgcaggtaggggaaggacaatgaggaaggatgaaaagaaatactctataagctcagaagaacacaattatcctttaaaaagtggagtggggtggaggggcagcagatggacacttcagatgaactggacaagaatgctgatgctcaatgggaataaatttagaaaaagtgcatacttcctctagccaacttgacctatgaagtgaaataagattaacaaactaattcactccttcaacagctattga

SEQ ID NO: 472278 - DNA, 599 bp, Homo sapiens
ttcataacagacttaagtagtatcaacctctactcataggcctgtctcaaagttatagtcaactaaaagcgccgyttaagcaaactgcactgtacccatataaactgcctctttataagtttcttgaacacatcacatatcgcagggcctttccacctacagttccctctcctggaaggctcttgcccctgattccaccccaactcctaattcgtttggatcttgattcaatcgccaacttcctcagtcccaacacatatttcccttacttcattttatttatccttatagctttatcactaactgacatagtattatatgtttagttatttgtttaatgtcttctcactaactagaaaacaagttttaatctacaagatcaagaatttagtctattttgttctcataattcctaagtggttcctgacacattaaatgcgtttaataaatatttattaaatgaataaaactgaataatgaaaaagtactattagtgaagtttaaatgccaaatttgttgcacttcaaataataccagaaacaatatctcaaatttcaaaaattctggaaaataataatatcaacttgttaggaatattt

SEQ ID NO: 472279 - DNA, 448 bp, Homo sapiens
acagtgacaaatctagatctgtttttctcttgtataaaatgactcagtattcaaataaattgtcacacacaactcattaaacattatttataagtctactgaaataattttcttaaaaaattagtggattaagataagaatttttatccccacagtataccgattctgtgctgtcagcatctccctttgaggatgaggtccactgtataccacttttgacaaaccatgctgggatagtgcactctcagtcagagccatggacccaatgctggaaggctagagaaaagacatttgaataaagaaaaaaaaagctattctgctgaaaaggtgatatatagaatatatatataccactaaaatagctaccacgaacatcatrtatcttaaacatatttaggctgcctaccaaattttctgctcgaagatttaataactaattttaaaacaa

SEQ ID NO: 472280 - DNA, 497 bp, Homo sapiens
tccttctgagaggctgaatgccagagtggcaacttattgtcctaaacctgtatatcctatggtctcaccacagatgacacagggatcatgacaatgcaaatcttttgatcagcaatgaagggtggatgataaacaggacagggattcctattgcttaccccataatgataggtaatttgatgatgacaaatttatttctctttcctattcctggataattctcatcacccctgrctgcccaacaacccccccaaatacacaaaaacataaactccatggctgtcaggtatgtctaagattgatctccaccatgttgccttaagaaggttattgatctaaagatggaaacaaatctgattttctgaaatgctattcaactcgtgccctgacaaacgtaaagtgtcagtgtaatagcagcagtgttttgaaaaaaatcacatgcttttctcttttgtttttcctagtcacgatcttctctttaaagagttcaaagcatc

SEQ ID NO: 472281 - DNA, 602 bp, Homo sapiens
ctgttctaaccctgctgccaacgcctgggctgtttctgccgacaatcttctatttctctaaaagagtacgctgaactgtgggagacagagacaagagaaagtcattcccagttccctgagcactcacgtggacacagttcctacaactttcaggagccagtggttttatttctgcataagaaaaatgggcccaaaattcatcacgagaaagcaaaaccctaaatctcaatcaattcaatcaatttcattgaatgatgccattcattaaaaaaaaatggatgctgcagaaaaagcagaaggaaaacagcagaaggcaatttccactaacgacgtcacagagacactaacaaatgcctataacttaccaaatggaagaataaatcttctaaatgagagtgtgcagtttttattgatttgcaatgatgctgggctgagattttctggtccattcatttaagttttggaaactttattctgcatgtcagtcttaaaactattttggagggagaagctgggatttggaagaaggaattaagaacaatggtggcagaaaacactggaatgccacgcccttcaagtmacgagggctccacacatatata

SEQ ID NO: 472282 - DNA, 606 bp, Homo sapiens
ggtggggacacagatccaaaccatatcaatgaggctgggcaaggcttgacataacccagaacaaactttttcctgaaaaagcagaaaaagcttgactagccttaaaggaggtggaatacagaaggcattaattaggaatggtcctagagggaaayatacaagggcttctgagaagatggtctaagaatgagatacaaaggagcagagttgatatgtgaggtatagtccctaacagcatttctgaaatgactacttttggcagaagacacccttattctgcagtttaggaaaacatttgccattaagtcatctgggtttttttgctccccccataaaaacagttcttttcttagagtgggagacaagtccaagtttaaatgtttaaaatcctactcatatttctgaaccactttcttatcagttataattgtagatcttacacttactaggtaactgaggtttgtatttttgatcttgaaatgtgatgccagacccaaaccatattctttgaaatcatcaggttaatgtgtcctcagcaagcaatgtgaccccctactaagatgatttcccttaaaaaacgtgggacatttagccattccaatttca

SEQ ID NO: 472283 - DNA, 601 bp, Homo sapiens
ataattatgatactgttgctatcttcccaatagatgaaaataatacatttcaatagatcatgtgcttagtattttagcaktggggataggtttgcattaagtcagaatttgtttaaataggactattgtatacaaacatgtcactgactttacaacttggcctcttataaaaataatgacacattttagtggatttgaatttccaaaatctcttgccaggtaggaaagggagaaattgcatatgggttttatggcttttcatgaatagaccattttctttttggccaaaaatatgaggaaaacgtgttaggtagagatgtttggagattttgcatgtcttctagtagcaaaaatacaaattctgctgaaaaagcccttttattataaacattttaaaggtaaaattctgagcaaattgttttttatgttgggtaggtagaaagagacattttataaacttgtttttttcccctgcgtacgtgttattcatgatatttagcaaaaataacatttctgctaagaacttttgtaatgaacattattcattttcgttaaattggttgggcagtgagaaggcatgtagagaaccctgtatcattat

SEQ ID NO: 472284 - DNA, 450 bp, Homo sapiens
taattaacaaaggaactaatcctttcaagggtaaagctacttagacctggctcacagcacttatgctctaactgattttctttaaagaaaactcctgaagagttttctaagaacaagtgaagcaagattggaccctgagtacggaaagtgggcagctaaagcttctttcctcaataacaagtttaagtgccttatttatttttgtattrttaagtgacacttgtgaaaatactttgttgagtaatgatgctgtggcaaaactaaagtttatttaggacactgctccgcccaaggtgagcaattaaagcaggtatgtaaacctgctcccctgggctcctccactcaaccacttaagtaagtagtgctagaaatgaaaaagggtgtggggcaagatacatggcatggctgggggtgagaagaagttggaaggggaagaggaggccccatgaa

SEQ ID NO: 472285 - DNA, 518 bp, Homo sapiens
tgcaaatgtgacccaggatgaaaccaggactgagtccacattccatgaagggcagcttgactcccccaatcattaatccattgctgacgaggtgactgcagggtgctgactgccggagagacagagatttggagaaacagggagactgttctttggggtcatagcacctagtggtagaggcagatacataaagcacagtccttgtgaggccagggcaagcaccatcctagtgtcgctgkatgagatgggagagaggcaggaagggagggcaggagctgatgaagtgtcacggagaggtgagggctggttcctcacaggagacctgggggatgcacttggagaggtccttgtggagcacgtcggctctacagaggctctggaagggtaggtggggttgtgatggcatcccagcagacgtgcacagcaaacacacaggcccagggtggggagcagaggctgagggtacagcaaggcctcctgtgtgagtgcgggaaggctcacaaggtgaggctctggta

SEQ ID NO: 472286 - DNA, 518 bp, Homo sapiens
tgcaaatgtgacccaggatgaaaccaggactgagtccacattccatgaagggcagcttgactcccccaatcattaatccattgctgacgaggtgactgcagggtgctgactgccggagagacagagatttggagaaacagggagactgttctttggggtcatagcacctagtggtagaggcagatacataaagcacagtccttgtgaggccagggcaagcaccatcctagtgtcgctgtatgagatgggagagaggcaggaagggagggcaggagctgatgaagtgtcacggagaggtgagggctggttcctcacaggagacctgggggatgcacttggagaggtccttgtggagcacgtcggctctrcagaggctctggaagggtaggtggggttgtgatggcatcccagcagacgtgcacagcaaacacacaggcccagggtggggagcagaggctgagggtacagcaaggcctcctgtgtgagtgcgggaaggctcacaaggtgaggctctggta

SEQ ID NO: 472287 - DNA, 652 bp, Homo sapiens
ttagctaatggcagatcctcgtcccacagatagccatggcatggggctactgatacagaagtatttctcatgccaccaaattgtgccttcaattttgtcttctttacacaggacaacatagtaagaggwcattgttaacattaagtcttatataagattttcagagattgttacacttacattcaaccagtatggaaaatcggcactaggcctaactaccccatagctagcatagtagcataacaacgctcttctagcctagcaatccacatctcattctagggggtttccaatttactaagaacattttcttaaagcttctatatatccttggagcttactttgtcctcaataagaataaaatattatcaagaactcaacaaatggacatttgaaagcaggcactgagtttaatttattttaggccacctttgatttgtttgaagcctgtattccttaaatatgaagatcagtacttacgtcgtgagaataaaggtttaagagacaaccaaggtttctatagcaaagagaaacgactgagcttctagattggtcataatgacttactagtaactgaaaatagtattttaagatcatactaattctctgtttctctgtgtgagttatttagatttgctttagatgtctaagt

SEQ ID NO: 472288 - DNA, 652 bp, Homo sapiens
ttagctaatggcagatcctcgtcccacagatagccatggcatggggctactgatacagaagtatttctcatgccaccaaattgtgccttcaattttgtcttctttacacaggacaacatagtaagaggtcattgttaacattaagtcttatataagattttcagagattgttacacttacattcaaccagtatggaaaatcggcactaggcctaactaccccatagctagcatagtagcataacaacgctcttctagcctagcaatccacatctcattctagggggtttccaatttactaagaacattttcttaaagcttctatatatccttggagcttactttgtcctcaataagaataaaatattatcaagaactcaacaaatggacatttgaaagcaggcactgagtttaatttattttaggccayctttgatttgtttgaagcctgtattccttaaatatgaagatcagtacttacgtcgtgagaataaaggtttaagagacaaccaaggtttctatagcaaagagaaacgactgagcttctagattggtcataatgacttactagtaactgaaaatagtattttaagatcatactaattctctgtttctctgtgtgagttatttagatttgctttagatgtctaagt

SEQ ID NO: 472289 - DNA, 652 bp, Homo sapiens
ttagctaatggcagatcctcgtcccacagatagccatggcatggggctactgatacagaagtatttctcatgccaccaaattgtgccttcaattttgtcttctttacacaggacaacatagtaagaggtcattgttaacattaagtcttatataagattttcagagattgttacacttacattcaaccagtatggaaaatcggcactaggcctaactaccccatagctagcatagtagcataacaacgctcttctagcctagcaatccacatctcattctagggggtttccaatttactaagaacattttcttaaagcttctatatatccttggagcttactttgtcctcaataagaataaaatattatcaagaactcaacaaatggacatttgaaagcaggcactgagtttaatttattttaggccacctttgatttgtttgaagcctgtattccttaaatatgaagatcagtacttacktcgtgagaataaaggtttaagagacaaccaaggtttctatagcaaagagaaacgactgagcttctagattggtcataatgacttactagtaactgaaaatagtattttaagatcatactaattctctgtttctctgtgtgagttatttagatttgctttagatgtctaagt

SEQ ID NO: 472290 - DNA, 511 bp, Homo sapiens
ccatctcaagtaatgtatacatcatatacaataacaggtattttagttatgtttatgaagtttttcaagaagatgtttccaataaatattgggataatattctacttaacrttgtctttaagtttgaattatctgtttatttgtctcagttttctgtgtggcctgctacacccacacacctaattactgacactggtcaactctataaaatcatgtaatggggacaagaccatgacaaataatagaactgaatgtaacgggaagaaaattaaactattttgacccactgtgacctgtatatacaacctcccgatcacttaaaatctaaaactattaaacatgtcagcctgatctaattatagaacacatgactgactacattctatataatactctgacaatggctgtgttacatggaaaatgaagttgagaaatgtacacagaagtataatgtaggcaaacacacacacacacacacacacacacaaatttgaagtacaaagataagaaa

SEQ ID NO: 472291 - DNA, 655 bp, Homo sapiens
gtttgctagtattttgttgaggatttttgcatctatgttcatcagggatattggcctgtagctttcttttttcattgtgtcttgccaggttttggtatcatggtcacactatatattaatgtgaaatcagatacacagaacactggattcattttgatagaactgaaatttaaataaaatgagaatgtaggatttttgcacttatattcttcttttayattgtgttgatttttttttttgagacagagtctcgctctgtcacccaggctggaggacagtggcgcaatcttggctcactgcaacctttacctcctgggttcaagcaattcttgttcctcagcctcctgagtagctgggattacaagcgtacaccactacacctggctatttttttttgtatttttagtagagatggggttgcaccatgttggcaaggctggtctccaactcctgacctcaggttatccacctgccttggcctcccaaagtgctgggattacatgggtgcaccaccattcccaggcttctgttgatgtctttcaataggtatattcaagagaatgacttttaattttgctatcttaccttttatttattttttgttgtctttctgctccctagaaaaactgggtaaatacaacattcatgtttaaat

SEQ ID NO: 472292 - DNA, 655 bp, Homo sapiens
gtttgctagtattttgttgaggatttttgcatctatgttcatcagggatattggcctgtagctttcttttttcattgtgtcttgccaggttttggtatcatggtcacactatatattaatgtgaaatcagatacacagaacactggattcattttgatagaactgaaatttaaataaaatgagaatgtaggatttttgcacttatattcttcttttacattgtgttgatttttttttttgagacagagtctcgctctgtcacccaggctggaggacagtggcrcaatcttggctcactgcaacctttacctcctgggttcaagcaattcttgttcctcagcctcctgagtagctgggattacaagcgtacaccactacacctggctatttttttttgtatttttagtagagatggggttgcaccatgttggcaaggctggtctccaactcctgacctcaggttatccacctgccttggcctcccaaagtgctgggattacatgggtgcaccaccattcccaggcttctgttgatgtctttcaataggtatattcaagagaatgacttttaattttgctatcttaccttttatttattttttgttgtctttctgctccctagaaaaactgggtaaatacaacattcatgtttaaat

SEQ ID NO: 472293 - DNA, 610 bp, Homo sapiens
tatatgagcatccacttcaaatatggtcttttgctcaaagagggaagtagtgcgattatagtaaaaaccctaattttcctgattcaaacagagcaaaacttccccccctagctcaaacagtgggcaggatatttattccaaagacctggccattgcaatttatatgaatctttgccatttcagctctgtcccacctctgcagcrttcctgggcagaaggactagattaaacatcaggaataaaaaatgtaatctcttcttaatggaatacaaaatcccttttgataaaattataaaatacaatagtgatatatatacatcactattttgcattactctctccatacagcatatatatattctctctatataataatgcaaaaaaagtagaggatttggaattaacagcatgcatcgcattactactttgtttcatggtagaaggaaacgaaggaacatggaaaaagctgtgggtaagatttcctccacagtaagtgaatctgcaaaatataaagggacctggaatcgaaaacatgatgcctgctgttcctgcaaggtttcctgatgcctaaaacatcaggaaaattcttggagagcacttcaccccagtg

SEQ ID NO: 472294 - DNA, 599 bp, Homo sapiens
tgtacatttttaccctatgtttaactttccattaggtccctagactttgaaaaatatcaaataaaaaaaaagtcaccttttgttaaaaggtgtttttttatcttcccaaatccaagttatgaataaaaagtttttgaagcattttcttttatggatctcacaatattacagaatccccctcatgtcatgaggctaatggactcaaaaagggaatgatgctgatcttcaaaagctttccagtggagttgagtaacgaattggtcaagttaccaacaaatgggtttggggttaacaagaaattgatctatcaagctgctgcagcttcttctactttttttttttttttaaattccaacgtatttactcaatattattggctttaacatctttgaagagggatttgcatattgacaaaaayacaagaaaagtccattgcagccaactgaaacaagtaggaagtaagtcaggtcagggtgtctcttactgaggtgcctttatgttaattctaatcacaggagcttcagggctggttttcctctaggatgccagagatcattcctctaggatgccagagatcatttttgttaccagacagaccc

SEQ ID NO: 472295 - DNA, 599 bp, Homo sapiens
tgtacatttttaccctatgtttaactttccattaggtccctagactttgaaaaatatcaaataaaaaaaaagtcaccttttgttaaaaggtgtttttttatcttcccaaatccaagttatgaataaaaagtttttgaagcattttcttttatggatctcacaatattacagaatccccctcatgtcatgaggctaatggactcaaaaagggaatgatgctgatcttcaaaagctttccagtggagttgagtaacgaattggtcaagttaccaacaaatgggtttggggttaacaagaaattgatctatcaagctgctgcagcttcttctactttttttttttttttaaattccaacgtatttactcaatattattggctttaacatctttgaagagggatttgcatattgacaaaaacacaagaaaagtccattgcagccaactgaaacaagtaggaagtaagtcaggtcagggtgtctcttactgaggtgcctttatgttaattctaatcacaggagcttcagggctsgttttcctctaggatgccagagatcattcctctaggatgccagagatcatttttgttaccagacagaccc

SEQ ID NO: 472296 - DNA, 575 bp, Homo sapiens
gctgctcttttggacagtacagaactagatagtgctatgaaaaccaatctccttctttagggaagctgatgattactgtttgatggcaaagtcagtttcagtctcatctgaaaagggcaaatatagccatttcacaatgctgtagggggttaatgagatgctatatggaatgtgcttaacataaagcctcgtacatagtaaatgagaagaaatgaaggtagtagtaatagtgaatataggaatagtaatagttgtgataaatatattatttttgtctttgctgacaaacagcaataaggtctgaatattgcaataaggaggaggtcagcaagaaattgcccctgccaaaatgataataaattgcctggaaattaggaagttcattatagacagttaggctatacataaactcagtaaatattgatcaacctgaaaatttcagaaggtgaattactgcatatgcaatgtttccaggtatgtttctgcattktaaaaaatccaagttctagtgtcttggcccctcatctaattcttaaaagaattccagattagtcctagcatactatagttctcat

SEQ ID NO: 472297 - DNA, 471 bp, Homo sapiens
aactaagatttcagataataatgctatgggatagaatttcctgaaacagtgctaaaacccccaaagtgagaaactgctcatagtccaacatcctagacttattcccagaagccacttaatgtgactgataagaaagataaatgtaaagattagggttttttctgttggakagaagcccatagtctccaccctaaaagttaatccccactgttattcacaaacaccccttcaaagcagttctgagcataggcttggatgggagagggggaggttaggatggagggtgtttgcaaagctgtacagtaggtgagaaaggaatcttcttgctactactacaggcagtcgtagcccaggcatatccacggggcatatgatgcggattctgacttttggttcaagataacagactgaacacacatctttctctttaacaaggactttaaaatagataaacccacagcaatgaagagc

SEQ ID NO: 472298 - DNA, 575 bp, Homo sapiens
ctataaaagcctaataaaattatacagttagcaatatactttaaaaaatttctgttgcttagccgggtgtgatggtgcatgcctgtagtcctagctacttggaaggctgaggcagggggattgcgtgagcccaggagtttgagtgccaccagcctgggcaacatagtgagaccccatctcttgagaaaacaaacaaacaaacaaacaaacaaacaaacttctgttgctcactcctcctactctcctgactttgtgccaatattgtggttattacgtacctattatattttgttacaattacktgtttatgggcctgtggcccctcctagatgtgaactccttgagaaacagttctgtgttcttcccatctttatagccctggtgcactgcaatgactatgaaagggaggttcatagtcattgaaggctcagcaagttaaatgcatagaggactaaataggagacggtgaatagaattaaatctttggttcttttatcttgcctaggacctgctttgtgattatcttaaatgaagacaatctgctaaattctaaataaagctttgactttgtggtt

SEQ ID NO: 472299 - DNA, 625 bp, Homo sapiens
agtaaaatatcaccaaatgaatggcagagttggacaccctctaactcactcttgtagaaaattatgtacacatgacttttataacagtagcgtttggaaacgtggtgagttagttttgaaacttcatctcaacttttaaggagatataatatgcattattactcacaaatgagtggcagtgacaaatataagggcaccataaaaagttatttatacagaaactatatgataaatggcaatacagckttggtgatatttaaaattaaaaatgtcagatgaatacctcaattttttttgtttctctatacacaaaccactttaaaacccatggaagaacaattcataagtgtattggtcataaaaatggcagaactttttctccaaaggaattctctaatttttgtatctattagaactgattgagtttataaagttgatatcatgaactaaataaatgtgaaaaacatgacaatggggatagagtatattcctttagagatatagttattgtactttataatagtattctaaggaatttaaaaattacactataccaagaaaaatttctgaaattgaggcagtaatagcctaccaaccaaaaaatgtccaggaccagacagattca

SEQ ID NO: 472300 - DNA, 629 bp, Homo sapiens
cttgtatagagagttgaaaaggtgaaggggctggcacagagaatataggttgcagctattcagagcggggtgaagtggaaccacgatttactgagcaccttctgtttagtgcctrctgagttaccttcccattctcttaattccacaaatatttagtgagtgtctatgctgaccattttctgttatgtcatttaaccttcattttaatccattccataaatatttgttgggctcctaatatatgccaggtccttcctcctttatagacaaggaaactagaactgagagagtttaaataattatctcaatgcctcctaatgactaagtgggaagtccaaattcagattcaatttgggtaacagtaaattgcttgacattacagtataagcaaagaagtgtccgactttaaaatatctaaatctatgtaagtgtagaattaacattagaaagtgattatttgaaagataaagcaaattactacttggcctttcaatgtatagaaatcacattacataaatgtgatgtaaagagagtgattacaggaaagtttaaataatttatcagatcattttttaattgcaagactcccaggcatttggaatatttttatatgaacctaatattagtga

SEQ ID NO: 472301 - DNA, 629 bp, Homo sapiens
cttgtatagagagttgaaaaggtgaaggggctggcacagagaatataggttgcagctattcagagcggggtgaagtggaaccacgatttactgagcaccttctgtttagtgcctactgagttaccttcccattctcttaattccacaaatatttagtgagtgtctatgctgaccattttctgttatgtcatttaaccttcattttaatccattccataaatatttgttgggctcctaatatatgccaggtccttcctcctttatagacaaggaaactagaactgagagagtttaaataattatctcaatgcctcctaatgactaagtgggaagtccaaattcarattcaatttgggtaacagtaaattgcttgacattacagtataagcaaagaagtgtccgactttaaaatatctaaatctatgtaagtgtagaattaacattagaaagtgattatttgaaagataaagcaaattactacttggcctttcaatgtatagaaatcacattacataaatgtgatgtaaagagagtgattacaggaaagtttaaataatttatcagatcattttttaattgcaagactcccaggcatttggaatatttttatatgaacctaatattagtga

SEQ ID NO: 472302 - DNA, 625 bp, Homo sapiens
aatcctagaattaggtactccagttttcacaaagaaaggctggttgttggtctaacataggaatgcacatcccgaaaaaagattatttttctaatttacgtttaagacaagcattacaaagattttaagtcatatttagttgtctattttgttaaaaataacaaaattgtgttcaaaactccaggagaaatggtttttctagacctgtttaatccatcaggcaaaccacagcacccagagagcatgactggtcagtagcacagcccagtaagaccattaatgtaaaaggtttgagagtctgtgaggtactaggggtgtcctgatgaatttgcaggagcatggttctggggattgaaagtgtgagtgggcctccagcacctgggagcagattcgcaggtagaaggattgcagcttctccgaggaaggtaggctggaaagagtaagaggtggccctggggraaaaggcacaggaacccagagccagattcctcatggtaaggacattattcagaataggagcagaagattaaacctgggccagctccagggtgaccaagtgtggacccgagctcttcttattcctccttcctagtgtcaaaagagggctttgggcatgagtagcccc

SEQ ID NO: 472303 - DNA, 612 bp, Homo sapiens
tatgaccctgattcccagctctctccagtatcccagcccagcattttttactgtccataagacattttgacctggaagacttggctgtatgtctcactcttggctaaagctgacctggtcattgccccaactcagttcatcttcctgatcctctctgtcagtggcacagcctttctccttgctgcaggctcagtgccacagtgtgcatggtctcctgcccctctaccctgccccctcagtcagtcaatgaccacaccaatgctgagtctactgccacaaaatacctcccagaagtttcctcagaacgaattacctggcgacagtgcaacataggtgcttcctaactgcctccagccaccttctctccaaactgcactggcctctgccaggttgggctctctcagccaccatgtgggtcatatttgctggatctacagtgaatacccagaaagtacttttagaataagccagagaatgagagagaaatcacaggatcatacttcccagagcagccttccaccagaaataaaagtccaggccctggagttattatgcgcctctcgtygcctcccactgcatcatccctttttgccacatccccatcttggctcc

SEQ ID NO: 472304 - DNA, 563 bp, Homo sapiens
ccttgtcctacaaagccccatgatcccacccctatctggctttatcccatccaaattccttttcaaaccctgtatgccacttataactcccrgtgctggacactgctgtgccttctcagtcctctatccagctattacccgtctgtgaatcctcttcatactctgattctcatgggctccttttcctggctctggctagaaaactgtggctttggattccctgcattgtcatgaacttcctgcagttgggtctacctcagggaaaagtgggcaagacaaaagagtctacagagcctctactgctgtagctgctatccccaattccgccaccactgctgctgctcttgccaccgcgttgtaatgccattcgttaccagtacatgtcaggagtaggactgtgataggcaaaagatttctgctttccaggggctcctttcccagtcctctggcccaagagagagagtttatcttgcagttttttctgttaacagcttttgcacagtttcaagattcagactgctcttgattttatgccggaaaatatcggaggatataaaaaagca

SEQ ID NO: 472305 - DNA, 563 bp, Homo sapiens
ccttgtcctacaaagccccatgatcccacccctatctggctttatcccatccaaattccttttcaaaccctgtatgccacttataactcccggtgctggacactgctgtgccttctcagtcctctatccagctattacccgtctgtgaatcctcttcatactctgattctcatgggctccttttcctggctctggctagaaaactgtggctttggattcmctgcattgtcatgaacttcctgcagttgggtctacctcagggaaaagtgggcaagacaaaagagtctacagagcctctactgctgtagctgctatccccaattccgccaccactgctgctgctcttgccaccgcgttgtaatgccattcgttaccagtacatgtcaggagtaggactgtgataggcaaaagatttctgctttccaggggctcctttcccagtcctctggcccaagagagagagtttatcttgcagttttttctgttaacagcttttgcacagtttcaagattcagactgctcttgattttatgccggaaaatatcggaggatataaaaaagca

SEQ ID NO: 472306 - DNA, 563 bp, Homo sapiens
ccttgtcctacaaagccccatgatcccacccctatctggctttatcccatccaaattccttttcaaaccctgtatgccacttataactcccggtgctggacactgctgtgccttctcagtcctctatccagctattacccgtctgtgaatcctcttcatactctgattctcatgggctccttttcctggctctggctagaaaactgtggctttggattccctgcattgtcatgaacttcctgcagttgggwctacctcagggaaaagtgggcaagacaaaagagtctacagagcctctactgctgtagctgctatccccaattccgccaccactgctgctgctcttgccaccgcgttgtaatgccattcgttaccagtacatgtcaggagtaggactgtgataggcaaaagatttctgctttccaggggctcctttcccagtcctctggcccaagagagagagtttatcttgcagttttttctgttaacagcttttgcacagtttcaagattcagactgctcttgattttatgccggaaaatatcggaggatataaaaaagca

SEQ ID NO: 472307 - DNA, 563 bp, Homo sapiens
ccttgtcctacaaagccccatgatcccacccctatctggctttatcccatccaaattccttttcaaaccctgtatgccacttataactcccggtgctggacactgctgtgccttctcagtcctctatccagctattacccgtctgtgaatcctcttcatactctgattctcatgggctccttttcctggctctggctagaaaactgtggctttggattccctgcattgtcatgaacttcctgcagttgggtctacctcagggaaaagtgggcaagacaaaagagtctacagagcctctactgctgtagctgctatccccaattccgccaccactgctgctgctcttgccaccgcgttgtaatgccattcgttaccagtacatgtcaggagtaggactgtgataggcaaaagatttctgctttccaggggctcctttcccagtcctctggcccaagagagagagtttatsttgcagttttttctgttaacagcttttgcacagtttcaagattcagactgctcttgattttatgccggaaaatatcggaggatataaaaaagca

SEQ ID NO: 472308 - DNA, 618 bp, Homo sapiens
tggttagaggcaggtggaggaatggaggcctggccttctattaatatcagccccactgcatgctggcttcagccatgatgagagagctgcactgagcttgggggagctgagagacacattgagaatggtggatgctagaacagtaccagaaactggggacctgraggtcatggcaagggtgacagggagaaaaactgtggagatgaaaaggacccaaagaggaggaagaaaagaagtcacttttggagggaaaatcctgtcaaaactcataaaatactgataaaatgtagagtgacgcatgaatttcctagggcagcagtaacaaattatcacaaacttggtggttttaagcaccaagttctgttgttttaacaacagaaatgtattctctcacagttatggagtctggaagcccaaaatcaaggtgtcaccaagactgatctccctctgaaggttctagggaagaatccctcctggtttctttctagtttctggtggctttggcaatcctcagtgttcgttggcttgcagctacataactcctttctatgacttcatctctacatggcttcttctccttgtgagtcttttcctcttataaagacaccagtcattgga

SEQ ID NO: 472309 - DNA, 617 bp, Homo sapiens
gttagaggcaggtggaggaatggaggcctggccttctattaatatcagccccactgcatgctggcttcagccatgatgagagagctgcactgagcttgggggagctgagagacacattgagaatggtggatgctagaacagtaccagaaactggggacctggaggtcatggcaagggtgacagggagaaaaactgtggagatgaaaaggacccaaagaggaggaagaaaagaagtcacttttggagggaaaatcctgtcaaaactcataaaatactgataaaatgtagagtgacgcatgaatttcctagggcagcagtaacaaattatcacaaacttggtggttttaagcaccaagttctgttgttttaacaacagaaatgtattctctcacagttatggagtctggaagcccaaaatcaaggtgtcaccaagactgatctccctctgaaggttctagggaagaatccctcctggtttctttctagtttctggtggctttggcaatcctcagtgttcgttggcttgcagctacataactcctttctatgacttcatctctacatggcytcttctccttgtgagtcttttcctcttataaagacaccagtcattggat

SEQ ID NO: 472310 - DNA, 596 bp, Homo sapiens
tcttttatatatttagttatttcttctcccatccccagagaggtctcagaagaataaactcatttcttttcaaaaggaatttgtttcagaataggaacttataaaataaaaaatataaattttctggtctattttataagaaaaagtcaaagtaaatccaagtaaacataacagatgttcccttactgcttgtcaggtgacaatattcacaacaatgatctgttttaggtkaagggaacaatgatgtaaaatatatgactcttgttctccagaatgtcactctaactgtccaggatcattataattcaaatgtaacctacatcaacttttctacaagaccctctagtcttattccttctcattatattcctagttctttatctttcttcatcctgttcctcctgtcttaaagtctttctttctgttctgttctcctctccttcttttgagacctgacccaggtcccatattctccataagaccttcctgacttctgcactgatactgaatctttcttctgaacaccactaacatgcattttgggttctacccatgtggctcttggccagtgctgcctcaaattgttagggatatca

SEQ ID NO: 472311 - DNA, 596 bp, Homo sapiens
tcttttatatatttagttatttcttctcccatccccagagaggtctcagaagaataaactcatttcttttcaaaaggaatttgtttcagaataggaacttataaaataaaaaatataaattttctggtctattttataagaaaaagtcaaagtaaatccaagtaaacataacagatgttcccttactgcttgtcaggtgacaatattcacaacaatgatctgttttaggtgaagggaacaatgatgtaaaatatatgactcttgttctccagaatgtcactctaactgtccaggatcattataattcaaatgtaacctacatcaacttttctacaagaccctctagtcttattccttctcattatattcctagttctttatctttcttcatcctgttcctcctgtcttaargtctttctttctgttctgttctcctctccttcttttgagacctgacccaggtcccatattctccataagaccttcctgacttctgcactgatactgaatctttcttctgaacaccactaacatgcattttgggttctacccatgtggctcttggccagtgctgcctcaaattgttagggatatca

SEQ ID NO: 472312 - DNA, 582 bp, Homo sapiens
tggcagcaacaagacatatgtgagactaatacccacagcctgcctctttgcatgtgcaattaaaaattcactctacagtagcactggcagtttagtgttgcttttggcatttacaaattcttttattttgtgacttttttttaccatacacatatgctggagcagatgttgcttatttgttgtttattcaaatctgtaggctctggcagctaactccattgttctgtaatgaagctttattcactgtcctgtattaggacccagcgcctgcacgagaggctgcattagttcccagtaggacaccacagttattgcccttgtagttggctgtttgtcgttggaagcttgcactgggggaaaaaagcagcagcaacaaagggctgggtagtcgccrtcggggtgagtggaagggaatggacaggagagtcgtcttgctgtcccctgctctatattcctgcccggtggcctcagcctggcatctagactcatctgctttggggatttggtgtctgaggctgggaagtattttctatcctgctctttctcttttttgcctttatttttctctctctggttatttat

SEQ ID NO: 472313 - DNA, 567 bp, Homo sapiens
gctcatatatactaaaatccaataggcaatattcccactgtacttttctgtgaatttcttactacagttaaatcttggtaactgtgagttccatgttcatggattctactaacctcagggaaaataaaaagataattgtgtctactgaacatgcacagacttttttcttgttaatatttcctaaagaataawatatgataactatttacaaaacatttacattgtattagatattgtgaataatctagagatgatttaaagtatacatgcataggttacatgcaaatactataccatttcttttaagggattggaatatccctggattttgtatctgacgggggtcctggaatgatggataccaagtgatgactgtattttctttttcactggtaatatcaattaaggtgtatgtcttgatgtagtagagaatgtcctgttttagagaccaggacactgggttccaggctctagttataactgctataatccattttataccttctggtaaatcataaaactgctactctttcaattctttcttcctttaaaacagagtgatacaac

SEQ ID NO: 472314 - DNA, 453 bp, Homo sapiens
gtttatgagatggcatcttatttttgttttattttccatatttaaaattctaaaacactaaacatatttttatgtgctttttgaaacatcaaatattctgttcaataaactgcctatttatatcatttttccatgtttctwttgggatgctttcctttttcttttttatatataggggtttttcatatatagcttctttgtttaaagcatttttcagttggtggtactagttggtgccttttttgttaggattttaaattttactttatttaaatgtatcaatacatattttataatttattatacacttttttcataccacattcagttttaactatctcagttaagaaacatgaagtctagaaaatatgtgtccaatgtgaatgtatctttggccatatggataattatttatttgactggtgaacctttataattaatgctcaaaggata

SEQ ID NO: 472315 - DNA, 453 bp, Homo sapiens
gtttatgagatggcatcttatttttgttttattttccatatttaaaattctaaaacactaaacatatttttatgtgctttttgaaacatcaaatattctgttcaataaactgcctatttatatcatttttccatgtttctattggratgctttcctttttcttttttatatataggggtttttcatatatagcttctttgtttaaagcatttttcagttggtggtactagttggtgccttttttgttaggattttaaattttactttatttaaatgtatcaatacatattttataatttattatacacttttttcataccacattcagttttaactatctcagttaagaaacatgaagtctagaaaatatgtgtccaatgtgaatgtatctttggccatatggataattatttatttgactggtgaacctttataattaatgctcaaaggata

SEQ ID NO: 472316 - DNA, 504 bp, Homo sapiens
ggttctgatctgtctcctttatcataggtataatccagttaccaagaatgtgactgtcaagagtgaaggcgctattcaggtcaacttcacacttgttcgatcctcaacagattcaaacaatgaatcaaagaaaggaaaaggggctagcagcagcaccaatgatgccagtgatccaactaytaaagagtttgaaactttaattaaagacctttcagcggagaatggtttggaaagcctcatgttacgctcctcctcaaatctggctctggctctttatcgataccattcctacaaagacttatcagagtttctgagaggacttgtaatgaactatccacatattacaaatcttaccaagtaagtgtcactttctattgtctttttttttttttcaagacagtaaaatcagcattagccatgttgaatagttgtaatttatatagaaatatttgggaacagaatgtacagagagttggagtttacttattttgcaacatgtatttg

SEQ ID NO: 472317 - DNA, 669 bp, Homo sapiens
ataatgtgtaaagtggagcgggtagttgaaatctagcaattacggtttttcttgatgtgacaggttaaaggtgtctgctatatctttgctaacctaccactgaggaggtgagtctattttctatcttcttggagttgagtttgctttaaattatttgatcaacgaacgcagtgaaagtggtcttctgggacttctgaggctaggtcagaatgagtcttgcagattacactcagctgaaagaatactcattctaggaactctactgctctgccaatgaggaagcccaagcatcctgtgaatgggcmtttatggatcacaaccaagttaccctaacaaaagacttggccaagttctcagccaacagccaacacccacttgctagccatgtgagggagccatcttaaaaatgcatccactagtactagccatgccacctcaactaacatctcagggatcagaaaggaaacacccagctaagcatttcgccaattcctcttccacaaaaatcatgatctaaagaaactgcttttttagcccactaagatttgaaatagtttgttacatatcaacaggtaatgggaacactggatatggattaaaacaaacacccaaacagctggctttgggaaagcagtggtattacatgtaaaacttcctttgcaaagctaa

SEQ ID NO: 472318 - DNA, 585 bp, Homo sapiens
agtgtatctcttaggagaattttcactttttatttaatattactatcaaatttaaacaaaacatatgtctagtagactgtttttctaaaaattgtaattaagtacacatagcatgaaatttaccatcttattcatttttaaaagtatagtttagtaatgttaaatgtattcatactgatgtacagtcagtatccagaactttttcaccttgcaaaactgaaattctatattcattaaacagcaactcactatttcctttgttagggatttttttttttttttgagagagagtatcaaatcacatctaatttatcttattgttataattgctaaaaggatgattacaatacttttgtagagtggacactcaagagatttgagattatcaaaattcaacargcatttcttttcaaatattaaataataaatattttttattgcttttgtatgaaattgtttatacaagcctttttgttttattgtttcagataataatgaaattgggtttgttgtgtattatgatgggcagatttgggactttttgtggggggtaacatttactgattttattttttaaattttaga

SEQ ID NO: 472319 - DNA, 592 bp, Homo sapiens
tactcaagttttccaacaattccatgatgtgaatattttcaaccaataggcacgtctcacctttcctagctgtatttgtaacccatgcagtttgcatcatctgacactaattactagctagaaggcaagagagcgattctcccccagcaaaagattccaaggtcattctgcaactgaaagaaggtgggagccttactgtgaaaatcaggctacatccagagacaatagagagaaggaaaggagaaaaattctttatagaaatggaagaacaagtgtattacaacaacaggctatacccttgcaagtcagtgggtgggaagaggaggaggggggtgatgagggatagacgctaacaccmcagaaaacctaaaaatggtgctggcacttttgttagcactaatactaacaatgtcactaggaaagagccagaggtaactgcaaagcagcattgtcagatgttcgactcgttatctgcagcaaaatgtggaacttgaactttactcacgactttatgtctaactttgattcttatacttccatagatttgaagcacagaaatgtaaaagaactttcaacctggaaaaaaatttta

SEQ ID NO: 472320 - DNA, 535 bp, Homo sapiens
gagtagctgggactacaggcgcccgccactgcacccggctaatttttgtattttttttttttcagtggagacagggtttcaccatgttggccaggctggtctcaaactcctgacctcaagtgatctgcctgcctcagcctcccaaagtgctgggaatacaggcgtgagctactgcgcccagccttaaatcttatcatccaaaatcaccttcagggaaacatccagaatgtcggactaaatatctggtcactgtggcccaggcaagttgacacataaaagtaatcatcatgggggcttcctgtttaatccctaagacctgggagtaggtgccagattcccgtttccgatgaggaaactgaggctccaaggagtggagaggtatctcagggcacggagttgyggtgccatgccatcagaaggcagggcatgagagtgctgcctgcgtgtcacctgggtgaccagagaagaggcgtgtgagttcacccaccagaaccaggtggaagtatgactgtgcatggaaaggggatgatgggca

SEQ ID NO: 472321 - DNA, 683 bp, Homo sapiens
ctcaagaacaaaacaaaacaatagggttcctgcctccagcatctcagcatctctcttccttcccccttcctgctgaacatgacaaggcagcccttccaaaaacactactctgatatggcccatcctggtccaaaactctgcagggctccccacgtaagcccaagctcagccatgctcagcccctttgactggaagtcccctgcctccactaactttcctcctgaacgcatctctcattcaaggtttaggtcacggctcccttctctatgaagccaaaagagattcccttcccagccccaccttttcaaatcccatagtactttggatataaatcacctctatgacccttatcaatttcatgtcttttccccatactagatggccaagtctccggatgtggggcccatagttcaaacatctgtggaccctgcacaggcttgggggcagcacttggctcatgggggcagcacttgaacatgttatttatagatcagaggaggaggcaagggtgtccagcccacagaaagcctgtatttcctgagtaatctttctaaaagttgtggggaagggctgctgaggtgtgagatggacagamagacacacgcacaggcccaatgggtagtttctgaacatctactatgagtcaacaccatggctggcacaatctcggacaggacagtaag

SEQ ID NO: 472322 - DNA, 592 bp, Homo sapiens
aagacattttttgatctctcatcttataaggttcgtggtcactttggggagatcatatctgtcacccaacataaccatattatgataagagccaaaagtagatagggtcagttcacgtgcttcgagttcacagggactatgggtctaaggagccggggtggaggaaacagacatygtcaatggtggcttcacgggagggagatgggatctcaactgggcccttggaggagaagctgccacgacctcccccaacaccttgacattaaatgaacagacacatgaatgagggggaaaggaagactaattgggtccctgcaaggtggctggatcggggtcagaccacaaggccgatctcagcgtcgcctccccactctgcagccccagcacaggaagtcacactttaaagcctcctctggcggaaattgtgggggagttggaggggtgttgggccaccccctcaactgtctctccacaggcaccccagcttcctgcccttctgctccaggctggagtctgggcctaaagagctcacctcctgtttctcctgttttgcttcatttacgcaactgctgaggactgggcttactggggc

SEQ ID NO: 472323 - DNA, 613 bp, Homo sapiens
gatatttctgtcacagccataatcgctgtcatttttcagatctgtgaaaagtagrggaacaaaattgttgatcactttgtcctctgaaactatctgtctacctgaggacctgttgagtaaactgtccttgggcctcactctgagaaacatttcactgccttaagagatatcaaattcctaagagatgggctgtggggaagatgactgaaggacagatgggtgtacaaatctggaggcttgaggggagacagagtggactccggcattttccgagtcctacatttcttcctctggcctgggagtacgcagcaatgattatgatctaccaccagagggcactgtggcactagggacgccagccttggacccccctgggtctggcgttcctattcttctccacgtattcttgacggctacccaaagagctttcagctctttaaccacattaatttcgtttctttccttacattcagggttcttaacctggcaaccatggtaggactttttatggtcagtgaacctcagaatttatatatatatgtctgagtaagtgtatatacctctatctagaggtagtttatagttgtaatcaagttctcaaaggtgtatgtga

SEQ ID NO: 472324 - DNA, 613 bp, Homo sapiens
gatatttctgtcacagccataatcgctgtcatttttcagatctgtgaaaagtagaggaacaaaattgttgatcactttgtcctctgaaactatctgtctacctgaggacctgttgagtaaactgtccttgggcctcactctgagaaacatttcactgccttaagagatatcaaattcctaagagatgggctgtggggaagatgactgaaggacagatgggtgtacaaatctggaggcttgaggggakacagagtggactccggcattttccgagtcctacatttcttcctctggcctgggagtacgcagcaatgattatgatctaccaccagagggcactgtggcactagggacgccagccttggacccccctgggtctggcgttcctattcttctccacgtattcttgacggctacccaaagagctttcagctctttaaccacattaatttcgtttctttccttacattcagggttcttaacctggcaaccatggtaggactttttatggtcagtgaacctcagaatttatatatatatgtctgagtaagtgtatatacctctatctagaggtagtttatagttgtaatcaagttctcaaaggtgtatgtga

SEQ ID NO: 472325 - DNA, 554 bp, Homo sapiens
gagggacacagggcactgctctcctttcctctgctatctcctgactccaaaactcctgaaaatggcagatgcccaatggtagagctgaaatgaacaccttttttgcattttcagctgaggtggcccatgagggacaacagaggcctccctggagagactgtggcccacataaccctcaccagggtcaacaaagcaaggccagaaggtcaaacttcctgccttcagggatttgtagccctttaacctctggagagagaaagttcaaaaaggaggtcccttgaatggccccgtgcacagattttatcacagtacaacacaacacatggaccaagatttctctacccttcccacacctaagcagcaccagtctgcaacatcataaggttcctaagcaaagaaagcataaaactggcaaaacctgagggtccctgtgattccctggtgaccttaatagccctcccacctctaccccatgggtttgccaccatttttccttcttctgaatcctaaacacrgccagctatgacctagaaagtgtggaccactcacatggt

SEQ ID NO: 472326 - DNA, 657 bp, Homo sapiens
tccaacaaccttatcatgcaggaaggagaatatccccasttacaaacagaggcccagagagaataaacaatgtgcccacactgctgagctagtagctggtgaagctgccctcatcccccagtgcaaccgtaaggcctgtgagcttaaccctggcaccaagcgcctgtcacccctcttgctgatcaggcctccctgagcacaccactcaccaggctcagccccagttctatcccttgcttaccgttccttggccggaaacactgccatcttccccttcacatctccaaatcccaccccactggcaaggctcaaacttatatggccagtctccaggaaactgtctctgccctttgagatctcacagtcacaccccaactcagacctggcactccactctgctgatacctcctgggcctcagtttcctcatctgtacaatgggaggaccatacaggattgttcctttgtctgggacactgctgtgagctccgggcctggccttcacgcagaggccctgcccaggatcctcacaccgaccttgctgctccttactgtgccccaccccaacccctgtgcagggccagggcctccaacatatgccaacttggggctaccacacccctgaaattaagataccaaagttatgctgctttttggca

SEQ ID NO: 472327 - DNA, 635 bp, Homo sapiens
aaatggattaattacactctcatattaaccaccacctctcttctggatatgctatttaaaaatacttattgctattatatctaattagcactgcatttgggttttctactgytactgttttaaaaattcaagtaatttcatgtttatgatgaagcttttaatggattagataaaatgggaatttactaagaagtttctgggacccatctgtggtagtgtgaactaaatatttgacccttgctcccacgctctggcttacaactcctaatatccttagaatctccaaagcgaggtatgctattgagactggtggctggcagcccctaggtagcttcaggatgggggctcatcacagtgaagaccaaggcacaattaagagggttgagactattcagcccacccataacctcttgggaggagaggagccaaaggttaatttcactaaaggccaattagctaatcaagcccccataaaagcccaaaaggacagagtttggagtgcctgtggaaagcacacctcaactccatggggacagacactcctgtgctcaggacaattctaggccttctcaaatgtgtcccttcatctggctgtttatttgtggctgctcttcagtcatatcacctctattcca

SEQ ID NO: 472328 - DNA, 484 bp, Homo sapiens
ctgggtattgaatcgtgataattttgtactttattcttctgaaagtgataatttcctttctctttttgcctgtgaaccatgcttcaacaagcataaacccwtaccttctaaaataaatgattataatatatacatataaatgttttctataggtatttatatataaatatttctatatacaatctatatatataaaaatataaaaatacatgttaatatataaatatatatggtaggttctagtatatatagaaaagacctgtgtatttctaacgtgtttgtatacagcaaatacagttgtatattacattttatttacatatatttatgtatatttctatatagtaaattctactatattcagaaaagacctgtgtatttctaatgaatggaaatatgaaatatactttttgtctcctcagtcgcaaaaataaaaagactcttttcaagtagacagattttgctctactttgaatttttcttc

SEQ ID NO: 472329 - DNA, 395 bp, Homo sapiens
aactttcttgcaagactccttaggtttgaccactgatgtatattaatgaatatagctaaccccgaagttcttttacaaaagctattcctttttctctcctctcttccttctctaggtaatgggataatttataatcattttcattttacaaaggacattaaccctactttttaatttcagagtacattttgaaaacatcaggagacacacttttcaggactttgtcaaagacttgacaacaattattctatatagtcatcagttttktttgcagtgattcaccaccctggggtttgcaaatattggcatttttcccatgtgtgataacttccaggcaaatagccaatcgaatgatgaatttgtaatgctaaatgttttaagaagataattaaaaa

SEQ ID NO: 472330 - DNA, 610 bp, Homo sapiens
aatagatgctttatcacacaygttttaagaaaagtccactcttattcagttgaggaacgacataaattaaccaaatttggggagttgcttttttctagattattatattttatatcataaccctaaaaaagaaaatatttttaagtggttcaattcagttaaggcaaaacaaacagcagcttgtcacacctgtgaagactaaaacctgcatttttaaggggtttgctctcattaattcgttcatccacataaccctgctggtacacaattaaataaaacaaagtctaaaggggcattacgtcccgttcaggctttactcagagagtctactgcagccaagaaaaaaatccaaagtgcctccacagttgttccttttcttcttctccttctcttgtattacatttccagagcccctactgttcctgccactgatagtcacgatgataacggtgggcatcattgcaccctttggcagtctctgcctccaaaggagaggccatggggtggagcatgatggaaagcaaaggctttgagccaagctattgtactccaaattctgctgtaccacttcaggctgggtgactctgggaaagaaacttaaaccatctga

SEQ ID NO: 472331 - DNA, 629 bp, Homo sapiens
ttgagctgaatataatctatcagtcttatttcccacccccacacctgctctaactgctcccgatttagcaagtgctattatatagagaggctaattataggggagtgtaacaaaagcagcttcatgttgaaatagcattcacgtgygccctcctgagaggcagtcaaacgtatatggcagactggggatgtcacaggatatgcacgagacagctgggtttcaactgagcatcactaaatggaactgaggagtcaatcaaaccgcgtcagtctagagaagggcatggagaatgtcttcctaaaatacagagacattttccagggatccgccaggaacctggccctccttagtcatgtagtcatgtcttcatcctatagatgtgaatctatataaaaatagctcatgatttagaagagacaggcttgtaaacagacaaattacctgacaacatgaaagtgttactggacaaatatgtgaagcaactcagtctgcctgtgtgagtcaaaaagcttccatcaaggaagtgacatgtgagcagtgtcttcaaggagagctaagaattgtctaggaagagatgggcgtggaggcaaaggcatgtggcatgagagggcctgcgtgatgccagaggc

SEQ ID NO: 472332 - DNA, 501 bp, Homo sapiens
ccctggagaaaagttacaagtatcagaatatgaaaataaaagatctttctgcaggaattcagccttatcaaaccctaacattgcttcatactttgacaaacaggagaaatgaggcctaaaaattaattgctgaatttcatgtgcagagagctgatcctttcttccaaagttagtcctaccaatggactaaagcagcagcattttgtaaacaaaatctaatcttcagccacacttctggaattgcaaacttccatcacgtttctcrtaattatcagatactaataacagcacaggcacaagagaaagttatatttagaagcacagttacccggaaaagtaattctcctctgagctggatgattctgagtgaatttgatgtcaactattttcacacctccaacacacaaacttaatctacagtccttctataaataaaatcagaagtaaagtgtatgctgatgagagttttatgttcttgagttttcttctctaaaacttagg

SEQ ID NO: 472333 - DNA, 400 bp, Homo sapiens
ttatgtcttaagaatttgtgggaccattaaaatctttgaaaacaggatttttgttttccaagttttaatataagtaatacataatcattgtaaaggaagagatatggaaatataccggtaagttataagagcatctatatctaatctcccaggcccagcactgttcattaatcctgatggcttcccatttgcacatatgtataagtggcaagcaatattattgtgatattaactcaagtgttagtagcacagacaggatgtgcagcaggatcaatcaaggtccacccacagcactatcctgcaaaggttccaacatcccatccagcccaggagcaataaagagagcatagaccrtgctcactgctacagatgagcagaggcttctatacctgtggagcct

SEQ ID NO: 472334 - DNA, 605 bp, Homo sapiens
tgcatgggtgtgggcagttactttacctctctgggtctagttttctcttctatcaaattcagatgctaayagccctgctcatgtggagcttcccatccagtgggagtcagtagctgatgctaaaggggtgcagggtctcacactgaggagagggtcagcacagagcagggcccactctagtgagaatggcaccaatacccttcaatgaaagacatgcagggacaaacttgtagcttagcaaagttgggttaattgccttgtggcaacaagacagggtgagcaccatgggaaccattaggtgactcaagaagactgtattagaaacaggtcattctaggatttgggctttcttctttcagatgatttttgggtaggttccgtgaagtgaggctttgaataaaatgctttctgaaagcaaggttaattctacaactggacatgttcatatgtctatctaaaaggcagaaatgccagatcaaaggtaagcctataattaagaaaaaactgtattcactcatatcattcaggaaaataaagggatgtttggttgtttttgtaggttctttactatccttatatttttgagaattcagacatgattttaa

SEQ ID NO: 472335 - DNA, 494 bp, Homo sapiens
ggagacctcacaggtggtgcagggttcaagtgcagaccatgggaaaagcccgctgaaatgcagcccgtatccttctgtaagccactcatgagcacaccaggctgggacgaggctgctgaattcaacccaacatcttgtataaagcaaggacttcactgtcttcctctgacagtcttcagagggattattaaaatgtgtcaggggagtgcccatgtagccagtaaaaaaaaaaaaaaaaaaaaaaaaaaaacagtcattccaggattacttaggaattatccaatctgaattatgttgtttcttcaggaatgaatctctcrtgaaatatattctccctacatgtttatatactttaaatatttcatataagctgctatataaactgtgattttgctactctgagcctgtgttaaattgctgtaaattaagaatcataataatgcccatatcaaagaaacacaataaggatgaatttagaccatatgcaatgcccc

SEQ ID NO: 472336 - DNA, 586 bp, Homo sapiens
acagaaaaataagctttaatctacaatgaatgccagattatacagcagaaagcaattttcttagctttccacactgatagaaaggttcctactaagtgaaaaaagccataaagttatattcacaaatatagtactctgtctcaaaacattccacatgactattcacaatattaatacaattaratcagtcattcagtcaggttaaagtataacagtaatgaaaaaaatgcaaaatctaacataaattacgttaaaacctttgttcatcaaatcaaaaagcaaatttcctaccaaatacagaaaaacggtaaaatatatagtaatttaaaatattacattaatgatacagaataagaaagtggtaaactccaaaaatctacaggcatatctgcaaacttcagacttcaaagtagaatctgaccacccaaacattaatgtagcatttgtctaattttgttttgttttgttttgtttttgagatggagtctcactccatcacccaggctggagcacagtggcaacatcccagcccaccacaacccccgcctccgaggctcaagtgactctccccctcaagctgcgcaag

SEQ ID NO: 472337 - DNA, 360 bp, Homo sapiens
ctgtccttctacacaattctgttcaaatattattctttgaatatataagtaatattaagaagtcctcctttcttatgtcttaatcataattttaccagtagatcttaaatgaaatcccttatattcttatcatcacctatttgtgtaggtacarttctttcatagtggacttaatgttggtcttagtgagtggtttgttttatatattaagtatacttatgctttgctatatttattactattgggcacttaaaggggaatgcttggaaaaaactgggttgattttgctaggaatcaaccttaaagggcagaagattattgaaatttgaccctttccatcttaatctttgttccaagcag

SEQ ID NO: 472338 - DNA, 650 bp, Homo sapiens
attcaggagatgaaggctgtataagtattttatttacatgatattgacaacaagtttcttcagatgagactctctctcatgagtccacaataaattcccaagctttttttgatgtagatgaattgaatgagtggctggtcagaggctgagacaaaaagagmtccctgcattcagggcagccattaaatgcagtccctgctgccatatcacgcagctgtttctcactgaggtgtgggaaattgggaattttttgtaaacaaaaacgttatctgcaaatataagagattatttgtcctattgttaaaaaaactcaagtatatgacttgctaatacttacttccaatgtcatttctactatattgagagttaaatgtaagtgtccttgggcagaaagagaggacctcagcttggacaagagtctgccctttactagctacataacatcacacattaaattgttctcagctgaaaaaatggaggtaataacacacgaccatctgttttgagaatcaaattggataatacctatggtatgtgatatgtgtgtaaatctcatatcaggaatgctttcatataaaacaaaacaccatatgagatgaggatggttcagagtttattcagaaacatatagctaagaatctctgctggta

SEQ ID NO: 472339 - DNA, 608 bp, Homo sapiens
gaaacacagcaggagggctgrcagcagggtgtgctgctgcaggtggtcacagtggtgggctgccagcaggtggtcctgcagcaggtaggctgacagcaaggggagcaacagtgggtcatggtgtcagggatggagggtgggcttctgttaagaggtgagtttcccaaaatctgatgaccccttgcaatctggaccttttatacacctggcctccaaagtttccaccaatcagcaggacttttccttgttgctgtttacattgttttccacagtccatttgggattgtcaaaggggaagttgttactgaaatcttatgaaccttttaaactaagggtttaatctgtttcttaattgtgagttactcatagaaagtttgtttcagataaaaggaagcccgtctcatcatcagcatcattcctgctctgaccatcatctggtcatgtgacagttcctgttgatccggggggctcaggaagttctctctggccagcctcatgtttggctgtatatagacttggaagtgtctgtggggagaagcatgatgctgatatatttacagtgacaaaatgaatccatgcctgggcccaagactattcacccaccaaat

SEQ ID NO: 472340 - DNA, 503 bp, Homo sapiens
cctcatggtttagccacaccaccacctttaaccctagaactaagacaaggggagaagtgcgggtgagaagtgagtaaggcgaaggttgcttccaagcaccccctcacccaccgtttgtgcccctcccaaccctatggactggtacttcttccctggctgagggcgggctggtattaatggttcctgtgttccatgcctgggggaggcaaggaagggctggagatgggtctcrgggcacatctgcacaggacagaggtctcccacggtagccccggtctaggcttaagccccagagcactcacagttccttccccagctcctgtccactgagtaggttcagcctttgttgctagaagtggaaacttttctccttggttgattttctttcaagacccagtcagaggatgggaacctgactgctgtgaggtctctcactttatcaccacatggagggagtggaattgggttacattcaggttgccagaaccttctttctggctgga

SEQ ID NO: 472341 - DNA, 546 bp, Homo sapiens
taccccaccctccttgatttaagacctgtcttgggatctgctcatctgagtggagcaggactctgtcccttccaacattttgcctgctagggacygtgtctagctcatagatctcttatttctgatgtgtccatttggtcatgggcctgtgagccacgcggagcaggaagggcagggaggtggggtcgagagctgccagccatctgcccctctgatcttttccagcactgtcctctgccagcatccccctttacttctgtgtcttcttggtaatcactgaactctttgctctcgaggtggttcatggacttcctgcctgcactcctaggtcttggagagagcgcctcccctgggagtcctgccagcaattctttagctacatgtagttttaggttccatggcaggcatttttcctgattctggtttagaacgacagcaccgctttatgcttggatacctttacattcatctgggctgaactattttctccccagagctttcaggaaccaaaatggtaatcaggtgatgagcagcccttctccttcc

SEQ ID NO: 472342 - DNA, 621 bp, Homo sapiens
atctaattatgtatgccttatatataatatatacatatatatatctaatatacatatatattagaggggaacaacacacagtggggtctaccagagggtggaaggtaggaggatggaaaggatcaagaaaaaataactatgggtactaggcttaatatctgagtgatgaaataatctgcacaacaaaccaccatgacacacgtttacctgtgtaacaatcctgcacatgtacccttgaacttaaaaaattttaaacaatgagatatctaaatgaatgaatgaatagataaataaataaaagctattgtgttgaagaaaaagaaattattaggttcccaaaactgcatttccagcctccctcccaaaatttctgatttgatatgtcttgggcagagtctgatattctgcaagttttacaagttccctagtgataygaaaatggctggttcttggaccacattttgagacccatcaacatggaataatcaagattgatctccttgacattgtggagaagctcgactcccttgaaggacaaggaagccatgtagtgagtgaggtctttaggtttctgttagccagataattatcttttgtttagttagctaagaataactgata

SEQ ID NO: 472343 - DNA, 500 bp, Homo sapiens
ctgcagcagaggataggataagaagaggatgtccccaagtcctctggtcccctgtggaagggatgagaggaagaggcctaattactttgactagaatcaggacagtacagttgagagaagtaagagrttatccttccttccattctctttccatagataattcatttgaaatctagtaactttggcagaattattttcacagcctttttggcagtttctaggcctacagcataggtgctggagttattctgacctacagtggacattcaggtcttacctgctgcatgaccctgggcaggttacttatcttctctgatggtcacgcacctcttgctgcccaaagatgacgcgtgctgcacagactggtgctgagccgtgcactgtgcatcactggccatgccgaaggaagcatgttaactgaaagctgtcaggcatggtggtgagtacctatactcccagctacttggaggctgatgctagatgatcacttgagcccagga

SEQ ID NO: 472344 - DNA, 386 bp, Homo sapiens
ccagaacatggactctggagtctgagtgcctaggttcaaatcctcattctgcaactcgctagctctgagtctcagccttttcacctataaaatggagccaatcaaagaacctgccacwcagagctgatgtaatgattaaatatgttaatctgtgtaaagtgcttggaacaggggtcagcacagagtaaatgctcgataaatatggagtggattaagagctgtctcaaggccatgggatgaatttggtggccccccaaggttcttctgatccaggtcacctatgccatattttctacaaggaggttgcagcaaggtctcttccaagccccttccccttcctcatcttctgcccagagtaagtgcagctcctactccaacatgcacaa

SEQ ID NO: 472345 - DNA, 562 bp, Homo sapiens
ttgattcagcagaactgggcacccatactgggtatagcrtcaggctgaacactgggaaggttgaaaagcaaagaaaagatagggagtcaggagaaaacacggcatattttagagggcaggaagcttagaataaagcggacttggtttcaaggcttgggtctgcccttttttatgattgctgtggcttctgttcagttacctctctgtgcttctgtttcttcccatgtaaaataagaatatcttgaaatgttaccaagccttgaaataaaatagatataaaggacttggtactcacagcacctgacataagtggtagtcatcactgtggtatgcaaagactgttcccttcatgggcagaaatcagaggacattggatctcctgcgatccaagatctatgagcaaatcccacaaccccctcccgatgccacttccccatccagaaacctgcttcctccagggaagccagatcctgatgatctctgggggccccttagagcccttagcacctaggactgccttcttctgtagactccatctcctaccttgacctgtagagctgca

SEQ ID NO: 472346 - DNA, 426 bp, Homo sapiens
cctagccctttcctctctcatttcatgggcaaagcaatcagagccagagaaataattaacttagctccgactggagtcatgggggctgctatccaaccatagcagtcattattcagagcctttacagtgtctcccacagcgctatacgcctgacagttatttgctccttgagtcctcccagcaacattgagacatcatgtgccacttaacaatgatgacacattatgagaaatgcatcgttaggtgatttcctcattatgtaagcatcatagagtactctcacacaaatgtagatggtatagcctaccacacaccgaagctatatggtatagcgtatggctcctaagttataaatctgtgtaacatgwgactgtatggaatactgtaggcaacagtaacacaatggtaagtatttgtatatctaaa

SEQ ID NO: 472347 - DNA, 557 bp, Homo sapiens
ttacctctccaagtgtcaactcctttcctataagatatggctaataacagtgctacaatgactaaatgagttagtgtttgaaagctcttagagactacaggaataaataagtgatggtgaaataaaaataaacaatgtattgcacagctcaagtaggtagaggacaggagagctgggatgggtgatgataaccttacttcaatctcatttttcatgacaaggaaactaaggttaggggagtagaattaactttgattacaaggtagaagcaatcagagatatcacactgggctcacaacaaaagaactgtataactggaaggctccttggtgatcctactgatagggacaggaggcagagaaattctagccagaaaagggtgagtctctggtgaagccccaccttcaagctgaaaagcctgaaacaacagcccaaagtgagaaattctatcgctgtttttccacttgaatgtttccttttcataaaccacccatggccccaccatgcctcatcctgtgcctataaagwccccagagtcagccagcagagaggaggag

SEQ ID NO: 472348 - DNA, 570 bp, Homo sapiens
atcatgagactttttttttttttaaagtggacattttgataaacaattagacatcagtggtaacttgtaggtggttgggtataattaccttccttgtccaataatctttagattttaaaactacccaaaaagaaaaggatggaaaatagcaagctgggagggttattgacctgggtaaaccatttgtacccaattttaaagaatgcaacagatgatgctgtcctgagccaaagtagcctgctaggtccaatgctgatcagaaatggcagcaatgagttcctctattaatcattcagaggaattctgtattatgattttaagctgctgaataagtggtgatctaattcctcagaaattcctgcttcccagatctcagaggaagagtaaagtgcttaaaactatctattgtcctttatttccaggatctccatccaaatactttatgtggcccacaaggccctctatgagctggcccctgaccaccccaatctccaaccaytttgcacttgtcactttgcactctggccacagtgacctttgttccatttctcatacatgtcatgcccacgc

SEQ ID NO: 472349 - DNA, 661 bp, Homo sapiens
tttgaacgtatttccagcatgcattcacattgttgcatgctacgctgctggaaacacrgtgtcattggccagaagctggttgccacctgggttgtgaaatagcccaggacttcccaggctctggaggggtagaagcttaaactggtaaagaagttgagaacattgtgactgcaaaggcattaggcaaaagccatacctatatgccatccttatcattgcaaaggtgccactagaaggactatggtcttggaggaggcaagcaaagaaagaagattgatatggtttggctttgtccccacccaaatctcacctggaattgtagctcccacaattcccatgtgtcatgagacggatctggtgggaggtaattgaatcacgggaatgggtctttcccatggtattcttgtgagagtaagtttcatgagatctgatggttttataaaagggagtttccctgcacaaattctcttgtctgctgccgtgtgagacatgcctttgaccttccaccatgattgtgaggcctccccagccatgtggaactgtaggtccattgaacctcttttcccttataaattacccagccttgggtatatctttatcagcagtatgaaagcagactaatacaaagttgtattaaaagaggaattaagatgaaagtaag

SEQ ID NO: 472350 - DNA, 604 bp, Homo sapiens
ctgggaagaagaattagtaaaaactttaattgtggtctcatttacacttctattttcaaactcattcatgaattaattttaactctgtgcctctgccttcaatcaagccataagtacctgtcagaaaatgrcagtgtttgaatatctgcacatatgttggaaatttctacactttgattcctttgtcaaaatttccacttagagctgtgtgggtgaggctctaaggcacaggcaaggaggttagtctctcactgtggccaagattccacgccaaagaatgttcatttagcgtgtaagccaacgcagaactccttattaagacagttggccctcagagtcttataaagcaggaggggagtatgatgtatggaagcaaatgttgagcaggaactacagaaggttagccttaagggtgatgttccatagaggaaccttgggctaatcttaatctgtgaagatggacattggactatagagctttgtggcccctgtgcagcctgccattatacaagatcacttaactacaatgtcttaaagcaactcagtctaaggcagtagttgcaaaaattttggatagtatatccctgttggggaaaaaaatttg

SEQ ID NO: 472351 - DNA, 573 bp, Homo sapiens
aaaactgaggttcaaagataaatgactttttaaactaaagtgttacaatttgacagaaaggaaaactgaggttcaaagataagtgactttttaaactaaagtgttacaagccagtttgacaaagcttgtatgctattataatttcagattcaaattccaatgctccctctcctaaatttttattgttttgaggaaaattaaactaaacattaaaaaagttcatttacttccatttttatgcctcccttgaaatgcaaatttagcacaagccaaccatctctctctaagcatttccaagcacttgaggcatccacttctttgcactcagcagatggtcataaaatatgaacaaatgaagacagttcatctttagactctagggagtcacrgagtcacataagcttaggatttgaatgggcttagaggatttctaaataatgctctctggtttataaataaaaaagctaaggcactacgtcctagagctagtaaaaaaaaccagatatcctcactcccaaaccagtgttctgatgcttgtaaaatctggcactggtttaatcagagagtgaccag

SEQ ID NO: 472352 - DNA, 529 bp, Homo sapiens
ctttctgtaccttacatgagaagtgttgtgaggccttgacctttctgtggtttcggtatctatcaaatcatcttaagactcagacaataaacagttacatctaagatgattctgaaggaccagggcttctccgagaaattggggtaaacctcttggctggctctgcattcaggctggtctgtgctaggcttggtatggggttggagcctggacttgggaaatatactgggctgataggaatttgattggattttcttgcagagtcatttcctacagtgtaaagaggacaacccggactttgaaggcgtggattgtgcaatctttgaatccccatacccgatgacaatggcgctctctgttctagtaactatagaaatgtgtaacgccctcaacaggttagtgcaccttcacggcaggctgaggcgagcatggtgactgccagggcaccrgggaattgtgtgtagtcacggttgattgaggatcacaggacagttcttcccttcccaaaagaaaggagaacaggcaatac

SEQ ID NO: 472353 - DNA, 559 bp, Homo sapiens
ttaaattttcccagctttaattttgaatatgataaacatggacagatgtaaaccacatcaagaaaagctttttaaagctgggcctagtggcatgcagctagttactcaggaggccaaggtggaagtgacataggagttaagaagaaatcacttaggcagatagtaagggtatgggagtcctcggtaaggcttttctttttaatgaaaagcagccycaaatcattttgtaacaaagagcagcctgtaaggttgagctgcaggcagagacaagcaagctgggagcttgcacaggtgaatgccagcaggaactaggggaacagacaagttcaagatggcggctccatcttcccttctctgcccatgagttctagtccagcctgggcaacatagtgagacaccccccatctcttaaaaaaaaaaaaaaaaagaaaaggaatcttttttaagatctcaataattttgaaaagcaaaaatttcccatggagtgttagtcattcaagctcctgagttgcatcacctatactcttgggtagatgtttaggatgtcagatcccatgcc

SEQ ID NO: 472354 - DNA, 316 bp, Homo sapiens
tgacttgacttatcaattcaggcagatattagaaacactgctttcatccacctttccaaggtkcttcacaaaatggaaatcagatcatcttcccctgcttaaaaagcctccaagagtttttcattgtccaagggcctgtgctggctctcttgggaggcatcttcctccagcccctttccacagtacttgggtgttcttggcactctctgaggtcttgcacttgctgtgtttgcgcggaacgatccctatggttggaatttccttctcgtctatgtgcacctatagaatatgtgctcagcctttaagatatggccag

SEQ ID NO: 472355 - DNA, 517 bp, Homo sapiens
agctggatctttatctatgggattaattagtgaattattaatccaaacaaaatttaagccctctcaatgacaattatgttgaagctggcaacttctaatctttttctaagatgagacaaggcctgacaatggctctccacctccttacatgaagagaaggtaaaatgtgaaatgttaccacttaacatattaaagtatacataattgattttggaggaggggtaacatgtactggaaaattacatgatgccagaaactgttaaaagtcccttgtatgggttgatacatttaatttttacacagtctcatgaaggaggtgtcagtgtttcatggatctgcacattaggaagctgaggttcatggaggttaaacgacttccacaaagccacacagttggagggtacatccaggcagcctcagagcctcctcttcacctttacactctcaaagggttctggaagttgatgaagcygaaacttcaggttgctttgacacaaccattgaaatttccaaaggt

SEQ ID NO: 472356 - DNA, 392 bp, Homo sapiens
ggctagagggatgagctgtgcttgagaggctaggtgatccttgtagactgatggatgtcacattcgacactctgtatataatatattctataaatgcataacagttcattccatcacttgagaaggcaaggcacatttctcccatttgatctcagaagaaggcaactcttattccatgtcataaaatggtacagcttatttctcaagtcgaagcgtgttcagtattgtcaatttaatctctcttccatgggaaacaggcagagaagatgargagtacaccagcgcaacgagcatggtggacatgtttacacagatatgcagcgcatatgctcacatttgcacacacatgctcccttgcaacgtgagcatgccaacttcgcaaatgcacaacc

SEQ ID NO: 472357 - DNA, 500 bp, Homo sapiens
gctggcaatgcagaggcagccacgacatttcacagctaataactgaatatgctccttaatcccccacacaaggatgcctgcctaatcagtgggaggggcgcaccttctcctcttccaggaaacagcacagagcaggtgcatgtcaccgaatgtgcacctcccagacaagtctgtgcacgccgcaggtccataaacccaaccacatctcaaatgcgctgtgatctaagaatacgctttactacttcctacacgatactytgataaagctaataaatctctagtaaaacaaacaatcacagcctcgtttgtgtgttgaattaatttagacttcccattgccattttgactcaaaaattgaacttcttgtattatatagaataaaaatgattatatcaaagaactatatagatgagcatgtatattttgtttacgtagcccagtgaatattcttctcactgtagatttcaggacgtgagctgcttttagataatagtaacagc

SEQ ID NO: 472358 - DNA, 500 bp, Homo sapiens
gctggcaatgcagaggcagccacgacatttcacagctaataactgaatatgctccttaatcccccacacaaggatgcctgcctaatcagtgggaggggcgcaccttctcctcttccaggaaacagcacagagcaggtgcatgtcaccgaatgtgcacctcccagacaagtctgtgcacgccgcaggtccataaacccaaccacatctcaaatgcgctgtgatctaagaatacgctttactacttcctacacgatactttgataaagctaataaatctctagtaaaacaarcaatcacagcctcgtttgtgtgttgaattaatttagacttcccattgccattttgactcaaaaattgaacttcttgtattatatagaataaaaatgattatatcaaagaactatatagatgagcatgtatattttgtttacgtagcccagtgaatattcttctcactgtagatttcaggacgtgagctgcttttagataatagtaacagc

SEQ ID NO: 472359 - DNA, 577 bp, Homo sapiens
agcctgttgcaaattccaaatagctttatatactttatcgttgaataaaacggtattaagtatttaaggtgtctgtttagatataaaaatgtctcattatgacatcaattaatttaccctctcctcagatctctgagtgaagctgaccactcggggatggcgggtcatcttcatggaggccccaacccactgtgtctccatctggaagcatctggcagcgcctgcccatgggtgaccagtggggatgggtactcaccactgaaagaatggactgagtgaggtggtgaggactctcttctgttccgggtcatgtcgtcgtcrctggtcacgtcactgttgttgtcgtctaagaggacaccggtcgccaagttactatctctggcccacattctcacaatagttccccccaatccctgagccgcatctccctgtcacagacacacatggttggaatgacctgatcctgacatttctgagttcaaaacccttcagcggcttccaaccactcctggcatactaaaaactgggtggggggagcatggtggctgtgaccaccccgacctcacccccagacaca

SEQ ID NO: 472360 - DNA, 577 bp, Homo sapiens
agcctgttgcaaattccaaatagctttatatactttatcgttgaataaaacggtattaagtatttaaggtgtctgtttagatataaaaatgtctcattatgacatcaattaatttaccctctcctcagatctctgagtgaagctgaccactcggggatggcgggtcatcttcatggaggccccaacccactgtgtctccatctggaagcatctggcagcgcctgcccatgggtgaccagtggggatgggtactcaccactgaaagaatggactgagtgaggtggtgaggactctcttctgttccgggtcatgtcgtcgtcgctggtcacgtcactgttgttgtcgtctaagaggacaccggtcgccaagttactatctctggcccacattctcacaatagttccccccaatccctgagccgcatctccctgtcacagacacacatggttggaatgacctgatcctgacatttctgagytcaaaacccttcagcggcttccaaccactcctggcatactaaaaactgggtggggggagcatggtggctgtgaccaccccgacctcacccccagacaca

SEQ ID NO: 472361 - DNA, 612 bp, Homo sapiens
tatggtttaacctttgtatgtacagctaatttctggtttgtaaaaggtaaaaccttgaacacaaaataatggcaggtaacacattttacacatggaatggtgggaagggacgagcaccactgacagggaaacgtgttctgttgtgttactgctatgtaaccacagtcctaacacaagtcacattagagcaacccagagccaaaggcaggaagaggaagtgctggtcaaccttctcctgcagggctacctgacacaaggtgggccatatgcaatgaggttagctgccttcctggccgagtggcccaacccttagccttggattcamcccgtcctctacttgctgcccaaagggcaactagcagtggggccagatgctgaaatttgcacctgccagggccacatacttacctcaccctgactggggaagaccagatcccacgtgaccttctgtgacagcgagtctggccaatcaaaagcataactgctctgcccacttggcccccacttccccaggccagcttctccatggcaacagccacgcctaccactgaagaaaacagaagatacgtgtttgcaggtgctgagaggaagaaaggtctaaaggcttgcctg

SEQ ID NO: 472362 - DNA, 568 bp, Homo sapiens
tcactctttttttagtagctaagtaatactacagatagagatataccatggttaatgatgagggacccctagtttgtttccaatataaagcctatttcaataagcattyttatcaatataaccttaaaaactggtatcttagtttcttgagtaggtgcctaaagtgggattgaaaagataaaagataggtatattacattagtttaatttgcttctgttcattgattttttttcccctttcagatgtgccaggtgcagagattaaggagttatctgcaaagagggctattaatgaagtattatcgcagtttgacacagtgataaaatgtacaagaaacgtatgtaaggaatgtggaaatctatactgccacaatatgcagcttactctccataagagaaatcatacacaaaagaaatgcaatcagtgtttagattgtgggaaatacttcactcgtcaatcaactctcattcagcatcaaagaatccacacgggagagagaccctataaatgtaacgaatgtattaaaaccttcaaccagagggcacaccttacctagcatgagagaat

SEQ ID NO: 472363 - DNA, 476 bp, Homo sapiens
cacaggtctctgcaaatcacgtaattccttggaggttcacccgtcctcaccagcaacatagggacaatatctgatctcaaagggctggtgtggggtaaatagaaggacagagcttggctcctctttctagaggcaataaaggatcatcttttcttctgttcctagcatgaatgaagaacggttcatgattactgtcccaacctctttctccactttggacgctcttccctgcatcaaatgcacgagggtcctcaataatctcacagcgttctgartcttagtccctgactgctcaccatgcatgaccccttgtggattctacttcccaatctgttcccagcccccagcatctgacctcgtttttggttttctaattatggcttcgtctttgtgacctcttggggacaacattctggaccacgcatgtaaccttggccaccatgctgactctcctggatgggctgccatcagggatc

SEQ ID NO: 472364 - DNA, 519 bp, Homo sapiens
tggccaagatccctcagaaattcctaggcaacgttggaggggtggaggagcctaggatcctctgatttctggctggtttggctggggacagtcctgggggcagttggaagagaggatgttaagatggaaaattacaagatatagttctttttctcccagtttgacaaatatttgttgagtgttggctgtgtccgggactggagctggggtgctgggaagacagagaagcgaggcagaggtctagaatctcagggcagaagggacttggggagaactggggtccatttctttcttcttccaataatagctatttttatttttaaaaaataagagaccatttgatcaagcatctattttatgtggggcatttttgtgcctgacagcaattctggctggtttttttgttkgtttgtttgtttgttttgagacggaaattttgctcttgttgcccaggctgttgtgaaatggcatgatctcggctcactgcaacctccgtctcctgggttcaagcgattctcc

SEQ ID NO: 472365 - DNA, 297 bp, Homo sapiens
cctttagaatgcctgggttccgcaatgagtttcttccattaaaatgcctgtagttgataggtgtcccgattattagacggcctgaattcggccaggagtctcttccattaaaatgtctggggtcacccaggtgtctccagaattagactacttgtgcttggccagaaatctctcccattagaatgcatagtgttgccctggtgtctctatcaktagactgccaggggttggccagttgtctctttaattagaacgtctgatgttgcccaggtgactctattattagactgcctgtgg

SEQ ID NO: 472366 - DNA, 657 bp, Homo sapiens
ttttagtctcaactctcaagtcaagctcaccaccaactgatgccttgtgctctctcgagctacccagagggtgcaccttggctcccagggtagatttggcctacaggactgtccccttttgagatcttccacttwgttaatgggataggaaataaacagttttgagttaaaagaataggtttattatcacagtgcaactccttaaattaaaatccatatagtccaggtctttcttcttcctttgtttgggtttctcttttctaacacctgtcctttagttttcaaactgtaattttttttaacttcctggttctgctttattagggcaaaaccttattatattacatttcctcatgaaatttctcattgctctctctccccactccccctgccccagaaatatctgataagtatactcattgtttactaggacacttatcttaaaccatagacaaattttcctggataaattgatgttatttaatattttcaggggtacaaattttaaagttctgtggaaatactttctgggctaatggccaaactaaaatagaagaggagggacctttgataatatgttccctagagaaggctttgtgattgaatggaatgagcaaagtccacaatgagttactatttttaatataaaaatacgat

SEQ ID NO: 472367 - DNA, 524 bp, Homo sapiens
gcacccaggagggcagatcctgcctcttctcagttcccccaagagcacagggaggctcgaatccacagctacaggaggayggggctcccactagctccatggagtgtgcagccccggtggcacctccctgctgctgctgacatgatggcatcagccactgccatcaacaggtgggatccagcaccttcccctggagagcaggcagtgctgcccaggaaggcatcctcctctttacctgaaagaatatttctgtaactgtgataaaacacacatgaaatacatatgaactttaccatcttagccgttgataaaacacacatgaaatacatatgaactttaccgtcttagctgttgataaaacacacatgaaatacatatgaactttaccatcttagccgttgatgaaacacatgaaatacatatgaactttaccgtcttagccgttttcaagtgcacagctcaatggcattaagttggacaaccatcaccaccctcctctctagaacttcctcctcttcccaaac

SEQ ID NO: 472368 - DNA, 524 bp, Homo sapiens
gcacccaggagggcagatcctgcctcttctcagttcccccaagagcacagggaggctcgaatccacagctacaggaggacggggctcccactagctccatggagtgtgcagccccrgtggcacctccctgctgctgctgacatgatggcatcagccactgccatcaacaggtgggatccagcaccttcccctggagagcaggcagtgctgcccaggaaggcatcctcctctttacctgaaagaatatttctgtaactgtgataaaacacacatgaaatacatatgaactttaccatcttagccgttgataaaacacacatgaaatacatatgaactttaccgtcttagctgttgataaaacacacatgaaatacatatgaactttaccatcttagccgttgatgaaacacatgaaatacatatgaactttaccgtcttagccgttttcaagtgcacagctcaatggcattaagttggacaaccatcaccaccctcctctctagaacttcctcctcttcccaaac

SEQ ID NO: 472369 - DNA, 505 bp, Homo sapiens
ctgtaatcccagcactttgggaggctgaggcagacagatcacttgaggtcaggagttagacaccagcttgrgcaacatagtgagatgccatctctacaaaaaatttaaatattagccaagcatagtggcacacacctgtagttccagctactcaagaggctgaggtgggaggatcgcttgagcccagaaagttgaggctgcagtgagccatgattgcaccactgcactccatcttgagcaacagaatgagaccctgtctctaaaaaaaagtttatcttaaaaatggggcacctctcctggaaggcagctcagccattatgaaaggaccctgacctggcatcaggggatttgtattcttgtcactaagtgactcttccccgctgggcctcaatgtcttcatctgccaaatggcagggttgaatttccacgtctgatcttggctgtctgtgatttccttcacacctggcttgagttgctggggaaaacttttaaagaagaggggcac

SEQ ID NO: 472370 - DNA, 505 bp, Homo sapiens
ctgtaatcccagcactttgggaggctgaggcagacagatcacttgaggtcaggagttagacaccagcttgagcaacatagtgagatgccatctctacaaaaaatttaaatattagccaagcatagtggcacacacctgtagttccagctactcaagaggctgaggtgggaggatcgcttgagcccagaaagttgaggctgcagtgagccatgattgcaccactgcactccatcttgagcaacagaatgagaccctgtctcwaaaaaaaagtttatcttaaaaatggggcacctctcctggaaggcagctcagccattatgaaaggaccctgacctggcatcaggggatttgtattcttgtcactaagtgactcttccccgctgggcctcaatgtcttcatctgccaaatggcagggttgaatttccacgtctgatcttggctgtctgtgatttccttcacacctggcttgagttgctggggaaaacttttaaagaagaggggcac

SEQ ID NO: 472371 - DNA, 505 bp, Homo sapiens
ctgtaatcccagcactttgggaggctgaggcagacagatcacttgaggtcaggagttagacaccagcttgagcaacatagtgagatgccatctctacaaaaaatttaaatattagccaagcatagtggcacacacctgtagttccagctactcaagaggctgaggtgggaggatcgcttgagcccagaaagttgaggctgcagtgagccatgattgcaccactgcactccatcttgagcaacagaatgagaccctgtctctaaaaaaaagtttatcttaaaaatggggcacctctcctrgaaggcagctcagccattatgaaaggaccctgacctggcatcaggggatttgtattcttgtcactaagtgactcttccccgctgggcctcaatgtcttcatctgccaaatggcagggttgaatttccacgtctgatcttggctgtctgtgatttccttcacacctggcttgagttgctggggaaaacttttaaagaagaggggcac

SEQ ID NO: 472372 - DNA, 603 bp, Homo sapiens
tttttggagtgtgtagggtgtgcctcgcctccttggacccacctcgtttctcccaagagcagacccagatacactaactcgatctgcctcccgcctcctccttctgctttaatcaactgtgggtcctgctctcttcaatgcctgcgtgtcagctaagtttgcaatcaccccgtttacagcttgaaaatgaagccctgtcttttctgcaagtaagaatcttcctgaaccatgcatccaaatgtcacatttccaaacatgttgtgagctgaggactccaagtcataaacttcaaagcaagtacttgtaatgggaattctgactgacagtcccttaattacagtytttaaatatgcacagtccctgacggagccaggctttctgaggaaaattcctgcctaactggttgaaaatgtgaacagtggggtataattccctgagctgcaaggagccacagatcagagaaaatgcaagagaaactctaaagacccttgtaggatgaattttgtcttttgcaggcggtatgaaaaccgaaagaggggagacaactgggacaaggagaaacaaatatttcctgtgcttgaagctgacacacatggtttattt

SEQ ID NO: 472373 - DNA, 603 bp, Homo sapiens
tttttggagtgtgtagggtgtgcctcgcctccttggacccacctcgtttctcccaagagcagacccagatacactaactcgatctgcctcccgcctcctccttctgctttaatcaactgtgggtcctgctctcttcaatgcctgcgtgtcagctaagtttgcaatcaccccgtttacagcttgaaaatgaagccctgtcttttctgcaagtaagaatcttcctgaaccatgcatccaaatgtcacatttccaaacatgttgtgagctgaggactccaagtcataaacttcaaagcaagtacttgtaatgggaattctgactgacagtcccttaattacagtctttaaatatgcacagtccctgacggagccaggctttctgaggaaaattcctgcctaactggttgaaaatgtgaacagtggggtataattccctgagctgcaaggagccacagatcagagaaaatgcaagagaaactctaaagayccttgtaggatgaattttgtcttttgcaggcggtatgaaaaccgaaagaggggagacaactgggacaaggagaaacaaatatttcctgtgcttgaagctgacacacatggtttattt

SEQ ID NO: 472374 - DNA, 358 bp, Homo sapiens
ggctccattctcggtaaccacagccctgaagcgtttaggaaatgcccccaacacttcaccccccactgaatttgttgtgatggggcttccatgtggcctgggaacggcctctgtgtggcctctgggctcccccagggygcacagaaatcagagcatcccagaaacagaccttgggtcagccagaggggtggacccagaaatcccacaggtaccaacacctgcatccccctgtagctgctgaagtgtgagggggacagaaaaacccaagtggctagagctcctggtccgtgtgctggttggggaagacccaggagaaagaaggaagtgaccagattgtaggtaacaatgtggcctggcc

SEQ ID NO: 472375 - DNA, 548 bp, Homo sapiens
ggagaccactgtcttaagagaactaatgaaggatcagaaaaccaaataccacacgttctcacctataagtgggagctaaatcgtgagtacacatggacawaaagataggaaccatagacactggggactactgggggggaaagaaggagggagggcatgggctgaaaaacacctattgggtaccatactcactacctgggtgacgagatcatttgtcagaaagagaaaaaaaaagtaaaacaaaaaagagtaagaaataaatattgattgttgttttaagtcattaactttgggtgatgcattatacagcaatggatgactaaaacaacccgagtccccccagaagctaagtctgtgtcacgcatttctctctgtgcatggagaagcaggagagtccttctatgatcgctgagttgcctttagtaagatactgagcaggtgaggcttcactgcattgctgtgcagcaacctcacattttgcccagctctcatgcacgtggctcaggtgcctccatgcatctacagcctttagctgaacgaggtctcgt

SEQ ID NO: 472376 - DNA, 520 bp, Homo sapiens
tgaggatgggagtggggtgggaatggataatgggaaagaatggagagctataaaaatgtgggggaggacaytggaaaggggagatgaaagtccctttttcctccatcacctgcctcaaacttcctcttgcagtccccggtatcctctgtaggttgggggcttccttcctttaccttttaaaaaaatcttcctgctcccgattcttagacctcacgttttctcttttcctttatgaatctcacctctctcaccttcttcaggtttaaatactccaattttccctttctctaaacttagaaatttccatgcatcaccctcttctagaattcatccctcaccattccttatataattgatttattgtaaagactcagaaataaatcaaacattctactaagaaaaattgagaaggggagctctgggggtggaaacatattagggtaaaagacttaaaattggaggcagcattatcagaagatgaagaacaactcagggatggggtgggaagaagacaggtcct

SEQ ID NO: 472377 - DNA, 520 bp, Homo sapiens
tgaggatgggagtggggtgggaatggataatgggaaagaatggagagctataaaaatgtgggggaggacactggaaaggggagatgaaagtccctttktcctccatcacctgcctcaaacttcctcttgcagtccccggtatcctctgtaggttgggggcttccttcctttaccttttaaaaaaatcttcctgctcccgattcttagacctcacgttttctcttttcctttatgaatctcacctctctcaccttcttcaggtttaaatactccaattttccctttctctaaacttagaaatttccatgcatcaccctcttctagaattcatccctcaccattccttatataattgatttattgtaaagactcagaaataaatcaaacattctactaagaaaaattgagaaggggagctctgggggtggaaacatattagggtaaaagacttaaaattggaggcagcattatcagaagatgaagaacaactcagggatggggtgggaagaagacaggtcct

SEQ ID NO: 472378 - DNA, 596 bp, Homo sapiens
aattacagctgttgtgcctgattagcacggtttcaggtccatgttatatggctattaatctggtgaataatgtgttcttttcttttctttttgagatggaatctcactgttgcccaggctggagtgcaatggcatgatcttggctcactgcaacctccccctcccgggttcgagcgattctcctgcctcagcctcctgagtagctgggactacaggcraatgccaccacgcctggctaatttttgtatttttagtagagacagggtttcaccatattgatcagactggtctttaactcctgacctcgtgatctgcctgcctcagcctcccaaaatgctgggattacagacgtgagccaccgtgcctggctgaatgtgttcttttcaaatactatcaggaagaaagaccaaaggcagtttgaatttacaggtatggatataagtgtacatttacatttacatttttgcttcagtaccatgttaaaactctcccgtcataatagggtccaatgggacatggatgtgctgcaagtccaggcaaaaaagccttgatttacatcatttgctgatttctgcagtgtaaatattctcaccatg

SEQ ID NO: 472379 - DNA, 612 bp, Homo sapiens
atctagacatgatttaaagtatatggaaggatgtgcgtaagttatatgtaaataccacatcattttatataaggaatttgagcatttgtgaatttggtatctgagggaaatcttggaaccaatcccccatggataccaggggacaactgtacttacttacaaatctatgagaaatcayggaaaaaagataaaaatgccagaagattgcaggtgaacaaagggtatctactgggagagaaaactaaacggttttctgttgcaaaaattctagaatagattgttaaagaacgttctgaacacctagatagaaaagttgtgatcccaaggaaacagtgaatctttgccagaaattatacatgtcaaactagaattcccacaagtaggatgcaagttccatcaggacaggaaacttattctgtgttgttcatctgctatctccagtatttaaaatagatgctagcacacacaaagcttcaataaacgttatttccttttatgataggattactaggctggtatgttataatcaaaccatggcaagaatatacactaacaggagctaacacatttgataaaatctcatgtagctttgataacaggactgagaaattt

SEQ ID NO: 472380 - DNA, 489 bp, Homo sapiens
tcaacagccagccccactacactgtaaacttccccattccacaccccatgcttcatcgatttgccttccttagaaaagtccaccaatggggttgtgggggaaaggaagkgctatggggctccttgtgatgttctagctgcctcctggtcctcactatttgcatatggcgctagtctacctggagtctgtatgtttttcttataacagtacccttttctcattcttaaaaaaaccaagaacaattctatcccctctgatttttatgagatatctacagcctgctcagcagagactccctttgctaaaaaaaatggtctaactgatcccctccaggatttctgaacaatctcccatgagcctctgaatataccaccaaattagaggaacagacttgacaattatgactaatccctttccataaggttatggcttttaggtgtgtagctgattgtttgtgtgaagcatttcccttcaaaaaagagaatcctt

SEQ ID NO: 472381 - DNA, 489 bp, Homo sapiens
tcaacagccagccccactacactgtaaacttccccattccacaccccatgcttcatcgatttgccttccttagaaaagtccaccaatggggttgtgggggaaaggaagtgctatggggctccttgtgatgttctagctgcctcctggtcctcactatttgcatatggcgctagtctacctggagtctgtatgtttttcttataacagtacccttttctcattcttaaaaaaaccaagaacaattctatcccctctgatttttatgagatatctacagcctgctcagcagagactccctttgctaaaaaaaatggtctaactgatcccctccaggatttctgaacaatctcccatgagcctctgaatatrccaccaaattagaggaacagacttgacaattatgactaatccctttccataaggttatggcttttaggtgtgtagctgattgtttgtgtgaagcatttcccttcaaaaaagagaatcctt

SEQ ID NO: 472382 - DNA, 548 bp, Homo sapiens
cccccaacaacaatgaattatcaatcccaaaatgttaatagttccaaggttgatcctctggtttaaaggaacaaattcttattaacagagaacaacacaaaaaccttttaaggcctgtctaggtaatacagccctaatcttagagttagggaacatagaaaagttaaactccttggtagactaaaatcaaattygctgtgaaaaactaaaatactggactgattccagagttttaccatcacttacaagaatagaagaaatttggccaggcacggtggctcatgcctgtaatcccagcactttgggaggccgatgtgggcaggtcatctgaagttaggagttcaagacaagcctggccaacatggtgaaaccccatctctactaaaaatacaaaaataggccaggcatgatggcacgtgcctgtggtcccagctactcgggagtgagactctgtttaaaacaaacaaacaaacaaacaaaaaaaaacagaatagaaaaaatttaaatgatccactaaaatggcgtaatgtcttaaaccggaagcacag

SEQ ID NO: 472383 - DNA, 556 bp, Homo sapiens
aaatggtgcattgtttggactacaagtgtttgtgttcacagtgctgataaattgtaagtttttatgacagatttttgtagatcttatattagtcaatgataaaatagactagtctttacatacatttatccattcaagtcacacccaactttttcttaagttttctaatatttctaggctacaagatttatcagaaagttttctcagattgtctcatatctccaacaaaatttgcaatatatttactgaaaaaaattgtgtattagtggatccatgcagttcaaactcctgttgttcaagggtcaactatataatacacctggtgaagcaatgtgtattctcatctttcaagtttctttggtgattttagaacattgaagaagatctaattgataacacacaacacttagtatcacttccattgttccaactcttagtcaagtctttcaaataccataactatgctcagatctttctcttgtcactctttgyttttaactttcaagtaaaacttcccccttttccttcctctctcactctttccttatgcttcagc

SEQ ID NO: 472384 - DNA, 611 bp, Homo sapiens
gtgggtaataggataactgatactaagtgatctacatgaatgtcatgcaaacaaggcacactttgaaaactgagttctctcttgcataacccttactgaattccacacrcaggatttctaaatgcaagacaatggaattctttcagaagcacttcagtaatcatgcctcattttctcaaggagaaacagagagcagcaaataaaaagagctgcattttcctaaaagaaaagaaagtactggattaattaagggtttgatgcttttcttctaatacttttcctgaaacatctggaatcgcagagctggaaggtagtgttaggccttaaaatatttttgcctttccagagaaggagtctttttaagaacagaaaagcctggggactggggtgaaatctattgcacaggaatccttgggctgcctcacctctccaagagctctttgcatgttgcttgggaccagcctataaattttatcaacattctctctctcctacttttgtctgaatttacatcatattttccccaatttggatccttacaatccatcattcaccatactagtgcattctactggccactactgattcttcatacaacagttactttaata

SEQ ID NO: 472385 - DNA, 442 bp, Homo sapiens
ttccatgcagcactgcaaaacaaataattgttgtaagaatctattcatcaattatctgaaatctgaattttcaactttaaatagaactattttgtgataatagctaccatttagtgaaaaataatgtatagctacttttcacctattattaataattcttatattaatgatgaagagtaggtattaattttaccatcttacagaggaagaaattgaggtaagacttccttgccaaaggtcacatagtaagtaaataaaacagctttccttgactctatacactgtyatgctttctgtcttgaaaagcctttcaaaaactctattttgttttcatttccttgtccaccatatttttaatggtaattatagcaaagccaataaccagagctgtttacaaactgccatgtggtaatgttatggagttgagaaaggtttaaaattg

SEQ ID NO: 472386 - DNA, 442 bp, Homo sapiens
ttccatgcagcactgcaaaacaaataattgttgtaagaatctattcatcaattatctgaaatctgaattttcaactttaaatagaactattttgtgataatagctaccatttagtgaaaaataatgtatagctacttttcacctattattaataattcttatattaatgatgaagagtaggtattaattttaccatcttacagaggaagaaattgaggtaagacttccttgccaaaggtcacatagtaagtaaataaaacagctttccttgactctatacactgttatgctttctgtcttgaaaagcctttcaaaaactctattttgttttcatttccttgtccaccatatttttaatggtaattatagcaaagccaataaccagagctgtttacaaactgccatgtgrtaatgttatggagttgagaaaggtttaaaattg

SEQ ID NO: 472387 - DNA, 623 bp, Homo sapiens
gtaggtaaatgtcccagaggctgaccaatggatggctttaagctgcctgcttgaccaaggcatcctatgtcaaataataaaaataataaaaatgaatagaaatttttgtcagtggtggaaggaataatgaaaactgcattggttttgaaagacaggtgagcactatgaatgccccagactctaccagtctgggagtacacgtaaggttgccttagtagatgaacttccagtccactgattgtgtggctcttatgtgcctgatgggaaacatttggcatcttctccaaggtccttctccmctgtgcctctcccctgtgctcgcagactttagaggagactaccagaaggaatccacagcagtccaagctgcagattgtgcattgcctggctccacattgctaacctcagctccaccacagccttctgtcccgttgctgcacatttccaaattgtcactccccattccctccctaaaacactgccacatcccttcctgtagttctgggtttctggacctccctcagactgctgctcttcaaaactgacctcagggttactgctcttccatataccatcttggcttaagcacggatacagattctttcctacatttcccgcattac

SEQ ID NO: 472388 - DNA, 603 bp, Homo sapiens
agacagctcagcttgtaaatcagatctaccctggctggctttgattgagtcagcgcctctccttcctagagcttcaaaggctttcctaggagtctttcctatcagtcatgggcccttwggcttcctctctcaggaactctcctctggtaggttttgttttgtattctaagggaaaagattgaatatggaaattctttggagggtggggggtgcaaaacaccacacaaaaataaggaacaacaaaactcacaaaacttggcccgtaacagaagttcttttttttttttaattttggaaacctgcaaaatggcatttgagttatttcttttctccctcaagagtttctttttctgctaacttgtagatttcctcacccaatctctctctctccagggcccaaacacatacacagacacacagacacacagacacacacacacacccccacagttgatgtgttgatgtgatggtactgaaactgatacaatctttaaaaataaattcctagaacttaatgaaattactgttatttgatcattggttaatccaagataaagtcaaaaatctatcttccttcaataggaaacttcataaatgtataaa

SEQ ID NO: 472389 - DNA, 557 bp, Homo sapiens
gattccctgcggtgcattcacaagtttcctgttcccctgcagaagtctttctttaggcacataaaatgagtgtcaggagggatccactttgctggcttttagcaagcagtctaattctggctttctcttctagtcagtggatgtgccactttgcttagtttgtagcaggaaataactacgttggaagagttgaagaaagctctttgggccaytgtacctgggctaaagcacaatccctataattaggcgagaaatcaacctactcgtgaagacgccattcggcaatatctagatgagtcaatctattgggttggacgcatcatctgtgagtcacattaagtgtagatttataagtaattattagaagtcagtatttcatgacttcaataattgaagagaagttaataaacattaagacatactgggccgggcgcggtggctcatgcctgtaatcccaggactttgggaggccgaggcgggcggatcacgaggtcaggagatcgagaccatcctggctaacacggtgaaaccccgtctctactaaaaatacaaaaaaa

SEQ ID NO: 472390 - DNA, 557 bp, Homo sapiens
gattccctgcggtgcattcacaagtttcctgttcccctgcagaagtctttctttaggcacataaaatgagtgtcaggagggatccactttgctggcttttagcaagcagtctaattctggctttctcttctagtcagtggatgtgccactttgcttagtttgtagcaggaaataactacgttggaagagttgaagaaagctctttgggccactgtacctgggctaaagcacaatccctataattaggcgagaaatcaacctactcrtgaagacgccattcggcaatatctagatgagtcaatctattgggttggacgcatcatctgtgagtcacattaagtgtagatttataagtaattattagaagtcagtatttcatgacttcaataattgaagagaagttaataaacattaagacatactgggccgggcgcggtggctcatgcctgtaatcccaggactttgggaggccgaggcgggcggatcacgaggtcaggagatcgagaccatcctggctaacacggtgaaaccccgtctctactaaaaatacaaaaaaa

SEQ ID NO: 472391 - DNA, 557 bp, Homo sapiens
gattccctgcggtgcattcacaagtttcctgttcccctgcagaagtctttctttaggcacataaaatgagtgtcaggagggatccactttgctggcttttagcaagcagtctaattctggctttctcttctagtcagtggatgtgccactttgcttagtttgtagcaggaaataactacgttggaagagttgaagaaagctctttgggccactgtacctgggctaaagcacaatccctataattaggcgagaaatcaacctactcgtgaagacgccattcggcaatatctagatgagtcaatctattgggttggacgcatcatctgtgagtcacattaagtgtagatttataagtaattattagaagtcagtatttcatgacttcaataattgaagagaagttaataaacattaagacatactgggccgggcgcggtggctcatgcctgtaatcccaggactttgggaggccgaggcgggcggatcacgaggtcaggagatcgagaccatcctggctaacacrgtgaaaccccgtctctactaaaaatacaaaaaaa

SEQ ID NO: 472392 - DNA, 650 bp, Homo sapiens
actgtgtatgtttttaaagttaagattttgaatttggtttattatcttattcttgttaagaaagttccttcaagtgaattttctattctctttcttttcacttatgattttaaaatatcttttagtattgagactggcaggttaggtgaaaataaagatagattctatccatagggatagaatcttctcaatatgaaataatgtaaaatgctatgatagatcctattttccaagaatgatgatacgatacctttcatctcacatggtcttcaggaacamtgttatacttcttcagcaggtggtgtctatggcttctccccttgcacttaatacctttgtgactttctgaagctataccttatagcagaagtgatgctctgcatgtacatcataaattgtcacacacttcagcctttctttcttgggatacttgttcttggaagcttgccaacatatccaaagaatgctcaaagtagctcatgtgaagagatcacttgaagaagccatgtataagtgtaacaggaaacagcccagatgaagtcacagtcagcaagccagcttccacccccaaacatgagtaaagacgccttcagatgattgcagcccaagctgtctgcctagtagccccattctccaaccttgaagttttc

SEQ ID NO: 472393 - DNA, 457 bp, Homo sapiens
ggctgagacgtgagaatcccttgaaccggggaggcagaggttgcagtgagcagagatcgtgccactgtactccagccagggtgatagagtgagactgtctcaaaaaataacaataaaattatgaattaaaaaagaatatcagttattgctcttataaaatttacagaacattttattcctaaaattaattaattgtttaatgagtcagaacagcagataactattatgtttcctctrtataattgtttgacttcttatctgtctactaaacatttattatgcttttactttgagcccattcagcttctatgggctatctgaagtagatttaagagagtatacattttctgtgcctaagcatctttccaaattttttggagaggtaagaggcatgtaaaattcaggccatatgcaagaaaatttgactgtaagtcgatgtagttgagaaaaatctgct

SEQ ID NO: 472394 - DNA, 362 bp, Homo sapiens
ggtatttgttcccataatattggctggggttattcatgtagtggtactyggttaggaactctgccgtagctaagaagttcagggtagccttgaactacagagtttctctcattatgcttctcatcattcagtaatctatcctgggcattcctttttttcatttttattttagatacgtagggtatattttatttgagatacagggggtattttatcacatgggtataatgcactcaggaggtgagcatagttcacaacaggtagttttttgaaccttgcttccctccctccctcacctctctagcagtctacacagtgtccattgtttccatgtttatgttcatgggtgctcaatgtttagc

SEQ ID NO: 472395 - DNA, 362 bp, Homo sapiens
ggtatttgttcccataatattggctggggttattcatgtagtggtactcggttaggaactctgccgtagctaaraagttcagggtagccttgaactacagagtttctctcattatgcttctcatcattcagtaatctatcctgggcattcctttttttcatttttattttagatacgtagggtatattttatttgagatacagggggtattttatcacatgggtataatgcactcaggaggtgagcatagttcacaacaggtagttttttgaaccttgcttccctccctccctcacctctctagcagtctacacagtgtccattgtttccatgtttatgttcatgggtgctcaatgtttagc

SEQ ID NO: 472396 - DNA, 362 bp, Homo sapiens
ggtatttgttcccataatattggctggggttattcatgtagtggtactcggttaggaactctgccgtagctaagaagttcagggtagccttgaactacagagtttctctcattatgcttctcatyattcagtaatctatcctgggcattcctttttttcatttttattttagatacgtagggtatattttatttgagatacagggggtattttatcacatgggtataatgcactcaggaggtgagcatagttcacaacaggtagttttttgaaccttgcttccctccctccctcacctctctagcagtctacacagtgtccattgtttccatgtttatgttcatgggtgctcaatgtttagc

SEQ ID NO: 472397 - DNA, 362 bp, Homo sapiens
ggtatttgttcccataatattggctggggttattcatgtagtggtactcggttaggaactctgccgtagctaagaagttcagggtagccttgaactacagagtttctctcattatgcttctcatcattcagtaatctatcctgggcattcctttttttcatttttattttagatacgtagggtatattttatttgagatacagggggtattttatcacatgggtataatgcactcaggaggtgagcatagttcacaacagrtagttttttgaaccttgcttccctccctccctcacctctctagcagtctacacagtgtccattgtttccatgtttatgttcatgggtgctcaatgtttagc

SEQ ID NO: 472398 - DNA, 506 bp, Homo sapiens
gctgacagagaaaaaaatacttgtgtatgataacttttgtatatacacatatctatcaatagttgtatatgtaaccatctgtatctatattaagctaaacgtgaggtcatgctgacgtttacagttctcatccawtaccatatggataggtttttatttctttctttatctataaacttactccaactataagaagactgattccttccatcagtcatgtatttaattaaatgtttaattccattatacatgtatagcagagccattagctcatacacccatgggaaactattttatcaactagattacagtgctcatgtgcagttctcatagtcttatgcttacagatcctactcatttgcaaagttgcttgagtcagcaccttttctccctctcccattaagtgagtttgctttatgtgtttgtaatacatttagaatatcctgtcacactctgcatttttaagtgaccctttgaccacctaaattatgtttttaaatttgcac

SEQ ID NO: 472399 - DNA, 534 bp, Homo sapiens
ttacgaacacacagaatggtacttcgcacatgaaacaccctcaaatatttgttgaataagtgaagagttgacaattactaaagcaagtctctttgtaaattaattcaatcatctattcattgattcaaccatctttactgacagtctagcacctgtcacgtcctgcagtagaaagttccatgagaaataaacaggtataagatgtgaattcagtcctcaaataaacctactatgcaccttgggggaaagccaacatgcaatggcataggctatagatgctgctagacatggctgccagatgatcgatttctaatatagatcagatgctcaatctagtaacatttttcatttaaaatctttccttgacatattttcacacagtaattaatttctatatgaaagtgtgacattaacaatgtacctactctgttagccgcgtattgagttcagtggtgtcrttgatgtcaaaccatcctatttcctgtcgtagaatagcatgaaaaaacttctgcctaattttcctgatctgtcgac

SEQ ID NO: 472400 - DNA, 606 bp, Homo sapiens
aaaggcatttgtgcagtattcttctcaggttcctttacatttatccaatgattgaaaagacagcatctactgtagtaaaatgacgcctccaatttcacagaaatacaagggaacaggaaaaagttttaagttgcagtaagattattttagcttaaagtacaaagaaattgttgaaaaaataatactctacacagaaagtttttggaaggaaacacattataactggtctgttgtacatatatttcttgctagcaaaacaagrtctcttttctaacccactatataatttgctctgatgtaagttgaaccttatgtagttcatcaatgttagaaacataaactagggcactgagattgtataaaactaagatgtacttctttgctaacacagacattattccataatcatttacaacaatgtatcatttatctttaattctagattttccttttgaaattttgaaatatatgactctagctgccttctgcatgaatatagaattttttaagagtcagtgtactttttaaagaataaattgactccttttcacacataagtcaaaaatggcagaaaatattttgctttgatttaaaaaaaatgacacc

SEQ ID NO: 472401 - DNA, 581 bp, Homo sapiens
acccagaaataagctcagcttgagacttaaccaatttattctttgttactttgattctctcttatttcaacttggatgctttgctagaattagtattatgagaatacagtgttatttccagtaggtccttcagttgtaaatctgaaattccaagtatagttctgatctctctatattgagctaattcattcagtgtcactgatggagggtgaagcatcttatgtgcctgagataagagataaatgaaagaattmttcacagtctattgggaacacagagaggtaaacagttacaaggtggtatgcaagaagaaacaatctggaaaaaagggagcatgtcacacatgatgtggtaaaacagtgctatgtactcagggtgagctttggaggcagggaggaggttgttcagatctatccagggccacttactagctgtgtgacagagcatacattgctctctctctaaaacacagaaaaatgtgttattactaccagagaggttttaagcattaaatgagatgaaaactgcaagtgcatggcaccctgcccccacacagaagaaaagctagataaatgtttttc

SEQ ID NO: 472402 - DNA, 477 bp, Homo sapiens
aatccctgtgtaaaatggttactataagaaaaaaaaagagtgactatttgaatatagatacaactaagggaaactgagccatattttgttaagattgaaatgaaaaaataaatgaaacaagattttcattttcttctcatcattttgcggcttcaattgatgaagaggagtgcaagaaactgtctggaaactcaaccatatttttacagtcttagtgagtccagataggataaagcccagaatgtgcaatttgaaaaatgatttttatattagtgaaatatattttagcacatgagacgacatctttttaatgcttcctgcaatacatagcctyatcctgtcctataaagccttcattttccccagaatgacctggcagccagctgaaaggacacagtggactgcctgactgattacacccttggaatatttatgtaacttttcgatggcagcaaaatgctgaaaagaggatacagc

SEQ ID NO: 472403 - DNA, 637 bp, Homo sapiens
aactccttcaaaatacagtcacattttaagactgcaggattagttaagtgcaaggtcacattgcaaagtcagtagtacagagagcaaagattctcagaatcactgatctctcttcccttttagtgaccttagacttgcccccttcttccttctcaccaagcaaaagacactctcacttccacaagggtctcaatcccactatgtccaatactaatgaggagggagagaccttcatcttagtaacctcatcacaaaagaacagaggggaacaagttcgttattatagcaaaggtcaacataggtctttatagaaaactaacatatataaagatgtagctcatcaggggttggaaaggaaagagaaccaaatgtttataatcacctgcattatcctgcagctattgaagaagagaaagttgtcaccaatgcatctacatttttaaattcctttagtctcctttaaaggtgcctacctcattttacatagaagtgtaaattaatacagagmagtgctgaaatcatgaatgtaagacttaatggattctacaagctaaatacacctgacattattgtccatatcaagaatcaaaacaataccagaatctctgtgcctttttttccctgttttgaaccatca

SEQ ID NO: 472404 - DNA, 647 bp, Homo sapiens
aaattaaatcaataccttttgtgcagaacttctcaaatatttagaatgataaattgtaaatattcatatggagaaagaggggcagcacttaacaaacattatattatggaactcttttggagtatttcagcagactactgcataaacagaacacattctgaaaaatagtgcattaatgcatttttcyaaaaagtatttattgaagacctaccacattacagttcctattctggattccagagatacggtgattaatgaggtagaccacctgccctagggaaacagtgtacctagtaggaaggagtgatacccatacatcagattactatgagtgttattccagacatatgtgcaagtaggtatggtaacacataacacaagtgggagcatctagcacttatctactaggcttaaaggaggataaatgttgatactaattcttgaaaatagtaatcaatatacagtatactttaaaacttcttatttttacaactgtggaattatacaatttaaaacctgaatgagatcttagaataaactatctcaagtttctcttttatccataggtagaaactaaaactcaaacaaaacatctttttacataataatttcatgatagagttaagatgaaaatttgatttctagta

SEQ ID NO: 472405 - DNA, 468 bp, Homo sapiens
ggacatggtatgccaatggtgctgctataatcatacttctgcatgtccactgggagggtttgtgggcataaattcctctagggattatcattaggactgaattgttcagtcccaaaaaatgatacacccccagcttttctagatatgaccaatggcttttcaaattaataatagcaatttacactgccaccagcattttgaactgtcaaacttcttcaattttgctaatcaagtgggtgtgaaatagtatcttattttagtcttgatttatacctttctgattaccaatgaggttaagcgtcycttcactggtttttggtcatatgagcttcttctgtgaaatgacatgtcattcagcaagggttttttaaaaatgattttttttttcactgagtcataggaattcttaccgattcttaatgttttcattttatttttacatatgtttcaaatatttttctcaatttg

SEQ ID NO: 472406 - DNA, 285 bp, Homo sapiens
cccatgtcagccctcatgaggtccatatttgcagaagccttgatggagataccaccactatggggaaatggacaacgtgcaatattaagagcaaagaagatggccaaaatcactttatttaaaaagtacagatgkgcacggtggctcacgcctgtaatcccagcactttgggaggccgaggtgggcggatcacgaggtcaggagatcgagaccatcctggctaacacggtgcaacccatctctactataaatacaaaaaaattagccgggtgtggtggtgggcgc

SEQ ID NO: 472407 - DNA, 285 bp, Homo sapiens
cccatgtcagccctcatgaggtccatatttgcagaagccttgatggagataccaccactatggggaaatggacaacgtgcaatattaagagcaaagaagatggccaaaatcactttatttaaaaagtacagatgggcayggtggctcacgcctgtaatcccagcactttgggaggccgaggtgggcggatcacgaggtcaggagatcgagaccatcctggctaacacggtgcaacccatctctactataaatacaaaaaaattagccgggtgtggtggtgggcgc

SEQ ID NO: 472408 - DNA, 555 bp, Homo sapiens
tgcaaatggtcagtatgtagtgctaggtgacttttagcaacaaggaagtgggccaaagtacagcctgattaatgcttaattataactatatttctgcctagaacttggcatgaaatttttgtcaacacagtggggatggtttcaayagaaagttttcaagtagtgctcaatatttttatatatttttattttctgtaaagcgttttgttttttttaattccttattttttacttttttttttttaacggagtcttgctctgtcacccaggctggagtgcactggtgtgatctcagcttattgcaacctccacccctgggttccagcgattctcctgcctcagcctcccaagtagttgggattacaggcgcccgccaacacgcctggctaatttttgtattttcagtagagatggagtttcaccatgttggccaggtgggtcttgaagtactgacctcaagtgatccacccgccctggcctcccaaattgctgggattacgggcgtgaaccaccgcgcccggctggttttaaatttctcattgtaaaaaagtacac

SEQ ID NO: 472409 - DNA, 555 bp, Homo sapiens
tgcaaatggtcagtatgtagtgctaggtgacttttagcaacaaggaagtgggccaaagtacagcctgattaatgcttaattataactatatttctgcctagaacttggcatgaaatttttgtcaacacagtggggatggtttcaatagaaagttttcaagtagtgctcaatatttttatatatttttattttctgtaaagcgttttgttttttttaattccttattttttacttttttttttttaacggagtcttgctctgtcacccaggctggagtgcactggtgtgatctcagcttattgcaacctccacccctgggttccagcgattctcctgcctcagcctcccaagtagttgggattacaggcgcccgccaacacgcctggctaatttttgtattttcagtagagatggagtttcaccatgttggccaggtgggtcttgaastactgacctcaagtgatccacccgccctggcctcccaaattgctgggattacgggcgtgaaccaccgcgcccggctggttttaaatttctcattgtaaaaaagtacac

SEQ ID NO: 472410 - DNA, 608 bp, Homo sapiens
cgcggtgctccaagagcatggaacagaaggctcttacctaattcatgagtcaggaaagttctcccataaaaattaacagtaaagctgcaacctgaacgaaaagcaagactgatacaggtgaggagagaaggtgagtgaaaggcttgaggaaaggcagaagaatgtggctggtctttcgcggaactggaagaagggggatgtggctgcagtatagatagtgaagagaagatggagctggacaggtaagcagggtccagtggttgaacgcttttgtaggccacaggataaagctgatggtggcttgtcctatatggagctgaagcagaggagagaggtggaaaattgccatgctgcttggagggtaggatcaagawgacttcgtgatggactggatctgaagcgaggggaaggggaaatttaaagatgactcctaaacttctagcttaagcaacacagtggatatcctgctttcaactgagattgaagacccaggagcagaagcaattgtggtgagggtaatgaaggaggcagcaaggaagacagctccattttgcacaaattgagtttgaggaacctggggatatccaagtggaaagatgcaataggca

SEQ ID NO: 472411 - DNA, 625 bp, Homo sapiens
gtgagaggggagtacgcggtgctccaagagcatggaacagaaggctcttacctaattcatgagtcaggaaagttctcccataaaaattaacagtaaagctgcaacctgaacgaaaagcaagactgatacaggtgaggagagaaggtgagtgaaaggcttgaggaaaggcagaagaatgtggctggtctttcgcggaactggaagaagggggatgtggctgcagtatagatagtgaagagaagatggagctggacaggtaagcagggtccagtggttgaacgcttttgtaggccacaggataaagctgatggtggcttgtcctatatggagctgaagcagaggagagaggtggaaaattgccatgctgcttggagggtaggatcaagatgacttcgtgatggactggatctgaagcgaggggaaggggaaatttaaagatgactcytaaacttctagcttaagcaacacagtggatatcctgctttcaactgagattgaagacccaggagcagaagcaattgtggtgagggtaatgaaggaggcagcaaggaagacagctccattttgcacaaattgagtttgaggaacctggggatatccaagtggaaagatgcaataggcagct

SEQ ID NO: 472412 - DNA, 592 bp, Homo sapiens
agcatggaacagaaggctcttacctaattcatgagtcaggaaagttctcccataaaaattaacagtaaagctgcaacctgaacgaaaagcaagactgatacaggtgaggagagaaggtgagtgaaaggcttgaggaaaggcagaagaatgtggctggtctttcgcggaactggaagaagggggatgtggctgcagtatagatagtgaagagaagatggagctggacaggtaagcagggtccagtggttgaacgcttttgtaggccacaggataaagctgatggtggcttgtcctatatggagctgaagcagaggagagaggtggaaaattgccatgctgcttggagggtaggatcaagatgacttcgtgatggactggatctgaagcgaggggaaggggaaatttaaagatgactcctaaacttctagcttaagcaacacagtggatatcctgctttcaactgagattgaagacccaggagsagaagcaattgtggtgagggtaatgaaggaggcagcaaggaagacagctccattttgcacaaattgagtttgaggaacctggggatatccaagtggaaagatgcaatagg

SEQ ID NO: 472413 - DNA, 289 bp, Homo sapiens
ctgcatggaggtaacatttagaaagcttttatttgaagaaaacatcccaggaaaggcaaggggcttagactgagggcaggatgccttgtgcgcaggtctcacagatgcagcaggctctggagcagtgcaccagcaactacagggaggacctgcaggcactcaagcagctctcggacctggagagggagaagctgcagcrtgagctccaggagaccactcagcagaaccacgccatgaaagcccagctcgaggcttcccaccagagagccctgcgcatgctggagaaggc

SEQ ID NO: 472414 - DNA, 606 bp, Homo sapiens
gccaaaggaaagtgaaaggacactctgcccatcgggtataagccccagttcctgtgtcrgcgagtaggaatgggctgcctgggttcaagtcctggatctgccatttacaaagtgtgggagctcggataggtcattaggttctttgtgcctcagtttcctcatttataaaatgatagatggtagtatgaatcttatgagatggttatgaagatcaaaagggacactgcatgtaaagtacttagaacagtgcatggctgagtaacagcttggtttttaaaaggttcacttttattgttcactcatctattctgcaggcattcactgagtagctaccacgagctgccatcacgcagagctgcagagataccagatgatcactacactatgtgtccttacgtagcttacctctaggggaaaaggcagcccctcaaacaggttgctgggatcagtgggtggaagccatgagggagttgtctaaggtatttggaagcactgggaatggagactttacataatataggacttttggagagacagggtgaaactaggtccctcaggaggccccaaactggccacaacaagagcagggtaaccctcccatagcag

SEQ ID NO: 472415 - DNA, 606 bp, Homo sapiens
gccaaaggaaagtgaaaggacactctgcccatcgggtataagccccagttcctgtgtcggcgagtaggaatgggctgcctgggttcaagtcctggatctgccatttacaaagtgtgggagctcggataggtcattaggttctttgtgcctcagtttcctcatttataaaatgatagatggtagtatgaatcttatgagatggttatgaagatcaaaagggacactgcatgtaaagtacttagaacagtgcatggctgagtaacagcttggtttttaaaaggttcacttttattgttcactcatctattctgcaggcattcactgagtagctaccacgagctgccatcaygcagagctgcagagataccagatgatcactacactatgtgtccttacgtagcttacctctaggggaaaaggcagcccctcaaacaggttgctgggatcagtgggtggaagccatgagggagttgtctaaggtatttggaagcactgggaatggagactttacataatataggacttttggagagacagggtgaaactaggtccctcaggaggccccaaactggccacaacaagagcagggtaaccctcccatagcag

SEQ ID NO: 472416 - DNA, 490 bp, Homo sapiens
caaaagccagcaggaaaggttttaccagttacagtctaacgggcacttactatatgccaggctcccattatcacattgaattctcacaaccacccagtttcatgcccattttaaaggagagggaactggggcccacacacaggtgaaatgatgcccaaggtcacatatctagaaaaaagaagagccagtattagagccgggtcatctcacccaaagccctgggctcttatcaactccagtcagtagattatctgcacccccagccctcctctcctcaccacccagttactcttctctggcttcacgctgaaaaagcagtgggggccgggcgcggtggcccacgcctgtaatcccagcactttgggaggcccrggagggcggatcacgaggtcaggaattccagaccagcctggccaacatagtgaaaccccgtctcctctaaaaatacaaaaatttccctggcacggtggcgcgcgcctgtagtaccagc

SEQ ID NO: 472417 - DNA, 593 bp, Homo sapiens
attacatttggcccatttactagaattagatacagaatcttctctgagagatattttctcaagtattgcataagaaatcagtgctacatatttttctggaaaatgatcctccttatgaattttgctttgctattatccactataatatcaaaaaacaaataaaatcctccatgatcaaggtctaggcctttatccaagattctcatttgctcctcatctacttcttttccctcagaacttaataaacttacctggacatcttcacagtgctttagatatgcctattgcctctgaagaaataaaaatatcatttctctgcaagagtcactatttatccttgagcaatcactcctacaccctctggcttacttcgctagttctcagtcagagcctacagaaagattagatgaataaatgttcctctagaagtttctctgtcagtcaaaaggycctaagaggaaagtggggttttttttgccctaagaaatgactaggagaacaatccctagtgagtaattttaggcacttgtggtcagaggcaatctggcctgaagaaatcctcagcctgagccaccattaccagtctgctctac

SEQ ID NO: 472418 - DNA, 447 bp, Homo sapiens
ctaaaccagccactacttgccctaaaataagagctttcgcaamattttcaactgtattttaaggtctgcatatattgataaggctttgtcttcagttgtgagcagggagaatagattatactgggcatgtcctctccaccagcgacagactccaaagcatgagctagagctcctagaataaaaagcagttagttgacctcccatcatgcgatgttctgggctcttacttaagatcactaagccttgaccctggcataaatccaagcagcactcatttagtacacgttctttggagccaagacatctgtgtgttgtaataacatgctacaaaagagtgtttatatctcattttagtataatgtgaacatttaactattgcaaatcagctttctataatgactagtccttacttaaaagatttattatatttccaattaaagtccttag

SEQ ID NO: 472419 - DNA, 609 bp, Homo sapiens
ctgtttttcaatcactcatcttttgtaggacattttggttgcttcaggtttttgctattacatataaagttgctttaaataaatatgtgcaagttttgtagttttatttctctgaaataaatatctacatatgtgattactgggtcatatcccaagtatatgtctagttttttaagaactgccaaaccattttccagagtgactgccatcctatatttcaccagcaatgtatgagagattgtctcttcacattcttaccaaaatttggcattgttgctattttttattttagtctttctaataaatatgtagtgataacatatggtggtattaatttacatttgtgtggtggctagcaatgttgaacrtatttttatgagtttattttttacgtctataacttctttagtgaaatatctcttcatgttttttacccatttgctaatttgattgtttttaagtattttttaaatgctccagatatgagttctttgtcacatgtaatttgctaatattttctcccttttaacaaatgaggctagaacaactagactcccatataaaagcaaagtacaacttgatctttttgtcattcaggacacaaaagaa

SEQ ID NO: 472420 - DNA, 527 bp, Homo sapiens
tgtatatgagtgacatacattactctcttaagtaactattttataaaatgctaacttacaaatactttttgttataaagatgggatggttctcactaattattccatcacttaactgatacctcagcataaactgatggcctgcagttgattcttcttaggagaaagtacraatgaagaaacaagtgctataatcagagatgttttacaaaaaatcgtaaaacattttgaacaaattttgaactgtataatttttcctagattgtgagatacagtgagcatccataattggcagcctacctacaccattgtactgatagcttagcattaatatcgtatcaaaataaaaaagaaagtaattcttcagtttctgctgcaaaacttttctagtgagagacactgtgcaaatggacaatggccagaccatatataagaacagaactcgcaacctgcagcaacctgaccaggaaaccaatcccttatctatagcaaccagcccaggaggccagcctgctccaactaagacct

SEQ ID NO: 472421 - DNA, 582 bp, Homo sapiens
ctgaggctgtcaaccacaacacctatatgtgaaatttctatgtacatggggcttctcagagtggctaggttgcaaaagatagcacccaaaacggacgtatttttaaaaggcagagagaggcagcaaggcttcttatgccctagccttggaaaccacacagtgtcattctgttgctcaaagcactcacaggaccagcctgtgattcaagcagagggcaattagacctcacttctcaatgagagttctgctgttttccatgtgtctttcaatgtgtaattgacaaaatacaaatttattgaagggcatattggatttttagtaaatgtcaatcattaaatattttttcaaccaactcataaaagtgtaaaagcaatttaacaagatgattaagcattcacgctgtgcagttagatgggtctgaatttaaatccctatacctattggctgtgtaaacaggagaacatcactaagcctcaatttctccacatccaaatcagcaatagaaacagacttcccagtgcagttctaaagattgcatwaaaaaaatgcgtggtagatgcttagcactcaagataattagct

SEQ ID NO: 472422 - DNA, 593 bp, Homo sapiens
ctgggctctctgtcctacgcacagccacgcatcagcctccaggtcagtgggaaactgcctctctcacatcactgggacctcagycgagacagctcatctctgctccatggggtctctcatcatccaggaggcttgcctgggcttcttcaaatggcagtctcagaatccaaagagcagcaagagaggataagccctaaagcataaacactgcaaatctctaattgtattgttgttttccaagcagccaaagcaagtcaagcccaagcccagaatcagttcagagggcaaccagccaagcagacagacccggggacatgtggacaaactggcatccacaagtgcaaaaatcagttatcctggggattcaaggatgaacacactgacaatgtccctgccctcatgaagcttgtttcttcatatcctccatcagcccgtggtatttttttgccaagcagataagccagtattcctgtgtgattctaatttatctgattaatggtgaggacaaacatttctttatagacttaatagccttctatgaattgcttttttgtgagtcttgcatatttttctattggatttcctgtgttttt

SEQ ID NO: 472423 - DNA, 620 bp, Homo sapiens
tgaaattgagacatctgtctccccaccattctatggaytcttgctctaaagtgacacttttttgtcatttgaaatacaccttcatactgcagtggcttcatttccttgctatgcaagtatgagagaggaggacatcagattggtgcagataatgaaaagtagaaaattcacctgtccagagccgtggcaggaccacctgccttgggaacatggttccaaccctgctgagcaactttctcctctggcattccactccccaattgcaagtgtcagtggttaccccagcacatcaacagagtgaaaaatatttggtaactatgccctctgtgtcataggttgctagaaaagactgagtttgtaaggccatacattggagcaaagctttgcaaactttaacatgcatccatattacctgaggaatcttgtgaaaacacagattctgaatcagtatgtccaaagtgagggctgagatcctgcattcccaacaggcttgcaggtgatgctgatgctggtgcctgaggaccacactctaagtaacaaggccagttgcttggcaaggttacatcaagcaagcagagaaggtgatagcagagtgaaatcatggtagaaatatctctgca

SEQ ID NO: 472424 - DNA, 620 bp, Homo sapiens
tgaaattgagacatctgtctccccaccattctatggactcttgctctaaagtgacacttttttgtcatttgaaatacaccttcatactgcagtggcttcatttccttgctatgcaagtatgagagaggaggacatcagattggtgcagataatgaaaagtagaaaattcacctgtccagagccgtggcaggaccacctgccttgggaacatggttccaaccctgctgagcaactttctcctctggcattccactccccaattgcaagtgtcagtggttaccccagcacatcaacagagtgaaaaatatttggtaactatgccctctgtgtcatasgttgctagaaaagactgagtttgtaaggccatacattggagcaaagctttgcaaactttaacatgcatccatattacctgaggaatcttgtgaaaacacagattctgaatcagtatgtccaaagtgagggctgagatcctgcattcccaacaggcttgcaggtgatgctgatgctggtgcctgaggaccacactctaagtaacaaggccagttgcttggcaaggttacatcaagcaagcagagaaggtgatagcagagtgaaatcatggtagaaatatctctgca

SEQ ID NO: 472425 - DNA, 641 bp, Homo sapiens
tgatttatagagtaaggctgatggttacattagagggtaatacaggatcacttacgatgttatttctatggctcccagccagggctggtataatgggatatgcagagcatgctgtgcatagggatccccaaagaggaagggatccagactctgatcactgcttttattcatttagtaataaatgagtttgtgcatctatagtacagaggccaagtctccttttttttgtgtgtgctcattggagaatatccacccaaagtttccagaccagacatgcatgttgcagactcatttatgatttaataggcacataccctctaatctttcataaaggtaaaaattgaccaagatgtacattgaagggcaatcttaaacaggaaaaggaaagaaagatatcacctggaaggcatttaggaatagagatggggatagagtcaacccgagrctcatgcatgtaacaatgtctttggtctgtcactggagaacaatgatcctttcttctcactcaactagacaatccacaagcctagttaccgaagctcctgctgggagtgggtctcctcactctgggaacctggaactactgtccccatttgccaaattgcactctgaagaaaacttgttcccacagactagtagcc

SEQ ID NO: 472426 - DNA, 578 bp, Homo sapiens
gtaaagtagttcttattgtcctcgctggatagatgctgtaactgctgcttgtcaaatcctcatgggctggtcagacattctgtggtggcttgagccactgtcatggccacagtgccagactttctctagcagtttgacttcacagtggtcccacagaaaattttaggagtgaatatagaagaatgataaaataatcataggtaatattcatttatcagtttctatttttcaggcattagtctaataaatttaattataaattaacttattaatatgtgctacaattctaggagccagtagataattcttgtttctatttcatagatgagggaactgaggcagaaaaagtttaagtaagttgcctgaagttacacagataacaggtggtcacattttcagctattgcaacataataaataatcwcaaaattacaatgtaatataataatacagaatgattctcacaatgatgatatatagacatatgaactacacacattcatatatatgtttgtgttgttattatccaaagcagcccctcaaatatctgggattttcattatacttcttatagatgat

SEQ ID NO: 472427 - DNA, 586 bp, Homo sapiens
ctcgctggcacgaacatggcacctcatttaagccattagacaaagtctctaccatcagggtttatcaatttatcactaccagagtttctatctgttttcacaaaattgtcttggtcttttacaggttaaagtcctctttctccagcaaggccataagtacatgggagacagggatcctgctatatcctttctttgcatctggacttaccatcgtaatgcctagtacagactggagctaatgaagtcctgctgcctggggtcaaactaacaagagggttgatcatctatcagtatcagatataagtttgcttgtcaaatatcgaaggagcagaaggaagaagccgtgggagttatcaaggtcttttgataagctataaggtctatgaatgattaatctacttgcatgtaatgagtttagcttagtgactgcaacgtgtattgctatggcttrtaaatgatgaaaatctattttttttttggttaaaatcagaaacaaatgagaattcgaagactatgccatgtatggataggtaagtgtttcatggttgccagtagaattcaggctggtttgcatgaattaatgaaa

SEQ ID NO: 472428 - DNA, 513 bp, Homo sapiens
ccgtgactttgtttggctctgctgggctcagcaccgcatgtcttcttatttcagcccctttgtggaacatgccattgtcatagcaaggagggaagagcaacagagctggtagaatcacatgatgtctccaaaactcatgctcagttgtggtgaacagcatgtcttctcacaggctattgacaaggaaagtctcatggccaagctcaaagtcaaaaaggcagagaaatatatgaaaactacatggaagacagcatcgggctgatatattcgatctaacagagaaagagatgaatattgcaaacaaaaatacagcttaccatatgctactgttygctgctcatttgaaaaaaaaaagcttagtcctcattcacattaagtaaagaattacatttattttcttggataaaacatgtcactatatttccctaaatttctgattaattgccccagtcatccacttcactgtcactgtcatttatagctatgtaaacaattgggggtttcatacgagta

SEQ ID NO: 472429 - DNA, 619 bp, Homo sapiens
ttccaagtatttctgcaaatgatgctttaactttacattacaagtgatctcacagttctagwagacttctgacacataaggattatgttgtctgctcaagaacaaaaaaagcatttgtgaaaactcactgctttcttgacttttgttgactttgtattgtctttatctctgcctcttaatatgttcactaattgttgcaggtgtgaacagacattaaaatcagtatgggaatacactgattaaatcaaagtaaaagcttgaaggtagaaagaataacattaaactgttaaatacttttctaccgtttaaaaatacattgacagttaatatttactgagcacctagtatgtgccaagtactgcccatagatacatggataaaagatattacccatgtcttcaaagagcttacaatatggagaaaaaacagacaagtaaataattacaatacagaataatgaagtgccaggaaagaaaatgcacaaactgctttgaatagatagataaaaagggaaacatgtaggaagttaaaaatacatatatattttcaacttaatctatagtattaggtcgtgataatctgtaatactcctttaaagaagattattattctcatattt

SEQ ID NO: 472430 - DNA, 619 bp, Homo sapiens
ttccaagtatttctgcaaatgatgctttaactttacattacaagtgatctcacagttctagtagacttctgacacataaggattatgttgtctgctcaagaacaaaaaaagcatttgtgaaaactcactgctttcttgacttttgttgactttgtattgtctttatctctgcctcttaatatgttcactaattgttgcaggtgtgaacagacattaaaatcagtatgggaatacactgattaaatcaaagtaaaagcttgaaggyagaaagaataacattaaactgttaaatacttttctaccgtttaaaaatacattgacagttaatatttactgagcacctagtatgtgccaagtactgcccatagatacatggataaaagatattacccatgtcttcaaagagcttacaatatggagaaaaaacagacaagtaaataattacaatacagaataatgaagtgccaggaaagaaaatgcacaaactgctttgaatagatagataaaaagggaaacatgtaggaagttaaaaatacatatatattttcaacttaatctatagtattaggtcgtgataatctgtaatactcctttaaagaagattattattctcatattt

SEQ ID NO: 472431 - DNA, 450 bp, Homo sapiens
ccttcaacctcctacatgtcaccataaaaatactataataattctggaaggaatggtaatatgaattataaaggcagaaatacttcaattaaatatcctgaagttyttattgggtcaaaattttgaactattcatttatctgcttcatagggaaactattcccgcaaaaagtgctttcaacctaggattggctttacaaaggcaaccctggggagggaaaataacacattgtaacacattatattttttcttcaactgttcagctaagctatcattctaatgagtgaaacaaaatgcagcaaaatgctgcaaatttcttaaagaggactttgggcaccaatttatggaaccaattccttaaaaagatgggccaccggcactggatgactatagtaagacgtgactcatctcttggaaggtttcccaaaacagaagtcagcacatcttcaa

SEQ ID NO: 472432 - DNA, 450 bp, Homo sapiens
ccttcaacctcctacatgtcaccataaaaatactataataattctggaaggaatggtaatatgaattataaaggcagaaatacttcaattaaatatcctgaagtttttattgggtcaaaattttgaactattcatttatctgcttcatagggaaactattcccgcaaaaagtgctttcaacctaggattggctttacaaaggcaaccctggggrgggaaaataacacattgtaacacattatattttttcttcaactgttcagctaagctatcattctaatgagtgaaacaaaatgcagcaaaatgctgcaaatttcttaaagaggactttgggcaccaatttatggaaccaattccttaaaaagatgggccaccggcactggatgactatagtaagacgtgactcatctcttggaaggtttcccaaaacagaagtcagcacatcttcaa

SEQ ID NO: 472433 - DNA, 537 bp, Homo sapiens
caatcacagatgttaatgttttgtcatatgtgctttgtatttttttgaaataaatttttctactagtaaaaacatatatattttcaaatactctcaatataaaaattatatgaccttggccaggcgcggtggcttatgcctataatcccagcactttcggaggccaaggcgggcagatcatgaggtcaggagatcgcgaccatcctggccaacatggtgaaaccctgtctctactgaaaatacaaaaattagttgggcgtggtggcacatgcctgtaatcccagctactttttcgatagtgttagaaaccatctccctctgagactgtgcaccagccttgcagtgaagtgaagattgttccccaatctctctccaggcatagtatctctcctgtgcactcacagagtgtgtgtgtgtktgtgtgtgtgtgtgtgtgttcatgcacgcacaccatgtggagaggtacatcttggtaaattaggaacaagcaccattgaggggattcaattcactttaaccttaatagctatttcttag

SEQ ID NO: 472434 - DNA, 456 bp, Homo sapiens
cttacccacttctccctgctgcaaaatttgtcctgggaggtctggtggtccatgaggtctrtgggctgctcactgtgcctgcaccccaagctccctgagccagaactttcttcctaagtcttaatttgtcatgaagttctcctcctacagcttattaattattgaggtaaggctgatgattagtattaatataacacaaattaaaatcatgatgcaggaggacattttgacccataaagtgaatgttaattgaattatttctaatttttatacatcttcacagttcctttagaatattttctcttacatgtctaagataaggactgagacagaaaacacatagttcctagagttcctgtgtttacccttttattatgacagtgtctggggacagaactaaaactcaaagtaataatataaagacaacaatgacaaagtattttcccccatattaca

SEQ ID NO: 472435 - DNA, 522 bp, Homo sapiens
gaagtagacacttacccacttctccctgctgcaaaatttgtcctgggaggtctggtggtccatgaggtctgtgggctgctcactgtgcctgcaccccaagctccctgagccagaactttcttcctaagtcttaatttgtcatgaagttctcctcctacagcttattaattattgaggtaaggctgatgattagtattaatataacacaaattaaaatcatgatgcaggaggacattttgacccataaagtgaatgttaattgaattatttctaatttttatacatcttcacagttcctttagaatattttctcttacatgtctaagataaggactgagacagaaaacacatagttcctagagttcctgtgtttacccttttattatgacagtgtctggggacagaactaaaastcaaagtaataatataaagacaacaatgacaaagtattttcccccatattacagacaactttatgcgcattctcactaaatcttcacaattcctatacattagacttac

SEQ ID NO: 472436 - DNA, 669 bp, Homo sapiens
ggtatgtgggtggtgacaggaaaaagagaggagttaattcagagatgtagaggaggtggagaagggttcctggagagggtataactctcccaaacacctgtgctcctgccagaggtgctctgacacttttgatacaggaagacagacaggcagaggttacctttaaagaataaatccacaggatacactgatccaaaatatttacagtacttacatttttttcaaagtgttattaatgatgaaaatcaaaaccacaatgagatatctcatgccagtcagaatggctactattaaaaagtcaaaaaagaacagatgctggtgaggctatggagaaaagggaacgcttatatattgytagtgggaatgttaattaattcagtcactgtggaaaggagtttggagatttctcaaagaacttaaaacagaactaccattcaacccagcaatcccattactggatatatattcaaaagaaaataaatcattctaccaaaaagacacatgcacttctatgttcatcacagcaccattcgcaataccaaagacatggaatcaacccaggtacccatcaatggtggattggataaagaaaatgtggtacatatgccatggaatactacccagccataaatatgaatgaaagcatgtcatttgcagcaatatggatgc

SEQ ID NO: 472437 - DNA, 435 bp, Homo sapiens
aaggcgagaacttcaaaaaaatcctaatgcctgagccttgctcccaacagacgtaattggcccagccagtatttttttaaaaatgagatagaataaatcagaaaatatcagtatttattttgtgttgtaactcttgttttgggaagcattgttttcagatttatattacacatatatgtgtatactgattgctaagtgaaatctatttgttacctctgggcatggtctaaaaagtttgaaaactgctccaaattaaatagaattggcagaagcttaaaaatggaaacttcattttcttcccatatgatatgctatttagaacaatacttgaattttgactagaacttgggataaagaggagagtcctagaggcaagaagccctccctgaaatgcaatcatggctgagttcctmtttaggacaatagcctaaacca

SEQ ID NO: 472438 - DNA, 591 bp, Homo sapiens
tctagtgaagcccattcttgagattccccaatctcctaatgaatggaatttttmaactgtactctcttaggcataacttgaaagaagggatgtaaattcattgagtaataaatatttaagtgaatgaatgcaagatctgtggtgcagaatcgttttaaagtttacagagaacagagatatcaaaaattgcatgaaagaagataccaccctagcagggccaatgacaaatgaatatcagggatgattttatcgtaagccttatttgtaatgtacacattatttaattgttcatatatttatagggcatctatgatgtgacaagctttagattgagaagctagtaaaagttttggggaggactggacagataaggtaatctagtcatgtcttagttctacaccttgaaagtctgtgtccttgggcaagtaacttaacctcttcatctcatggtttcctcttctgcaaaatagcaaagataagaaagatacatatcccatgtggttgttatgaggttaattgtatcattgtttatgccaggttctatgcgtacagaaataagacaaagcttccacgattttcatggtttagtag

SEQ ID NO: 472439 - DNA, 591 bp, Homo sapiens
tctagtgaagcccattcttgagattccccaatctcctaatgaatggaatttttcaactgtactctcttaggcataacttgaaagaagggatgtaaattcattgagtaataaatatttaagtgaatgaatgcaagatctgtggtgcagaatcgttttaaagtttacagagaacagagatatcaaaaattgcatgaaagaagataccaccctagcagggccaatgacaaatgaatatcagggatgattttatcgtaagccttatttgtaatgtacacattatttaattgttcatatatttatagggcatctatgatgtgacaagctttagattgagaagctagtaaaagttttggggaggactggacagataaggtaatctagtcatgtcttagttctacaccttgaaagtctgtgtccttgggcaagtaacttaacctcttcatctcatggtttcctcttctgcaaaatagcaaagataagraagatacatatcccatgtggttgttatgaggttaattgtatcattgtttatgccaggttctatgcgtacagaaataagacaaagcttccacgattttcatggtttagtag

SEQ ID NO: 472440 - DNA, 467 bp, Homo sapiens
gggagtgtttacattttaaaagacggcmaagatggccaggcatggtggctcattcctgtcatcctggcactttgggatgctgaggtgggaggatcgcttgagcccaggaggttgaggctgcagtgagctgtgattgaaccactgcactccagcctgggtgacagagtgagatcctgtcaaaaaaaacaaacaaacaaaaaaaacaacaaagtttctttactcctcacccctctcaaaaaaatgacaactgacgctaaggggatgttcagcccatggtaggaaatccagttatcggtactgtacgagggaggggaccttctggcctcttagaagtttctagaccttattgaggctatccctgcacagtgactctaagatcaaacggtgccttgtacctggggctgtgtgctgagtcctctgctgccagggtgctcctcaaatggccctgctccaggtgcgtggggcag

SEQ ID NO: 472441 - DNA, 512 bp, Homo sapiens
ctggccactgattagggcattaacttcctccggatggctcacgtcagaccagaagcacagaacgggctgtttctggtgcttgggcattgggaggtggggagctggcgggcagggggcttgccactccctggcactggacattgaggcctgcagaacaggcagggtgatgaaggcaggggagagaagccctttcccttaccggcgtgcctgtgggtaaggcctcccgagaggacatggagaagaggtaaagaggatgtggacatatctgtcaatttccttaggcaagaagcgggtgggggctggacagaaagggacgaaaagggaagtggaagctgtgagcctcacagtccagctccactgcagacctgcccttctgcagggagagccctggccacccggccttgagtggaagaagaggaaagggtgtaygggggcaaaaccctggacagggagcaggataagaagggggcgggatgagaggtttggggaggtgaggacattgccctgagata

SEQ ID NO: 472442 - DNA, 613 bp, Homo sapiens
tgctccagcaccgccttcagccgcatggcgttggacatgaacagggccacgtccagcatgctctccgccacgctcttcttggtggcgtaatggttcaggttgatgggctggctcctggggtcggagcttccaggctgtaggggagaaagcacagacttaccaaggggagctctggaagggaagcagttgagaggtgggagagaggagagaggttttaaagctctttccaatccagatgggaagctcagggcaaatgacacccttagtttcatggcctgataaaatgaagggttggacgagaaaacccataaggacctctgcactctgaaatgacattctgttgcagttgatacttcctggagagtcaccccttccctcacaccttcacacatctggctggagaaagccgggagggttctctgctgctggtaaaatgcaccttcctcaccctattcactattttacctgggccaggcctcagctttgggctgtgttcttttcctctgagaggaaagcacctgagaagacaataaaaagagcttggaggcttgggtgaaatagagaaaggcacctcctctcgcataatgcygtggcccccaaggcagggtgcaca

SEQ ID NO: 472443 - DNA, 449 bp, Homo sapiens
cattttaattttcctgttatctcttaaacttctcagcatgttttctatggaagattcagcactttgaagttttccatatattctttttggaagctcgcatttctattcagtgctcctaacactcctctgggtttgtgacatgagctctgctttgaaatctgactgcatttcctggcccctggcctcttctccagctcrtccttggtttatagagtttagcaatggttgctaggcagtcggccatctcccttttcagcacccaccaaggctggaccccttagtcctttgtcagatggttgtgaattaggaagttattcctcaagatttagctgctttttgtggctgctgggcctgctcaggtaccaccatgcctttgtctgtgttgtcgtcactggataagccctccttttcctatgccaacctcaatcacacccatctgacatgtagct

SEQ ID NO: 472444 - DNA, 361 bp, Homo sapiens
accttgaagggtttttttttttttgcccattaaatatgcatggaactaaatttcattggttccaagatacacacacacacacaagcaaatatttatattatcatattttcatgtcactgaagtcaggatgtgtcttgcaatcaatgctgcgcatatcataatttgcagaatttctcttagagtctgaaatgtggtaacctctgccctgcctgcctgcctgctagaatataaatgtgatagygttttgtatactgggaagtgctgtacaaataagtaagaactagtaaaacagaagttgccactgcctccctcaatacctggtcgtacaattctgactgctctagagcagccagccaagtaa

SEQ ID NO: 472445 - DNA, 507 bp, Homo sapiens
cccagacagcagctgcaaaccctgccaccctaagaggccactgctaggtcatgtcaacaccaggaaatgtgtgtcattggagccctaagctgttctcatgtcctccaacccaggactcatgtccctgatctcatgtccccgatcaccagactgccagtggactctactttctgctgcctgcccagacccagtcaacttccagaaaagggcacataaagtgatccacactgaaaagcaattggcagacaaaacctaatgggctattcatccaaaggaaacttgggttttattaggggtatctggtgtcctcctggcctgcattctgacatataataagcatctaagtcatgacarttgagtgaacatacaaaaggtaaatacatatggcaaagcctagaattggaattggcagtttgaaggccattggcccaagaacagggtattttcggttgtgttctcttttctttcttttttttggatgagtgctggaagccccaacacaattgt

SEQ ID NO: 472446 - DNA, 609 bp, Homo sapiens
gacctcttgatatggtttggctctgtgttcccacccaaatctcatctcgaatcctaatccccatgtgtcgagggagggacctggcaggaggtgattggatcatgggggcagtttcccctatgctattctcgtgatagtgagggagttctcactatcatgatggtttttaagtgtgatggtttaagctgatggttttaagtgtggcacctccttgctcttttgctctctctctctctctctctctcctgctgacttgtgaagaagktgcctgcttcctcttcacgttccaccatgattgtaagtttcctaaggccccccagccaagcagaactgtgagtcaattaaacgtcttttccttataaattacccagtctcaggtattctttatagcagtgtgggaactgactaatatacctctgaagcccatccacctctaatactctccatttctttgattcagtgaatttcactaactgggctcaaagtatgtttaggatgtgaaaagtcaagtggttcaggagactttaaatgtttcaaacaactttatattggaaatatggggaaaatgcaaaatcttgatcagaccattaaaccgtgatattgacttta

SEQ ID NO: 472447 - DNA, 652 bp, Homo sapiens
ctggaatgtattcaatatagagttttaaaaaccatttatcattattctaggtttatgtctattcattctccccacccactctatgggatgataacaggaaaagatggcaaatggttgtgtccagtattattatatactggttatataattctcaaatgtactgattatatgattctcgatttaatctacttaccaaaacaaagaaataaaattttaacatccattaactctgtactatcatattttaaaatatgtatcaaaatcagttctctcttataaaagaggggttggcagtacattctcagaccaaacaacaacaacaagccccaaaaaaccggtatagtaccttcttacaatggctactgcagtgcattctacatatttcatagaaaccaactaggtaagttcagcgttcgcagagattgcctcacagatacttagctctgggttcctagtcaccttgagataagatctgcaaagtctaaaagaaaaacaactcccaaatgctgtaacagtttttccattcaagtgctgagagagctatgcatataaaacttgaaaaaagatagccatgttgaagggaggactattttaatgtggttttttggtatgtaaattacaaataaatmgaaaaaaagattttcaaaacctg

SEQ ID NO: 472448 - DNA, 464 bp, Homo sapiens
gccatggcgggctcatggggaaggaagcaggcagagatcaaattcctctgctggggcccaatgagagttaagggggaggactccaaaaaggagcatggagcacacggtagggctgccccatgtggcagaagccatgtgggtaaggacccgcagcctggagcagtgtckttggccagagctgaaggagaggtggctggtatggccagcggggccttcagcagctcactgagctgcctgtctgctctaactgggctgcaggggtggaggtgggcagccccaccgggccaaggccagccaggctgggggttggctcagtgggtctctgccgcaggggcgcatcctgctgggacccgagggggtcccgctgcagagggtagacgtgatggccgccaatggtgtgatccacatgctggacggcatcctgctgcccccgaccatcctgcccatcctgcccaagcactgca

SEQ ID NO: 472449 - DNA, 621 bp, Homo sapiens
actgcagtcttcaccccaggggttcgaacaaacctcccacctcagcctccagagtagctgggactacaggcatttgccgctgtgcctgactagtttttaaaactttttgtagagacgggatctcactatgttgtccaggctggacttgaacatctcagctcaaacgatcctcctgccttggcctccccaaatcttgagattacaggcatcagccaccataccctgtcctgcgctaaattctttgactgacggcagcacttcctatgcactaggcatggattaacttagttgwttgtccctcagccctatgacgggagtgtcgtgcctgatgtcattttacagatggtgtattagtcagggttctctagagggacagaactaatgcaatagaaatatatatagagagaggagtttattaagtattaactcatatgatcacaaggtcccacaacaggccgtctgcaggctgaggagcaaggagagccagtccaggttccaaaactgaagaacttggagtctgatgttccagcatccaccatgggagaaagatgtaggccagaagactaggccagtgtctcttttcacatttttctgcctgcttatattctagccacagcggca

SEQ ID NO: 472450 - DNA, 621 bp, Homo sapiens
actgcagtcttcaccccaggggttcgaacaaacctcccacctcagcctccagagtagctgggactacaggcatttgccgctgtgcctgactagtttttaaaactttttgtagagacgggatctcactatgttgtccaggctggacttgaacatctcagctcaaacgatcctcctgccttggcctccccaaatcttgagattacaggcatcagccaccataccctgtcctgcgctaaattctttgactgacggcagcacttcctatgcactaggcatggattaacttagttgattgtccctcagccctatgacgggagtgtcgtgcctgatgtcattttacagatggtgtattagtcagggttctctagagggacagaactaatgcaatagaaatatatatagagagaggagtttattaagtattaactcatatgatcacaaggtcccacaacaggccgtctgcaggctgaggagcaagragagccagtccaggttccaaaactgaagaacttggagtctgatgttccagcatccaccatgggagaaagatgtaggccagaagactaggccagtgtctcttttcacatttttctgcctgcttatattctagccacagcggca

SEQ ID NO: 472451 - DNA, 401 bp, Homo sapiens
tcctcgagttttccttgcaccaaagatgtcttgctttttgtgatgaatgatcattccttcctcttcgacgacaaaatacttcgatctctgcagacaccgtctgttgkgttacagacagacactgaggcctgaattctcattaccaatgtctgctctaatagagcttcaatctgcaactgcataatatggtcactgggaagtcaagaacggggccagttggttgaccttctggggagaggctgggctgcttggatgctgagaccgtggagggttcatgggttccgaggagcagatcatgcaccagggcggcctgctcagctctggtgtctgcagccccggtgagcttgagcattagggagtccctggatattcatgttgaggtgtggaggaggagactccag

SEQ ID NO: 472452 - DNA, 585 bp, Homo sapiens
tggctgtgcccttcaatatcctgagaatgatgggatgtgaaaaggtgtcgaatcctcaacagcagggagactgcttggatgactcccacccagaactgaaattgaaggcggagtttctgagcttagaaaggggaaagacccagcatttatgactgactccttcatccaacctctttccccaaatcagacgatttttgacatgggtatggtaacaccatacgtttgcatagagagrttcatgggaagcctagctgctgtgacgtgcagcagtcagtttttaacaccatcatcagtggcgaaatgaaacattcccttgaaatcgcctttctctggatgactatttaaacagcttcacgttagcctgcctgtgcgactgaggacgtactgatgatatcctcattttccggtggaggaaagtttatgacgtcaatcccattccgaatatcaggactttaaatctctatgatgttagcacaaaatgcaagtggagccctctccaagctttcatagagccatgtattttggaagccttaatggggagacagttctcaatgtggaaaagttgtcatgtatcgcagagaagag

SEQ ID NO: 472453 - DNA, 397 bp, Homo sapiens
gaccgaacaaagtatattccttaaatgttggaagaatctgcaaaccacagactagccagtttggtgttaatcgccagaagatgattaaccatggaaatcaaagccagataaacagtttctgatcataaactgaacmtgtgtgtggacctcccctttctccagccccaaaaaggattgcaaagcccttgaggatgctttatcttgtgtcgctcagggtgcctagaagagcgttgaaaactggcaaattctccataatgtgtgtgttggcatggggaagtggggacgatgggaagctcattaggtacgcagccattagcttttgcagcaaaacaaaccaccccaaaacgtggtgctttaaaacaatacccatttagttcgttcccgattccgtggctca

SEQ ID NO: 472454 - DNA, 594 bp, Homo sapiens
ttacagccttgcctctgcttacctaaaggtacattttgcttttttgtcctactctcacccctcctcttcctcatattcttcggagccatcctgaataacttcatggtgccagagtgctatactgttgtatgttctgctgagataccattggacctggtgcatgtatttactataaagcaaataacatcaaatttcagatatttatttatctttctttacygagctcacgcaagtaaaagagacttattgatctttaagtttccaatatttaccatacctgaggcatagtaggagtccacaaatatatattgaaataatgaaataaaaacacagttacgtattattcattaatataaagaacaaataagatgtaatattttgaactgtagaattttgtcattgcaatttgttactgggaaaaatttgcattctgttctgagggacatatataattactgatctccaatatcatcataatttaaacattcttactaaaagtcgtctttgtcattggttttatgctataaaaatactacctccataaatatggcatcccagatagactattaccttctataaaaatgtacttatcac

SEQ ID NO: 472455 - DNA, 610 bp, Homo sapiens
tagttagtgggttgacaaactgacttccccaaagggacttcagtatatgtactgctttttcactgtggtcaaaatcacaggttaaaataagaagtagtttgaaattcctacccacacaatgtgttactaagggcagtggataaatcttgaaaatatggggtctacccctctccccattcatccagcatgtccttagggccctcartcgtataactagtcagcaaagcactatgtgctctgggagaatttgggaaacccaaactattctattactgaagtgacttcagtacttccattaaaaaaaaaaatatatatatatatatatatatatatatataatttcaaagtttattttagattcagggcgtctatgtgcaggtttgttacatgggtatattgcatgatgctgaggtttgaaatacaaatgatcccgtcacccaggtagcgaacatagtcctcaataattagtttttcaacccttgctccctcggtccccagtatctattttcgccatctttatgtccactagtactcaatgtttagctcccacttataagtgagaaggtacggcatttggttttctgttcctgcattaattcacttaggataa

SEQ ID NO: 472456 - DNA, 321 bp, Homo sapiens
attacaggtatgagccaccacactttgccagcaccataacacatttatgttaaatgtttataaaagcctttacattttatatatatatatatatatatataaataaataatttgataggttacrttacattttataaaatactttatcatataagcataccagtaggactatatttggtatatcataaatgctgggggtttttcttcatcctgaatttgaaaatacatgtactggtgtgtgattcaacttatttaattcaaataggaaaagaaaagtttttcaaaaaatgtttgctaggcttagctatttgccaataacat

SEQ ID NO: 472457 - DNA, 532 bp, Homo sapiens
agataagataatctgttattttgagattaccactccatatttacaatagyttctcatttatgtaccaagcaagcccccatgcctgaaagagtaattcaaaattgtattgttttgtgtttgcttgtgtgtttttttgtgtattttcattatgtttgtgttttcattaattcagtggtaacataaaaccacaaatagctgtcatctataagctggcaattgcttttgtagagagcatttaaaacgacattgcatttacccgaacgtctttacttgtttcaccctaaacattttataacactttaacatatcaaatttggtaaaaatttatggatgtcaaatgcaaaatcatatcaataaaagatagtgttcaacctcaacctcaaacagaagcgagtaaactgcccaaccatctctatgcataagacaagataataacgtcctgttacaaagaaaaacatgtacatgggcctggaatgttcacaatttatgaatacaagatataatgaaaaggtaatttttcaagtagtaaatg

SEQ ID NO: 472458 - DNA, 134 bp, Homo sapiens
tgggctttgtttacttaggtttaaagcttgacaggaaatgttattgtgcacagacatsgtttgggtgtctgagtggaaggtgtggctagctacaaacaataaaggtttccttgcttccttcccatttatacacc

SEQ ID NO: 472459 - DNA, 523 bp, Homo sapiens
atttttaatcccaatatttgttaatgacaaattctgtgattttaggcatatctcctaactcctctcatattcagatttcgcttttatacaaatgatatactcactgactcataaagtcataagtaatatggtacacatgttattcatgaatatgcctgacaaatagtaggacatgtgtacttattgttcttatgcccatgggccaatcagtcttatgtccatgtccatatgtcttacgtccatgggccaatcagtccatgaaaaacaaaataagggaaacatttgaagggaaatggatagaagtccttttctggcactatctcatcactccaaatttttatygcatcccccttgttccacttcttaccattgaaagaaaccactcatggagtggatatgggaggaatgaaaaattggactgactcatagtagcaaacaatctacctgatttcaaggtgaatatttaggatgaaataggccaaaaactgtcttgtatttgaacatccataaaaccagtccctag

SEQ ID NO: 472460 - DNA, 598 bp, Homo sapiens
actcattacttgataaaccactttgacaatgaagtgtaggtgcttagtctagttcccagtactcagaaggacttaatagaatccaacacacacccataattccttgaattaatgttgcaagtaagattggactagattcaaatcytaagacatttttgaagatagatagagaatggtcacacaacctactattatatcaggaatactgtgtcaatagaacaatagttcaagtggtttttttctatcagatattaggtgatagatacaacattctgtcactagtaacagtggtggcttttcactggcctttaggagggctggagaggagatatagagcatgtgagaaaatcagaaactttgggatttgaaacatcttccccagagctgagatttcaacatcatgccatgtacctgtgtgactaccatggatttccctcctttccctcagttgaatattattaaactaagttcagcacctgactttgtatccatgagttatttgtaaggatttgtataaaactgctgtctgtttaaaaacctctttcaactttgagcatagctattgttgtaaatctgagatatgagaacattcgtcagc

SEQ ID NO: 472461 - DNA, 591 bp, Homo sapiens
atatttcatatttccaagcattagaggaacagaacagtttggctccatataaaatcttagttatcacttatgaaatattttactaaattgaataaaatagaaaaactgcatgctctaataaattagaagaaagttaaattatcartgctttaaagaaggtaatgtgttatgataacaaactatttctaaacataaactatgtgttccagggccttctattcaagatctgaactggagaataagttctggctctgccacttgattgcatagcaaccttgaggaaagtcatttatatattttgtgcctgagattatttatccaaaatgtaaaagtggcgataattttacctgtccaaactatctaataggcaacttatgtagataaaaatggagtcaatgaatgtaaaaactatttgccaactgtgaagtgaagacaagagtggttaaaaagtggtagcttttctctgtgccggtagtgaactatctgagaaagaaatcaggaaagcaattccatttacaatagcaacaacaacaacaaaaaacctctagaaataaacttaaccaaggagctgaaagatatttacaatgaaat

SEQ ID NO: 472462 - DNA, 593 bp, Homo sapiens
cgtttaagccaacagctctgtgccttttaacacacattaggacgactcttcctcagtgtgaaagagctcacagaggacttcacacagaagctgccattttctaaggtctgtttaatatctctggcccagacctggaaagactatgctttggcactgaatttattcggcaatttcttttctttctttcttttttttttttttttaagatggattttttgctcttgtcacccaagctggagtgcaatggyatgatcttggctcactacaacctccacctcctgggttcaagcaattctcctgactcagcctgccaagtaactgggattacaggtgcgcgccaccatgcgcagctaatttttgtgtttttagtagacacggggtttcaccatgtcagtcaggctggtgtggagctcctgacctcaggtgatccacccgccttggcctcccaaagtgctgggattacaggcgtaagccactgtgcctggccgatttctttattaaatataaaacaatggactaagctgtcccaccccctcgtagccacattctactgcttgaaaggtgagaaagagggaaaaggttgcacactgcaa

SEQ ID NO: 472463 - DNA, 520 bp, Homo sapiens
gggatcttctggcagccggccgggggctctccctcgcccaactctctcccctcccctctccgctcctttgttccctgctcctgctcggcgcacctcggcgctgtcagagtgagagaggcgaggagggaaggtacaggaggtcctgcctccgcccccagccgcccgccccgtccccctcccgccccgccgctcctccgcccctcccccgcaccttccagccgggaagactggaccgagcgcggcggccgctgtcactcgtccctcgggggcggcggtgcggacgcggggggtggccgggtccagaaacacgatcctttccgcctgccgcgcacggaccgcccgcatccctcgcccggcggtgggggcaccagccgagcgccccaggtttctcccttgggccttycttcccggggctggcgagggtgcgtttggttcggaaactgcaacagatggaaaaaaggacacctccctccttccctcctccacccccgggaagaaaagcctccccgtctcgtttttg

SEQ ID NO: 472464 - DNA, 640 bp, Homo sapiens
acctgggttccacccacaattctcctgctccattgtaaagtagtaatccactttgtccttcatggttaggatcaattacaccagccagcactaaaatccatatcatttcctcttttcctggagtcataagaagctgagtatggccagatggcaatatgagcttccaattcaatggaaacattgttgtctgtcttactggaaacattcttccttgtggattaatacctccaaccagcagaccccaacttattggaacaagatgcaaaaaacttttaaagtcataccaatactgtaactgaaacttcaataggccatttccaatatcctataatgatagacgcttctgagttatggcaaatatgccaaggataatgaatcaaaacatggcagtctttcccctgtccttttttcwcttaaccattttcattacaaacaatgttatgtgaaaatctgtaccaagggtagagcaataaggaagtcccttaatagtactgcttgcagatgcttgatggccaaggacaacaaatccaaattcacgttaagtatctattccagtgtggaaatatttgcaacctctatctcagacggatttcagagttattatcctgctaccagacacctgactggtcatctcaggtgt

SEQ ID NO: 472465 - DNA, 477 bp, Homo sapiens
agagtgtcttctggtgtttctcaggggataaagttaggaaattatctgaagtaacacacggtgaatggactcccaccttctaacctctaagtctttgcagtgttctctctgtactagaccaagagttttctgtcatttcaactttttcctttcttttaactgtaggccacccttagttccaggttgcagatttaggcatccatccaaacaaacaattaaactcactcccagggaatccagcaagcatactgaaaccatatcaattaaattgkccaaatcaaaaatgatgactgttcctcattttacaaataagctcagattcattcctatacacatttcccagattttgatcaacatgaattagtaaagccatataactattttttaggtgaaagcattcttcttaaggctggactttgtaattttctccaggagcattctggattataatgctaattacatttggggaggcaagaa

SEQ ID NO: 472466 - DNA, 477 bp, Homo sapiens
agagtgtcttctggtgtttctcaggggataaagttaggaaattatctgaagtaacacacggtgaatggactcccaccttctaacctctaagtctttgcagtgttctctctgtactagaccaagagttttctgtcatttcaactttttcctttcttttaactgtaggccacccttagttccaggttgcagatttaggcatccatccaaacaaacaattaaactcactcccagggaatccagcaagcatactgaaaccatatcaattaaattggccaaatcaaaaatgatgactgttcctcattttacaaataagctcagattcattcctatacacatttcccagattttgatcaacatgaattagtwaagccatataactattttttaggtgaaagcattcttcttaaggctggactttgtaattttctccaggagcattctggattataatgctaattacatttggggaggcaagaa

SEQ ID NO: 472467 - DNA, 566 bp, Homo sapiens
acatctctggcttcaggtcctcaccatctactagtcccagccacaatgaatgaaaaacattctccaaaacttgtattttcagttcatattttagtggcttgccacatgctgtttcctctgcctactataccattcacacctttttctcaacctggcaattaattgtactctggagactctcaccaaatgttgccttctctggaaagcaagatacctcccaacccattctatattcatgtagaaatatgtgctgaattctaacagcataatagcatctcaattattcctgcaaaactgtgagctctctggaaaaaggaagagtgtgttggtttgtctgtctatagaaagcaactctcatactgtttgtgatgtcattgctatactcagtaagtrttgactgatgagtgaatgcacgagtgaataaataaatgagtgagtgtgccaaagtctcttggtaagcctaagcaagcccatcaaagtaaggcagaatttacaacgaaaatgcatgtttaagtgttaggtaagtgacctaaattaaagtgatgtggagtggcatttatgttgcc

SEQ ID NO: 472468 - DNA, 598 bp, Homo sapiens
ggtccatggagttaagagagaaggaagaaagaggtgagttctggttacattggggccatcctctgaaggattaagcaaacaagacaagaacgttatctcagtcccttgccaggcctcccctctaggaatcctagcctaagcctccttctgtcataatcagtcatttgtctcttctacactagccctgagtggtccacagtccctcgttgcccctctcccttgcctgcttattatcattgtcatcttgcctgctacccatcacccctccacatagctcataactcacaacagactgtgagcttctgacagccgaaatcaggcacagcagctccagtgcccaacctggcacaaggagagggtttatgccatcgttggaggagggaacaagtgaacaaagaatcagcaaacagactctggacctagaggtaggcaattcacgagatgagaatctcatcgatggcacatggctgttatcactgacaccaaactgcygtgagtttttaaaagtggaatgccaaattagggcgcattaaatgaagcacagcatccaaaaatgaggaggttattatacattcatctctggtgaatggtggtcagt

SEQ ID NO: 472469 - DNA, 656 bp, Homo sapiens
cctattacagcacctctactatgatgtggggaaactccttccaaggttaggtttgaatgtcgaaactccttccaaggttaggtttgtatgtcaaactcctgacggtagtcctttggaatgatcaaagaaagatgattacggggtgggagggctgtccaagaaaagatccaaaacagaatagtcaatgttcaggcagtttataaaaggggatgtcctgccagcacasagtttaaaagaggtggtggagggcatatgcacttgtggagcagtaagtgaacctcatcaggattgtgagggagactggacataggcaagagatgcttataggtggcttgcactaagtcaaacaccaagtttcctccagtcttcacaattcacccctgatgtttgggttagcacagcaaactcctaggtttcctataaataaacttgcatttgagagaggccaaatatgcaaagttgacccaataaaattaggccagcaattataatagctccctgaaagataatgtggtgccagataatgttaatccaggcagaaggaagcagtcaggagaagaaatagggattcagaaactcttgccacattttagtaacttagtaacttcgttgactgttttggtttgttatctactgaacgattctggagagctttc

SEQ ID NO: 472470 - DNA, 342 bp, Homo sapiens
aactgttaagcatgaagggaagtatagttttaaaggcttttgtgtaggggtcatttcacccaaaggatgaaattaagtggtgtggcaccaatgggtgtaagttggctagtttgtagggcattggcttacaccaaaagggcatcacatgaggagccaatagaatgggacaaggacaaatctaatctgcagttccttgatgcagaagagtaggtcattggcaatggtaggtccctgtgtgccgtcattcatcagrgtttggatatacctagataagtaagggcctgccagtaagctttagcttcttgcagagtgtgattacattgtgcaggacaggagaataca

SEQ ID NO: 472471 - DNA, 646 bp, Homo sapiens
gctcataccttcaagcccatcaaagagttcacaccggagaaaaaccatacaaatgtgaggagtgtgggaagggcttcagttggagctcaagtcttatcattcatcagcgagtccatgctgatgatgagggtgacaaggacttyccttcatcagaggattcacacaggaaaactcgataaaatatgttttactatctcagatgggtgctgaaatattttaataatcagagctatcatagacaaaacatttgttttatagagtcagtagttcagccaagtgattgggagaccacacagcagagaagcctcacaagagtggagacatatggactgcattcagaacattgaccattagctgatacatgcagacaagaggatcaggaaggatgagtctgatctggagtaaatcagaagtactaagatagaaatgctgaattctgttccactagaatataagatccaagagggcagggactttgttgactgccaaatctactctgccttttcagtgcctaatacgttgtaatttttcagtagtatttgaaattactgtcatatttgaaattcagtaatatttgacatttttatttatctctagaagtttctctaaaattgtactcagaagaattctgcaaggcttggaggat

SEQ ID NO: 472472 - DNA, 646 bp, Homo sapiens
gctcataccttcaagcccatcaaagagttcacaccggagaaaaaccatacaaatgtgaggagtgtgggaagggcttcagttggagctcaagtcttatcattcatcagcgagtccatgctgatgatgagggtgacaaggactttccttcatcagaggattcacacaggaaaactcgataaaatatgttttactatctcagatgggtgctgaaatattttaataatcagagctatcatagacaaaacatttgttttatagagtcagtagttcagccaagtgattgggagaccacacagcagagaagcctcacaagagtggagacatatggactgcattcagaacattgaccattagctgatacatgcagacaagaggatcaggaaggatgagtctgatctggagtaaatcagaagtactaagatrgaaatgctgaattctgttccactagaatataagatccaagagggcagggactttgttgactgccaaatctactctgccttttcagtgcctaatacgttgtaatttttcagtagtatttgaaattactgtcatatttgaaattcagtaatatttgacatttttatttatctctagaagtttctctaaaattgtactcagaagaattctgcaaggcttggaggat

SEQ ID NO: 472473 - DNA, 520 bp, Homo sapiens
cccctcctagttttattgaggaaactctagattatcctagaggaggccctctgaggagaggctgttccaaggtaaattattatttcaaatttattgacaacacatccttaattatatctttgttgacagctagtcactttgtgtgcatagaatttgaaacaatgcatattccaatttgccttggaaccagagaaacgtttaacaaagcatgtgtttttgtgtttttgtgtttttgtgtgtgtgtgtggttttttttttgtttgtttgtttttttccctgaggcagggtgtcactccatcamcccggctggagtacagtggcacgatcttggctcactgcaacctccacctcccaagttcaagtgattctcatgcctcagcctcccatgtagctgtgatgacaggtgtgtgctaccacacccggctaatttttgtgtatatatatatgtgtgtgtgtgtgtgtgtgtgtgtgtgtgtgtatatatatatatatatatatatatatatatattagcagagac

SEQ ID NO: 472474 - DNA, 386 bp, Homo sapiens
tgaacacatttccagagcacaatttcttggttattttatttattctaccaacttgcttcatgtaatcacatgtttgccacaaaggaagaaaaaaggggcaaatayattacatttctattacacaagtagtctgtgaagttccctcatgctgttttcttatttcagctaaaataaccatgttcaaaggatacattaatcccattgacctttgcagagctatttagagataccttgccttttttttccttctctttttttccatattaaagtttttggtggaatttcctcacccaagtcagttgtgaaatctgtacagtggagacaataaaatggaggcttaatgattcagttcatgttcctttatcaactcactgcccacacagcca

SEQ ID NO: 472475 - DNA, 483 bp, Homo sapiens
tgatagttctatggcaggctgagtttgggtatttaaattgttcaaagagggaattggggccatgcgcggtggctcacacctgtaattccagcactttgggaggctgaggcaggcagatcacaagatcaagagatcgagaccatcctggccagcatggtgaaaccccgtctctacaaaaatacaaaaattagctgggcgtggtggcaggcacctgtagtcccagctacctgggaggctgaggcaggagaatcacttgaacccaggaggtggaggttgcagtgagccgagatcatgcaactgcaatccagccttgtgacagagtgagactctttctaaaaaaaaargggggggaattgggataagttgaagtaaaaactttcttactaggatagaatgccaagggaaagtgcaaattccattccttgaataaaaatgggtgatgaaaatccaattcttaccaggaaccatgagttgaagaaagaa

SEQ ID NO: 472476 - DNA, 552 bp, Homo sapiens
aaaaagaacatttactatgtatcagacactgtactaagcgctgtgcatgtataatctcatgtagtctttgcaacaaacccttgagataggtgttatttccatttttcaactaaattacagaatgtgatagaaacaagaccaaattcaagtccaacagcatagcccatgctattaacgaccatgccttcttacctcctgtgattgctctgcagggcagaatgactacgtaaagcctgactgaaactagtcatacaggaacaggaaacccagagtaagggtctgcctcaggcctcagcaaaggacatttagttacaggraagaccagaagtatcaggttataacccagcttcacagacagctttctgtaggtgttgacacacatcctttcctctcttcctggtctcctgacaggctttctgaataactctaattttaaaatctttcttcccaattaatcagagcacatttcttctgtggtgattaaatcattgcttccaccttatcccaagaatagacaaaacgactgtttgacccatttttaagtggtgtgtt

SEQ ID NO: 472477 - DNA, 532 bp, Homo sapiens
taattaatctgtgctctgataatgcatctctagctatgttgcacattttcttcatgtgcatgtatatgggtgtttggggattggtgttgattgtttttccctttgttttcttctaaaacattccctttgttgaattaagaaggaatctctgggagaaatactgtacacaatttgacctccaaataaataaagactaagaagtcttcctaagagagattaaggaaaccctgatcatcagtaattgctaactctccaagccagagaacacaggtgtgcatacacacacgcacacacactcacacacacgcacacacacacaaaccatgagttctagggccagatcaatacttactgaagcgaaaytgggctcatgaaaattgaactcacagaaaacctgagacattaccaccaatccctagtgagcaaaaactgtcagtgcccatggctcttcaaggacctgccttcaagtggtccatctttaagaaccagagaataggtttgactctgcaagaccatagactatttaataaag

SEQ ID NO: 472478 - DNA, 532 bp, Homo sapiens
taattaatctgtgctctgataatgcatctctagctatgttgcacattttcttcatgtgcatgtatatgggtgtttggggattggtgttgattgtttttccctttgttttcttctaaaacattccctttgttgaattaagaaggaatctctgggagaaatactgtacacaatttgacctccaaataaataaagactaagaagtcttcctaagagagattaaggaaaccctgatcatcagtaattgctaactctccaagccagagaacacaggtgtgcatacacacacgcacacacactcacacacacgcacacacacacaaaccatgagttctagggccagatcaatacttactgaagcgaaactgggctcatgaaaattgaactcacagaaaaccygagacattaccaccaatccctagtgagcaaaaactgtcagtgcccatggctcttcaaggacctgccttcaagtggtccatctttaagaaccagagaataggtttgactctgcaagaccatagactatttaataaag

SEQ ID NO: 472479 - DNA, 422 bp, Homo sapiens
aaaatgctgtgtactgtgaagccaatgtgttggtttacattggccagcagcagcatctctggagttagactgaatgtgttcaaatcccagctttcccatttgctgtattatcttgagcaaatgtcttaacttctctgtgtctcagttttctcatttgtaaaacataattcatagcagtaactatttcgaagamttttttggagagtcaaataattaaatctttgttaagtgcctagaacagcacctgataagacacaataagcacttgttaaaggttagttcttatgattatctccaagaatctgaatcagtctgagatcagcagctccaaggctgagttgctggtggcatttgacacagtgccttctatttaaaacatgatatttcatggctgtggagttgtttgtccacttcaaatggcc

SEQ ID NO: 472480 - DNA, 508 bp, Homo sapiens
ggggcctgctcctgtcatgtatggcatggaagagcatagaaagctgtttgcacacttgtaggtgacaaagagaaaatagaaaggggctgagagtcacatgctcagccactgcacccaaactcacccatcaagkagctcacgcttcctcccttgaggggaagggaaaagggggatacaggaaaccaaggagctaggagtgttttctgaaaaagtccctacacacaaaaatggaagactagggaatgtatcctccctgcatgtaacagagaagtaaatgataacaacagatgtcaactacaagtagaaaatgagacttaacttttaaatacagagagtaaaaaatatgcatccaaatggttagagtgctcaacatttttagttataaaaagatatttctctcacctgccatggagaccccataataccctagagataatatagttcacagtggttgccattatctgatttagcattttcctacagatgaaggataaacaagtgccttagt

SEQ ID NO: 472481 - DNA, 624 bp, Homo sapiens
tcttcttacgtggagacttcccttccgttgacacaaatgaaggatctaagtttgattactaaggaagagagaggtttcttgttcatgatgagagcatgaagctttaaaaaagagagagatttaagtttcagaaacttggttcctcaatgcagcaggtggacctgaagttgtcaatgtcatagctaaagactgggaaaacacaactcaagaaaggatggctgtgggcaaagccaagcagcctggtttagcaccccctagcggaagaaggggrcaatgtttatggtccctgcttctggttagctaaggaacttaaccgctggaattccgtgcaaggtcatttctctaagcaggaatcaactcaagctctgatcctccctaatagcataactatttgccacgcatctagccaagagttagttaatgctgcttccacagggaaagaggccgtggtcagaccagcctttaatgagcatcccagggcctggctagacttggagggagggagcatattgagatattagtcgaagctccaaaacaataggtgcctgcgccctctaagtagctcatgtgttacagatctgacaagtctcattgatttaaatagctggagcactgcttggattt

SEQ ID NO: 472482 - DNA, 601 bp, Homo sapiens
aaatcttaggaggaattcagagggcaaagaggaggaaacacaaagatgtaataaaggctatagtggttgctaaaacgacaagaaaaacaaatggaaatcatttgatttgcactgcacctgtgagagaagamattatggtccctttttacatctgaatctcacaggtctattttgagagttgagagatctgtgtgaggtacctaattcactcttctcaaacagccttcactttaagagaactcaactgtgaaatttatagaaattatttctgaagctaagaagaaagttcaaataccttttgcttttcactatttcatcaaaactcttctaaaatcccgagacacaatgtagtgtggtgtgattaagataggccaagtcataggttgctataattattaaaaaccttggtttatccttgtgtacaaggaatagaatctctcaacctatctcatgtcattaaccttcccaaggagcagggtaatgtggttactgcttttggtacctgaaagattccaagacttgaggcactgagaaacaaagtgtttggctgagagatcagataagagaatagcagacgaaccagtatggatggctcctggcc

SEQ ID NO: 472483 - DNA, 678 bp, Homo sapiens
tgcataggacagcccccaacaacaaagaattaccagccccaaatgtcagtagtgctgaggataagacacacattttcaaggtaccttaccataggactcaaagtggcagaaggacatgaagaacttttttcaaaactctcattttgcttccttaccctcacctgccacaactgattcccacagttttctccattccacactataatctacattctttggccaagacgacccaattacagagtgggagaaggcttctccccattttgggtagtgttttattgctctgcaacgggggtcctcatcactggagtcaggagggacaagccagaaacacctgatgaacytcttcctaacacccctctccagccaattctgatgtgtctcacagtttgccagaggtggaggatgtgtgtggggcacaagctccccaggaggagagacagcaaggtaaacagcctatgctcccagctctcaccctcatgacagcagcccctttcccacttttctatgacccagcaaatgaactccgtgaatgcctggcaaagcaaggcctttctccattattccagcaagcatctgtcttcagacccattactagatattttgaatcctacccctggtgagacaagtgtaggcagaagcatctccccgggtggctttgctatgcatgcacagccc

SEQ ID NO: 472484 - DNA, 618 bp, Homo sapiens
tctaagtattaaatttatccttaaaggtatcctgtgatcctgcacattcttaagggccttttatatctcacctttaaattttgttttccttaatgctagagtctcctggggtgctccctggctcctaccacaatctctggggctgcaggagctcgtccatagaagtgacccacaggacttgtctgggccactcctcttctttcacaccaacctcttgccccgataggcttattcctgtggtccatggataaagtcaaaacaggaaaaaaatgtcaaatgagaacattgtcaaggtatttggtgtgaggaggaagaggcggaggaggtgtctgcatgtacatgggcactccaatcacatccgccgtggcaagaagttggagcctaggctggttacagcttctgcaaatgggaatgatggacagggtcaacagcaaattggcctcccatgaggcattatactaaagatctcacatgcacttcaaacatatcttcytaacaattgcacttatcctagttttactgatgaggacttgcctgggatcatagagttagtcagcaacaccacaagaattaacagccagttcaggctgattttgaagcctgttttcatcaccctta

SEQ ID NO: 472485 - DNA, 634 bp, Homo sapiens
aaagtgctgggattacgggcatgagccaccactcccagctgacattagctctctatccagtgctttcttaaagtccttctaatgtacatgcagtcgtgtgaagcataatgacattttggtcaatcatgggctatataagtgacagtggtcaaataagattatgatatygcatttttactgtaccttttctatgttttgatatgtttagatccacgaatacttatcatcgtgttacaactgcctacagtattcagtgaagtatatgctgtagagttttgtagcctaggagcaataagctgtaccatggagcctaggtgttcagtaggctgtaccatttagttttgtgtaaagtacactctatgatgtctgcacaatgacaaaatcacctaatgatgcatttctcagaatgtatccctgtcattaaacaatgcatgactgtatatatacacaaatatgcatatatttgtatatgcatatacataggtatgtatatataaatatacataaaaatttgtgtattttatatatggcttttattattcattgtattgaattgttattgtatggatctgtttcttttacctttttttttaatctccttgtcatgtttcttagcacgcaaagacaattttct

SEQ ID NO: 472486 - DNA, 634 bp, Homo sapiens
aaagtgctgggattacgggcatgagccaccactcccagctgacattagctctctatccagtgctttcttaaagtccttctaatgtacatgcagtcgtgtgaagcataatgacattttggtcaatcatgggctatataagtgacagtggtcaaataagattatgatattgcatttttactgtaccttttctatgttttgatatgtttagatccacraatacttatcatcgtgttacaactgcctacagtattcagtgaagtatatgctgtagagttttgtagcctaggagcaataagctgtaccatggagcctaggtgttcagtaggctgtaccatttagttttgtgtaaagtacactctatgatgtctgcacaatgacaaaatcacctaatgatgcatttctcagaatgtatccctgtcattaaacaatgcatgactgtatatatacacaaatatgcatatatttgtatatgcatatacataggtatgtatatataaatatacataaaaatttgtgtattttatatatggcttttattattcattgtattgaattgttattgtatggatctgtttcttttacctttttttttaatctccttgtcatgtttcttagcacgcaaagacaattttct

SEQ ID NO: 472487 - DNA, 523 bp, Homo sapiens
actactctaggatttaagcctaaatttgcatccttacatcactaattctatggggacaagcacatgtagggagggtagagttttagattggagtcatttggtcccttcacacaagcaaggctcacatcctttcctgagaacactatttgtgatactggaagttccaaagggcctgggagctcagagtttccaggagggacgggctgaagcactggaaatgaggaggaaagtaacaaagaggttcagcagaatatgaaaaaagcatctgcctcacttgacatgagrcctagggctacctttaggtgtgtggagatgagaaagaggcagagtcatgtggcatgggtggctttagccctgtctgcgagattctggagaaataagcattagcccctccttgtgggacacactctgtaccaggttctccactgagtactctgacttttgatcttcacaataacccacgatctaaccacatgtaatgggctgaatttttacccccgcttcccaccacatgcatatgttg

SEQ ID NO: 472488 - DNA, 523 bp, Homo sapiens
actactctaggatttaagcctaaatttgcatccttacatcactaattctatggggacaagcacatgtagggagggtagagttttagattggagtcatttggtcccttcacacaagcaaggctcacatcctttcctgagaacactatttgtgatactggaagttccaaagggcctgggagctcagagtttccaggagggacgggctgaagcactggaaatgaggaggaaagtaacaaagaggttcagcagaatatgaaaaaagcatctgcctcacttgacatgaggcctagggctacctttaggtgtgtggagatgagaaagaggcagagtcatgtggcatgggtggctttagccctgtctgcgagattctggagaaataagcattagcccctccttgtgggacacactctgtaccaggttctccactgagtactctkacttttgatcttcacaataacccacgatctaaccacatgtaatgggctgaatttttacccccgcttcccaccacatgcatatgttg

SEQ ID NO: 472489 - DNA, 572 bp, Homo sapiens
agcaaaatggagagaacctgttaacagtgtggactgatgcaacttttgggagtggagtggccaatatgtgtctcagatgatgaygcctataagacagcatttcatttctatgaagtaatccatttttaggactcctctgaaaatgttaattgcactcttagaaatacttcacgttaatggattgtttgaaggaaaatactactcctaaaatataggctcttttaagaaagtaagaacccaggaatttgcaaagactaagcaggaggatttgggtttttgtaaggcttggaataggttgatcagggtggaaaggtgatctgtgtatataagtgtctacatatgtacacgtgcacatatgtatatgattgcttttttgggcaaaatactgaatttaaaaatcagtacttggctgaaggagatgataagtttagtgtagcttcaaaaggtaaatttctgatataagaataaatctgaattttaagatctattattcttgattttattagtttagtagtcatatttttaaagctgggcatcctggtacaggaataataattgctaagcatcatcag

SEQ ID NO: 472490 - DNA, 572 bp, Homo sapiens
agcaaaatggagagaacctgttaacagtgtggactgatgcaacttttgggagtggagtggccaatatgtgtctcagatgatgatgcctatragacagcatttcatttctatgaagtaatccatttttaggactcctctgaaaatgttaattgcactcttagaaatacttcacgttaatggattgtttgaaggaaaatactactcctaaaatataggctcttttaagaaagtaagaacccaggaatttgcaaagactaagcaggaggatttgggtttttgtaaggcttggaataggttgatcagggtggaaaggtgatctgtgtatataagtgtctacatatgtacacgtgcacatatgtatatgattgcttttttgggcaaaatactgaatttaaaaatcagtacttggctgaaggagatgataagtttagtgtagcttcaaaaggtaaatttctgatataagaataaatctgaattttaagatctattattcttgattttattagtttagtagtcatatttttaaagctgggcatcctggtacaggaataataattgctaagcatcatcag

SEQ ID NO: 472491 - DNA, 572 bp, Homo sapiens
agcaaaatggagagaacctgttaacagtgtggactgatgcaacttttgggagtggagtggccaatatgtgtctcagatgatgatgcctataagacagcatttcatttctatgaagtaatccatttttaggactcctctgaaaatrttaattgcactcttagaaatacttcacgttaatggattgtttgaaggaaaatactactcctaaaatataggctcttttaagaaagtaagaacccaggaatttgcaaagactaagcaggaggatttgggtttttgtaaggcttggaataggttgatcagggtggaaaggtgatctgtgtatataagtgtctacatatgtacacgtgcacatatgtatatgattgcttttttgggcaaaatactgaatttaaaaatcagtacttggctgaaggagatgataagtttagtgtagcttcaaaaggtaaatttctgatataagaataaatctgaattttaagatctattattcttgattttattagtttagtagtcatatttttaaagctgggcatcctggtacaggaataataattgctaagcatcatcag

SEQ ID NO: 472492 - DNA, 639 bp, Homo sapiens
tttgatttccttcagggtttgctatctgcaatgtgatgctataccagactcaggttgaaatttggcatcttattgctataagccatctgtgtggccagtcttatgatttctattttaatgttgatgctggtcacttgtgtctaaactccaaaacggaggaagtataatgagttgtgaccaacctaccttcccattatcggtctaaattcagtttttcaggttactctggggtccstttggcccacagagtgtccattcagttgtctggggagcttgggattttatttttggtatatacaagagaaaaacatacatatatatattaacaagtatattgcatatgcacatatgcagagaagtggcatagaactctcacttatatagcatcttcaaataaaacaacaaagagggtgttaaggaggcaagttatgacaaagggacagggaaaagggataaactagagtaaggtttgttatgcagatttaagtccttgccttctctaatgataagagtatcttgtaacttcttagccacccctctcttcctggtgcagagaggcacccttacaaatggaagtctcctttagatggaaattttccttacaaaagattaacttctactctattttcagagtttccg

SEQ ID NO: 472493 - DNA, 621 bp, Homo sapiens
ttccattttcgttgaaggcctttgactaagttactttaattttccaagcctcagtctcctcacctattaaatggggatgataataatatgacctatttcagagcgtagctgtgaggattcaatgcattaatatataaaatgcacttagtatagtatctggaggataaataaacccttagtgattattatgggcactgatcggtatgttgcaaggtggaaaaagggtggagttccaagacatcgtctactccctgtaggagaaaatccacagccttcaaccaaaaacaatgcamcttaatgataatattaatgttaattattacgactatttttccttcgcacctgtgacatgttggacatggtactgatcatttccatacacattgttcattgaattctctcagcatttcactgatcagtaattaaatttcaaggtagttaagatacttgttcaatgacccatagtgagtacatagaaaccccacaggttgagcccagggtaaacctggttgcatcccacactgttttcagtctgaccagaaaaaaagactgataataaataatgaattaacatttacttagtttttactatgcgttgggccttgttccaagtagtttata

SEQ ID NO: 472494 - DNA, 636 bp, Homo sapiens
aaccctgaacttagtaaggtgtccatcaatgagttacaccagaacacaggctgtttgccatctcttattctagtcttcctggtacatgtgggttgtcccattacttttagctgttgactacacccagaaggcaaaaactagcgaatcatgcccatgtttgcagtatggacagcccaggacaaaatctgcagctttagttggctacactttggaatgagttcctcaaagaagctttccatctgctttgaaggtttgtaacagaacaatctcagctatcaattatcagggataccaccttctctgatcagccctcatgtttttcttcacttttcttttgccacttagtatttctaccttgtattccagtgtttgggggttattaatgcctctggacagaatccctgtgtgatccagctttgatgcagccagaggatacaggacaatctctggctagaataggagctcaacagatgtttgcttaaaggtaaggggatgcttttattgacctgtcttagtttctcttggctagtgacgatattatctctattttaagtgtcaaagggaaatgraacttaagcctatggccccaggagtatatgttttctgtgatatcaactactatatccttgcggtatc

SEQ ID NO: 472495 - DNA, 582 bp, Homo sapiens
attactatcttaggctaatttcacatacagtgttaggatttgagtgtcttcatattttctgttctactgttgaagtcacaactggttacctggtttttttctttgatccaaatactgcctaaattttttaattggttgccagagtttcaaaaattttacataatgcattggactgtcttttaaaagatcagaagatttaacctctttgcgtacctttcacatggcgataaagggctgatgtggaaagggcaactgcccacgctctccaatacatcgcagctctgccctcacgccttgggatcttcattcacttatgttactaccctaatctctgtagacactttgctatctctgttctcttccttcctgttcctacaatttcctctcytggaaaccccctttcttctccactaaaaggagtgagaacaatggaaatcccagttcctatgactcgacccaagatggagaatgttaatacgagaattgctatgaaacagctcctaatgtcatttgagatcattgatatctgagtcaaccatttagatctattggtgtaatttgtcctctgatatttctcaggtg

SEQ ID NO: 472496 - DNA, 256 bp, Homo sapiens
taaaaaagactgaatggcaagtctgcaaagagcaatgcctaaggtctatgctttgcccataggtgatcactcaaactcttacaagacatctacgatgtttctaaaattgtactgagtccctggggacactgaaataatcccgtccctgtcctcaaggagcaccttataatgtggaagatgcacgtggraggaatgaatgactagacctcagagtagacatagatccagccgtggaaactcaagagcccagaggaaa

SEQ ID NO: 472497 - DNA, 603 bp, Homo sapiens
gttagggctgtgagagggctaaggacaggatgcttgtgggaagagcacagaggctcatcgataatggactgagagatctacatgaaaaccattttggtcttattcatactttatgagataagaagaaggatagcagagctacaattagaaatagattgctttgtgtttcaaaattgaaaaaaaaamcatgtgaacatgagttattgtctgttaataactgcattccttcctctaaatcatagtgagaaagaaggaaaaacaaagatattggcaggagaaatgaaggactagcaggaggatgcatgagataggcttctttcctttcttttttttaaagcataaaacactggatcttcctggacagtcttccatcccaagtactaaccaggcctgaccatgcttagcttctgcagtcaggcacttgcagggcggtatagctgcaggcaagagagcctttgctatgttgctctttattctgtcatgttcattagatttgatgggacctcagcaaggttcactcatcaagtcctggttccatctcctttcaagaggggcctgtggcatataattgttgtgtctctctttgagtgtgtgtgtgtgtgt

SEQ ID NO: 472498 - DNA, 547 bp, Homo sapiens
taaagatgagctgtaagtttgtttccttctgtttggatcatttaattttgttaattttaagaatgaagacacaagagcatgcctgaatgcaatgggaagtagatcagttgacctttgctgaataacaaggtggacctaaaactgggtgacttgaaacagtaagtatttttagttcttgattctgcacatcagcagtctgggctgggttcagccagaggattctgctagtctgagctgttcttacttacattatcattgcagtccatagtcagtcagtgggtggttttctggggctggatagtgtatgatggttgaccttcatgggtggcagttagcttgctgctatctagggtcaataggcwactagacaacatatcttttgtcatctcataagctcgtccaggatttctcctttttgatcaaagcaaaccacatgcccaaacctggagtcagagtcagtgttgaagggcattagcaaagggtgtcactcagggaggcatgaacaaatcaaggccattatggaattcaatttgcccaaaaggcatag

SEQ ID NO: 472499 - DNA, 503 bp, Homo sapiens
ctgccctcaagtccaatattcactactaattcaggaataacaaatagcaactcttcattcaagaaaatatctagggtcactttttgtcaatggggctgttaccctttgaagggggtggtgaactggccrtctctgtgatgtgcatgtctagtgaatatccatctttgtccatataacaaacattaactaagagtctagttaacggacctgtgcctaccaagccctgggtactcaggatgggtccattcctggcccacaagatccaatcagtggcagtacctggaaggaagaagttccaacctaggaatgcatatctcagggactggatatcctggccttatgtgtgacaggaggagaagccaaggaggaagaagatggcaggtcttgagagggtgcagttccagcagttgtcctgggtggatttttgccacagccttatgggttgtccttgacatagtcactggtatcacagcccctccacccaggtgcattacttcttgtct

SEQ ID NO: 472500 - DNA, 577 bp, Homo sapiens
ctggaaatttccttctccctgtggccttttcccagtgcctctggcagccctcccaaaggattcctgtgaagccaggtaggaatgaccagcttggggacccagcgagctcacagggccttttccactgcttcctctacttctgtacctcgcttggctctctaaattggctgagctccagataaagccaaaatcttctcccgtaatctagaccttcagtttccccagtggggatgtgtgtttagaggtaaacaatctcccttccccactcctgcagtttgggcactcagcatatttggggtatctcctgggtcctgcaggagcaatctgcttccttcggagggtctgtggccccctcgggtttcctagtttattcctgcagtcgttctgtagctaaaattcatgatgcgagcctccatacactgctctgtccatctgagtcagagctgcaatctagtcctgccccttgtctgccatgattcccctttttctcrtctcaaatttgtttaatttgtttttgtccatgaattcatcactgtttctatcttgctctgtatattgtttatcacagaagagatga

SEQ ID NO: 472501 - DNA, 614 bp, Homo sapiens
aacgtcaactccaggtgatattgtttgaatcctggatagagtcaatacctatttgatttttctgtcacttacacccaaaaaaatcttacctgaccaaattggtaaatatgcaacatacagtagacaccccgtaagtggtggcctttttcattaaaggttatcatccacgtgakatccaggatcaggggacttcggaatcacaaatgttaagggatcagatgctgtctacataagaattgcatgttttagctccctgcagcacacatctgtgccctctactgtgtcctcaacacattctgcatttctgatttgtactcagaaaaaacaaagattccaaagataacgccatttttgtatggaatttgcaatttttctctagtttatagctatcatcaaaaatttaatgcatctgataggagattaaaaagttaaagaaaaggttgcaagatttccacaaaattactaaatatttttcttaagtaactgccaggcactagtctctggagagcttgatttaccataaatgtttaaaatgaaaataaaggagttctgaaaaaaaaagagaaacggctatttaaaaattgcttcataaattaacacataggagtgaaaga

SEQ ID NO: 472502 - DNA, 482 bp, Homo sapiens
ctcttcaagtatctgaagagcatcttaagaaagamtgatgggatttattccttgtggaacagaattagaatgtgactcacactccctggaactgtgtaatatgaagcctgtacaactaaatgtggtgaccctggtccaagaaatgaaagggatgaaagcttgatggttccaaatatggaaattgacctctcctcccagaatctgtgcacctttgcaatgagactttgcaaactttcccaccaactggagggacctttttcctcagtctttgaacctggaatgaccctgtgactcacagagtctcagagtgatattgtgccaggtccaagcctaagcctcaaaagcctttgcacacctttcctcttgttcctagaacgctgctgctgtgacatgaatgagttcaaaccaccctggtagagaataagggaccacagcaaggacagaccagccattccaactgatgccatcccagaccagccaga

SEQ ID NO: 472503 - DNA, 482 bp, Homo sapiens
ctcttcaagtatctgaagagcatcttaagaaagactgatgggatttattccttgtggaacagaattagaatgtgactcacactccctggaactgtgtaatatgaagcctgtacaactaaatgtggtgaccctggtccaagaaatgaaagggatgaaagcttgatggttccaaatatggaaattgacctctcctcccagaatctgtgcacctttgcaatgagactttgcaaactttcccaccaactggagggacctttttcctcagtctttgaacctggaatgaccctgtgactcacagagtctcagagtgatattgtgccaggtccaagcctaagcctcaaaagcctttgcacacctttcctcttgttcctagaaygctgctgctgtgacatgaatgagttcaaaccaccctggtagagaataagggaccacagcaaggacagaccagccattccaactgatgccatcccagaccagccaga

SEQ ID NO: 472504 - DNA, 566 bp, Homo sapiens
ctgcctcacatcatggaatgagaaccagacctaatgtctcatcayagaaagacttaatgacagatcacaagaagggtgaagacagtaaaatgaaatattgagaaagagagagagagatcacattcacataacttttattacagtatattgttataatttattattgttattaatctattactgtgcttaatttataaattaaactttatcatagcctgtttatctaggaaaaaacatagtgtattcagtacttagtatagcggattctatacagtccacaatttcaggcatccactgggggtcttggaatgtatccctatggataagggggactactgtatgtggaaaagactttaaatgaaatgctcaattatgattagctttcagagaatccattttattttttatatttgaaatgctctcaagcctctgaacatactaactcaaattttcaaaactttatatcttttccatctcattaactctgcttccttggatttttttcctcaatttttttcagactgatttgctatttcatgttgttttcttacaaagtttagtgattc

SEQ ID NO: 472505 - DNA, 566 bp, Homo sapiens
ctgcctcacatcatggaatgagaaccagacctaatgtctcatcacagaaagacttaatgacagatcacaagaagggtgaagacagtaaaatgaaatattgagaaagagagagagagatcacattcacataacttttattacagtatattgttataatttattattgttattaatctattactgtgcttaatttataaattaaactttatcatagcctgtttatctaggaaaaaacatagtgtattcagtacttagtatagcggattctatacagtccacaatttcaggcatccactgggggtcttggaatgtatccctatggataagggggactactgtatgtggaaaagactttaaatgaaatgctcaattatgattagctttcagagaatccattttattttttatatttgaartgctctcaagcctctgaacatactaactcaaattttcaaaactttatatcttttccatctcattaactctgcttccttggatttttttcctcaatttttttcagactgatttgctatttcatgttgttttcttacaaagtttagtgattc

SEQ ID NO: 472506 - DNA, 436 bp, Homo sapiens
atgtccattgcccggtctcccctctctgcttcctccagtgtcccctatgaaggacacctttgaaatgagggatgagatgtaatgaagctagatacaaaattaatcaaatatgacacgagaattgatgtggaatgcaatcccgtcagcagatgattcacctccttggagtggagttgcttgtttactgtttgcagcatttctgaaggactcgrgcaaagagcaacaccagggattatttttcagaagaaggactacagacacagaacacaatcaccaagggccaggtgcggtggctcacacctgtaatcccagcactttgggaggccgaggtgggtggatcacatgaggttaggagttcgagaccagcctggccaacattttgtactttaccaaaagtacaaaattagccgggcatggtggcgggcgcctgtaatca

SEQ ID NO: 472507 - DNA, 436 bp, Homo sapiens
atgtccattgcccggtctcccctctctgcttcctccagtgtcccctatgaaggacacctttgaaatgagggatgagatgtaatgaagctagatacaaaattaatcaaatatgacacgagaattgatgtggaatgcaatcccgtcagcagatgattcacctccttggagtggagttgcttgtttactgtttgcagcatttctgaaggactcgggcaaagagcaacaccagggattatttttcagaagaaggactacagacacagaacacaatcaccaagggccaggtgcggtggctcacacctgtaatcccagcactttgggaggcygaggtgggtggatcacatgaggttaggagttcgagaccagcctggccaacattttgtactttaccaaaagtacaaaattagccgggcatggtggcgggcgcctgtaatca

SEQ ID NO: 472508 - DNA, 300 bp, Homo sapiens
gcctccatgttcaacccaccatgcttattcatcacatcgggratgcttctccctctggtcctcaaggagatcatgcccactgtcaagtgttttgcaaaaatcaaaatacagcatgcagagttatagaaagggtcccaaagcagagatagaagagatcaatttgagtctacattgcataacttagctgcgtgctccggggtaaatcccattttctttctgtttccttgtctgtaaaatgggcatgttatacttccctgcctatttcccaaggctgttatgaaagaggggggaaaataatag

SEQ ID NO: 472509 - DNA, 300 bp, Homo sapiens
gcctccatgttcaacccaccatgcttattcatcacatcggggatgcttctccctctggtcctcaaggagatcatgcccaytgtcaagtgttttgcaaaaatcaaaatacagcatgcagagttatagaaagggtcccaaagcagagatagaagagatcaatttgagtctacattgcataacttagctgcgtgctccggggtaaatcccattttctttctgtttccttgtctgtaaaatgggcatgttatacttccctgcctatttcccaaggctgttatgaaagaggggggaaaataatag

SEQ ID NO: 472510 - DNA, 430 bp, Homo sapiens
gtggagagggcagagatcagggggtggcccaaaccacaaggacactcaaagccaaatgtggccatcaccaagggattcggaatggagaggcaagttgcaggagcctgaggcctccctgagccctgcactacttgactcaggaaaaaaagtctaggccaagctaaaccgagtcttttagtacaataaaccgataccaggcatgggctgaagaagagcaaaatgtcccaactacacgggaggggaaagagcaccaggctgggagtcaggarctctaggaatttttttttttttttttttgacagaatctcactctgtcacccaggctggagtgcactgatgcaatcttggctcactgcaacctccatctccccagttcaagcgattctcctgcctcaacctcccgagtagctgggattacaggcatgcacca

SEQ ID NO: 472511 - DNA, 501 bp, Homo sapiens
ttccaaatttttttggaaaaaaggccaagcatataaggtatttcattttgtttgcagttgttaggccattgttaagggtgcaaatgaagcctataactgaggtaccactaaggagagtcacgataggcacatgatggaaggagatggggcagtcttggtcctctttttttttttttttttttttgagacacagtctcactctatcacctaggctggagtgcaggggcacgatctcagctcactgcaacctctgcctccccggttcaagtgattctcctgcctcctcagcctcctgagtagctaggattacaggtacctgccaccacacccggctaacttttgtatttttagtagagacagggtttcaccatgttggccaggttgrtctcgaactcctgacctcaggtgatccacccaccttggcctcccaaagtgctgggattacaggtgtgagccaccgcgcccagtcccagtcttgaacttaagatagggattgcaact

SEQ ID NO: 472512 - DNA, 560 bp, Homo sapiens
ctgccaattttatattaagtataaacagattgttcaaagggcaaaacttgttattcttatgaaggggatgtgatttgattagtatgcctaaatccatgtaaaatctatttaaaaatgaaaatttataatgaggttctaatgaacaacagcatgtatgtgacctgtcggcagactcttccattcttcttcaagcttcccagttaagcaacgttttaaagcagcctacttcaattctctgagtttttctcttgctagcttttttgttcttcacccccatttctcccaccccaaccaatctaataatagccrcccctattattaaaaaactgtttcagatatattttaccctgccaatactttttcctgttcttttccttaatagtagttagaactcatttgtgattttcagtgtggtcaaattctatcctagcacaaatccaacttctgataatgaggttggcacactgacttactctataaaggaggtggcaatggccaccaatatggcaatagaagaactttcaggttttggttaaaaattgggaaaaagtatcatactc

SEQ ID NO: 472513 - DNA, 469 bp, Homo sapiens
cccaaacatttccacgactttgctgttgttgtgactctgatgtgggggctctgctggccagagacaccccctccgcttacacagagctggcagatggaaacagtatcaggacatctccattacacaacaggctttcacagggcgatggttcacattttactgcagtttcctttggaaatgctcaaagcaactacatcygtttcctttcattgggacttttatgtttttccagccaaaaaaggagaggataaagttcattaagtcagaatagtaataatgacgaggtccacataaattttgttgtgtttggtgcttttaaatattgaaggattcaccaccctcttccactccctctttcttagttagggagtgaagatgatgagaagactgctaagcctcagggtgacacctcagaggtcctgccagctgtaaagaactcaccacggactttccaagaggatggtgacat

SEQ ID NO: 472514 - DNA, 550 bp, Homo sapiens
taccattcctcaacttgacctttatctctttgggtttcttctctgatgatttctggtccatgaagtttacagaggcctgcaatccaaaaatatccagaatcctctcttcaagagacttccatgaattatgacttctgaattaaaactatacatgtaatatttctccaacaatgacatgtcacttgagtagcactttgttctaatctgcatgttttacagatgccatacagatgcatatctstataaggatggcagagacttaggaaacaaaaatactacaaaggaaatgttataatgcttggcatatttagtcaataaaaaagataaaaagttatatatgttgtacatataacatatatatacacaacaatatattgtataatcttgataacttcccaatgttaagaatcaacatctattgagcattttgtccaggcaacagcctagatgctttctataaatcgcttcacataatccataccaacaagatgatgacaaagaaagcaagagctccattttacacatgacgatatggagactcagaaggata

SEQ ID NO: 472515 - DNA, 585 bp, Homo sapiens
gcaaactccaggcagttccctaaactggsctcagggcccatgaagacttttcccttcagggagagggctcacctggttctgagctaatcctgaccggggagaggaggtagcagagacaagatgttttgtttccttctctatagagtcatcctgcttttctgtgcctcacagggttttcaccacccccttactgtacttcagtgctctccgttagtcactttagtcaaaatttagttgtttgttcattgttttggtccttttttgtgttgggcaacgagtgttagccacctctagtcagtcatcttgctgaccacaagcctgtgataattttagtacaaaggctaatgcactcttcagagatgttgtgaggaaatattttgttatgcaagattgtcctttaaaatctagtcaatcaagattgttgtttagtggatttatcttaaggtttcagccgctgtctaggtgcatattttgttgttgtgtgttgtcattgttcttgttaatgtttttttggtgttcttgaaagctggtttaagtgggggcgaatgtaccataaaatactattattctattatttggagaggg

SEQ ID NO: 472516 - DNA, 569 bp, Homo sapiens
actgacctcaagtcccaaggtatttttagggtgttgctgtgaggctcaagcgagaaaattggagtgaatataccctgtgcagggtaaaaagtgctagacacacaagagtttattggtagcatggaagacagccaaagggtgacttgaatggaaaaaaggaaagatgagaggcctctaagctgactgccttgcatatttgttcctactctgatgctgcttcttatctgatggaatatctgtcttcattagaatgttttggtggctgaaatcagattatagactttggtatcatttatagtgttgagggcctgtggggagggggcccagaggctgcaatagaaatcaactgaatggagagtttggagctctggaaaaatgcagggaaataacccccccttttttttattatactctaagttttgggatacatgwgcagaacgtgcaggtttgttacataggtatacatgtgctatggtggtttgctgcacccatcagcccatcatctacattaggtatttctcctaatgctatctctcccctagccccccaacccctgacaaaccccagtg

SEQ ID NO: 472517 - DNA, 448 bp, Homo sapiens
cctgcacccactcaccaattctttcccattggcctttaccaagtaagtgagcaagacagggtaggattgctgagagacatcccttctttggtacgttgtgtcttacaaaagtacaagccggtggyctactgaatgcttagaagaggttaggagagttgaaagaaatttctcgaagtcacattcttgaaggtattttactgcacaagtaaaagaaataaagggcatattaattaggaaaaaaagtaaaatgtaaatatcctttttttttttttgagacagggtctcgctctgtcacccaggctggagtgcagtagtggcccagtcacagttcactgcagcctccacttcccaggctcagatgattctactacatcagcctcccaagtacctgggactacaggtgtgcaccaccatgtctcgttaatttttgtattttttttttttttat

SEQ ID NO: 472518 - DNA, 484 bp, Homo sapiens
ggtgggggaccgaagaggccacgtccacccattcagcattgttgttgtggcttcactttcagttgggcatggggcaggcagcagtgacaagacacacacagccctgccctcatggggtggggctcctggattggcccacatataactcatgtatgggggctgagaccctgggagaactgggccaggacctatcccttggatctgtctgggggagtccatgtctcagacccggcttgggaaaccagcaggtgtcaccctaacgggcagtgctgggacaggccagatggtgggcagctccctggcaccagagtgcggaagggctccagggcctggctcctcctcccagctcatggtctgagcgtctctgagcttgaccctgggagagccygctgcttggaggctcaactaggaacctggtcaaagcatccaccccacaccgggaggagcaagccccagttcaccttctcccatctgtaagatgagc

SEQ ID NO: 472519 - DNA, 541 bp, Homo sapiens
tcgtttgcacgaacaaggatggaactggaggccatcatctttagcaaacaggaacagaaaatcaaatgcaacatgttctcacttataagtgggagctaaatgatgagaacacatggacacagaaaggagaacaacagacactggggcttatcagagggtggagagtgggaagagggagaggatcaggaaaaagtaaccagtgggtactaggcttaacacctgggtgatgaaataatctgtacagcacatgcccatgacacaagtttaacaaacctgcacgtgtacctacgaacttaaaataagataaaagaaaaaagaaatttcmtaccccttagtaagatagtggtaaatttaagagttaacagagatcttcaatgaatgacctttgcttctctgggcattctagaaatgaagaaagaatctaataccttctattaagtcatctcctgtctgataagcagttgtgcttatccaggtacgattttctgagcaagtatttggcactaaatgtggtcctaagaaacagtttttgaaaatgagg

SEQ ID NO: 472520 - DNA, 591 bp, Homo sapiens
accaaattaccctgtgtctcacctggccctgttataaataaggtttygactttactcccaggaattgccccttgccatattctcagttattacttgtttagttttctttttaactgaaatttaacagatacagtacatattttaaactgtcttaattcattgagattgttttcattttcatgggttctatgaaaggatttccattgccatttgcaaaatcaaaacttccttccacttactgcagtattactactatgctatgactcagaatgtattccattcatgaggatttcacaggcctgaaagattgagcccgctttaataatttattctgacacattggattcaataaaatagtcatatctaaattcagagtaactaataataatttatgcacttgcataatgtaatatttggctgaaaggtttttttcattaaatgtgatatataaaagttgaaatgacagtttctactttatatttctagtcttatatttctaatatttcatatttcactgtgacgtgaatatctgaaacataatgaagggagctataataattctttaaatattcctcaccagcagacatagtc

SEQ ID NO: 472521 - DNA, 591 bp, Homo sapiens
accaaattaccctgtgtctcacctggccctgttataaataaggtttcgactttactcccaggaatygccccttgccatattctcagttattacttgtttagttttctttttaactgaaatttaacagatacagtacatattttaaactgtcttaattcattgagattgttttcattttcatgggttctatgaaaggatttccattgccatttgcaaaatcaaaacttccttccacttactgcagtattactactatgctatgactcagaatgtattccattcatgaggatttcacaggcctgaaagattgagcccgctttaataatttattctgacacattggattcaataaaatagtcatatctaaattcagagtaactaataataatttatgcacttgcataatgtaatatttggctgaaaggtttttttcattaaatgtgatatataaaagttgaaatgacagtttctactttatatttctagtcttatatttctaatatttcatatttcactgtgacgtgaatatctgaaacataatgaagggagctataataattctttaaatattcctcaccagcagacatagtc

SEQ ID NO: 472522 - DNA, 569 bp, Homo sapiens
ttgtggcaaatttttactaattcacaaaatgtgcatttctgaaaaaggcttcggccgaaatcaactggtgcaaacttgtgagtcccctgccagtggccccaaaagccctagtggtcttgcaataagatccagatctctggcaccaaagactcagggcgctgcccctccccactaccactccctccctcctcaacaaccattcctcctcctgtctgcctaasatttccaggagcctcattcaacatggatggtctaatttctgtgctttaagtttatccaatattggtcacaggcttattctgagccagttactgcccaaggcactaagagtctcaaagtaagtaagaaaccagctctgctctcgaagaacttagggtaaatagaggtagtcaaacactaacagatgagggaaagctcttcacaggcaggaaggtgccatgcagctccagagcttgtagcttcacctaaggattcaatcaaggcttcctggtagggatgacccttcaactagtcttgacagatgaaggcaagttgtctatttaaggaaaagtgggaagggcttttcggcc

SEQ ID NO: 472523 - DNA, 562 bp, Homo sapiens
gttcttgactttagttagcaacttgttgggttatattttgaaaccctataagtcagggccagttcattattactttgtctttcatttcagaagttaactttaaattaagtattctcagatttggcatgtattgtgcatttgagaaaatgttgataaggaaattctcaggttctgggaagtctttatattctgtacattcattcaacagatacttgttttatgttttgtgtaaggaagtaactatgtatttccttggaaaatgccagtgcccagctaacaattactagttgtggtagtggaaaaatatgcataatttgtggcaatcatttaaatttaaatgtctctttgtagaatttctgcatggttttcaaggcttaaaaaataatggaccaccktaatgaaatgaccagagaaaaatctcaacacagatgaatatttgtcctcctaatttctttgtgagattaaatctttcagattttcaccttatgcatatatgcaattattccttcagttcagtcactgagatctggtatggcatctttgttgacttgtcatctatatt

SEQ ID NO: 472524 - DNA, 605 bp, Homo sapiens
gctgcttttactgtgtggattatgccaacagcttgaatggattctaacagactcttttgtttttaaaagtctgccttgtttatggtggaaaattactgaaactattttactgtgaaacagtgtgaactattataatgcaaatactttttaacttagaggcaatggaaaaataaaagttgactgtactaaaaatgtatacttgttgccaggaaggtgacctcaaaaattaaaagtataattattcggccgggcatggtggctcacacctgtaattccagcactttgggaggccaaggcaggcggatcacgaggtcaggagttcaaaaccagcctgtccaatatagtgaaaccccgtccctactaaaaaatacaaaaattagctgggtatgtggcatgtgccagctactcaggagactgaggcaggagaatcatgtgaacytgggaggcggaggctgcagtgagcccagatggcatcactgtactccagcctgggtgacagagtgagactctgtctcagaaaaaaaaaaaaaaaaaaaaaaaaaaaaaaaatatatatatatatatatatatatatatatatatatatatataaataaagtattcaa

SEQ ID NO: 472525 - DNA, 605 bp, Homo sapiens
gctgcttttactgtgtggattatgccaacagcttgaatggattctaacagactcttttgtttttaaaagtctgccttgtttatggtggaaaattactgaaactattttactgtgaaacagtgtgaactattataatgcaaatactttttaacttagaggcaatggaaaaataaaagttgactgtactaaaaatgtatacttgttgccaggaaggtgacctcaaaaattaaaagtataattattcggccgggcatggtggctcacacctgtaattccagcactttgggaggccaaggcaggcggatcacgaggtcaggagttcaaaaccagcctgtccaatatagtgaaaccccgtccctactaaaaaatacaaaaattagctgggtatgtggcatgtgccagctactcaggagactgaggcaggagaatcatgtgaacttgggaggcggaggctgcagtgagcccagatkgcatcactgtactccagcctgggtgacagagtgagactctgtctcagaaaaaaaaaaaaaaaaaaaaaaaaaaaaaaaatatatatatatatatatatatatatatatatatatatatataaataaagtattcaa

SEQ ID NO: 472526 - DNA, 605 bp, Homo sapiens
gctgcttttactgtgtggattatgccaacagcttgaatggattctaacagactcttttgtttttaaaagtctgccttgtttatggtggaaaattactgaaactattttactgtgaaacagtgtgaactattataatgcaaatactttttaacttagaggcaatggaaaaataaaagttgactgtactaaaaatgtatacttgttgccaggaaggtgacctcaaaaattaaaagtataattattcggccgggcatggtggctcacacctgtaattccagcactttgggaggccaaggcaggcggatcacgaggtcaggagttcaaaaccagcctgtccaatatagtgaaaccccgtccctactaaaaaatacaaaaattagctgggtatgtggcatgtgccagctactcaggagactgaggcaggagaatcatgtgaacttgggaggcggaggctgcagtgagcccagatggcatcactgyactccagcctgggtgacagagtgagactctgtctcagaaaaaaaaaaaaaaaaaaaaaaaaaaaaaaaatatatatatatatatatatatatatatatatatatatatataaataaagtattcaa

SEQ ID NO: 472527 - DNA, 541 bp, Homo sapiens
tgcattggcatttcctgggaagttgttagaaatgcaaatttctggcctccaacccgagctgctgaataagagactctaggggtagagcccagcaatccgtgctattactaagttctgaaggagactgtgatacctacttacatttgagaaccactattctacaacaaacaagggagactggatccagccttcagatgcacttttattgaccagtgtagtgttttgaacatttttaaactagtttccaatgtttcaaaatgggttttttttttcatgaaaatccacatttctggcttttcttggggaaaaaaaataggaaaatctagacacagaggactcacacacctatttggaaataattgtctggagctgagaagaggctgccactctgagaaaggtcacaagccctcctgggagcagyggcccctcattacctatctcactggccagctttgcttctttccacctggaggcatttgagccattggcctgtgatctatataatgtctggtgtcatctcaagctgaagttcattcaacac

SEQ ID NO: 472528 - DNA, 367 bp, Homo sapiens
gctggagtaagtcaggcctcgttcccagcagacaatctgcaaatatttattgagggtctgctctgcacccagggctgcggggcacacagagacgccccgtgtgagacaaggagcttgtgttctgactgggaaggccagactgacacacaggaaaccagggggtcctgttgaccctgagctatgcttttaatgcacgattgtgtggtaaggtgtaggccaaataccaagacattggtcttaggmtccgtgatctggtgcattctcagaatctggagaagattgtagaagttaatcttgttttgcccaggggctttcctccaagcagcactaaatccactaaatccccacatggtctctagcccctttt

SEQ ID NO: 472529 - DNA, 404 bp, Homo sapiens
tctccaagcagggtcacattctgaggtactggggttaggactttagcatgtgaattttacagggacactattcagcccatatcattaggcttcctgggaggggaggtaggaagatggaagttgagtgagtgaagaatagaggagaatggaggggatgtgaytggtggggtaccccaagctgttaatgttctgaggcattaggacctctctggtacactggattatcctgactgaggctccctggcaggaggacgtcaagaagcccaaaggcgaacacaccagggaggaaggaggcctgggctggtgagccaggctcaccagcagggactagaggctggtgtgtgggggtacagggagtggggcaagagctagggccgagatagggaggagagctgtggctggat

SEQ ID NO: 472530 - DNA, 404 bp, Homo sapiens
tctccaagcagggtcacattctgaggtactggggttaggactttagcatgtgaattttacagggacactattcagcccatatcattaggcttcctgggaggggaggtaggaagatggaagttgagtgagtgaagaatagaggagaatggaggggatgtgactggtggggtaccccaagctgttaatgttctgaggcattaggacctctctggtacactggattatcctgactgaggctccctggcaggaggacgtcaagaagcccaaaggcgaacacaccagggaggaaggaggcctgggctggtgasccaggctcaccagcagggactagaggctggtgtgtgggggtacagggagtggggcaagagctagggccgagatagggaggagagctgtggctggat

SEQ ID NO: 472531 - DNA, 645 bp, Homo sapiens
tttggcagcatttactaatgataaacatgtgccttccctatgatcaaacgatttgtctctctctatttctatctatgtctatgtctatatctatctctctgacagaaatgtctaccaaatgttcaccaaaagatattctagattgctcatagtggccctattcatagtagcaacaactggaaactttccaagtgcccaacaccagtaggatggataaatagattgtggtatatttacaccctggaatacaatcagcaaagagaatgaacaatcttcaactacacataacaatgtgcatgaatctcacttgatgacaagmaaaagaagtcagacacaaaagacaacaagctatatcacttcatccacaaaaagaacaaaaactggcaaagctaatctctgctgtttgatgtcaagatagtggttatacttggaaggaggcagggagggaacataagcgaggattctggaatgctggtaatgttatcattatttgtaaaaatctgggtgctggtaacaatgtgtgtttagtttgtggaaactcactgagtactcatgatatgtgtacttttccatgtgtaagttacatttcagcaacaggttaaaagaaaagtgggaagctctgttcttcctccacttagtattcat

SEQ ID NO: 472532 - DNA, 615 bp, Homo sapiens
ctgtccctagtgctcatcattccaattatgccacattaactscagtcttttaaaaatcccgtctcaaggtacttctaggagtctccaagatggcttgtgtgaacacgtgtcagaccaggttattggaggccaccgtgctgtcaccttcctctgccaagtccaggcccactgtggggaccgctgtccaggcttagaaactccggtatgaacactggtgggcgggcactctcccgtagctgcccttggccacaatggagatctcccctggccctctcccagactgagtcacctgtactacacagtttgccctgtttgacacaactgccagccaaacctgagatcctcctgggtcactggccatgcccaggagaggcctcgaggagccaatctctgcagcccagccacagatgctcttggccatcaaggagctttactgagccctgtcaggggacaggaggattcacttccctcagctcccctctgtgagacacctatagtaaggctacagatttcaaagggacgccaaatttggttgtttccaccagcgaaacccatttttgccctagggcccacatagatcatcagcatagtgatgtcagcagcacccttcaggcc

SEQ ID NO: 472533 - DNA, 627 bp, Homo sapiens
catttgtattcttcccagaagcagaccctgagatgagggttctgggaaataaggagaacagcagttgggaagaggagaacaaagccaggggatgactagagcttaatcctttggggaaactctgggtaacagcacagaacacacctcagagttatcttcctaaggtgccagatgagggagttgaggtatttatacaccctctcctgagactcatgggttgagggctgctggaggctgcgatgacaatgccctgacacatgggcctgcttcctgggggcaaaagcctcaggcacagacatacatacactggggtttgaagttgattgttacatactgtaatagtaacatccaagcaatactagcagggcactgacagcatctaatacagtttttttttttttcactaaaatgcaaaggaatgtttgcatttctttatcagaagaaggaaaagaatgccagtcttcccattttgatggttgtgcccacaagaaccagcagagcctggaaggacaatatgcttggtagtgggaycatttggggctagtgagggggcagggtctcgggaaaaagggcacggtgcctggtgaagggagtcattctgggggtgctgcagtgatgatgctagtg

SEQ ID NO: 472534 - DNA, 627 bp, Homo sapiens
catttgtattcttcccagaagcagaccctgagatgagggttctgggaaataaggagaacagcagttgggaagaggagaacaaagccaggggatgactagagcttaatcctttggggaaactctgggtaacagcacagaacacacctcagagttatcttcctaaggtgccagatgagggagttgaggtatttatacaccctctcctgagactcatgggttgagggctgctggaggctgcgatgacaatgccctgacacatgggcctgcttcctgggggcaaaagcctcaggcacagacatacatacactggggtttgaagttgattgttacatactgtaatagtaacatccaagcaatactagcagggcactgacagcatctaatacagtttttttttttttcactaaaatgcaaaggaatgtttgcatttctttatcagaagaaggaaaagaatgccagtcttcccattttgatggttgtgcccacaagaaccagcagagcctggaaggacaatatgcttggtagtgggatcatttggggctagtgagggggcagggtctsgggaaaaagggcacggtgcctggtgaagggagtcattctgggggtgctgcagtgatgatgctagtg

SEQ ID NO: 472535 - DNA, 448 bp, Homo sapiens
agaggggggttgcaggctgctcagggacagagggaggcaccgctaggaggtgtgtgggctccagctccgctcttacttcctttatcctccatgctcttcacaaacgtcctggcctcctggaggttctcgggcgtggcctggactaagtgctctttccatgtggacacatctccactgaacaggatgaaattcagatagtcttcctcttkcatatcttccaggattctgagaagggcctcctttgtctggaggagagacaaagagctgggagaagccgcagcagagagtgaggtcccttctcagctcagcaggcggtgcagcccacgccatctgcaccagcgagccctgcctgaggcttgccacagaagcgggcagaggccgtgagccttctcttatcctgtcccctttctcctcattcaccacaaagatcagctttttccagttaaaa

SEQ ID NO: 472536 - DNA, 635 bp, Homo sapiens
ctgtcccttcctgtccttggctacaacttgaatttgggcatttgcctctaggaggtgaagatggatttttgaagttttggtccttacccaggcagccctgtaggcctggggcagcccctgagttaccagagcctggagagagctsggtggggccaagtgggaacagcaaatgagaaaagtggactggggaacgcgatagggaggggtggggactgtggtgggttgcagagttcatgctcccttcgacatcattaatataaataaaaaattaaaacacttccttagcatgtgtatgtgtgtatgtgtattgcaaaatttccaaaaaacaaaacaaaataaaaaaaaaaaacacaggaaggatatgccagaaactaatgaaactggctccctccagcaggtgagtaggaatggagtgtgggggatagaaggactcttctgagcacagcttgcatagagtggaccttttggaactatgttaatgttctacatattgaaaacaataaagtaacaaagaagaatgtagacagaaatgactgagcctacctgtatttcagacgaataaaataaccacactgaagagaaagaaccaatccaagtaacatctgaacgtgtattcaaactgttactttgaccat

SEQ ID NO: 472537 - DNA, 497 bp, Homo sapiens
ttctgcccattcagggcttgccctcagagaagctcagataggaaagagctgggaggtagaggccctgggttcaaggccttctcaggcctcaactttgctgtgcaaccctgcataggaccgtgccctttctggcctagcctcccgcctgtagagtgagccctccctccaagctcatacttacaccagggactccgctcactataaaagacagtgaaggcatcagtgggattggctatgcctgaggagggaaagggggttcagagggtggagcagctcagtccccactagcagcctcctactccctgcctggctgctcattggcttgccaacctgctcaccctcatccagggcaaagcctgccctcagggcgtggaactcaggccgctgcacgaacagctccatgccttggtgacccccaacctcctcatctgtaaaagcagcagggacrtgagatgaggaggctgccccgccccaccctcccctttcccaaaggtatc

SEQ ID NO: 472538 - DNA, 567 bp, Homo sapiens
aaaaaaaaaaaaaaattgccaggggttgtggtgcacaccagcgatcccagctactctggaggctgaggcatgagaaccacttgaactgtggaggcagacggtgcagtgagccaagattgcgccactgcatgctgggtgcacactgctcactgygtgacagagtgagactacgtctcaaaaaaaaaatctaatatttcctgaggagataagatatagcttctttatatataagtaaaataatttttatatcaatatgtgaaatacttctgcattagagttgattctcaaaattgtgcaaagtagacctttatattaaccttaatttataaacaaagaaacccaaactttctgcctctaagactcgccttgccatagaagatttatggcttcttccttaccaggcatttggtggtaagaggccctgagtttgtatattgccagagtcagtctttgtgttacaagccaagacattcattttctcaaatcctcagcttctaattttataaaaaggagataataaaccagtatcttttaaattagatgtaaggaataataaaatagggaatg

SEQ ID NO: 472539 - DNA, 567 bp, Homo sapiens
aaaaaaaaaaaaaaattgccaggggttgtggtgcacaccagcgatcccagctactctggaggctgaggcatgagaaccacttgaactgtggaggcagacggtgcagtgagccaagattgcgccactgcatgctgggtgcacactgctcactgtgtgacagagtgagactacgtctcaaaaaaaaaatctaatatttcctgaggagataagatatagcttctttatatataagtaaaataatttttatatcaatatgtgaaatacttctgcattagagttgattctcaaaattgtgcaaagtagacctttatattaaccttaatttataaacaaagaaacccaaactttctgcctctaagactcgccttgccatagaagatttatggcttcttccttaccaggcatttggtggtaagaggccctgagtttgtatattgccagagtcagtctttgtgttacaagccaagacattcattttctcaaatcctcagcttctaattttataaaaargagataataaaccagtatcttttaaattagatgtaaggaataataaaatagggaatg

SEQ ID NO: 472540 - DNA, 353 bp, Homo sapiens
ctggtccttaagatgatgagaaataataaagacctgttcatttaagccactagattttttggagagttagtagtaacagctaaatgatatacatggaagattattttattaagagtacttaaagtataccaggcctggcatggtgaatcatgcctataatcccagaactttgggaggcctagggggttggatcacctgaggtcaggagttcaaaaccagcctggccagcatggcaaaaccccatctctactaaaaatacaaatattagcctgaygtggtggtgggtgcctataagcccagctacttgggaagctgaggaatgagaatcccttgaacctgggaggtggaggttg

SEQ ID NO: 472541 - DNA, 505 bp, Homo sapiens
accatacttgactatgatttgagctcagggccaacctgggtttcagctctgactgacaacagtctttcaacaggtaggaaggataataaaagaagaaaaaaggtcctatccacactaggtatggaagcagtggcatcctgttcttaggaccgtcagatcttacttctgtttttacaacaaagacctttaagcaaaaataaataaatagccctaaagcatcatgtgtttgaaatcagttacctatttctccaaaatctccttctctcacagcaacattactattaggatggaaaatttaactggcaactttccctatccctttttggtaagagggaaaccttttgaatcaagatrctttaataaagaaataaaggtacttcttgatccgcctgcctcggcctcccaaagtgctgggattacaggtgtgagccactgcacccggccggggactgttgtttctaaaggccaaaccagaactacgctagtagagaaaatagcaacccaa

SEQ ID NO: 472542 - DNA, 608 bp, Homo sapiens
tggttttgatttgcatttccctaatgtaagtaatgttgaacattttttcatatacttttttcatatacttgagtgtttgtatgtcttcttttgagaactaggtattcagatcttttgccccttttaaaatcagattctttatttttcccagcaatacaattatgtacatattgttttatgccattacttttaagaccagttaagagaagaaaggataagaaataagcaattatactgttttaataagtagttacaagttatataattgcttatataattacacaattctattttattagtgctctccagagggtgcagccttgggcatgagtgctggatcgctaactactccagataattatggttttagctgggttctttttttggggtagcttttgcctttttattacaaattatatatgtgtatatatatatatatatatatwttttttttactttaagttctgggattcatgtgctgaacatgcaggtttgttacatgtgccatggtggtttgtttcacctatcaacccgtcatctaggttttaagccccgcatgcattaggtatttgtcctaatgtgctgcttcccttttcccccaagaccct

SEQ ID NO: 472543 - DNA, 598 bp, Homo sapiens
tctttgggaattttgatatggggttttagtggcccctgctgcttgctgggaaaattccccaccttggaattgtaatcgatttcaggagaaatgacacacagttgctcatggatataaaataaattttataaccaaaatagaacccagtgtcagcactccccaagaagaaggattcaggcttggtccagtgtgaagcaagtgggcacttaggcaggtggctttgcctattttttgtgcatgggcccatggtgagggttgctgcatgtgggctgggttttgaggggttcgaatgtctttctgctgtgcagagagggagcacatgctctgcccagatgtgcagtggatgtgactaaggactggaaagctgataatctccaaaactgaatgttcttgccatacagggagatgaaagggctgctagaaaatagcttatctaaccctttgagaaaatgtaaagaaaaggttccaacccaggtgtgtgtgaccgcaaagtctcaggattgctgagacaggggcttttgcatccacggagccccgggttggtcccgctgccctccckcccactcagcctgtgactccctggctctgtcatcatctc

SEQ ID NO: 472544 - DNA, 522 bp, Homo sapiens
ggttttaatgggcttgttttctcattcccgccctcatccccaggcactagtttatccagttctataatgtttaaggtatgcattcatcaaaaataaagtttagtggaaactgactcttctggtcgctaacagaaacctgatctgccacacacccatcccaggcacgcgtcccctgggatcrtggaaaacccactgggcaggtccaacgcccagagatgccacacttagtctgactttgggccaaagctggagcctgagagggagtgggtggggcggggtgtggaggatgtgggctatggaggagccctcgggtttggaaggaggaagcaaaggctggccaaggcacctgaagcacattcttcaggccctgtgccagggacaaaccctcgtggccagtgctgatgtggaatagatcgcagggagggggccacgctgctgcttacccaacccagaagcaggttccttagggagcgttcagccctagggtctccaccaacctggattccccaaagtcaaagaagc

SEQ ID NO: 472545 - DNA, 557 bp, Homo sapiens
ggatcttatgtagtaagaataaacttattttgagaaatttctgggtcatgtatttacccacagaaaaacagaagcaaacacacacacacacacacgcacacacacacacacacacaccacacaggctgtcacgtgtcctmagcacaaagtgccttgagcaaggccattgctggccccacacttatcctgactgtgatcttgctgtgatcagcacatcccatcagtgtggcaacaggtgtggccagagtgggaaccaggccttttcttcagatttgctctttgttcctgaatagccaccgtcagaacagacaccctcctagaagtcacttgattaaaaatttccttttggatatttaggttgatgttttatccatcggttaaagtataaatgtatatttattataaaagtgtaattatggctctaattaatgattatggtgaattttaataactatagctatgaaaatattccaatagataaaaacagtgctaaaatatacagttaatataagagtgattactttaagataaatcttgtaatttttgatctaataaat

SEQ ID NO: 472546 - DNA, 557 bp, Homo sapiens
ggatcttatgtagtaagaataaacttattttgagaaatttctgggtcatgtatttacccacagaaaaacagaagcaaacacacacacacacacacgcacacacacacacacacacaccacacaggctgtcacgtgtcctaagcacaaagtgccttgagmaaggccattgctggccccacacttatcctgactgtgatcttgctgtgatcagcacatcccatcagtgtggcaacaggtgtggccagagtgggaaccaggccttttcttcagatttgctctttgttcctgaatagccaccgtcagaacagacaccctcctagaagtcacttgattaaaaatttccttttggatatttaggttgatgttttatccatcggttaaagtataaatgtatatttattataaaagtgtaattatggctctaattaatgattatggtgaattttaataactatagctatgaaaatattccaatagataaaaacagtgctaaaatatacagttaatataagagtgattactttaagataaatcttgtaatttttgatctaataaat

SEQ ID NO: 472547 - DNA, 557 bp, Homo sapiens
ggatcttatgtagtaagaataaacttattttgagaaatttctgggtcatgtatttacccacagaaaaacagaagcaaacacacacacacacacacgcacacacacacacacacacaccacacaggctgtcacgtgtcctaagcacaaagtgccttgagcaaggccattgctggccccacacttatcctgactgtgatcttgctgtgatcagcacatcccatcagtgtggcaacaggtgtggccagagtgggaaccaggccttttcttcagatttgctctttgttcctgaatagccaccgtcagaacagacaccctcctagragtcacttgattaaaaatttccttttggatatttaggttgatgttttatccatcggttaaagtataaatgtatatttattataaaagtgtaattatggctctaattaatgattatggtgaattttaataactatagctatgaaaatattccaatagataaaaacagtgctaaaatatacagttaatataagagtgattactttaagataaatcttgtaatttttgatctaataaat

SEQ ID NO: 472548 - DNA, 557 bp, Homo sapiens
ggatcttatgtagtaagaataaacttattttgagaaatttctgggtcatgtatttacccacagaaaaacagaagcaaacacacacacacacacacgcacacacacacacacacacaccacacaggctgtcacgtgtcctaagcacaaagtgccttgagcaaggccattgctggccccacacttatcctgactgtgatcttgctgtgatcagcacatcccatcagtgtggcaacaggtgtggccagagtgggaaccaggccttttcttcagatttgctctttgttcctgaatagccaccgtcagaacagacaccctcctagaagtcacttgattaaaaatttccttttggatatttaggttgatgttttatccatcggttaaagtataaatgtatatttattataaaagtgtaattatggctctaattaatgattatggtgaattttamtaactatagctatgaaaatattccaatagataaaaacagtgctaaaatatacagttaatataagagtgattactttaagataaatcttgtaatttttgatctaataaat

SEQ ID NO: 472549 - DNA, 431 bp, Homo sapiens
gaggagtatgaaggcattgagacaaacagcaacggaatcagttaacatagaaaatattcacataggccaggcatgttggctcatgtctgtaatcccagcactttgggaggccaaggcagaaggatcgcttgagtccaggagttcgagaccaacctgggcaacacggtgaaaccccatctctccaaaaaataaaaaaagaaattagccaggcatggtggtacacgcctgtagtcccagctactcagggggctgaggcrggtggatcacttgagcctcgaaggtaaaggttgcagtgagccgagatcacgcctctgcactcctgtctgcatgacagagtgagaccctgtctgaaaaaaagaaaaaaataaataaaatatgttcacctcaaagtgaggaagattatataaaagtccaacttagtccttgtttca

SEQ ID NO: 472550 - DNA, 431 bp, Homo sapiens
gaggagtatgaaggcattgagacaaacagcaacggaatcagttaacatagaaaatattcacataggccaggcatgttggctcatgtctgtaatcccagcactttgggaggccaaggcagaaggatcgcttgagtccaggagttcgagaccaacctgggcaacacggtgaaaccccatctctccaaaaaataaaaaaagaaattagccaggcatggtggtacacgcctgtagtcccagctactcagggggctgaggcgggtggatcacttgagcctcgaaggtaaaggttgcagtgagccgagatcacgyctctgcactcctgtctgcatgacagagtgagaccctgtctgaaaaaaagaaaaaaataaataaaatatgttcacctcaaagtgaggaagattatataaaagtccaacttagtccttgtttca

SEQ ID NO: 472551 - DNA, 627 bp, Homo sapiens
caggtaaatgtctgttatggtgagtgacatggtggcaygttgggctctatgaaactgagtccacacacagcctgctgtgctgcctgccctgaaacgggacaggcccttggtaaatgacttgctactgaatggtagtcctcacgatgacatgtgtggcccatttaatgagagaagtaaagaccgcagaggatggaggaaagggcagggggagaagttagctaatattaaattcctgaccacccacacctaatgaaaaagaatgttctctgcttgcagaggcagtgaattaggctggcaaggtaccaagggaggaggaaaagtgtgtgaatggatacccgctacatctgagcacagacttaacccagaaacgcaggcggtcaggaaatctaatgatggcttcggacctgggcagacttgagttgagacctgtgccctccgcctcacgagcctcagaaggctgttgagtctttttctgagtctcagtttctcattctgtaattgggggatgataaggataaaacctgacaagataattgtgactcaaatgccagttcctagtactggtgttagcacaaagctgagtaaatactcatggattcaaaggcgcgagatgtcataccatccaag

SEQ ID NO: 472552 - DNA, 627 bp, Homo sapiens
caggtaaatgtctgttatggtgagtgacatggtggcatgttgggctctatgaaactgagtccacacacagcctgctgtgctgcctgccctgaaacgggacaggcccttggtaaatgacttgctactgaatggtagtcctcacgatgacatgtgtggcccatttaatgagagaagtaaagaccgcagaggatggaggaaagggcagggggagaagttagctaatattaaattcctgaccacccacacctaatgaaaaagaatgttctctgcttgcagaggcagtgaattaggctggcaaggtaccaagggaggaggaaaagtgtgtgaatggatacccgctwcatctgagcacagacttaacccagaaacgcaggcggtcaggaaatctaatgatggcttcggacctgggcagacttgagttgagacctgtgccctccgcctcacgagcctcagaaggctgttgagtctttttctgagtctcagtttctcattctgtaattgggggatgataaggataaaacctgacaagataattgtgactcaaatgccagttcctagtactggtgttagcacaaagctgagtaaatactcatggattcaaaggcgcgagatgtcataccatccaag

SEQ ID NO: 472553 - DNA, 627 bp, Homo sapiens
caggtaaatgtctgttatggtgagtgacatggtggcatgttgggctctatgaaactgagtccacacacagcctgctgtgctgcctgccctgaaacgggacaggcccttggtaaatgacttgctactgaatggtagtcctcacgatgacatgtgtggcccatttaatgagagaagtaaagaccgcagaggatggaggaaagggcagggggagaagttagctaatattaaattcctgaccacccacacctaatgaaaaagaatgttctctgcttgcagaggcagtgaattaggctggcaaggtaccaagggaggaggaaaagtgtgtgaatggatacccgctacatctgagcacagacttaacccagaaacgcaggcggtcaggaaatctaatgatggcttyggacctgggcagacttgagttgagacctgtgccctccgcctcacgagcctcagaaggctgttgagtctttttctgagtctcagtttctcattctgtaattgggggatgataaggataaaacctgacaagataattgtgactcaaatgccagttcctagtactggtgttagcacaaagctgagtaaatactcatggattcaaaggcgcgagatgtcataccatccaag

SEQ ID NO: 472554 - DNA, 627 bp, Homo sapiens
caggtaaatgtctgttatggtgagtgacatggtggcatgttgggctctatgaaactgagtccacacacagcctgctgtgctgcctgccctgaaacgggacaggcccttggtaaatgacttgctactgaatggtagtcctcacgatgacatgtgtggcccatttaatgagagaagtaaagaccgcagaggatggaggaaagggcagggggagaagttagctaatattaaattcctgaccacccacacctaatgaaaaagaatgttctctgcttgcagaggcagtgaattaggctggcaaggtaccaagggaggaggaaaagtgtgtgaatggatacccgctacatctgagcacagacttaacccagaaacgcaggcggtcaggaaatctaatgatggcttcggacctgggcagacttgagttgagacctgtgccctccgcctcacsagcctcagaaggctgttgagtctttttctgagtctcagtttctcattctgtaattgggggatgataaggataaaacctgacaagataattgtgactcaaatgccagttcctagtactggtgttagcacaaagctgagtaaatactcatggattcaaaggcgcgagatgtcataccatccaag

SEQ ID NO: 472555 - DNA, 569 bp, Homo sapiens
acaccttctggagacaccttcctcactcccaaaggcacggggccttagtgctttctgagtagccaccttggaccatcggttcagtaatttgaatagtaaaatgtgggatggcgttttcttgctaaagtgcagcttaactgggggagtgagttgttaaaagagcagggtggtagcatagatgacaggcgttcataaagcactgaatttagagatctggacctggactgtgctgctgaatgtggaaacctagactcagtgtgaccatctctaagctcctttgagcttctaggagtctgtcatcaaaggtggtttccaacagcctccagggccccctggccctttgtgctccatccccacctccgctcattccagtttcacctggggctatgtggctacctcctcacgtctaggctctcctccttctgagatgctctttctctttcttgtttactggagggcttggctaagaccaaactygggtaccctgggcagaactagggactcctgtgcctcctttccagagcatcgtgtgtggaccctttttgtcgtgtagttatttggttattttt

SEQ ID NO: 472556 - DNA, 624 bp, Homo sapiens
gttcacatgtgagagggagtagaggaatagtcacttgtgcattcctctagctccgtgaatctgctttttttgtttgtttattttattttatttttttgagatggagtttcactcttgttgcccagactggagtgcagtggcacaatcgcagctcaccgcaatctccgccttctgggttcaagtgattctcctgcctcagcctcccgagttgctgagattacagccatgtgccaccacacctggctaattttgtatttttagtagagacggggtttcaccatgttggtcaggctggtcttgaactcctgacctcaggtgatccacccaccttggccttctgaagtgttgggattacaggcatggaccaccgcgcccagcccatattcaacttattttttaaatgataattsataaaacactttaggatcttgcattgcaatagcattgttatgaacattgctctaaagttaagatttttagtttcttaagtaatacattaatggttgaaaaaattagagaatatagatgaacaaaaataaaagtaaaattaaattttcccaaacactgccctagagacagccccgtatcacgttggtctgtgtccttatagactttttctcttgc

SEQ ID NO: 472557 - DNA, 544 bp, Homo sapiens
aaatgctgaatcaaagaaaaggcaacttaaaaacagtaggaaagctttatgatgctttatttgttcytgtgccaacccctccccagcactgcagctattctgaatctggtagagtttcccagcctgggcccctgggccctggttttggagaggggagagaaagcttcatcgataaagaattgtttgtctcttcttatctgtctggggcgtaagctgatgcatggtcggtcattgttttccctaactaggaacctacttgaggagaaaaagctgcaggcattcctcaaaaacattacaaggtgactgactaacccatagcagcttcagtaggtcttcagggcatataaaagactagaagtctgtgaggaaaagcagaggagagtttcttttggaacttagggcattaaaaagtgccagcgtttattggagtgtttagaaagccacattcatgcccaggacaggaagcttactcagagaagagccgagaagacccagaatttcacctctgagtgatctctaagagcggtccaggcaaaaagtgagg

SEQ ID NO: 472558 - DNA, 544 bp, Homo sapiens
aaatgctgaatcaaagaaaaggcaacttaaaaacagtaggaaagctttatgatgctttatttgttcttgtgccaacccctccccagcactgcagctattctgaatctggtagagtttcccagcctgggcccctgggccctggttttggagaggggagagaaagcttcatsgataaagaattgtttgtctcttcttatctgtctggggcgtaagctgatgcatggtcggtcattgttttccctaactaggaacctacttgaggagaaaaagctgcaggcattcctcaaaaacattacaaggtgactgactaacccatagcagcttcagtaggtcttcagggcatataaaagactagaagtctgtgaggaaaagcagaggagagtttcttttggaacttagggcattaaaaagtgccagcgtttattggagtgtttagaaagccacattcatgcccaggacaggaagcttactcagagaagagccgagaagacccagaatttcacctctgagtgatctctaagagcggtccaggcaaaaagtgagg

SEQ ID NO: 472559 - DNA, 536 bp, Homo sapiens
ttagcagctcctgggtcgaatgcattattgatatcgccagttgacttcrctgctttatgacccattttgaacacgaataagaaaatcactcaaatttgcttttgtctaacattatttccatagtctaaaataaatataaaataaacaccaagtaataagtcattagcaaaaaaaaaaaaacaagaaatgtgcattaaaatgatgtataacataaccacatttatttaagaatgcattccaatatcaaattgcaatttcaacaatgcaaaaacctctttactcttgcaccatatactatatataactatacaaatacgtgtagtatttgtataattatatattatatatatggcatatccaaatatgctatatctacatctatacctaatcctgatacttcttttgtttatcatacagaagcccaggcaggacccatgtctgatggctgggaaggccatcagacctcaaagcaagtctgaccctgaggaaagaatgagggaaagaaagttgtgtgaaaacatcttaaagggttgtgg

SEQ ID NO: 472560 - DNA, 619 bp, Homo sapiens
taaaagctaacatcttaaaagtaaatctatggagaattatcttgcaaaacatgtttatttatgtaaattggaaaaatgagtgaactatttgcaggtttcatgagaagtaaatatgtctctaggcataaaaaacattaacatctttactgttttttaaataatatctgtcaatcaaaaagttatgaattaaaaaagaagaagaaaaagcctgcaatgccaaacagattagacacagtgggctaagaaaaggaagatggatagaattgttcacggggcagatactcttcccctttctcactaagaataagcagmgctgcatttgtggaaacttaactaagcagaaacctgcagtgtctgctcagtgctgctgacctgccagctggaaagagcactgagtttaaagggtttaagctctcaaagaagccaagacttggctgatcatcttgggctcagcatattgtgaggcatatgaacactctcttcaaaactggcagagaaaaaggaaggaaaattgaaaatctaaacacagtagccagttaaaattcagacaattgtaagggttatgttttctgtgaagcacttggttatacccaacactgataaataaggaaaataaatg

SEQ ID NO: 472561 - DNA, 428 bp, Homo sapiens
atactttgatttcaaccttgttaagaacccagccatgctgtactgaactcctgacccaaggaaactctgagataatatatttgtgttttattaacccactacagttgtggtaatttcttacacagtaatagaaaactaattctatgtatttcatctgttttgtggagaattcagtttgctaaaaaaaaggaaaaggaagtagagcagatcactaccatcacattttcatttcaaaacaaggctgtgcatcattttgaagactggagttgaatggtatgcagattgaggtcctttatgacagaatagatggatgaacttggtggttggctactgaggtacaagcaagatacctcagattaggatggtggtagcagatattgtgtagaaaggayagatgttagagccatttttagggaacattgaagaac

SEQ ID NO: 472562 - DNA, 510 bp, Homo sapiens
ggaattacaggggtgagccactgtgccaggcctgaacactctaaatctttgattcttattaattttggtttgttcagactagttttcacataaaactattacactgggcaaacaaacctaaatgttttatttatttattttttggaaacccagacagtgggcaaaattttgtatgtaagtgtagttttctatagagttaattaatacatttcatcagttttttaaaagggcatgtgaccataaaaattaagaaccactgaactaaagataagcaaaaattaagccagtttaaaaatgaaataaactaagttagaaaacaaaagaaaayaacattcactgtagtgtacccattaatgaacagattgtcatgtaaatgccaccaacccaaccacattttctgaaattttatacttgtagaacatacaatataattatattttttcattatattatcatttttgagtatttactatgtgctaagccctttacttacttaggtaatatttaatt

SEQ ID NO: 472563 - DNA, 406 bp, Homo sapiens
ttcgggccaaaggaccttgccgtgcgatgcctccatggagctcggcggccacccctaatccgggctggaatcctctggcaccrgacgcccggcggggctccaaggctcctgggcccacgccaggccccggcctgaaacgcagcactgctggaataaaacacgccagagaagcagggcgctaggctcgcctggatttggggaaacgagaattgtcatgtcttctccctccgtaggttggtgttaatgaaaaacccccttttcagcatggactaaatcccgctaattctatttagggagcagtgtctactccgggccgggaactgctccggtttccaaccgcagcctcccgtgagggtcccagtgtggagggccggggtcatcccctcactctgggatggctcccaac

SEQ ID NO: 472564 - DNA, 487 bp, Homo sapiens
atcgctgaagtattcagcaaacactctcccctgaaaaccttcccgtgaactgtggrggcaaaggggtgtcgggggctgggcgggggtcctggctcaccatgctgaagtccaggaggtcactgagctccttgtctgtgcccacaggcgccatcctctgcggctggttcattctcctggggccagggcgggcacctcaggcctggaaaccctgcttggtggatgtggggacagatggacagggagaaacagggaggggagaagagttgtgagtggtcaaagcacagagtgctaaaagccacctaaaaaaccctcaaccgccctggggtctgagttccagcagagccctgggggcacggggagccctgggagcaggcgcagggaagctggaattccagagtctaggtccctgcagagtcctccccagagaccacagggagtctgaaaaatggggggagggtgtgcaaatataaactccctaactccccca

SEQ ID NO: 472565 - DNA, 613 bp, Homo sapiens
ggccaccgtaggacaatccagtgggacctgggggtgcctctgggccattgggggaccctcggtgagccagtgaactcagtgcacttctggagctccctgaccacgagtgaggaaattgaacggtacaggaaaagcaggagagcgtgcaccttaaacggccaaggtccgtcactaccaccgagcacctgccaggctccccacccagtgctcccaaaagtagagggccccctccctcccctaaactctcagaggttagtatcaccgggtcaagatgatgacagcacggggaagcctctggcaagggccttgccccaggggacagctcaggtggcctcggataacatgacaaagaccttctttatttattattattattaattttttatttttkttggagacagggtctcaccctgtcgcccagactggagtgcagtggtgcaatcatggctcactgcagcctcagcctcctggactcaagcaatactcctgcctcagcctcccgagcagcttggactataggtgtgcactgccacacctggcttttttttttttaatttttatttatttattattatttttttaagacagagtcttgctctgtcgcccaggctgg

SEQ ID NO: 472566 - DNA, 535 bp, Homo sapiens
aaacctctgtgcacaggatgcagcaatcaagataataaaaatcaactccgactgagaaagtatctgcctacacattcatcaggctgggaggacagacccagatggtatcagttggaaaattaacagaaaacagtatttttgccaaggacacctttttctgagccatcaatgtcttctagctcgctaaatgccttccttgcccattacaatcatacacagtgattgacattttatcagtaagaataaacttcccttttccggccggagggtctgattttcttggacacagagaatccgtctccatttccaacccaggtgcagggctctgataagcggtttccggacwtaacaatctacagcggtcttatcttgtggttcccaaggaaacaggtcccggctgcacttcgcagcccagacccgagggtgacccctttacaagcttgctctttgccaaatggaaaccacgcagtatttacatttcacctaaaccccacccttccctccaaatccgatgggttactcaggcctaggatcc

SEQ ID NO: 472567 - DNA, 589 bp, Homo sapiens
tgccatctctctttctctttctctctctctctcttttttttttttttttttttttttttggkatggagtcttgctctatcactcaggctggagtgcagtggtgcgatcttaattcactgcaacctccacctcccaggttcaagtgattctcccacctcagcctccagagtagctgggattacaggtgtgccaccacgcctggctaattcttgtggttttcatagaggtggggtttctccacattggccaggctcatctcgaactcctgagctcaggtgatccacctgcctcagcctcccaaagtgctgggattacaggcatgagccaccgcgcctggcctctttctttctttaaaacataaaaacatacactcacactttgaaacacagctatcctctcagtctgtctctgttcctcttacctgcatctaaacctttgcttcttccctactccccaccactcccctttgttcccatccttagaagcttgctgtctgtattaatcatgcttttttatttactgtatttttgatgttttgacatcttggggccttgctgatcctgaagggactgcccctcccagggctagc

SEQ ID NO: 472568 - DNA, 670 bp, Homo sapiens
actgataagacttatgactgttatcttcccatacgatggaatgaaatgtaaaagaagtttcaagaagctagcaaccagttctaatgaggtagtgatgaggatttttgtctcaatggtttgtaaggaagacctttataacatccagagctgtgcaatgatggaattgtggatcctggcacacactcatcagaagtagcttgagatatctatcaatgatgctgaagaggtgcttaaacagtgagtaatctatttctaactgcaaagactaaatacagatatgagttttcttcatatgaatctctaaaattcacacaattgcaatcaacatcttctctaggatttttttattttaaaagttttcaaatatacagtaaaattgaaataactgcagtaaacaccatatacccaccatctagatgttatccttgacaacttttataatcacaactttattgagatataccataaaattcacctatttaacgtgcacaattcattgttttgcagcatatagtatttacagagatgtgaaaccatcaccacaatygattttatattttcatcactcccccagaaaacaccattcctattagcagtcactttccttcagaccctcacttcccatgttctttccaccacctagtgctaggaaaccaacaatctactttct

SEQ ID NO: 472569 - DNA, 600 bp, Homo sapiens
gatttcttccacgtattgctccttctctgccttttgcaacagtttgtgttctttaagatacacaaactgctttctgttttcttattgttgttgtccaccaacattctcatcattcttcaattgacttcttgggtcacagtctacctgtctatgcctttgtctatactcattcttggaaatgtcaaaaagccacgtggccaactcatctagcattcacaatgatctctgtttctttaccaccttacttcacatgaacttttcttccattccacctcagccacttacttgcatggccatacttkagatccacatcatttaaaaccaccctatcttcacaatctcccttgcaaatatccagtttccatgactctcagttcattgaccccaccactttaactttccatcaacacctcccccactttgttctttcctcatcacacttggattctgcaggtcatcgttacacccaaaatatcataaaagccctcaatgctggtgttcctcactccttcatattatttcacatccagatggaactcatcataaatacctcttaagtgcctgtgcacaggcatttgacaaattctagaagaaacctca

SEQ ID NO: 472570 - DNA, 600 bp, Homo sapiens
gatttcttccacgtattgctccttctctgccttttgcaacagtttgtgttctttaagatacacaaactgctttctgttttcttattgttgttgtccaccaacattctcatcattcttcaattgacttcttgggtcacagtctacctgtctatgcctttgtctatactcattcttggaaatgtcaaaaagccacgtggccaactcatctagcattcacaatgatctctgtttctttaccaccttacttcacatgaacttttcttccattccacctcagccacttacttgcatggccatactttagatccacatcatttraaaccaccctatcttcacaatctcccttgcaaatatccagtttccatgactctcagttcattgaccccaccactttaactttccatcaacacctcccccactttgttctttcctcatcacacttggattctgcaggtcatcgttacacccaaaatatcataaaagccctcaatgctggtgttcctcactccttcatattatttcacatccagatggaactcatcataaatacctcttaagtgcctgtgcacaggcatttgacaaattctagaagaaacctca

SEQ ID NO: 472571 - DNA, 648 bp, Homo sapiens
gcccaagagttgaacaagtgtgcccagtcactcaacacatgtttgagtgctataccgcaagcagatgccacaagaaaatatgtcgacataggaaagctaacatacgagtatagttcaggctgaggctatagaaaaattgaaaaaagaatctcaaatggtaccatcttaacaaagaactctttattagaaggatcaacataatgtggtaaaaaaaaatgtctagacttagaggatcagcccagacttagagcccagacttagaggatcagctttgccgtttattggttgttcaactgcagwcaggtcactgtgtctcttgtttctgttttctaatgatgcctgctcttcttattttgaggtgcaattgtgaagatcaaataaatgttgaagcactttgtcaactattgaaaacttcacaaatgtaactaaaggggatgtttggaaaagcacttcaaattgtaattaaataagtgaaaagaatctggtagcaaagactttttaaagacgatgtcaaatttatgaggactggctcaaatatattccagaatcctctggtattgtaaatacatgtacttaataaagaatgttgactcaactcttttattgcaaatctaccatgtgcaagtctttatgctagtgtccgtgaca

SEQ ID NO: 472572 - DNA, 648 bp, Homo sapiens
gcccaagagttgaacaagtgtgcccagtcactcaacacatgtttgagtgctataccgcaagcagatgccacaagaaaatatgtcgacataggaaagctaacatacgagtatagttcaggctgaggctatagaaaaattgaaaaaagaatctcaaatggtaccatcttaacaaagaactctttattagaaggatcaacataatgtggtaaaaaaaaatgtctagacttagaggatcagcccagacttagagcccagacttagaggatcagctttgccgtttattggttgttcaactgcagtcaggtcactgtgtctcttgtttctgttttctaatgatgcctgctcttcttattttgaggtgcaattgtgaagatcaaataaatgttgaagcactttgtcaactattgaaaacttcacaaatgtaactaaaggggatgtttggaaaagcacttcaaattgtaattaaataagtgaaaagaatctggtagcaaagactttttaaagacratgtcaaatttatgaggactggctcaaatatattccagaatcctctggtattgtaaatacatgtacttaataaagaatgttgactcaactcttttattgcaaatctaccatgtgcaagtctttatgctagtgtccgtgaca

SEQ ID NO: 472573 - DNA, 271 bp, Homo sapiens
ctgcttctataaaatgaggcattagatgagataagcaagtttcaaactgcgatcctttgtcctaaattaccttaaagggttgtccccagggaaagggggctggatagaggtggcccttaaagccctcattcttcaagtaagtcagggcagctcaacttttgtcaactttcgtatcagtgttttacttctgacttctcttgaaaaatagcttgctgttgttaaaagaagaaaaggtrtgatgaatattccaacttattaaggtcccttcaag

SEQ ID NO: 472574 - DNA, 609 bp, Homo sapiens
gtcattattacagttaaagggttatgggactcaaccttcacatcaccttttcccccaagcctcccttccttcataaagcctctctagattgcatggaaagaggtgacctgggcaaaatcctcttctgagtgtaccacaatggcactgtgggctgtgcattgggaatggaggtaggatagtgaggacatttgcagtgtggatttggggtcagagatgctgggtttggtacccacttttcccctgtactgactctgtgacctccatcatgctattgacattctctgacctgcagattgagggcttactatgtgctgggcactctcataatcacttcacttatattatcttatggaatctccacaccgagatgtctcttatctctgtttcacagatgacaaaacagatgcttagaatttatacgactstccccaacgtcaagcagcttgtcagaggcagagttgaggtttgaacctaagcactctgattccagatctcccatgtcaactaaactctgagcctgagtttgctgatctgaaagtcaaggtactcatacccacctcgtggttgtgagggttgaatgagatagtgtacttgccacaggtaacccca

SEQ ID NO: 472575 - DNA, 525 bp, Homo sapiens
tattagttgtctctgctctagccaaaccttcctcatggccrttacctcttctgcgcctcctctctccctgatacacatataaattggagtttcttccccactcatgaaaatgcatatgaaagatgaatttaggagaagaaatgggatattccagcttgggatattgcaatcattcaggcccgaatggtgatagacgttgtgggaatgaacaaactggacaagctcaagagctatttaggagttacactgataagaactcaattattgattgattgtgattaattaattatttaatgaaatgtatgcataagaaaaaaggaaagagataaatcaggaatattcccatattgttgactagggtgactgattggatggtggtgttttcactgacagagaaaacacaaaattaagttcttttagccactgcttcattttgttaaacacttgtctttcccatatctgggcagcatgcaggcatcctagaaatttagacattgctctttcagtaacagggggcccttgaag

SEQ ID NO: 472576 - DNA, 612 bp, Homo sapiens
gcttatggcagcattgtttggtatttgatgggattattgctgcatttatcatcagatggcagattctctgagagctggctactcctggataccctattcacagcactgaggcaatcagctaaaaggcttccacatgacctctccatcataatagaatttacatggcaactgagctttaaaagggcgtgcaagcacttaccaagcctctatttgcatcacatttgataccttctccatgggccaaagcaagtcatatggcagaccactgattcagtgtggaagggggttgcacaaggttgtgaatatcaaaaaatgtgatttgttgagggtgatttatgtattaatccactatacgggtaatagtatctttaaaaaaagaaaacatactaccatatatgcgataaatacwgtttttaaggaattaggaacagaatttcttcctagggtaaaaagacacataatttcagtgtcagcttcctctctctctggaataactcaatcgtaatggatggaaagcaatgtttggtccatctattgctcttttccgaatagactataaacacttcttacctttttattgcaggttgtcatatggcaccaagctttgttttg

SEQ ID NO: 472577 - DNA, 383 bp, Homo sapiens
aatttggacagtcatagaatttggagctattcttgcccttcagggaatggtgtgctattatcaaagcaggtaattttcaaagggagaaaccttcataacctgaagatttaagagcaccctggcttgytgtttctgaggataattcttttctgatcagctcctctctagcctttagctttgagtgaggcaatcacactttgttgcctttattcatttggaaggttcttcctatttcaatttatgtgaacccatttaaacaacagtaaaaatggaaactcatccaaataaatttaattccaattactctgactcttttgcatcttctggctgtaatttaaagcatttttccaaacaggcatatttaaaaggtgataattcacttg

SEQ ID NO: 472578 - DNA, 600 bp, Homo sapiens
gaaacataattaacattatttccaattcaacctatcttttctctgtgttttcagaatactagcactgttgttggctgttttgtaggatccttttcttgctgcataacaaaggattcaatttgttcatttagtcaatraacagttactgagcatctgctatctttcaggcccatgctaagtcttggtgacagaaatattgaaaagatatggtctcacctcccatctctctttatgtaatcagatttgatgtaagaaaacaaaaggaaggaatgaaatgagaaaaggaagttatacaatgagaagaaaaggaaaggaaagatggcaaaataatacaaatgaaatcaacggggtttggagatgcagaggggaaaaaatgagaagagatgaaggagaaaaaaggcaagtacaagaatgggagcagaaaaagacataaaaatttagaaatatggtagtattgaaatttatatactgctatgctcatatgcatgcatataattttatgtattttctagaactcaaataacttggtaaaaagccctctcttcagttccactgatgtcagcaaaaacatttaatcttgccacttatcagattttctgt

SEQ ID NO: 472579 - DNA, 627 bp, Homo sapiens
gatattattggaatcaaggacacaaagcttgagacaagaatcacagagacttatctcaagtgtggacagtggctgtggaaaggagagaaaggtttgagactgagttaggggatacaatggacataattatttcctttccataatggtgacaaaatgagacacagtgtgtaagcgtggactgtatgtaattttaactatgagaaagtcttcattaagtgttacgtgttccaagaagcagttggcttcctagaacaatagccggcaaggctaaaaattagatttttgtacttgacaaattcataaaagagaaatgatggattgtgaatttggattttcaatgcatctgtgaasaattttcttttccttttttttttttaacgtctgactaaaattattcattattctgaagatgaaaaacatcttgtcagcgtgtggaggaaaattacctcccagagaattctggaacattcttaagaaattttcttaagatcaactccatatgcactataacttcatgtgatggaagagcacagtacaggagaaaagtagaggtcatgttatttaagagtcatagaaacaatggctgacatgacaattcccattgagctaacaggtgaatatttttta

SEQ ID NO: 472580 - DNA, 627 bp, Homo sapiens
gatattattggaatcaaggacacaaagcttgagacaagaatcacagagacttatctcaagtgtggacagtggctgtggaaaggagagaaaggtttgagactgagttaggggatacaatggacataattatttcctttccataatggtgacaaaatgagacacagtgtgtaagcgtggactgtatgtaattttaactatgagaaagtcttcattaagtgttacgtgttccaagaagcagttggcttcctagaacaatagccggcaaggctaaaaattagatttttgtacttgacaaattcataaaagagaaatgatggattgtgaatttggattttcaatgcatctgtgaacaattttcttttccttttttttttttaacgtctgactaaaattattcattattctgaagatgaaaaacatcttgtcagcgtgtggaggaaaattacctcccagagaattctggaacattcttaagaaattttcttaagatcaactccatatgcactataacttcatgtgatggaagagcacagtayaggagaaaagtagaggtcatgttatttaagagtcatagaaacaatggctgacatgacaattcccattgagctaacaggtgaatatttttta

SEQ ID NO: 472581 - DNA, 655 bp, Homo sapiens
gataatcatggcagcaaaagagcaaaccagaatcccaaagctaaaccacacttattcttgtatctagtggtgccacgccagcttcctaaaatgagacctgttactttacaggctgtacccattatcacagagctcaaagtcagcttttctactgttcactcttaaatatgaatgtaccactagaagtcagacacttgaacctacgacatcgtggtggatagtgtccaaagatggtctccattgatacctgtcttcctgtgggctcatgctagtcttttaatcaagaagtggagtcccattcccttcccttttaatctgggctggacttcatggcctgtttgaccaatagagtgccgcaaaagtgtcattctggtacttctgagttacagagaatatgtggaccttttgcttggggctcttgacacacacactttggggtaagccatccgccaggtaagaagtttaattattctgataatctagtctgccatgctgtgagggaactcraagtagccatgtagagggtctgtgtggagattaattcctgaattcctggccatagtcaggtgttgcagctctcccagctcaggactcagatatggggaggaagaaaccaggcttaacttcataaccagcaaattctttataggacccc

SEQ ID NO: 472582 - DNA, 632 bp, Homo sapiens
tccctgttccaaagcaagctaaagccctctagctgtgttaataccttgtggccccctctttccaccacctgggttctgctatttttactttggttggttgaatgattcccaagtaacctgccaaggtaaataagtaccaactctactcatgaatatttaagcccaagtggatatactgggtagctttgtggctagyattggatttccatataaaccataaggaagctgttgtgactatggttgagccgagccttgaactcttcaacagtgcagtgatccctagccaagctgcagagtctggagactgcattctgtgtgccagggtccacctgtggtataaattgcatggatcctttgtcacttccctgttctgagactgctgggctcagacactgccccattgtctctgcagcgtctctgcctccacaacaataagagagaagaaactcctgggccatttctcacccctacctgccaccacctttgttaacaaaaaccaacatgtctgttaaggttataaatggttttatatttgcaccagaaaattattttctttgctattattcttttctgttgaatgttttcttagacgttttccagcgttcaatgcagtggtagacaaagaagtagga

SEQ ID NO: 472583 - DNA, 628 bp, Homo sapiens
tattttcaaaaataaaagcctggtaagctttgtgattgttttaacagaactaagggacataattaagaacattttaagctattctgaggtggataccgcagaagcagaatctgtttgtggacagatagaacaataaaagggtagttctctgcttggtttgctttggattttaaccaaaactccccttagaaaactaagtcytttagaaggatttatccaagaagtatgccttgaatttattatatcctttcatgttcagaaactgtttcagataactacatattactcacagtccatagcatcatgaaggtaattcctgaatgtgccaatatgttgacatcttccagaattatgccagttccccgaaaaaagtacagctatctatgtttacagtttttgtcctatactcccttatagacttataatcctgaagagagcgacaaggaagaggacactagaaaacaatcttttcaacgaaagtagcatatatctaggactttgaatggcaagcagcttagagcaaaaaaccaagtgctgaagatatagtttaaaaaaaaggtagaaacatgcttagcaaagagtcccccacaaaacttgtaatctgcataaattgtcaaggcacagctgt

SEQ ID NO: 472584 - DNA, 387 bp, Homo sapiens
gaattacaaattcccttggaagcatatgcattataaattagctggactaattctcatgattagtattcagttgctcagtatacagtgaggcccactaaagatccctgaagttaacaggtggaagagaaatggatccagtctatgaaaaaggtgcaggtttctctgaaaatcatccatgactgaaggactagaggaattttgtatttctgattatttgacccagtacctcaacccctatgactgccagtgctaatygtgtcattacagaaattgtatcctggaaagccactgggatttttgttctgtgatctcatctgatgcaattacttaccagcttctaggagtaaattagcttagttttctgtttttctacttggctgatttaca

SEQ ID NO: 472585 - DNA, 593 bp, Homo sapiens
tgcgaaatcagtgctgaaagagcccctctttcacttagaggctataatgttcttcttctcccccaaataacattttcttctgatagccaattttcacaaacaaagstcaaatgagagacaaagataaacctggattccacacttttccatttgttattaagtatttccatttccattaagtattcttaatgataagaaggtctgagtctgtgaaccaaggtgcttcttctgagtagaaagttacccagaaaggcagatcttttctcagcaggttatatgaaatgtgcagaattagaatgaatgtgagggaatatttgcctcgtgtcagagatcaccaataagctactgatggctctgaaccaaagaatgaatgtgtgtgtgtgtgtttgtgtggtcttttatttttctaaactaatgtatttttgcagtattagacttcatgacaaagttccttctctgtaccctatttttcttttttttttttttgagatcgagtctcactctgtcgcccaggctggagtgcagcggtgcaatctcagcttactgcaagctccacctcccggactcatgccattctcctgcctcagcctggg

SEQ ID NO: 472586 - DNA, 612 bp, Homo sapiens
gtgaagcacggattgtcccacttctactggaagtgcctgagtgttggtggattcagagattttaatagaagacaatttgaagggaatactgcagagcacaaaaaaagctggtgcaacataaaagtcttaagcagctttgaggacccagtttaaattgggggtcacggccgggcctggtggctcacgcctgtaatttcagcactttgggagggcaagacgggtggatcacctgaggtcaggagtttgagaacagcctccaatatggtaaaaccctgtctctactaaaactacaaaatcattagccaggcattgtggcatgcgcctgcagtcccagctactcgggaggctgagatgggagaattgcttgaaccctcgaggtgkaggtagcagtgaggtggaggtagcagtgagctaagattgtagcactgcactccagcctgggcgacagagagacttggccaaaaaaaaaaagaaaaaagaaaataaataaataaatagatctggggtcacaaatatgtattccagccatcttcaagcttctcctcacttcatctggtatagatagatgggaagaaggcagacagttgggtcagcccaactagaagctgtgaa

SEQ ID NO: 472587 - DNA, 511 bp, Homo sapiens
actcttgtaaatgtggtttggtgctgggggttgggaaattccaggtgatgtagacagactacatcctgactgctggacccctctgaaacaagaaaaagctccacccactgtgtgcttaggggtcaggtacatcacctgtatgttgactgccccattggcctgccctaggaggtggagtggaaattacagaagtagggagcaggataaagttctcaattgccagatgtggaacagattgctcttgggtcttctggttaaaagattggatcaaaacgagtgaaggaggagtyatttaaggtacaatcaagaaatagaggaagtggtgagaatctcgaaaactaacagccaagctccctgtgcttcagaaaaccatacgatctcaatcacatcaccaattactcctaggctttgaaaccagattgaagactagattgctcaatagcaccactgaagtcctgtagaagcagaaacatgcatttttcgatttctcgtacattctttccctcccgaa

SEQ ID NO: 472588 - DNA, 588 bp, Homo sapiens
tgtgggcctcagtttccctatctgtagtaagaaggctaaactataaggccaaaagcacgaggctctgatcttgcaggtagaagagtttcaatgaggatgatgacagtggtgatggtggtgctgccaagcccccctcctccaactcctttacccctagggccttctttcttgaggccagaacccgractagggaggggacaggggaacagggacaatcccatggctaagtaagacaacccagaaggtgacttggctgtggctgggtgggatctcagggtctgggaacgacccctcaggatgcagtgagaagtatttgccacttggtcctgtgcacttcagaggtgccaggcactgtgctcactaagccctttcagaccttcatacccttttatcatgtaaactttttcagactcacaaagcagatgtataattagctccactttacacttgataagctaaggctcagagaagttcagtcatttgtccagcgccacacagcctggaggttgtggagccaatactcaaggcggagccgcttccttcctgaaattatactccagtgggaaggagagaggaacaacgaggcag

SEQ ID NO: 472589 - DNA, 598 bp, Homo sapiens
tgggaagctcactcatgatcacatgagtggggcttggaccagggacatggcagtccttggagtgaagtggaccagcacaagggtactgcagaggcacaacaggtgggcggcccactgttgggccaaaaggagagggtgggaacaaagggagagggtgggaacaatcaccctcaaaagtaaaagatgcttctctgggcttggatttcttcatctatgagtagatataaaagtatctgctkcataaggatgtgataggtatcaaatgagattgttcatgcaatcatcaatcaatcaatggcctaccaatcactccattgattggcatcatatgccattcagtaagctgaggagaaagagagaaatgtgttcctctccttcagatcatatatatgttagtttgtaattgtatgtgtgtggttatttgattgagagctctctcttcccaccagcctgaaagttctgtgagagcagtaacagatgtgttatagtgacatctgtatcccttgtgctcatagagtgcctgtcccataacaggtagttaaaaaatgcttgttgagtatataattaaaaatggattgatatttaagtgattgataga

SEQ ID NO: 472590 - DNA, 570 bp, Homo sapiens
tgctgttatcttctctttgctgtggttcatcttaattagaaagactattttatggtaggaggaagtatagtcccatttattttgattatactacatgagaaattctaaaatcagagggttgaccctataatttagagagaataggaattttcagaagtgaatgtgtgagactgggcacaatgccattgtaatgaagcataaggcatagacatgccacttggaaatacatataattttttatgtaatgagtctgggaagttgaggaaaacctctcaaggctttcaaaactttctcttctgtgttcaagaaatagatatgaagacatgaatyaagttactttcattcctaaggcttcagtcatctcatctgtggaaatcaggcacttggcttccacgatctctaaagtctatctaactccactatgctgtcattctaactcttgaaatttttggtaaccacagaacattctaatgaagaaacagcatattgtcccttattaccttaggggaagcccttgttcactgacagattgccatggctgattgccgctgctcttcactccaatgttat

SEQ ID NO: 472591 - DNA, 612 bp, Homo sapiens
gagattagatgacttccgtaaaattgtggagctaggatgttgctgaaccaggattcaaggctgggcagtcacttacctgtgtggtagctagtgttctatgaatctgtctctatcrtctatctaacttctgtatttccaatctatttacatcaataatttaactgttaaaggttgtgcataagcaccataaaatggcacttgagttcatgggaacagattatatttttcagagaaatcattgttagaacacccaggactgagctctaagtgactctaacagtagagactgggtagaatgatgaaactgtcaaaagaaattaaaattagtaacccagtaataagaggaaactcaggaggaagaggtggcgaggaagaggtggctgacataggggagagtcctaagacaaaatcagaggtcaatgctgcggagagttgaaccaaatgacacgagaatatttgctagattacattgtgggatgtgtccatgaccctgagaagggttttcatgaagtaggaagttgacagacaggatcaagggtggatgagagagaatgctgacttagaacagggaggcagctcttttgaatttggtgttgtgataaaagagaaaaa

SEQ ID NO: 472592 - DNA, 466 bp, Homo sapiens
ctatttacatcaataatttaactgttaaaggttgtgcataagcaccataaaatggcacttgagttcatgggaacagattatatttttcagagaaatcattgttagaacacccaggactgagctctaagtgactctaacagtasagactgggtagaatgatgaaactgtcaaaagaaattaaaattagtaacccagtaataagaggaaactcaggaggaagaggtggcgaggaagaggtggctgacataggggagagtcctaagacaaaatcagaggtcaatgctgcggagagttgaaccaaatgacacgagaatatttgctagattacattgtgggatgtgtccatgaccctgagaagggttttcatgaagtaggaagttgacagacaggatcaagggtggatgagagagaatgctgacttagaacagggaggcagctcttttgaatttggtgttgtgataaaaga

SEQ ID NO: 472593 - DNA, 612 bp, Homo sapiens
gagattagatgacttccgtaaaattgtggagctaggatgttgctgaaccaggattcaaggctgggcagtcacttacctgtgtggtagctagtgttctatgaatctgtctctatcgtctatctaacttctgtatttccaatctatttacatcaataatttaactgttaaaggttgtgcataagcaccataaaatggcacttgagttcatgggaacagattatatttttcagagaaatcattgttagaacacccaggactgagctctaagtgactctaacagtagagactgggtagaatgatgaaactrtcaaaagaaattaaaattagtaacccagtaataagaggaaactcaggaggaagaggtggcgaggaagaggtggctgacataggggagagtcctaagacaaaatcagaggtcaatgctgcggagagttgaaccaaatgacacgagaatatttgctagattacattgtgggatgtgtccatgaccctgagaagggttttcatgaagtaggaagttgacagacaggatcaagggtggatgagagagaatgctgacttagaacagggaggcagctcttttgaatttggtgttgtgataaaagagaaaaa

SEQ ID NO: 472594 - DNA, 596 bp, Homo sapiens
gtattgttattgttttttccagtttatattttaatcaagaaataattcccagactttggtatatttctcatgccccatgacttatctgaacacattgttacggtataaatgcatgtgtctcatccaaatctctattgttgtaaccaaagacccaatttgataatattaagaggtagggactttagggagtgattatgtcatgaaggctccatctgccctcatgaatagtattaaaatcctaattttagggctcaagagaactagctaagcccttttgcccttctgccttttccaccatgtcaggatatagcattagtcccctctggaggccactgcattcaaagcatcatcttagaaccagagactgggttctccccagacattaaacctgcaggttccttgatcttggccttctcagcctccagaaatgtgagaaaataaatttccattcttatataaaatatacagcctccggtattttgttttagcagcacaaatggtctcatacacacattggcaatgtaatgaaactcagaaaaactctaggctctccactgagtmtaagttccatttcattttggcttcctcacttcagc

SEQ ID NO: 472595 - DNA, 349 bp, Homo sapiens
gcattcttaaaattttataatgtataacacttataagttataatagatgttaatcattatctgttacatgctacttcattttctatgaaaataaaagttctcatctatttgcaaatacttaaatatggaggcagttctaggmaaaactgtaaaatatataaaatatatcctcagtcccctctctcctactttccttaaccctgtcttttttccagggtgccaatgcaaactttcgtgtccaaatccttctgtctttctcatctcctcatgattaaaatatacttccaggaagtgaagtggaatgttactccatttatatgtgactgtgaatgtaagccacagtatcaac

SEQ ID NO: 472596 - DNA, 578 bp, Homo sapiens
cacccactgtagttttcagaggagtagacagtgctgtgggggaggtggggtccagcacagatctcaggtaagcattcagtgtgaaggagggaccaggagcgcccatggttggtagaaaattccaagctgacactaataaaaccagaacaagcacacacaaaaggtggggagggtaaagataacaaatcaaatgaaattttcaactctggttaagtacattaaacaactgtaaaaacagtgtaaaattttttaaagatgctgtttcctaaatgattgttttctctttcactaaagtctgaccagctttcaaagggcaatcagttaaattactgctataaayaaactatgtttcaaagacaacaaatggtaacttgagtttgtgttcttgagtttgataggtggcaaggcaattaccatgtctcacactgtcacttcatcctgtgaatgtgacaccgacaaaattcctagaaaaaatatgagcaacacttgggcaagtgaaactgagaagtcatagctcttgacatgctaattgatttccatgcttattattagcaggtcaccagccgacaggaggtcaa

SEQ ID NO: 472597 - DNA, 660 bp, Homo sapiens
tgtttaaagattatgtttcaaagtttaacagatcacagaaactggtacatccttaaccaaagaaattccttccctatccaggaagtttgcctaccaaaggctgtagtgtaattttttgaggtatgcacatctaagtaacaaggaggcagagagcacaaccagcttatcttgccagatgatgcaaagtaaactggtgataaattaggtgaaagatgccacaaacagaatgacctccaagaactttatgaataagacacgtctatagattgttaagcttttaccatawaagtcagaatgagataggttatgttgcggcaacaaacaactctcaatctctatggtttaacctagaaaaagtttatttcttgcttattttatatgtccagtgtaggttggcaagggagtctgcttattgtagaccctcattgagatgtaagattcatctcaatacaagcttccacggagccagaaagatggcaaagtgtacatgggctcttaaagccatatgtctcattttcattcacatttcatttagacatgccaaactttacaggctgtggggggaaagtataatcctccatttttctagggagaaagaaagctggaaatattgttgaatggcaataatgagcatccaaaccatatgctattctctctgag

SEQ ID NO: 472598 - DNA, 619 bp, Homo sapiens
ctgcttgggaggctgaggcaggtgaatcacttgaacccgggaaatgaaggctgcaatgagccaaggtcgcgccactgcactccagcctgggtgacagagcaagactctgtctcaaaaaaaaaaaaaaaaaaatacactatcagtagtattttaccatcataattttgaaagtgtgcttcacatgtcaatgagtaaaaaacaatttttatgtgagggaaataaaataatgaaaaaataaacctcagtagctctgctttgagtatgaccagtatttccattgtttgaagtgctgttttgcatacatttgacatataygcttggaataccattgaaattaaataaaagtcttgattatattcccagcagtagacataaaaaagtagaatgctagagaaagtagcaacttgttatacaaagcattagtagagtatctaggaaatgtctcacagttggaaacagaaaaatctgtggaaatcaaatttcaagcattgtattccaactgacataataatgcatccttcaaaataatcaaataggcatttttacataatgcaggaattcaatcttcaactaaaggcataaaaataactctaggttggtatctaaccaattgtttttg

SEQ ID NO: 472599 - DNA, 611 bp, Homo sapiens
caactaggcttcatttaaattgtttgctttaaagatacaccagtctcctgggcatcaggggagaaagcctaacagtgcctggtagtacatgggctgaagggtctgcaaatgacagagccaacaatgctttctcactcacaccatgaacagtatttccccacctgagcatttctgaaataacttaagattatttttacaatcagcatcttgtaaatttctcccttctgagatggtttcgtgtcctcataattctatagagaaacagaaggaaatgctgtgttttataaatattgcctgcacctaatgtttgcatgattacaaatgtaactacgaaattggctgaagagaggaagtattcaatgctgaggagagtcatgtgctctgtgagctattttggaatagctgataacagattttaaaggtgccaagacaccaagaaagaaasaagataaaaattacgtaaaataatagattaaataagcaaaatgaaggcagttaaacaatgataaccaaatttttgcttagcaactgtatctgttcaactggtagaataggaatctagagttatttggtgtctcccatttcctattgcaaatgctttggtgtggact

SEQ ID NO: 472600 - DNA, 606 bp, Homo sapiens
gcactggcaggggttggtgatatggggtgtggtttttccctgggtgtttggcagcaatagggaggatactgtcaaaaagcctttctgttgtagcccaccctttccccaagccaaaggcttggggaaaaaggtttttcttaaagcttttttttttttttttttggtctgtgcctcttggcatttccagtttaaaggttttgtagcaccstgtatgagacacaggcaagctgttttactatgctttgccttattgagctttgcagatacatgtattgtgtttcgccacgttggccaggctggtcttgaatgaacggccttgagtgatctgcctgccttggcctcccacagtgctgggattataggtgtgagctaccgcacccagcctcacttaatccttgtaataactttcacgtgggtatgattttcatggacattttccatgtaaggcaagagacactgcatttacatgaacttcccaaggtcacatagctcataaatactaggtcggctgcgcactaaccttccaaaaaattcaaataaataaatagtaggtctgggattcaaaagctggctgtttggctcttggagtcctcattcttacatacc

SEQ ID NO: 472601 - DNA, 606 bp, Homo sapiens
gcactggcaggggttggtgatatggggtgtggtttttccctgggtgtttggcagcaatagggaggatactgtcaaaaagcctttctgttgtagcccaccctttccccaagccaaaggcttggggaaaaaggtttttcttaaagcttttttttttttttttttggtctgtgcctcttggcatttccagtttaaaggttttgtagcaccgtgtatgagacacaggcaagctgttttactatgctttgccttattgagctttgcagatacatgtattgtgtttcgccacgttggccaggctggtcttgaatgaacggccttgagtgatytgcctgccttggcctcccacagtgctgggattataggtgtgagctaccgcacccagcctcacttaatccttgtaataactttcacgtgggtatgattttcatggacattttccatgtaaggcaagagacactgcatttacatgaacttcccaaggtcacatagctcataaatactaggtcggctgcgcactaaccttccaaaaaattcaaataaataaatagtaggtctgggattcaaaagctggctgtttggctcttggagtcctcattcttacatacc

SEQ ID NO: 472602 - DNA, 668 bp, Homo sapiens
cacacagatcttccacactagactgtgaactccttgacagcagaagcaatgtttattcacttctgtacccccgtgttcaacactgtgcctgggacctacctgcatgcaatacatgtttttgactaagtagctcaaagccaagtaatttccctttggaactccaaatttactttctcaccactcccctttttagttacctgctaaagctatagggaaaattgctcttgaaagtaggtcartggaaaggcaaattatccaagaaaaacctgtgagttcacatacaggaagatcgctgggtgctttggtaggttttaggtggtgagaaaggagtttacacagtaatgtgcagaagccatgagtgcacagtggccaggggaataacagggctactcattcacagttcttcctgcctaaagttctgaatcctcctccatggttctccaacactgcaaacacacagtttctttaactaaggagttggcgggtgaagtcacatttctttttgtgatctactctaaaaccaactggccattaactcttttaagtagcaacctgttctgccttatgtgaaaccatttttttttaagtgcaatttactggtgttcatgaacagatcggttttatatttatccttaacgttaaatgatgtcattaagtcctcctaagtg

SEQ ID NO: 472603 - DNA, 668 bp, Homo sapiens
cacacagatcttccacactagactgtgaactccttgacagcagaagcaatgtttattcacttctgtacccccgtgttcaacactgtgcctgggacctacctgcatgcaatacatgtttttgactaagtagctcaaagccaagtaatttccctttggaactccaaatttactttctcaccactcccctttttagttacctgctaaagctatagggaaaattgctcttgaaagtaggtcaatggaaaggcaaattatccaagaaaaacctgtgagttcacatacaggaagatcgctgggtgctttggtaggttttaggtggtgagaaaggagtttacacagtaatgtgcagaagccatgagtgcacagtggccaggggaataacagggctactcattcacagttcttcctgcctaaagttctgaatcctcctccatggttctccaacactgcaaacacacagtttctttaactaaggagttggcgggtgaagtcacatttctttttgtgatctactctaaaaccaactggccattaactcttttaagtagcaacctgttctgccttatgtgaaaccatttttttttaagtgcaatttactggtgttcatgaacagatcggttttatatttatccttaackttaaatgatgtcattaagtcctcctaagtg

SEQ ID NO: 472604 - DNA, 596 bp, Homo sapiens
ggctcatttccaggactgcgtgagcctgctttgtttcaatgcagcgcacaagagcagggattttattagacatttcaaaggggctgcttagctagggggagcagacgaggagccctctaagtgtatgtgtgaatacactgcacatgtctgactgactacaattccaycactccaaggtgcctagggcaaaaggaactaggcaaagagcttaaggattactatgcacatagaatctcattatactgatttaacaggggaaaataaaaagaaatagcttctgcatcccctcctctggagccgtgaaattcctggcttttcaaagaaaaacagtagttcctagaagaatacaaaatgttgccatttcaagtgcccactatagttcaaggccactgtgtacaaatgttccaatataccatcagtcaagggcaacaagcatggagggaacctgtaagagatcccaggaaaagcactgaatccgctgatccaactgtgtcctgtagaaacaagggtacaacaaggaaagatgatatttagctaatattttcttgttcagaaaactctctcacacacattatttcatttatttcttaagtgag

SEQ ID NO: 472605 - DNA, 544 bp, Homo sapiens
ctgaaattgccaccactagaaaccagacataccataatggttttccaaacaaaagtgctgtctgttagggctgccataacaaaatactatggatttggtgtctcaaacaacagaaaattattttcttactattatggagcctgacttaagcaaggtgccatgatggttggttacaggggaggcctctcttctggtttgtcgatggctgacctcttatcctcagggcctcctctctgtgcatgtgtggaaagggagacagagatcccaggtggttctcccttttctattggacctattggattagagtcccatccttatgacttcccttagcctttattacctcctgaaaggtcctgtctcccattataggcatactgggagttgaagcttcaacataggaatgtggagggcacaattctattcataacaagtatggatatgaattgatcaggtctccagggacaacaattcataaatcaacataagctgaaaaatgactgaaagggagcattragaactgagaccatctgtgtcaacagggctg

SEQ ID NO: 472606 - DNA, 521 bp, Homo sapiens
ggcttttgctctcctagcttgccttcctagggcactgcctgcccttaccctaccgacacayagagacacatagaacggactctcagagaggctgtacaatgcagtacgtgatactccagatagtcctccctttagtctacactgtgagccatgcccagctccctatatgacaataccttggaaaacctctgacaagggcctacttacctgctcttctcaggggagttcgcatttggcagaaaaatcctcaaactttaagtttgtcagtactttataaagtactgagaaatggatatcagtgggtgattttcagtgaactgaataaaggaagtactcaaaagaattgctgtgagccaaactggacctccctctgaatgctgagggagataaggtgggtggacacctccgtgcctccttgcaggaaaaagcacatccttctctttttgtcctctgagatattcctttattcaatgtgacatttctggtgatatgctatacttccttttatctcataactccat

SEQ ID NO: 472607 - DNA, 521 bp, Homo sapiens
ggcttttgctctcctagcttgccttcctagggcactgcctgcccttaccctaccgacacacagagacacatagawcggactctcagagaggctgtacaatgcagtacgtgatactccagatagtcctccctttagtctacactgtgagccatgcccagctccctatatgacaataccttggaaaacctctgacaagggcctacttacctgctcttctcaggggagttcgcatttggcagaaaaatcctcaaactttaagtttgtcagtactttataaagtactgagaaatggatatcagtgggtgattttcagtgaactgaataaaggaagtactcaaaagaattgctgtgagccaaactggacctccctctgaatgctgagggagataaggtgggtggacacctccgtgcctccttgcaggaaaaagcacatccttctctttttgtcctctgagatattcctttattcaatgtgacatttctggtgatatgctatacttccttttatctcataactccat

SEQ ID NO: 472608 - DNA, 521 bp, Homo sapiens
ggcttttgctctcctagcttgccttcctagggcactgcctgcccttaccctaccgacacacagagacacatagaacggactctcagagaggctgtacaatgcagtacgtgatactccagatagtcctccctttagtctacactgtgagccatgcccagctccctatatgacaataccttggaaaacctctgacaagggcctacttacctgctcttctcaggggagttcgcatttggcagaaaaatcctcaaactttaagtttgtcagtactttataaagtactgagaaatggatatcagtgggtgattttcagtgaactgaataaaggaagtactcaaaagaattgctgtgagccaaactggacctccctctgaaygctgagggagataaggtgggtggacacctccgtgcctccttgcaggaaaaagcacatccttctctttttgtcctctgagatattcctttattcaatgtgacatttctggtgatatgctatacttccttttatctcataactccat

SEQ ID NO: 472609 - DNA, 557 bp, Homo sapiens
ggaaatgatagctttggtccggaaggaaaaaccctgcggtaaacacarcatccaccataggttttcttgttttctttggcgtttgatgaaaacctattcacatcacacatgattaacaatatcacaaaaagctactcccagttaaagaactacagaaaactgttgcttatactccatttaaaattgcacagatctcagtttcttgtcaaaccaacaaaaaacaatgcaaagaaaatgcacagaattgtagatgaaagtaaattcattaggcttcttactgccattattacttaaacatttcagttgctaagtttaaacattaggaaacaataaaaagaagagaagtctagaacacaatgcaaaccaaagtaaggacacaataaatgcaaatgtaaaaatcaatgatgtagaagagaggaaaacatagagaagatgtcagtagttaaaagacagagaaaccctgtgctaaggttatgtactatacgccccatttacatgaaattctcaaaaaggcaaattatagtgacaaagggaatcagcggtgacctcgggccatg

SEQ ID NO: 472610 - DNA, 616 bp, Homo sapiens
aagtagacatatgaattactttgaagttaatatttatttacttaacttctattcctattttgtattaagcacttaacatctaaaactagttgctgaatcagagaagcagcgttggaagaagagtaccagcaaaarcatggacactccttatggaattaggctctaccaattttaaaaatcatgtagatagaaatcattactgaaaatgatagtactaatatttaaaaagtcttctttaaagctagagtcagggaactgaagctaatgtatatgaagtctatgaatatatgttgagttttgtagtgtcctaggcaccatcctagttaatggagatccggaggtgatcaacataagcatcgtccatgctttccagtcgcaaggaatagtgttagaaaattaaaggttagaaaactaaagctgaaatattcaagctcccataaaagctgaaatataatagtgaggggtactcatcaaagtcaataaaaattcacaaatctcatcatataacttttaaaaataattagattagtttttaggagacatttgtcaagggtaatgtgagtttgcttatatggtaaacagtatttaaaggcctaatgttattctctgtattttc

SEQ ID NO: 472611 - DNA, 225 bp, Homo sapiens
acaacatccttcagagagtcagtgcattgcaatgtaatggtattactttatagataatgttatcttctcatttcttttaggctttcagtgtaatgaaagtacacatttttctgaattattacagtattgggcttcatgaagtttggcggcagtgagagttgtttgatttctcaaaaaytttttccagtaattttcatagtatttgtattctatgaaggaaatata

SEQ ID NO: 472612 - DNA, 335 bp, Homo sapiens
ctcaagaagggaactggctgacttctagttgggatctccaaactaggtcaggrtagtgtaatttttaaaaaaacttatataatgtaatacagatacaaatggcaaaaaggcatacattttactcttgaactgatctctctccttcacttccagcaccattttcataccatagacttgtgaatagttgttcttagagtgtcctatactctggagttggataattactacataattttatcattgagtatctttctgcatctttatattatctatatacaggtcgtatacacagagcaggattttacatcattatcccacctgatgacctctgtttt

SEQ ID NO: 472613 - DNA, 335 bp, Homo sapiens
ctcaagaagggaactggctgacttctagttgggatctccaaactaggtcaggatagtgtaatttttaaaaaaacttatataatgtaatacagatacaaatggcaaaaaggcatacattttactcttgaactgatctctctccttcacttccagcaccattttcataccatagacttgtgaatagttgttcttagagtgtcctatactctggagttggataattactacataattttatcattgagtatctttctgcmtctttatattatctatatacaggtcgtatacacagagcaggattttacatcattatcccacctgatgacctctgtttt

SEQ ID NO: 472614 - DNA, 646 bp, Homo sapiens
ctggttgctttgtttatcctgactatgtgatatcacagtgataaaagtaagaagggctctactaaagttaatgctgatggttttagaaaaaggaaaatggggccgggcgcagtgtctcaggcctgtaattccagcactttgggaggccgaggtgggcggatcacgaggtcaggagatcgagaccattctggctaacacggtgaaaccccgtctccactaaaaatacaaaaaattaggcaggcgtggtggcgggcgcccgtagtcccagctactcgggaggctgaggcaggagaatggcgggaacccgggaggtggagcttgtagtgagccgagatcgcgccaccgcactccagcaggtgctacagagcaagactctgtcacaaaaaaaaaaaaaaaaagaaaaaagaaaaaggaaaatggactaatgttaaacacaggctgaatctgctcaatgtttagttttattcccagccaaacacttaatagctatttaaaattcacttttattatcaaaattctgtctataacatatatatcatatatttcataatttataycatacattttcagaaacatatacaccatatattttaggaaatatatgatatatatttcttatcacagtagactatggcatgtgtttttg

SEQ ID NO: 472615 - DNA, 604 bp, Homo sapiens
ttctttatgcaaatattcctctttggaaaattctattcattgttgttgaaaaataaacaacatgttttgctctccactgatttctgcatgtcaagcatcaagtgtgagtgacaggttttagatttaacaaatcgttctgagtgcatcagcctttgctgcagttatgcgagtttcatattcatcacacatctccaaaatacttccctgcttagtaaaacactctgaggtatagtatatgaaaagcactatataatccccagcagagtgcagaatgaaaaatcctgtatttaaagattaatgattcttttagctgcacaactgacttatggaactgtctattttttaagtatggagctatgactgagatgcttatattaaacagayagaaaaggtcttaactgagatcgctactgagcaggaaaagcatccagtttcctgctcagtagcgatttacttgcaccatataggacttggaatcatgaattctaatgagaacaaattcacatctggtcaaatctcaattatctgaatgtggcttatccactctgctgagtatctatagaagcacaaaatttaaactgttattttctctgccatcctactt

SEQ ID NO: 472616 - DNA, 633 bp, Homo sapiens
accttggatcactgcaacctctgcctcctgggttcaagcaattctcttccctcagtctcttgagtagctgggatagcaggcacctgctaccatgcccagctaatttttgtatttttagtagagacgccattttgccatgttggccaggctggtcttgaactcctgacctcaggtgatttgcacacctcagcctcccaaagtgctgggattacaggtgtgagccaccacgcctggcccatcttttttctttaaatattatgtaccttatttatgtattgttcatttttaattttattgttctaaacagatttatttatataatcagtctgtaataattttattatctaatattcttgggagtctaagtctatgatttgtttgttctatgactcttcatcatggtggcttattttgtggtatgttttgtaattttgaattatgaactcaggtttggtgaaatttttatctgtgggaatccccttcagcctggttaaaaatgtgascttcaaggaggttttgcctttgcatctgctcaatccagaaagtatttaaaggttgatttcttaattaaacaattcctggcatatacaaattatgtaaattctaacatcagaataaggtgagaagagcatg

SEQ ID NO: 472617 - DNA, 633 bp, Homo sapiens
accttggatcactgcaacctctgcctcctgggttcaagcaattctcttccctcagtctcttgagtagctgggatagcaggcacctgctaccatgcccagctaatttttgtatttttagtagagacgccattttgccatgttggccaggctggtcttgaactcctgacctcaggtgatttgcacacctcagcctcccaaagtgctgggattacaggtgtgagccaccacgcctggcccatcttttttctttaaatattatgtaccttatttatgtattgttcatttttaattttattgttctaaacagatttatttatataatcagtctgtaataattttattatctaatattcttgggagtctaagtctatgatttgtttgttctatgactcttcatcatggtggcttattttgtggtatgttttgtaattttgaattatgaactcaggtttggtgaaatttttatctgtgggaatccccttcagcctggttaaaaatgtgagcttcaaggaggttttgcctttgcatctgctcaatccagaaagtatttaaaggytgatttcttaattaaacaattcctggcatatacaaattatgtaaattctaacatcagaataaggtgagaagagcatg

SEQ ID NO: 472618 - DNA, 633 bp, Homo sapiens
accttggatcactgcaacctctgcctcctgggttcaagcaattctcttccctcagtctcttgagtagctgggatagcaggcacctgctaccatgcccagctaatttttgtatttttagtagagacgccattttgccatgttggccaggctggtcttgaactcctgacctcaggtgatttgcacacctcagcctcccaaagtgctgggattacaggtgtgagccaccacgcctggcccatcttttttctttaaatattatgtaccttatttatgtattgttcatttttaattttattgttctaaacagatttatttatataatcagtctgtaataattttattatctaatattcttgggagtctaagtctatgatttgtttgttctatgactcttcatcatggtggcttattttgtggtatgttttgtaattttgaattatgaactcaggtttggtgaaatttttatctgtgggaatccccttcagcctggttaaaaatgtgagcttcaaggaggttttgcctttgcatctgctcaatccagaaagtatttaaaggttgatttcttaaytaaacaattcctggcatatacaaattatgtaaattctaacatcagaataaggtgagaagagcatg

SEQ ID NO: 472619 - DNA, 667 bp, Homo sapiens
ctgtgaaggttaaaagtgaaagtcttaagagcggagctcgaaaaaaatgtaacattagcttactactatttctctcctggaattctaaatgtaaccagcacatcgaaccagagtattcactaggtgtaaggatcacattgtttggtcttctgatattccttgcaatgaattccatgcactgggtttttctctgccccaataaaaagctgggcagtttcttggcttttctggccattcttaagtaacacacagtctcctgctagtcattagaatgtcagttccatctagaagtcgaagtttacagcttcattcagayaaccagcccctcctcctcccagcccaggcctgtgcaggaagcagactgcacttgagctggagatggtactgctcctcttctgctctacttccctctcatctgttcccacttaacaccccaccccaaacacgcgcgcacacgcgcgtgcacaaacacacacacacaccccctttaggatctactttagagctgcaggaagagtgaaaatttgagctggggatgttccaatttgatcagcagatatttgcactgactcttttttgcagaaggatttctagattctttggagaaatcttcccccgtccctgaggatttcttgcctgtcgttcccatcatatggacaaatgccag

SEQ ID NO: 472620 - DNA, 235 bp, Homo sapiens
ggaagaagcccggaatgcctagactgatttgcttcaaaacgaacaaaagcaagttgctaaagaaytcacagacctggctcccagtccccgaagtgaaactaggtttggacctcttagccacctagtaactgcagaagccttgccacagggagccattggtccaggggcagtgcccagagagaggcaatgttccaatggaacctattaccacaagtatcaaaaacaaatcaaagcc

SEQ ID NO: 472621 - DNA, 218 bp, Homo sapiens
gctggggctgggcatggaggcgcagccgcgagagagtgctgggcctggagagtaggctgggaggcagccaccgggccgtggtggtggcttgccaacttgggcctgcagaggctgccacgagggaaaagccgggcctytgaaagaggccgttcagagggatgagccgggcctaaagaggtcatcgggatgcaggagccgggcctgcggaggccgccaaa

SEQ ID NO: 472622 - DNA, 218 bp, Homo sapiens
gctggggctgggcatggaggcgcagccgcgagagagtgctgggcctggagagtaggctgggaggcagccaccgggccgtggtggtggcttgccaacttgggcctgcagaggctgccacgagggaaaagccgggcctctgaaagaggccgttcagagggatgagccrggcctaaagaggtcatcgggatgcaggagccgggcctgcggaggccgccaaa

SEQ ID NO: 472623 - DNA, 627 bp, Homo sapiens
gtgtggcggggctgtggcaagagcctggtctagttcttgtttgctgtttggattgatactgtgtttggccccatgagctctgccttgtctcttgttccttttgctgaaggtataaagaagaaactcagagattaaagactctttcagggcagaaggctcacacaggcttccagaacctcctcggagcgaytgtagggactgcctgacccggaagagagttgtcagtcaagaccgccagagttttcccatcagagtatttggcatagcagaggtggctcccaaactgtgccagggcactgcagcaaactcacaagtgatcattctcaatgcggcggacgctcaagtctgttgaactccatgcgaagtgctagcttgggacagttcacggttccaacgtgagatccttgctgcattccttcttaggattttacatctttgcgaagctgggtttgcagtggttgttcagacctaactatacgtggaactgttaggcatttttttttggcctacggataccattaaaaatttgctgagataccagggactccacaaacgaaggacatttgggatctgtccagacaggtacactggaagcccaatgtgtgttttatttgttaattgattgat

SEQ ID NO: 472624 - DNA, 627 bp, Homo sapiens
gtgtggcggggctgtggcaagagcctggtctagttcttgtttgctgtttggattgatactgtgtttggccccatgagctctgccttgtctcttgttccttttgctgaaggtataaagaagaaactcagagattaaagactctttcagggcagaaggctcacacaggcttccagaacctcctcggagcgattgtagggactgcctgacccggaagagagttgtcagtcaagaccgccagagttttcccatcagagtatttggcatagcagaggtggctcccaaactgtgccagggcactgcagcaaactcacaagtgatcattctcaatgcggcggacgctcaagtctgttgaactccatgcgaagtgctagcttgggacagttcacrgttccaacgtgagatccttgctgcattccttcttaggattttacatctttgcgaagctgggtttgcagtggttgttcagacctaactatacgtggaactgttaggcatttttttttggcctacggataccattaaaaatttgctgagataccagggactccacaaacgaaggacatttgggatctgtccagacaggtacactggaagcccaatgtgtgttttatttgttaattgattgat

SEQ ID NO: 472625 - DNA, 537 bp, Homo sapiens
gaagtttgagtgacagttaaagcaaaccattcaagtctggatgtggtggctcacacctaaaatcccagcaatttaagaggtgggtggatcacttgagatcaggagttcaagaccagcctgaccagcatagtgaaatactgtctctactaaaaatacacaagcatggtggagtgcacctgtaatcccagatacttgggaggctgaagtaggagaatcacttgaacctgggaggcagaggttgcagtgagccgagattgcgccccacactccaacctgggtgacagagtgaaactatgtcccaacaacaacagaacatttaaaactatgatctactagctaaagtgcttgttttcaattttatttattagatattatagatagaaaatcagaagtcttraatacaggtaaaaaaccaatgctttattgcaaaagccatatcttatcacgtgctaaggtataaggtttcagagataacaatcattagtcagtgtttaggagaccaactggactaaagaaaatacagttgcttccttttgg

SEQ ID NO: 472626 - DNA, 467 bp, Homo sapiens
tttaatgtgccaaacctatatctgcctcagagcctttgcacatatttttgcctctacttcaagggcacccctactcacacacacatagctccattgccaccacccttagctatcatttttacatagctcaaaaatcacttcttcatagcaatctcccttgacattccagataagattagtctcctgcaattgactttcatagtattacatatatgtttttcataaaagctggtttaacaagtaagtgtgtattgatccaatgataaaattccatggcaaacaatcagttcaattcagtaaacatttactgagtgcctactatatgcctgacccagtgtattgytctcacaaccagagaagacagccacatcttttaaaataaggaaaattatgctttcaaagaaaagtacaaccctcatttcaactgactgaatgtttatcaagtacttatcatatgcaagatacaa

SEQ ID NO: 472627 - DNA, 547 bp, Homo sapiens
tctggttctgcttgaccagaggctgaggataattcagctttctgatgatttttcccttcactttccaggaggctcattattgatgaagcctattaagacaactgggatggacagaggaaaagggtcagacacatatggctttcctgtttcttttygtttgaccagattcatttgaaaggatgaaatgcaatcatcattattatcatcgttatcacagaagctctcacttaatgagtaattaccctgagtctgcaccatactcagctctgcttaacatatattgtctttgattatatattaatctacaacgtgttacctttattttacagtgaaaaaaatgtgactcagaaatgattgatgttagttctgtctcccaaacatgtgcattatctgtagaagcacatagggtcaacaattatttatatttgtcaaataattagtagttgtaatgtcaactgtgagtctagatgtagaaatgctgtttaaaaaagcttggttcaaagtatgttacaaccagcaatgacaaaactaaattctctgctcttga

SEQ ID NO: 472628 - DNA, 547 bp, Homo sapiens
tctggttctgcttgaccagaggctgaggataattcagctttctgatgatttttcccttcactttccaggaggctcattattgatgaagcctattaagacaactgggatggacagaggaaaagggtcagacacatatggctttcctgtttctttttgtttgaccagattcatttgaaaggatgaaatgcaatcatcattattatcatcgttatcacagaagctctcacttaatgagtaattaccctgagtctgcaccatactcagctctgcttaacatatattgtctttgattatatattaatctacaacgtgttacctttattttacagtgaaaaaaatgtgactcagaaatgrttgatgttagttctgtctcccaaacatgtgcattatctgtagaagcacatagggtcaacaattatttatatttgtcaaataattagtagttgtaatgtcaactgtgagtctagatgtagaaatgctgtttaaaaaagcttggttcaaagtatgttacaaccagcaatgacaaaactaaattctctgctcttga

SEQ ID NO: 472629 - DNA, 605 bp, Homo sapiens
cagctgctcaggaggctgatgcgagatgattacttgagcctgggaggcggaggttgctgtgaacmaagatcgtaccagtgcactccaggctaagtgacagagggagaccctgtctcaaaataataatagtaataataaggaaaaaataaagaaagagaaaaagaaaaatttgaatttattgtgctaagttttcttcgttaaatttatataatttcttctatagtatgtactgttaaaatgctttttacaatcaaatattaattaaatgtcattacgcattagcaacttcaattagaaattgaaacaaaacacaaatgcacatgaaaagatcaattattttcagagagaatagagtacaatactgaattttcaataattcaaaatttactttggttgccaatatagagctttattttaagtcctgattataattaggcttggtttatattaaataaggtactaagaatagtgacaatctctttgccttagcactactgagatatgtaagaagtcagaattacaagagactggaagaaaaaggaaggttcttaaacaataatccctcttacacacggttttgcttgttaccctagtcaaaaaatatt

SEQ ID NO: 472630 - DNA, 605 bp, Homo sapiens
cagctgctcaggaggctgatgcgagatgattacttgagcctgggaggcggaggttgctgtgaaccaagatcgtaccagtgcactccaggctaagtgacagaggsagaccctgtctcaaaataataatagtaataataaggaaaaaataaagaaagagaaaaagaaaaatttgaatttattgtgctaagttttcttcgttaaatttatataatttcttctatagtatgtactgttaaaatgctttttacaatcaaatattaattaaatgtcattacgcattagcaacttcaattagaaattgaaacaaaacacaaatgcacatgaaaagatcaattattttcagagagaatagagtacaatactgaattttcaataattcaaaatttactttggttgccaatatagagctttattttaagtcctgattataattaggcttggtttatattaaataaggtactaagaatagtgacaatctctttgccttagcactactgagatatgtaagaagtcagaattacaagagactggaagaaaaaggaaggttcttaaacaataatccctcttacacacggttttgcttgttaccctagtcaaaaaatatt

SEQ ID NO: 472631 - DNA, 511 bp, Homo sapiens
tttgtttctagcacctacagtgcactctcaccttgcctgtgagttggataaatggctgaaagctgattctttttcaaagttgatttcaatttgggaaagaagggagtagggaacaaaatgacattgtaaactggatagcaaaataaggatattgagtacatagaggaagagctcaggcacaagaagatcttgttcctcaaaccacatgctgcctactttctcrtctagcttcacattagccctactccaatttccaaaagaacaatgattgtttcatttaatctaaccaagagcattttacacatcctaccatatacatctgtcatctcaaagaggaaagagtattttaagactacaaataaaaataatgtaatattaaattaaaatcaagtaacaaatctagcttcattgaaaatctgtctataatgatatcttattttttttaaattctgccgtggagtagtgaaaatattatcccagtcttgtgtctgtctggaaatcagtattggga

SEQ ID NO: 472632 - DNA, 641 bp, Homo sapiens
tcttggagccttgtaataaggccagtggaccatgttgttaggcacaatgtaaccgcttttattcttggccccaaacaaaggacagcaggctgatagtgttagagctaattagcacactattcatcttgccttatgcttagaatgcctaaaggaatcttcctttttctggctgatgataaaacagaatcagtctcttttgctctctgatttgagtcatttatcaatcatcattctgcagacacactgagaagcaaagaatgtatacacatatacatgtttttgttaaatgttttatggggttatatatgttttttagcaggcgtgtgtctgtgtgtgtgtgtgtgtgtgtgtgtstgtgtgtgtgcttggcaacacaatataatgaaaagaaaagtgggaggggttgaggaaagcgaagtctggaaactgagtacagctattcctggagagacagaatggtgtaaaattaaaagcatgggctctggagtcaaatttcttggcctgaatcctggctctgacacttattagccacatggccctggccaagttacttaccttccctggacctcagtcaccttatttgttgcatacaaataatagtagtacttaaaataaaaagttgttgaaagaattaaatgagt

SEQ ID NO: 472633 - DNA, 459 bp, Homo sapiens
ttacccgtgtcttttggggcatgcattccttatcccatcctactggtgtacaactggtaccagtaaagaaatatcgccttttttttttttttttttyttttgagacggagtcttgctctgtcactcaagctggagtacactggcgagatcttggctcattgcaagctccgcctcccgggttcacgccattctcctgcctccgcctcccgagtagcttggactacaggcatccggctaatttttttatttttagtagagacggggtttcaccgtgttagccaggatggtctcgatctcctgacctcgtgatccgcccgcctcggcctcccaaagtgctgggattacaggcgtgagctgccgtgcccggccaataccgcctaatattttcttgggttattcatgctgcctttatccgacccttgctttttttttttctgaatgcaaacaaattcccagatg

SEQ ID NO: 472634 - DNA, 645 bp, Homo sapiens
tgattcacactcttgttcctaccgtattttgtttctttgctctcaaagcgtgaacttgcctccctgtccagtgacaccaccttaattgaggtcaccatcattctctcacctggattatttctaaaaccctctaacagttttccactccaactcttgacctctccatgtttctgccagtgatctttctataagcaaagctgatggtgtcattgcctgcttgaagccctgcagagcttcccattcttcccaaaactgagcccaggctcctcaccggctgcgcaaagacctcctggctctgttcattctgggtatatgtctccccaagccttgtgctccatccactgtgagtcattatcatttctacaaatgcactgtaatttcttcagccactggacmttgtgtattctatcctcatatcttcagccagatcaaagtgccgtgatgggaggaaacgtgttctaagtgtaaaaagtaaagtagaggttcctcttcaaagactttccttcccatctaattaggaataaatagtaacttctcttagaaagcaaaatttattcaaagacctgtgctaacattattaaatatctgctagctgtaataaagaaatcaatatactttatattcttagctcccacaatttagcct

SEQ ID NO: 472635 - DNA, 609 bp, Homo sapiens
ctgcgcaaagacctcctggctctgttcattctgggtatatgtctccccaagccttgtgctccatccactgtgagtcattatcatttctacaaatgcactgtaatttcttcagccactggaccttgtgtattctatcctcatatcttcagccagatcaaagtgccgtgatgggaggaaacgtgttctaagtgtaaaaagtaaagtagaggttcctcttcaaagactttccttcccatctaattaggaataaatagtaacttctcttagaaagcaaaatttattcaaagacctgtgctaacattmttaaatatctgctagctgtaataaagaaatcaatatactttatattcttagctcccacaatttagcctaaatatttaccctacatgcttaaactggtccaagtaagcattaggtcatagcctgttcctcttccttatttgaaggtgtttttacctttctcagcattctgcaagttccttcctctttcctttgttctcctctgcctttgcctcttttaaaaagttctaagttgctagccaatcaggacaaatacagaatgtgaggtctcattccagccaatggaaagcggacacagcagtaaggtgg

SEQ ID NO: 472636 - DNA, 569 bp, Homo sapiens
cagtaacacactcatctacacgatactaagccttggtctccaaatgcctcattttctccctgcaactagcaaccatccattttccccttgaaagacaatgccaaaagagagacaattaggttaagagcaagaagacacatttataagtctttccttttgtacttcttgttctttctaacttaagatgttgttacccatgatttgtgcattgacaccctctggatataggaaagctctgaatataggaatgaaatagacactttgatggatgtcttcttatttttctgtcattcacttaataacgtatcttattccaagccataatagcaagcagtttttagattgtatcttgcaggggagaaaatacgttataaatggtctygctttgcatgatcttttctttggtgacatttaggagaaaagatactgactggtaaacctagaagctgaggaggagaagggtgtccttggatagaatgtggggacagggagactaatttgatagtggtttatttgtttgaaatggaaatgtgatcatttcctatgaaatacgttgaccctgcaaattc

SEQ ID NO: 472637 - DNA, 524 bp, Homo sapiens
cctgggtttctgcccccactacgtgccccgagctctgcaggctggaaggaaaaccctgccagcttcccttagggtcaagctgccgtctcttctctccatccrtaataaatccagcccttcagttaccatcttaatttatcgagtgctatgtgcctcataatgcagtatctcatttaatctgtactagacccccccccaccccacaacggaggtactatttttgtttccattttacacgttaggaaattgggtttcatataagatgagtaatttgcccagataccactggtgctaagtggtttcagtctctttgcattccactttgtggaaagttttgtttgtttgtttttgagaccaagtcttgctctgtcacccaggctggagtgcagtggcatgatctcaactcactgcaacctgtgcctctcgagttcaagcaattctcctgcctcagcctcccaagtagctgggattacaggcgtgcaccaccacacccagctaattttttgtatttttagtagagacgg

SEQ ID NO: 472638 - DNA, 506 bp, Homo sapiens
tgtggagccgaagtcaaccagccttatcccttcaggagacctgaatttataaatggtggtcaggatgaatacaaacaggattcctcccccagttcacgtttgtgacatctggagagatgtatgggtttgtcctgggtcattgtcaccacattggatgcagggggaataaaggatagggcggttgttaatacataccccacatttaaccaagaaaagccacagaggaaggtactgcttcataaaaccaatgtcccttgagcatgtcccttaatatgccacagacactatgccaagcccatcacaggcattgtctcctgtcctcaccccaccctatgggtagggcctgttagccccattttacagaggaggaggagcgctcccagagtcactgcccgcaggtaagtgggagaggctgtgcctccagcactgtcaaggacgggggcactggaccccatttctgatgaaccgaatcttygtctgagtgggccttggtagcgcagtctcac

SEQ ID NO: 472639 - DNA, 544 bp, Homo sapiens
agcaacagggacagaaaccgagggagcaggacatgcaccccatcggcctggggtggtgtggagayggcttcaaaagcaggtgacatgctgggcacggtggcactttggcaggccacggtgggaagattgcttgagctcaggagttcgagaccaggttgggcgagaccttgtttctatttaaaaaaagaagaagaaggctgggcgcagtggctcacgtctgtaatcccagcactttgggagtccgaggtgggtggatcacctgaagtcaggagttggagaccagtctggccaacaaggtgaaaacctgtctctactaaaaatacaaaaattagccaggcatcatacagacgcctgtaatcccagctactagggaggctgaggctggagaatcgcttgaacccaggaggcggaggttgcagtgagccaagatctagccattgctctctaccctgggcaacaagagtgaaactccgtctaaaaaaaaaaaaaagaaaaggagggaggaaagtagaaagaaagaaaagaaagaggaagaaagggaggg

SEQ ID NO: 472640 - DNA, 535 bp, Homo sapiens
gcaccacgcacactgcacggcgcacactgcactgcatacacacgttggttatggaggctgcttatggagcttccctgtgcagagaaatgctggcttgggttttaaatgggctacaattaacacttttagagcatttgggttttcaaagtgtcttcagagacttgatttttttaaagcctatattaggagtttttaaacatctgatgtaatagcttttttaaaaggaatcttgctgaattaaaagtgagtctaattactcggattctgaacktgtttttcaaccacatagaagtatttttaattgctctctctttttttcccctctggaactctgaaacaagttgttcttgaacttctgccagttgcggatgggccattcctttcttgctcacatgttgagccgcccggcggggcgccctcacgctgtgttctctgcggtgcaccgaggcgcacccggctgtcctgttgcgggtctcctggtcacctgtgggccatagggagagacgcgcccacacactctcgcccgcgcccagga

SEQ ID NO: 472641 - DNA, 535 bp, Homo sapiens
aactttcctgaggtctccccaaagcccagcagatgccagcatcgtgcatctggtatagcctgcaaaactgtgagtcaattatacctttcttctttataaattattcagtctcaagtatttccttatagcagtgtgagaatggactaatacagtgatgggtaccccaaatatttaacttgatcattacacattctatgcatgtaacgaacacacaaactccacaaatatgtaaaggagaaaacagaaataggtttgctaacagtgtgaacagattgcagtttactgaatttaatagaacaattttttaatacagaggamttgttaacatacaataaaccaaaatcaaatataaacccttgtgaatccattcattcattaaaacagaaccttggagtttgcacgatgaatacacaacacattgctaatctcactagtgttttgtgtaaacacgaaggtgacaacggtttgaatgaatactatcactcagacttggcacagattccttctggccttgcccccattcgcctgagtaatg

SEQ ID NO: 472642 - DNA, 580 bp, Homo sapiens
aggaaaggaaggaaacagaatcatcttcggtcctctaaaaagtcaattaccattggaaaatgcgaaacagaatatgtagagattctcttctattccactgagcatgcataaatgctttcttgatgcttatcaaccatgcaggaatcaacactgaacgcaaacgagagtatttgtcttcctatagtaaatatgtatacacatgrttttgtttctcaaaaactattatgtcaggtctatctggttctaaaggaaataaaaactactataaagagcctgctgtattacatcctattgccacaaaaagaaaacaaaaataggctgattgccttactgactctgggccaagggccaatgtccttgaatgtgtttgaccttgagaaaatcccttaccctttctaagctgcaatttattcataacatggaaatagcaacagtgcagtagacagctcacaaaaatattatacatggatttaaaactgtgcaaccttaaacaaaggtgataaactttagggattccaaaaggcgtatttttttcacatcttaacatctctgaaatcagggtgtcttatagtcctgcaat

SEQ ID NO: 472643 - DNA, 449 bp, Homo sapiens
cggaaaaagaatagaccgagatccggagaaaccaagtcgaagttcacctgcattcaagccaaaacctattagggcctaaggggtgaggataggccgttttaaaaggtggcggtcaacagtggagtttcccagggccaaggaagaacgaagcatagaaaagcgcagagagggtgcaaagaggctgaaaacaaattagggtgggagaaaacgatgtggcggcgggggtgccagagaacgccctagtggagaaatgtcttgaaagggcgcagagtctgtggcggccccacctgatggggacggagtggggtgcggggaaatagctccgaggtgagcgccggggcagcacctgcgagcagcacccgcagamaggcaggcagatttttggttctttctcctttatttccttgaaaaccaccttacaaatgtacccaaggaactggtagcagtgc

SEQ ID NO: 472644 - DNA, 638 bp, Homo sapiens
gaggacttgattcttccacccaattcattcgactaatatgtattgagctactagctccgacctggtagccaggggttccrcagtaaatcagacaaggcaagggccctgctatacttcagagttcattgagcaaacagaatgaagaggaagggattgttgatgtggagggagaggaaggaggaagcgggtgagaggaaattaaaaggtaagctgctttcccctgcactccaccacctcagctaactcttctgtgaccttcttggggctgggaactatcttatcgaccttgaggctcccttcttcactgcgcctagcatatggtcagttcatggtaggttccttgaattgaaggcaccctatggggagataaggactaggtccattgctttaagcagagattggaaaaccaggctgggaagattccatccaggatttcttagccagtcaggtgcaaacccccaaatggaaggaaaccccctagccatacctggcctattgccaaggtgtctggtaccctcgtggctgccatggggccagcctgagaggtaagaggaggcacctcaggatgtggaacctagaccttgctagcagggctgttgtgaggagggtctccactcccattggtttggtccacataa

SEQ ID NO: 472645 - DNA, 638 bp, Homo sapiens
gaggacttgattcttccacccaattcattcgactaatatgtattgagctactagctccgacctggtagccaggggttccgcagtaaatcagacaaggcaagggccctgctatacttcagagttcattgagcaaacagaatgaagaggaagggattgttgatgtggagggagaggaaggaggaagsgggtgagaggaaattaaaaggtaagctgctttcccctgcactccaccacctcagctaactcttctgtgaccttcttggggctgggaactatcttatcgaccttgaggctcccttcttcactgcgcctagcatatggtcagttcatggtaggttccttgaattgaaggcaccctatggggagataaggactaggtccattgctttaagcagagattggaaaaccaggctgggaagattccatccaggatttcttagccagtcaggtgcaaacccccaaatggaaggaaaccccctagccatacctggcctattgccaaggtgtctggtaccctcgtggctgccatggggccagcctgagaggtaagaggaggcacctcaggatgtggaacctagaccttgctagcagggctgttgtgaggagggtctccactcccattggtttggtccacataa

SEQ ID NO: 472646 - DNA, 418 bp, Homo sapiens
tgggtttccggctctgccacgcattcgctgtgtgaccctaggtacatctgtcagcctctctgtgtcctaattggtaaaatgggggcagtagcagagcagcgttagggttttcatagcggagggctgggtagggagcatagggtcggcctrttggtgctgggcacctcctagaggtcggggccgcggagggctgcgggcctagggcctaatgacaagaagggaccagtcttgtcggagcctcgcagcccctgcgaggcgggtgaaaggcagcgcctgagcgaagccgcaagcgggagacttcggagacgctcccggctccctctagcggtggccgcgcgagtggcgcggcgcgagcgcgatcccctcggggtgggaggagaccagagaggcaggtggcggttgccggtccgggaatctg

SEQ ID NO: 472647 - DNA, 610 bp, Homo sapiens
ctgcccccaaatcctgagctcagcaggtttcaaacacctcatccaccctcccccacctaatctaccaagcagatttcaggacaacccactgcaagagacaagctattccttcattctggtcaataccgcaaatgtggggcctgccaacagcggggatttgtcattgctcctccctgccgcagccacctggaatggccaactttatgctaatgaaggccaggcaggggttactgccgtgcagtttaaggcttggcttacacacacgcacacacgtgcacacacacaattcaacatcaacgcccagcttacctcacwagaacccaattgggtggagggtaatgggtccaggcccccatggataatgcaccaaacataatctgcttatgaataattgagcttattgttagtgtcaatgtctaaaaccatcggctgaaattccaaatagatttccaggggagaggaaggcctcacagcctcatttcacattctctggtcctccagtgagagagtacagagcaacccacacaccttacttggctcccccggcctcccaggcacacatcacacctggagatacaaggaacctagactggggaggagacgcagagca

SEQ ID NO: 472648 - DNA, 525 bp, Homo sapiens
gaggtccggagatcaagaccatcctggctaacacggtgaaatcccgcctctactaaaaatacaaaaaattagccgggcgtggcagcgggctcctgtagtgcaagctactgcgggaggctgaggcaggagaatggcgtgaaaacgggaggtggagcttacagtcagccgagatcacgccactgcastccagcctgggcaacagagagagactccgtctctaaataaataaataaataaataaataaataaataaataaataaataagaactatgattaaaacaaaggaatccctagtttcaatccagtccctgtgattatactaagaaaggacatgaaaaataaataaataaataccggctgggcgtagtggctcacgcctataatgccagtgctttgggaggccgcggcaggtggatcatctgaggtgaggagtttgagaccagcctagctaacatggtgaaaccccgtctctactaaaaatacaaaaaaacgtagctgggcgcggtggcgcgcgcctataatcc

SEQ ID NO: 472649 - DNA, 525 bp, Homo sapiens
gaggtccggagatcaagaccatcctggctaacacggtgaaatcccgcctctactaaaaatacaaaaaattagccgggcgtggcagcgggctcctgtagtgcaagctactgcgggaggctgaggcaggagaatggcgtgaaaacgggaggtggagcttacagtcagccgagatcacgccactgcactccagcctgggcaacagagagagactccgtctcwaaataaataaataaataaataaataaataaataaataaataaataagaactatgattaaaacaaaggaatccctagtttcaatccagtccctgtgattatactaagaaaggacatgaaaaataaataaataaataccggctgggcgtagtggctcacgcctataatgccagtgctttgggaggccgcggcaggtggatcatctgaggtgaggagtttgagaccagcctagctaacatggtgaaaccccgtctctactaaaaatacaaaaaaacgtagctgggcgcggtggcgcgcgcctataatcc

SEQ ID NO: 472650 - DNA, 586 bp, Homo sapiens
gtggctcacacctgtaatctcaacactttgggaggctgaggcaggtggatcacctgaggtcaggagttctagaacagcctggtcaacatggtgaaaccccatctctactaaaaatacaaaaattagctgagcgtggtggcatgcacctgtagtcccagctactcaggaggctgaggcaggagaatcgcttgaaccgggaagcagaggttttagtgagctgagatcatgccactgtaccccagcctgggtgagagtgagacttcatatcaaaaaaaaaaaaagaaagaaatcaatcataactttggagaaatcaacattagtaatattaatgttaattaagtacatattatgctctcttgactatgtttggaattcttaaataggtaaaagtaaaaaaaacagagattaaaaactcctgaaaaccctaattatgcaaagaaaattaaatttgctagctttatttttatttttattttacgttcctgggtacatgcgcaggatgtgcaggtttgttacataggtaarcgtgtgccatggtggtttgctgcacctattaacccatcacctaggtattaagcccagcata

SEQ ID NO: 472651 - DNA, 658 bp, Homo sapiens
gtcatctctagctattcttaattcaagtaatgttaattgctcttgtttctgggttcttagccagtttctcttaatcaagcatcatatgatcagcacatcatagattctttccagatcttgcttgttcactaggtttacctaactctttttcttaatactttgctagtggaataatgacctcaggcctgcacagtggatcttagcttcttcccgctcataggacttctagaagcccctcagcagcagcattgattgaagaatcagagcaatgggaccgagttttcagagaagaagggaaacgtgtaacaggctgtgagaatgttctaagcaaaatcttggygccaggaatgtatttaaaatgtttttattatagagaatttcaaacatatatacaagtggaggaataatgtgaagaatccctacttactcattacccactttcaggtgacatcaacccattccctgtcttgtttcacgtgattattattttgaagcaagtcctaaaaacatcatggaaacatacaatagtatgatttcattagcacatatttcaatgtacctgtctaaatgatttggacttttttcttcatttaaaacaaaaccaggaaacatcaggatgtcttctagtaggtgaatggataaataaactgtggtatat

SEQ ID NO: 472652 - DNA, 379 bp, Homo sapiens
atatacttttaaaaagcattgatatmtgtttgcactatctggtctatagagtacacataccaaacatgattatagctcttctgctataaacttcaaatgtctaattaatacaaaaatctagaatgagaagagttctttgcaattttttttttttaccaaatagaatataggaaagatagctgcaaatatacctgacacacttatctgtgagtatggtggtagcctttttattttattttattttgagagtgggtctcactttgtcacccaagatggagtgcagtcatgtgatcagagctcactgaagccttcacatactgtgctcaagcgattctcccacctcagtctcctgagtagcagggactgcaagtgcatgaca

SEQ ID NO: 472653 - DNA, 379 bp, Homo sapiens
atatacttttaaaaagcattgatatatgtttgcactatctggtctatagagtacacataccaaacatgattatagctcttctgctataaacttcaaatgtctaattaatacaaaaatctagaatgagaagagttctttgcaattttttttttttacsaaatagaatataggaaagatagctgcaaatatacctgacacacttatctgtgagtatggtggtagcctttttattttattttattttgagagtgggtctcactttgtcacccaagatggagtgcagtcatgtgatcagagctcactgaagccttcacatactgtgctcaagcgattctcccacctcagtctcctgagtagcagggactgcaagtgcatgaca

SEQ ID NO: 472654 - DNA, 379 bp, Homo sapiens
atatacttttaaaaagcattgatatatgtttgcactatctggtctatagagtacacataccaaacatgattatagctcttctgctataaacttcaaatgtctaattaatacaaaaatctagaatgagaagagttctttgcaattttttttttttaccaaatagaatataggaaagatagctgcaaatatacctgacacacttatctgtgagtatggtggtagcctttttattttattttattttgagagwgggtctcactttgtcacccaagatggagtgcagtcatgtgatcagagctcactgaagccttcacatactgtgctcaagcgattctcccacctcagtctcctgagtagcagggactgcaagtgcatgaca

SEQ ID NO: 472655 - DNA, 396 bp, Homo sapiens
ttggaaattgatctgagagcgcggaaggacagaattctttctttgttcctgggcagcggtggttgagggatcattttgtggcagctacagtgggatcatttgtggcaatgatggaggcagaatggagggctcagtaccaagacaaggagagacttggcctcacaatggcagcattgcaggggtgcgctccacagagcatttgctcacatggttttgggcattgtctctaactacattgcttccccgatagtttgacccattctaactaaytccttttctctttaaaaaagcaaacttcatttgtatgacttgcaattgtaaacgacaccaattggccagttatcattcaaattctctgttacttaatcctgccttttcctgacatatgcaactttc

SEQ ID NO: 472656 - DNA, 613 bp, Homo sapiens
attcgattcaaataagaaagtatggctgttctggtcacacacaagtctgttatacctcgctggatatgctagaatgagagagtctttaaataycgaattgattctatttctgtaaatagaatatcctgtctaaatagtctttccattttgataactgtatgtagaaaatgctacttatagaaaacaaaaaggccataatttaaggttgtgtatagtatagtttggtgtttggcttttatttttggtttagtgttttatttcttttggcccaggagaaagtaagccaaattttactcagaaagaaaatttgaatccatgtagaataatgacggatttttggcctttctttaacttctataatctagaatatccttttaacatattatattttcctctttgattcaccacttcttatataaacagactgttcctttctaatttccaattgagcagtagaaaagagagttccagaactctaactatagaattatctcatttctgttaaaaaatatgtatttatatggacatagatgaaaggctggaatgatatatactctaccctgttgaccatggttacccctggagagtgagtctctagatgtggatgaaacca

SEQ ID NO: 472657 - DNA, 424 bp, Homo sapiens
acgtattcattcttcaattgcataattgtgcaattgcacaattgcacaagtttctttggaagagagggaaacttgaaccctattgagaggtagggtccagaccagaagagccgtgtttgataacctcaggacagtgggcctgttggaagccagaatcaagggagaggcaaggaggagcccctgagagacaggagacagttgggggactgaggaagaaatatggcagcagagactgagggcagagtggagcctggcaccaggaggagcaggttcccagttcattgtgatgcacctggyggctcccctggggccttccccacccagagtgttcctctttctcaaatgcctacatgctttgtcctggaaacaacagagccccagcaactccatagtggggctcctcttctgaaagaggcagaaatga

SEQ ID NO: 472658 - DNA, 507 bp, Homo sapiens
gctgctggatttttgttgttgttgttgttattgttttgctggttttgctttgcctactcttgctggaggaagaacataggagtatcatatagtatgcagagttactgaggcctatctggatgagggaaaaaaattaaaaatgatacttaaccaaacagttaaactggattttggttcaacaaatttcaaaatggcattttccaagtggttagcattcctttttaaagttgaacacrgggaaatattttttaaattatctttattcaatctaaacagaaaatataaacaagcccagagcctactagatgaataatctaaatgagaatgaagttaaattggcaacataactcagagtgcacaataataaggcccagatgcaatgctacacatagggtttcagtgagtttcttccaacctttaaaatcaccctctgtttcaagaatcatttcctagtaagttatatctaaaatataggtctcagttttagatatctttagctagtaaaaa

SEQ ID NO: 472659 - DNA, 616 bp, Homo sapiens
taacatgctagaagaaacattttgataaatggtttaacagactatcttggtggcatgctctcattccctgccattctttttactggtttgactgataatcctagaccctagttgctgtggggtacatcagcagacagtttgcatgattagcattctctggggaatacccatggccaattgaagctgtcttgcctccacttacctcattggcaaaggtcagtaattgattcaatgggggtacgaaagccccatttctttgtctaaggtgggatagtgtctggggtgcaatttacattccccattggttcatattgacactggactgtttctgaaaccacattgygccatagctccccgttcctttttctctatactgtttccctttctcggatttcactctgaaggaggtataagccccaggtatgttggttggaaccaggaaattgtgcctgagagtgatgcttgggtgctgaagcaagtgtttagaataaagcagagttgattgacacaggggcactctcctgtgagacagaatcacatgccctggcaagaactctgatgtgctgctgggaaggctcacagcagcctggaaaagtgttagctccccttaaaagaa

SEQ ID NO: 472660 - DNA, 616 bp, Homo sapiens
taacatgctagaagaaacattttgataaatggtttaacagactatcttggtggcatgctctcattccctgccattctttttactggtttgactgataatcctagaccctagttgctgtggggtacatcagcagacagtttgcatgattagcattctctggggaatacccatggccaattgaagctgtcttgcctccacttacctcattggcaaaggtcagtaattgattcaatgggggtacgaaagccccatttctttgtctaaggtgggatagtgtctggggtgcaatttacattccccattggttcatattgacactggactgtttctgaaaccacattgcgccatagctccccgttcctttttctctatactgtttccctttctcggatttcactctgaaggaggtataagccccaggtatgytggttggaaccaggaaattgtgcctgagagtgatgcttgggtgctgaagcaagtgtttagaataaagcagagttgattgacacaggggcactctcctgtgagacagaatcacatgccctggcaagaactctgatgtgctgctgggaaggctcacagcagcctggaaaagtgttagctccccttaaaagaa

SEQ ID NO: 472661 - DNA, 522 bp, Homo sapiens
gcagcagacctatagcctgccctcatggagcgcacagttaatctagcagggtgcaggcaataataaaatagttttacaaatagataactacaaattgtgagaagtgctttgaaggcaaacctactggagtcatgaaatcacatagcagactgggcagggtctagtcacagagagagcaggaaaggcctctgtgcaatcaactctgaaatgagacctaagcataagagtaactacgtgaaaatgaagtaaaaatgcattcctctgaaggtgagttacggctggaggactaggaaggcattgaagtgggcaaaagtatggctaggagtgaggtcagggatgggctgaccctaagcatagtggaagccatggctgggtttttatcacaagagttacaggaccagatttgcatttgatgtcaatggaggacaggctgaagagcaaagcaaggacagattcrgatgggtttatgcaaagcatcacattaatggataaagcctcattacttccaaggccacctttcac

SEQ ID NO: 472662 - DNA, 644 bp, Homo sapiens
aaatttagtcagctctacaagccatttatttcatgtcttcaagaacttcatttagttacatgcttggcaactgttcattgaatgcccaccaggctctgagcaccactggcgagcagcagacctatagcctgccctcatggagcgcacagttaatctagcagggtgcaggcaataataaaatagttttacaaatagataactacaaattgtgagaagtgctttgaaggcaaacctactggagtcatgaaatcacatagcagactgggcagggtctagtcacagagagagcaggaaaggcctctgtgcaatcaactctgaaatgagacctaagcataagagtaactacgtgaaaatgaagtaaaaatgcattcctctgaaggtgagttacggctggaggactaggaaggcattgaagtgggcaaaagtatggctaggagtgaggtcagggatgggctgaccctaagcatagtggaagccatggctgggtttttatcacaagagttacaggaccagatttgcatttgatgtcaatggaggacaggctgaagagcaaagcaaggacagattcagatgggtttatgcraagcatcacattaatggataaagcctcattacttccaaggccacctttcactgtgatctag

SEQ ID NO: 472663 - DNA, 622 bp, Homo sapiens
catgatgcccactcgaatatacctttaaggaaggacctgctgcctcgtcaggattgccccagctgccttgcttacagtcagtccccttcctggtattgcccacatccacttactgacaaggtgggagtataaagacctcaccctctcagcctgatttaggaggactcaaggaccattctaggtcccaagcatcctgttgaattaggcctgcactgcagtttcacctttccctctgcacagtatttcttctcttctttttcacaatggcatatcttaagaaactcatacaaggtcaactccatctcagaatgagaacactctctggaacaatgaattacttcagtgaatacaggtgtactagtggcctcttggatatattttggattttattatcataaaaattgatgaatgaaattgtagaatcagagatatatagatacattaataaraaaacacctaaaaccaagctcaccttagatcattatagaatttgcctttgcccactactcattaatagttaccagtttataattttataaaacaccgtgatctgagtttgggagaacttgacaatttattttgtaatatcttagtaaaataattttttaaaaaaatcactgtt

SEQ ID NO: 472664 - DNA, 676 bp, Homo sapiens
ctggctactctgggaaactgttttgcacattgactgagattactaagattagttccagctcacaatttcatcatttgaacatcaaggttaaacatcagaacatttcgcttcttcccgtcaaggcttgttgcaatgtcattatcttatgcaataagaagagataaattataaatacctatattctatggctcagaaggagtggattcattttagtgtgtggtatatggattcaatcttactagttcccaatcccacctcatatattactctttgttcaatacttttatctcaaatacaattcattgttcaattagcaaatgagagactgcatgtagtaattgtatcatatttaaagaaaattgctttgtacaggtatttagagaatcaaactagggagatasagttctcactatgagatgagatgaaaacgttgacaccagttctatcaggcactaaataaatatcaaggcaaaacactaaacaagaccaacttatcttttataaagtaaagggacaacagactcaatccataggtccttattttctcccccactgtatgttttgatattttcttgccaaatggatttaagggaatgtggatggagacttcatagaatctaatctccatgcgtaggggctttagctgtgatagtcccttctatcttcagcacttacc

SEQ ID NO: 472665 - DNA, 638 bp, Homo sapiens
tgcattcttacttcagtctgaccaggactttcatgctgcctataagctacttcctattttacttagagtgcttccccaatatttttaaaccacagaattctatgcaaacaaaaccttaaatataatccaaataaaaattaagcagtaagcagagccgctgggcctaagcagaaatggaggcccagggcctcatctgcttgggcccccttcactgccctaccaccaagctcaagaacaccagggctgccctgcaccacatatgaaaaccactgacatgtggctccacatagccttaagatgttgctccatttcaatataaggtgtgatttcactggggttgcacttaaagatccagtggatatcaatgtccaaatttttaggaaaatgtgtagatgaagctataagcaagtrtagcatttcccagtatctgttcataaactgagcccatgtttctttggaaacacttcgtggtggaataagattggaaaatagcatgcgctttcccttggagatctccagtgcacactaatatagtagactaatggctctaacaagtcccacagtaaagaaattagtgtaacgttgcttatcccagaagttcctaaattaacactggatggaagaagccttcagaagtg

SEQ ID NO: 472666 - DNA, 502 bp, Homo sapiens
taaaaaggatgaattctagaatgtgtaaaatatgcctgaataaagtaataaagaaaaaaaagaaccagggtcaggctttgaactaccacccaagacctttagccttaggtcctgttttgcccatatcctgttaccagctaaacagcttccagcttccaacactgcaaaaaccataaaktacaagaaatgttgaagttgttcattcagaaaaacagtccatcttttaatttactttctacttataaactctaaaatacttccagataacccaagcccttaaaaggacgggggccactttaaaactgtactttattactgacttaattcttttaatatctactttcataattatgtatttctattttgcttacagaccacttttattatactgtctccatctgttccacttagtacttagctgcttctaaggctacgggtgctaattatctctttaacacctctctcctactgactcccatctttgagggtccccaagttcctg

SEQ ID NO: 472667 - DNA, 565 bp, Homo sapiens
tgggtgacagagtgagaccctatcttaaaataaaaataaaaaaaaaaataaaggtgcaggtgcatttcttaatttcttacattcatgtttcttacattacatatagtttagtcttgccttttaaaatccagcctgacattctctgtcttatgattatttagtctacttgtatttaatgtagttatctataagtttgaatgtatgattgtccttttactatttatgttcttattattctcattttgtagagacagggtctggattgtaagtgggagccactgcacctggcctattgtctcattatttgtcttgtctggtttttgttcattttttttcttcttttcctgcctccttttgtattaatgaagtaatttttagtgtgccagggtaatcctctaayggctttttagttatatttctttgtattattttttaatagttggtctagtgattataatatgcatttttagtttatctcaacctacttatagttaagattgaattacttcagataaaaaacagaaaatttgcaacaatatagtttcatttacctccatccactttc

SEQ ID NO: 472668 - DNA, 669 bp, Homo sapiens
cctaagcagttcctctctcttctggctacctcctttttrcaccagcatttcagtcatttctctcagcccaacttcactgccccaggttgcagttagttaacatcttatttgtgctgttagtaaataccactggagcaaaaccatttgggagtcaaacaaaagggagccatttctggggcaaagatgaggaagactttatcaaagatattttaactaaatcttatatagtctgtaggagactgccatgtggagaagagacagaggaaacagcaggtacaaagacacaaaggcaaaaataccaaaaacaagcccaacctaatatgtttgggattattaagcgaaggctggagctgaaacataaggtgtggaggggatgctgaaacaggatgaaggctggattgtgaaaggcattatcagccctggtaaggaagttgagcctcctcatgtaggcaatgggggaggggggtaatattttaatctgatatgtatcttaggaagaatatttctaatgattctatgaggcattaattggcatggcaactaataaaactaaggagaacatttaaaaatagcagaagtcaacatatagaggaggaaatagatttgagagatttctgaggtctaattgacaggactcagtgagttatagaaagggggaggatgataaca

SEQ ID NO: 472669 - DNA, 669 bp, Homo sapiens
cctaagcagttcctctctcttctggctacctcctttttgcaccagcatttcagtcatttctctcagcccaacttcactgccccaggttgcagttagttaacatcttatttgtgctgttagtaaayaccactggagcaaaaccatttgggagtcaaacaaaagggagccatttctggggcaaagatgaggaagactttatcaaagatattttaactaaatcttatatagtctgtaggagactgccatgtggagaagagacagaggaaacagcaggtacaaagacacaaaggcaaaaataccaaaaacaagcccaacctaatatgtttgggattattaagcgaaggctggagctgaaacataaggtgtggaggggatgctgaaacaggatgaaggctggattgtgaaaggcattatcagccctggtaaggaagttgagcctcctcatgtaggcaatgggggaggggggtaatattttaatctgatatgtatcttaggaagaatatttctaatgattctatgaggcattaattggcatggcaactaataaaactaaggagaacatttaaaaatagcagaagtcaacatatagaggaggaaatagatttgagagatttctgaggtctaattgacaggactcagtgagttatagaaagggggaggatgataaca

SEQ ID NO: 472670 - DNA, 585 bp, Homo sapiens
tgtaatcatatacttttagaacaggaagaacattctagtaacattctttaattttacagatgagaaaactgagacctcaggaaaataggtgattcccctaacatcaggcagctatgagatttcatttctaagatgtcattcatcatgagatataccatmaattttaaaatagttttgaaaaaagaccacacacattaaatagatgcatcccaatttcagaaataataaaatcgaaaaactacagactttggagtcaagagaatagtccttagcttcagcaatgagaccacaagccaggtttcctgacttccaggtctagaatatttcttctagatcagttaggaatatgtttattatttttgtttttttcctcttccataacacaggtgcatgttatattctgagggtaacaagtctattagaagcaataaataatacttgtacagcaaccttttgtagtgatactaataattagttgttacgcagggttttatgaagaatttgaatgtttttcacgatcacggtgagagaatgctaattttatttttcgctaagaacatattttggtagaaagaagaagaggaa

SEQ ID NO: 472671 - DNA, 585 bp, Homo sapiens
tgtaatcatatacttttagaacaggaagaacattctagtaacattctttaattttacagatgagaaaactgagacctcaggaaaataggtgattcccctaacatcaggcagctatgagatttcatttctaagatgtcattcatcatgagatataccataaattttaaaatagttttgaaaaaagaccacacacattaaatagatgcatcccaatttcagaaataataaaatcgaaaaactacagactttggagtcaagagaatagtccttagcttcagcaatgagaccacaagccaggtttcctgacttccaggtctagaatatttcttctagatcagttagsaatatgtttattatttttgtttttttcctcttccataacacaggtgcatgttatattctgagggtaacaagtctattagaagcaataaataatacttgtacagcaaccttttgtagtgatactaataattagttgttacgcagggttttatgaagaatttgaatgtttttcacgatcacggtgagagaatgctaattttatttttcgctaagaacatattttggtagaaagaagaagaggaa

SEQ ID NO: 472672 - DNA, 476 bp, Homo sapiens
aaacttggacaccacacagcaagggacgcagggtgaactggagccggcatgctgatgaactgcacacgacacacagaaacacacgggaagctgtggctgcgkctgtcttgtgggtctgggccactgcagtcaacgcccctcaactatctctgcttttcacttccctttgccccccaggcgctccagtttttttttttggctattcagagtctgttggtcccaccatccaagccttacaggcccacatctaaccccaactccacctggtaagatgtctaggtttcagctgggcgcactggctcacacctgtaatattagcactttgggaggctgaggagggcagatcacaaggtcaggggttccagaccagcttggccaacatggtgaaatcccgtctctattaaaaatacaaaaattagctgggcgtggtggcatgagcctgtaatcccagccacttgggaggctgaggcaggaga

SEQ ID NO: 472673 - DNA, 476 bp, Homo sapiens
aaacttggacaccacacagcaagggacgcagggtgaactggagccggcatgctgatgaactgcacacgacacacagaaacacacgggaagctgtggctgcggctgtcttgtgggtctgggccactgcagtcaacgcccctcaactatctctgcttttcacttccctttgccccccaggcgctccagtttttttttttggctattcagagtctgttggtcccaccatccaagccttacaggcccacatctaaccccaactccacctggtaagatgtctaggtttcagctgggcgcactggctcacacctgtaatattagcactttgggaggctgaggagggcagatcacaaggtcaggggttccagaccagcttggccaacatggtgaaatcccgtctctattaaaaatacaaaaattagctgggcgtggtggcatgagcctgtaatcccagcyacttgggaggctgaggcaggaga

SEQ ID NO: 472674 - DNA, 637 bp, Homo sapiens
ctcatcgtagcgtgattacagacagaggtatattttatttttttaaaaaatggaaattgaaacaggtggttcaatgaaaagctttctaaggaactacacagatgaaattctaatacgatttctacagctctgcccgtgatttcctcttcatgtgctgaatcaaaagccctttgggaggccaaggtggggggttggatcatatgakgtcaggagttcaagaccagcctgaccaatatggtgaaatcccgtctctaccaaaaacataaaaattagccgggtgcggtggcttgtgcctgtagtcccagctattcaggaggctgaggcaggagaattgcttgaggcggaagttgcagtgagccaagattgcaccactgcactccagcctgggtgacagagcaagactccgtctcagaaaaacaaaaacaaaaacaaaaaaagacagtgaaaggcccatggctagttctttcacgaattggtcaggctattcaattatggtggttcggtctgattaagccattacttactttgcatttgatttttcaaaacacatacatctggagaagtatttggttctctcttttaaaaacaacattcctgtaagatgaagaagttctggagattggttacaccacagtgt

SEQ ID NO: 472675 - DNA, 637 bp, Homo sapiens
ctcatcgtagcgtgattacagacagaggtatattttatttttttaaaaaatggaaattgaaacaggtggttcaatgaaaagctttctaaggaactacacagatgaaattctaatacgatttctacagctctgcccgtgatttcctcttcatgtgctgaatcaaaagccctttgggaggccaaggtggggggttggatcatatgaggtcaggagttcaagaccagcctgaccaatatggtgaaaycccgtctctaccaaaaacataaaaattagccgggtgcggtggcttgtgcctgtagtcccagctattcaggaggctgaggcaggagaattgcttgaggcggaagttgcagtgagccaagattgcaccactgcactccagcctgggtgacagagcaagactccgtctcagaaaaacaaaaacaaaaacaaaaaaagacagtgaaaggcccatggctagttctttcacgaattggtcaggctattcaattatggtggttcggtctgattaagccattacttactttgcatttgatttttcaaaacacatacatctggagaagtatttggttctctcttttaaaaacaacattcctgtaagatgaagaagttctggagattggttacaccacagtgt

SEQ ID NO: 472676 - DNA, 637 bp, Homo sapiens
ctcatcgtagcgtgattacagacagaggtatattttatttttttaaaaaatggaaattgaaacaggtggttcaatgaaaagctttctaaggaactacacagatgaaattctaatacgatttctacagctctgcccgtgatttcctcttcatgtgctgaatcaaaagccctttgggaggccaaggtggggggttggatcatatgaggtcaggagttcaagaccagcctgaccaatatggtgaaatccygtctctaccaaaaacataaaaattagccgggtgcggtggcttgtgcctgtagtcccagctattcaggaggctgaggcaggagaattgcttgaggcggaagttgcagtgagccaagattgcaccactgcactccagcctgggtgacagagcaagactccgtctcagaaaaacaaaaacaaaaacaaaaaaagacagtgaaaggcccatggctagttctttcacgaattggtcaggctattcaattatggtggttcggtctgattaagccattacttactttgcatttgatttttcaaaacacatacatctggagaagtatttggttctctcttttaaaaacaacattcctgtaagatgaagaagttctggagattggttacaccacagtgt

SEQ ID NO: 472677 - DNA, 637 bp, Homo sapiens
ctcatcgtagcgtgattacagacagaggtatattttatttttttaaaaaatggaaattgaaacaggtggttcaatgaaaagctttctaaggaactacacagatgaaattctaatacgatttctacagctctgcccgtgatttcctcttcatgtgctgaatcaaaagccctttgggaggccaaggtggggggttggatcatatgaggtcaggagttcaagaccagcctgaccaatatggtgaaatcccgtctctaccaaaaacataaaaattagccrggtgcggtggcttgtgcctgtagtcccagctattcaggaggctgaggcaggagaattgcttgaggcggaagttgcagtgagccaagattgcaccactgcactccagcctgggtgacagagcaagactccgtctcagaaaaacaaaaacaaaaacaaaaaaagacagtgaaaggcccatggctagttctttcacgaattggtcaggctattcaattatggtggttcggtctgattaagccattacttactttgcatttgatttttcaaaacacatacatctggagaagtatttggttctctcttttaaaaacaacattcctgtaagatgaagaagttctggagattggttacaccacagtgt

SEQ ID NO: 472678 - DNA, 454 bp, Homo sapiens
caagttcagttcattctcacaacagtcctgcaaagaagatattattatctctattttgcaagttaagaaccaaggtttagaaaaataaaatctactggagattgtatgactagtaaatgattgagataggattcaaattgagacctacctttggaatccatgttcttttcattttaccaaatggcactccccactcccaaaccaacaacagcatttattgccacctagcctgagccaagacctataccaggcacacagtggacattggcacgaggcttagagactgacacacagaacagtccagcagtgagtcagtggcatagctgggactcagagccagaactrccgagagaggaaaggtgcaagctttgagcccaacctatgtcttcttccataggcgatgtttgctgtcttcattttatatacactatggtcacacaatttgactttgaga

SEQ ID NO: 472679 - DNA, 473 bp, Homo sapiens
tgccggaggagctgggctctttcaagtttttgataacttgctgtggygattttacccgcttcttagcagagagtgtcttgccagactgactgtctctcctcttcctcctcatttgccgcttatttcatcccagttcagccattctgtcctattcttcttcacttgcaaagattttccaaagtagaatccaggccgggcgtggcggctcaccattgtaatcccagcactttgggaggcagaggcaggaagattgcttaaggccaggagttcaagaccagcctgggaaacatggtgagaccccgtctttataaaaaattttaaaaattagctaggcatggtggtgcacgcctgtggttccggctacttgggaggctgaggtgggaggatcacccgagcgcatgtggttgcaccactgtacttcagcctggagtaatttcatgtctccaaaaaacaaaaacaaaatgacaacaacg

SEQ ID NO: 472680 - DNA, 473 bp, Homo sapiens
tgccggaggagctgggctctttcaagtttttgataacttgctgtggtgattttaccckcttcttagcagagagtgtcttgccagactgactgtctctcctcttcctcctcatttgccgcttatttcatcccagttcagccattctgtcctattcttcttcacttgcaaagattttccaaagtagaatccaggccgggcgtggcggctcaccattgtaatcccagcactttgggaggcagaggcaggaagattgcttaaggccaggagttcaagaccagcctgggaaacatggtgagaccccgtctttataaaaaattttaaaaattagctaggcatggtggtgcacgcctgtggttccggctacttgggaggctgaggtgggaggatcacccgagcgcatgtggttgcaccactgtacttcagcctggagtaatttcatgtctccaaaaaacaaaaacaaaatgacaacaacg

SEQ ID NO: 472681 - DNA, 473 bp, Homo sapiens
tgccggaggagctgggctctttcaagtttttgataacttgctgtggtgattttacccgcttcttagcagagagtgtcttgccagactgactstctctcctcttcctcctcatttgccgcttatttcatcccagttcagccattctgtcctattcttcttcacttgcaaagattttccaaagtagaatccaggccgggcgtggcggctcaccattgtaatcccagcactttgggaggcagaggcaggaagattgcttaaggccaggagttcaagaccagcctgggaaacatggtgagaccccgtctttataaaaaattttaaaaattagctaggcatggtggtgcacgcctgtggttccggctacttgggaggctgaggtgggaggatcacccgagcgcatgtggttgcaccactgtacttcagcctggagtaatttcatgtctccaaaaaacaaaaacaaaatgacaacaacg

SEQ ID NO: 472682 - DNA, 500 bp, Homo sapiens
gccggaggagctgggctctttcaagtttttgataacttgctgtggtgattttacccgcttcttagcagagagtgtcttgccagactgactgtctctcctcttcctcctcatttgccgcttatttcatcccagttcagccattctgtcctattcttcttcacttgcaaagattttccaaagtagaatccaggccgggcgtggcggctcaccattgtaatcccagcactttgggaggcagaggcaggaagattgcttaaggccaggagttcaagaccagcctgggaaacatggtgagaccccgtctttataaaaaattttaaaaattagctaggcatggtggtgcacgcctgtggttccggctacttgggaggctgaggtgggaggatcaccygagcgcatgtggttgcaccactgtacttcagcctggagtaatttcatgtctccaaaaaacaaaaacaaaatgacaacaacgaaatagaatcttctttccagaacgtgcc

SEQ ID NO: 472683 - DNA, 496 bp, Homo sapiens
tgtttgaggcaggatgtctgtgccctctgcccgagttctgctcaccctctctgtctccttccttgtgccactacctgctctgtggcagcccatgttcctgccttgaatggtacctaccctctcccccgccccatyacaatttgctgcgaataaagttttcttagtatgtgtggttaaaaagagtaaattgttactgagaaaatcccttcattcctcattcaggacgtgaaatgctggggctttgagcactgggctgatgagcagggctttgtccaattccttctgatttctctgctgagatccagagcaggttctgccaaggtgtggagctcctattgcaagtccaagcgctgcctggccaggccagaatcgtggagcccagcgctctctccccaggctccggccacagcctctgaattctcagcatggtgcccagcagccgtcccaggagcagccactggagcaggcggccttcagtcctcacccaggctttccg

SEQ ID NO: 472684 - DNA, 496 bp, Homo sapiens
tgtttgaggcaggatgtctgtgccctctgcccgagttctgctcaccctctctgtctccttccttgtgccactacctgctctgtggcagcccatgttcctgccttgaatggtacctaccctctcccccgccccatcacaatttgctgcgaataaagttttcttagtatgtgtggttaaaaagagtaaattgttactgagaaaatcccttcattcctcattcaggacgtgaaatgctggggctttgagcactgggctgatgagcagggctttgtccaattccttctgatttctctgctgagatccagagcaggktctgccaaggtgtggagctcctattgcaagtccaagcgctgcctggccaggccagaatcgtggagcccagcgctctctccccaggctccggccacagcctctgaattctcagcatggtgcccagcagccgtcccaggagcagccactggagcaggcggccttcagtcctcacccaggctttccg

SEQ ID NO: 472685 - DNA, 393 bp, Homo sapiens
ggctgggcctataatcccaggactttgggaggccaaggaggaaggatcacttgaacccaggagtttgagacaagcctgggcaacataatgagaccttctctctacaaaaaaatttaaaagttagccgagcatggtggcacatgcctgtagtcccagctactcaggaggctgagatgggaggctcccttgagcccaggaggtcgaggctacagttagttgtgattgggccactacactccagcctgggtgacaaagctagaccctatctaaaaaaacaaatcagagtcagcgcattgccagcgttactgcttgcatggcataggttattcctgaagagcccactgcaagatggaayagcaggacccctaccccagtgctgttatttatcagctg

SEQ ID NO: 472686 - DNA, 452 bp, Homo sapiens
gaggattaaaaggcctctggggcagggargaatgtcctttaatggggacctgccgggcctgtgcctatctaatcagttttgctgtgtgttagtagcacatccataataagaagtgcctgtgacagccgggactgggaatcggtgttgagctgttggctgatggtggggaggcggcggtgcacactctcggcttcccttgcacacgaacctcgcagagcatggggctgcatgtccgtgtgtccccacgggagtctcatggcatttctggagaatagacaggatcctacccccgccactcacctgctaaagtctagcattcctttatcaaagccgagcccttctttcctcagtgagagatgagctccacgaggagacccctggggagggagctggggtaagtgatggtagtcctttcgctggaagttttgatgccaagagtaggagaggaaagg

SEQ ID NO: 472687 - DNA, 613 bp, Homo sapiens
ggatatttgtaaatatttttatactcagtatatagatgtctttaaaacacaacttttaaagctaaaaataaagcaagctctcaaggtgcagccattgcatagaaccctctcgtgggcctagcgtggctgctgatggcccggggaggtgatgggcctggaggagggacgggtggggcatattcaggcctgcaaactcctctctgggatgagtagccacctggtgagggcctcaccttctcacttttccctggaacccctcgtgcgcccctcggagggccttgggtctccttatggccgccttgggcctcctgtgctgcgggtctcaggcctgccctgggcagcaggacatcatcaggctttctgcatgttcggacctgtgccaagagccsctgtagagaagactcattgacctgtccacacctttcagggatatgcagagatataccaaagacccctgtcctcaggagcgccgggtgactgagtctggtggaaggtgagggcgggtgaaggagtgggatctccctttctgctcccagcctaacctttcagctctctcctgccccctccccttctcccaacagcaggggaaggcagggtacaggctgtgtgagca

SEQ ID NO: 472688 - DNA, 608 bp, Homo sapiens
ggtggggcatattcaggcctgcaaactcctctctgggatgagtagccacctggtgagggcctcaccttctcacttttccctggaacccctcgtgcgcccctcggagggccttgggtctccttatggccgccttgggcctcctgtgctgcgggtctcaggcctgccctgggcagcaggacatcatcaggctttctgcatgttcggacctgtgccaagagccgctgtagagaagactcattgacctgtccacacctttcagggatatgcagagatataccaaagacccctgtcctcaggagcgccgggtgactgagtctggtggaaggtgagggcgggtgaaggagtgggatctccctttctgctcccagcctaacctttcagctctctcctgccccctccccttctcccaacagcaggggaaggcagggtacaggctgtgtgagcacagctrtctccaggaggggagggagttgtctgggtgacagggcccaggttgcctgagcctctgagacctcgctccttccccctcgcactcccccgccccctggtagtggctccattctgtcaccttcaggagatgacctttgggccagagggagagggaattc

SEQ ID NO: 472689 - DNA, 607 bp, Homo sapiens
gatccaagtgtcctgagattcaagaaagttgaagaactacttcttccccagtttttaggaagtttcctcaagagctagaataataaacaaattgtcaacaaccaggaatttcaagagggactggaaacactccgcggcaagcagtgtccgaatcccgggcacagtgggggagcccgccgcggagttccctggccagcacagggcagggacgttgcagacggaagctctgatgatggaggcctccctgaaagaggcatgcttccagggcctcgcagccactggaccctccccacaccgcatctcatcggggtaaattccaagtttaccctcacatgagatctgctgttttacatcatagcgatagccgtgtataccggctttgccagacaattggcatgaacgatgctgtgttataaacaggcatctcgaagagatcaaggttagaatgacatttctgaaatctcgaactctagtcctgacctaagaacatgttcagacatkctcaggcaggatgggccacctgggggggctcctgcccaggaatattctggccccatcctgccgccagggccaggaagcctttcccctgctcactgggcaccctggc

SEQ ID NO: 472690 - DNA, 580 bp, Homo sapiens
ggtttagttggtgctttcaactactgcttctgatcaactcctttagctagaataaattgatgaggattttggcmtgtggtattagagatggttattaattttttcctcttatttgcattgttcaatatagtaaatactagctgtatatggctacttcaattcaaattaattacaatgaaatatacttaaatattgaatttcttagtcactcttggttcattattgaatatcttcagctaagatttcccaactaaagacactaagaggtggcttagttaactggtcatccacaaatattgaagctgctgttaactcctgatatattctctgcaaggagaatactcataagcctcctcctgaaatcagcagcctagagatagttttataaactggatacaagttggaaatctatatactctttaagtgtttgaaatattagctttccagggaagaaaatcaaattcataagatatgctaggacaatttaactcaagatgttcaaaactgaaatgacatattctacaacatgtgataaaaccaccccctaacaacttaaagcaaaacaggggtggaccttaaa

SEQ ID NO: 472691 - DNA, 575 bp, Homo sapiens
tgcctggcctgtgggtgaacgtggagcagctgagttcacagcctgctttggccatgccccgttgtcgggcctgccgtaacatgygaggggaagggaaaggaagaacctagggctagcggtttgccatagccaagtccccacctgcacatggcgtcttgtatctgtgatcatttgagaggcttcttcagcctctgcccaagcatgaggcagaagtggctagaccaggtttccagtggtgaaagtccaccccagggatgggcagggtcccggggaaggaccccatctgcagagacaggtgctggcctttgcaattatccgccctcgggggaaaagttgggttcccccaaggcaggcttattcctccacaccagcccccagatgctgagaagcaatgaacagccggggctggaatgcgtgactgtcacatggcagagcaccttctcagaggaacttgttcccctctttgggtaaacagacctactactaggcctgctaaaaacacagaaacaacccccacaaaccctagggcagatgcttgtcatttcccaatcctcttctgagtctgaacagccggg

SEQ ID NO: 472692 - DNA, 575 bp, Homo sapiens
tgcctggcctgtgggtgaacgtggagcagctgagttcacagcctgctttggccatgccccgttgtcgggcctgccgtaacatgtgaggggaagggaaaggaagaacctagggctagcggtttgccatagccaagtccccacctgcacatggcgtcttgtatctgtgatcatttgagaggcttcttcagcctctgcccaagcatgaggcagaagtggctagaccaggtttccagtggtgaaagtccaccccagggatgggcagggtcccggggaaggaccccatctgcagagacaggtgctggcctttgcaattatccgccctcgggggaaaagttgggttcccccaaggcaggcttattcctccacaccagcccccagatgctgagaagcaatgaacagccggggctggaatgcgtgactgtcacatggcagagcaccttctcagaggaacttgttcccctctttgggtaaacagacctactactaggcctrctaaaaacacagaaacaacccccacaaaccctagggcagatgcttgtcatttcccaatcctcttctgagtctgaacagccggg

SEQ ID NO: 472693 - DNA, 472 bp, Homo sapiens
tgcagaggagtctggctgtgtccttccgagggggaaggacgctccggctcccacccccatctgtcagtgcttatctgtctctgggcggtgggggttgcctgagcttggtacggctgggagaatggatgccttcaagtgcatcagggggaaatgaccagtcatttatctctttcctgcagtgtcagagcctgcagccatccatctggaggcctgcaccggcagcttcgtcagctctggttggcctcatgagaaggggagctggagcgaggtgggcagggcgtgcagcccccactcaggctgtggctattacgtgctggaagggacctgctccttttgccttcctgtccgtctcaggaaaggagcagggactgrgggacgaagtctgtgtgacttcagctctgctcgtgttccccagctctgctggtgttctgcagggctctgggagcttgggctggccgaggaggtgggctgg

SEQ ID NO: 472694 - DNA, 634 bp, Homo sapiens
taatggatagtgtgttggactaattacctggggtagaggctgcacatctaggttttggaaacaactcttttccaaagaaagtgccagtttctctgttccctttcatctgttctcacagaatgccttttctccacactcgactagctagtcttggcattgacagaggagagctccccrgaatgatacatgacaaataaaatatggctccaagagccttgtccgctggattgctttatccttaatcatgtttatttatttatttatttttttgagatggagtctcacactgtcacccgggttggagtgcagtggtatgatctcggctcactgcaacctctgcctcctgggttcaagtgattctcttgcctcagcctcctgagtagctgggataacaagcgtctgccaccacgcctggctaattttttatatttttagtagagacagggtttcgccatgttggccaggctggtcttaaactcctgacctcgtgatccgcctgcctcggcctcccaaagtgctgggattaccagtgtgagccaccatgcccagctcacaatcatgtttatttttgttcattggctaatttcttaagttttaaaaactgaagtataacatacataccaaaaagtgcaca

SEQ ID NO: 472695 - DNA, 634 bp, Homo sapiens
taatggatagtgtgttggactaattacctggggtagaggctgcacatctaggttttggaaacaactcttttccaaagaaagtgccagtttctctgttccctttcatctgttctcacagaatgccttttctccacactcgactagctagtcttggcattgacagaggagagctccccggaatgatacatgmcaaataaaatatggctccaagagccttgtccgctggattgctttatccttaatcatgtttatttatttatttatttttttgagatggagtctcacactgtcacccgggttggagtgcagtggtatgatctcggctcactgcaacctctgcctcctgggttcaagtgattctcttgcctcagcctcctgagtagctgggataacaagcgtctgccaccacgcctggctaattttttatatttttagtagagacagggtttcgccatgttggccaggctggtcttaaactcctgacctcgtgatccgcctgcctcggcctcccaaagtgctgggattaccagtgtgagccaccatgcccagctcacaatcatgtttatttttgttcattggctaatttcttaagttttaaaaactgaagtataacatacataccaaaaagtgcaca

SEQ ID NO: 472696 - DNA, 634 bp, Homo sapiens
taatggatagtgtgttggactaattacctggggtagaggctgcacatctaggttttggaaacaactcttttccaaagaaagtgccagtttctctgttccctttcatctgttctcacagaatgccttttctccacactcgactagctagtcttggcattgacagaggagagctccccggaatgatacatgacaaataaaatatggctccaagagccttgtccrctggattgctttatccttaatcatgtttatttatttatttatttttttgagatggagtctcacactgtcacccgggttggagtgcagtggtatgatctcggctcactgcaacctctgcctcctgggttcaagtgattctcttgcctcagcctcctgagtagctgggataacaagcgtctgccaccacgcctggctaattttttatatttttagtagagacagggtttcgccatgttggccaggctggtcttaaactcctgacctcgtgatccgcctgcctcggcctcccaaagtgctgggattaccagtgtgagccaccatgcccagctcacaatcatgtttatttttgttcattggctaatttcttaagttttaaaaactgaagtataacatacataccaaaaagtgcaca

SEQ ID NO: 472697 - DNA, 634 bp, Homo sapiens
taatggatagtgtgttggactaattacctggggtagaggctgcacatctaggttttggaaacaactcttttccaaagaaagtgccagtttctctgttccctttcatctgttctcacagaatgccttttctccacactcgactagctagtcttggcattgacagaggagagctccccggaatgatacatgacaaataaaatatggctccaagagccttgtccgctggattgctttatccttaatcatgtttatttatttatttwtttttttgagatggagtctcacactgtcacccgggttggagtgcagtggtatgatctcggctcactgcaacctctgcctcctgggttcaagtgattctcttgcctcagcctcctgagtagctgggataacaagcgtctgccaccacgcctggctaattttttatatttttagtagagacagggtttcgccatgttggccaggctggtcttaaactcctgacctcgtgatccgcctgcctcggcctcccaaagtgctgggattaccagtgtgagccaccatgcccagctcacaatcatgtttatttttgttcattggctaatttcttaagttttaaaaactgaagtataacatacataccaaaaagtgcaca

SEQ ID NO: 472698 - DNA, 466 bp, Homo sapiens
aacgtgatgtgggtgcttgctgggtgggggaccctattttctactgccattcttggatttggaggcagatctttgtttcttagagttattcttttccctttctgagtagttcctgtgaagtagagtcatgccatttgtgtgtgagacccagctgctgcaccagttctaactcttcacccccttctttttcatgcccctctttcccttcaagtcactaaccccacacacgcccaccttcctctgcagcccggaagstcggtacacatttgctgacgtattagaacacaccctggcatgaatgtgattcacattctccgcccgtctcttccttcctctgtgtcctggaccgcaggcccttgcagtgcatatctctgacaggggaacccccactataggtgtgctcccatttagcctgggttcaggcacatcaatgagcatgttctgagttggagggatggggcgggta

SEQ ID NO: 472699 - DNA, 466 bp, Homo sapiens
aacgtgatgtgggtgcttgctgggtgggggaccctattttctactgccattcttggatttggaggcagatctttgtttcttagagttattcttttccctttctgagtagttcctgtgaagtagagtcatgccatttgtgtgtgagacccagctgctgcaccagttctaactcttcacccccttctttttcatgcccctctttcccttcaagtcactaaccccacacacgcccaccttcctctgcagcccggaagctcggtacacatttgctgacgtattagaacacaccctggcatgaatgtgattcacattctcckcccgtctcttccttcctctgtgtcctggaccgcaggcccttgcagtgcatatctctgacaggggaacccccactataggtgtgctcccatttagcctgggttcaggcacatcaatgagcatgttctgagttggagggatggggcgggta

SEQ ID NO: 472700 - DNA, 466 bp, Homo sapiens
aacgtgatgtgggtgcttgctgggtgggggaccctattttctactgccattcttggatttggaggcagatctttgtttcttagagttattcttttccctttctgagtagttcctgtgaagtagagtcatgccatttgtgtgtgagacccagctgctgcaccagttctaactcttcacccccttctttttcatgcccctctttcccttcaagtcactaaccccacacacgcccaccttcctctgcagcccggaagctcggtacacatttgctgacgtattagaacacaccctggcatgaatgtgattcacattctccgcccgtctcttccttcctctgtgtcctggaccgcaggcccttgcagtgcatatctctgacaggggaacccccactataggtgtgctcccatttagcctgggttcaggcacatcaaygagcatgttctgagttggagggatggggcgggta

SEQ ID NO: 472701 - DNA, 601 bp, Homo sapiens
aggttctttcgcccagtgcgggtggggaaaaaaggattacgatataaagtgttttgcaaagtttgcagagttgaattttgttattacaagaggtaatgagtgtggaggtgctttgagtctttgaaagccctttgctgatgtgagagttggagccataagagcggagtgtggagagatgagcagaggactaaggactgggtcttattgccaaatccccactgcctagcaggggctcagggaacttttggggaggaactaaatgaatgagtagaatcaaggctctgagtgtttcaaggagcgcatggctaatactgtcatacgttggttgagcagcaggaccacccacgggtggccactggatttggcaagaaggaagaaattagtccctatgaaaaagtagcatctgaggaaggatgrctaagagctgaggggaacgggtagaggggaggatcatgtatttgaggagcttttcagtaaacgttaaggaatggagttagacattgctagataggccctttgatgatttaaaggaattgtctcgaagaccctctgttatgtttcaccaggaaggtgaagggaaaggaggccaaggagtttcaag

SEQ ID NO: 472702 - DNA, 544 bp, Homo sapiens
ataaattccataaggctaagaattttgtttctcttgtataccaccatacaagaccaagaacagaggctgacatatagtaggtacccaataaatgtgcaaatgaataaaaaacagcattcatcattcaataaaggcccaacatgcatccaaaatctttatcaagataatctctactgcacagagtttgtaaagatccagtgggaggcagcaggacaagagtcgaagtaatcctgaaatattggtatttgccagggagaaacttaacccacaactcctagccttcattccagttattagcttacccagccaaattcccatctgtgagagcaaggggattttctgaagttaattaggggcttaaagattttccttaatattcagaggagcccggcattccttaacttcctatctgatttcaaatccatgtcctgycacattttctgtaaacaattataccttcccctcagtccctgaccctgcaccccactagatcaaggaaatacacacaaatcacacagaaagatgatctcacaaaacgactaac

SEQ ID NO: 472703 - DNA, 631 bp, Homo sapiens
ctggggatgcctagatctcacgctgtcctctgagcactgggatctgctgacaagtgtggatggctgattggccaattctcaggcctctgcttggagatgcggtctgacttcctgccagcctgcatgccgaaagaacaagcctgcatgcttcagtaatgtcttggtcctgtgggtgacctcttgatgagtcactttctgttcttgaggaggcagacagggagcctgagagaatgaaggttaaatggaaatttaggattgtaaaaaaattagagatggagaggacaagggaaatgaggaagaggttgggcagggctttgataccttttgtgaactatttaaagatatttatatcccttgcttttctctgattttgtgaatgatgtcaccatgcatccagggactcagscatcttcagcggccccttcccaacctctcctgcctgcacccctgttctatccccatctgatggttgcttacatctcctcatctcctctttcttccctcttctctttccagggcctcatgatgaccttctagctgcagtagtctccctgcagtcactcttgctcccacaatctatcctatgtgttaccaagccagagggatggtttaaaaatccaaataaaatcat

SEQ ID NO: 472704 - DNA, 593 bp, Homo sapiens
tgagactgaatcatgtctcttatttatgggctatattagtttgcttggactgctgtaccacagactgggtggcttaaacacaaaaatgtattttctcacaattttggaggctaggagtctgagatcaaggtgttggcagggccggtttctccagaggcctctctcctgggcttgtagatgctgtcttccccctgtgccttcacgtggtctttcctctgcacctgtgtggtcttcatctcctcttataaggacaccagttgtattggattagtgctcctttaatgacctggttttaccttaactacctctgtaaagacccaaatacagtcagatcctgaggtctctgggggtaggggttcaacatgggagttttaggagaatacaatttggtcataacatggcctgaaagtcagaactgtttgtgaactttgaagacagttgsattgaatgagagtcacagatctgacttaagtcagagaattaccccaaccccagggtggcctttcatcccaaagttgacatgatggacgtgtgaggtgggagaggaaagaggggcaaagagcaggggtcactgtgggaaaaaggaagggcca

SEQ ID NO: 472705 - DNA, 556 bp, Homo sapiens
aatttaatacctaaatggtaataaatgccaaaaccaagatatttaaaacaagatagcatacattgcaatatgtaaaggatacatggctacagacacatctgatatctggatacctataatttagtgtattctactggcctcccatttttctttaaacactatgtcgtatcacgtytaatattataaatataaaaattcactttatagaatataacatccattatacttttactaatttaaatgataatcatataaaaatatcaaacagagttttgatttttacactctgtatgattatatttgtagctcttttcaactttattattgttaaaatggtacatggtattttgttaatttgatatgtgcacataaggccaaacccacacatagaacatcaaatatgaaaaaagataacatattttaaacaaaatgctattgttgatgcttgcttgctgtctggcagtgtaataattccatattttccctgtgtcactgtgggttgttagaaagaggccgggcatgcttctgtaatgctgcagttactaattggaaacac

SEQ ID NO: 472706 - DNA, 556 bp, Homo sapiens
aatttaatacctaaatggtaataaatgccaaaaccaagatatttaaaacaagatagcatacattgcaatatgtaaaggatacatggctacagacacatctgatatctggatacctataatttagtgtattctactggcctcccatttttctttaaacactatgtcgtatcacgtctaatattataaatataaaaattcactttatagaatataacatccattatacttttactaatttaaatgataatcatataaaaatatcaaacagagttttgatttttacactctgtatgattatatttgtagctcttttcaactttattattgttaaaatggtacatggtattttgttaatttgatatgtgcacataaggccaaacccacacayagaacatcaaatatgaaaaaagataacatattttaaacaaaatgctattgttgatgcttgcttgctgtctggcagtgtaataattccatattttccctgtgtcactgtgggttgttagaaagaggccgggcatgcttctgtaatgctgcagttactaattggaaacac

SEQ ID NO: 472707 - DNA, 662 bp, Homo sapiens
aataacagaagccaaaaaaaaatcatattccaagaaatttctggacaacctatacaagactttcaaaagtatggacaaaatccagttttccatattcttgtctcaccaaaagagttgtgagacaaagaggaaggacgggatggaatttctgtgtgagctttccaatgttttgggkccctcttcccattggggtgttgttttatttttgccttaagccaagtgagaggagccttcagcagagccaagcacatgtctcttggggtttgggaagcattagaactggtatgatatactgtggctacagatcagctttagggtggcagagagagtgagagagaaagcttcactgggaactaactgtatttccagcaatgacagagcaacaatgcattaatatttctgtagatcaaatatatatatttctgtagttcaaagtagagcaagcctagtgctattttgaatatttttcaaaaggatgcctggaggagcaacgtgatcctcaacagagtgatagacagttggataccaaggagccaaaaaaggaatctacttggaggagaggtattaccgccatcaaggaagttggagccataaagttccactggtggggagggggctctccaaggcaattcgtaaaatcactcaaaaaaaaaagaagtagc

SEQ ID NO: 472708 - DNA, 635 bp, Homo sapiens
atgggacaacacttttcttgtaaaattaagggcttgagctagatgatcattaaggtctgtactgatttcctttattttcccgtattctaatgatgatttattgttaatccatttgtcttctgatttctcattagaatagtcctgttttactgatgcrtaataaggcacttgcattttagaagtttgtaggtttttgaaaacattctcatttccactctttatcttgtttggttaaatagaccccaaatttgattctaaatcacaggaacaaagttcttttagaatacctaacccatggatgattttggacatctattctgcccccttgatgcatgtgaattttagttcagagaagaagagatcagactgtttactagcaggttttttattcacagattaaaaccgtaaacaacaaaacacactcagaaaaaaagctcaactgtttacccacatcctgacccttattcacttctctccagatcttcctgatcttggggccttagagtatactcttctgtctaggatggtctttcctcactcttcacttggctgtcttccttcttgacctttggttctcagagtacacatcactgtcttagaagctgttctctatccctcagcctaatgttgaacag

SEQ ID NO: 472709 - DNA, 635 bp, Homo sapiens
atgggacaacacttttcttgtaaaattaagggcttgagctagatgatcattaaggtctgtactgatttcctttattttcccgtattctaatgatgatttattgttaatccatttgtcttctgatttctcattagaatagtcctgttttactgatgcataataaggcacttgcattttagaagtttgtaggtttttgaaaacattctcatttccactctttatcttgtttggttaaatagaccccaaatttgattctaaatcacaggaacaaagttcttttagaatacctaacccatggatgattttggacatctattctgcccccttgatgcatgtgaattttagttcagagaagaagagatcagactgtttactagcaggttttttattcacagattaaaaccgtaaacaasaaaacacactcagaaaaaaagctcaactgtttacccacatcctgacccttattcacttctctccagatcttcctgatcttggggccttagagtatactcttctgtctaggatggtctttcctcactcttcacttggctgtcttccttcttgacctttggttctcagagtacacatcactgtcttagaagctgttctctatccctcagcctaatgttgaacag

SEQ ID NO: 472710 - DNA, 474 bp, Homo sapiens
aacctctctccccaccaggcccttktctccatgccatggttactggagtccatgtagacccccagctaggtcaggctctgttaagaactagtgagtagtcctgaaaatgtaaaagtctgtctgtttgtggaccagctacttgcacccatgagcctcaagccagtacatggatttcacctggctaccctgacttggcctttacttcaagcctctaaagaacctttggagtgagataaacttggctttattcctagctctgcacatccaagttctggactctgttattcacaacctctccaaacctcagcatcttcacctgtagaatgggaaaagaaggcccacgccatgttagaccaaatttcttccctctccattcctattctatccagaccccacctgcctcatgatttactatcaccttctccttttgactctctggttattgaactttcttaagtttactaactcatttca

SEQ ID NO: 472711 - DNA, 474 bp, Homo sapiens
aacctctctccccaccaggcccttttctccatgccatggttactggagtccatgtagacccccagctaggtcaggctctgttaagaactagtgagtagtcctgaaaatgtaaaagtctgtctgtttgtggaccagctacttgcacccatgagcctcaagccagtacatggatttcacctggctaccctgacttggcctttacttcaagcctctaaagaacctttggagtgagataaacttggctttattcctagctctgcacatccaagttctggactctgttattcacaacctctccaaacctcagcatcttcacctgtagaatgggaaaagaaggcccacgccatgttagaccaaatttcttccctctccattcctattctatccagaccccacctgcctcatgatttactatcaccttctccttttgactctytggttattgaactttcttaagtttactaactcatttca

SEQ ID NO: 472712 - DNA, 586 bp, Homo sapiens
gaattacgagttccactttgcatcagagatctagggattcctctaaagttcagtatcttttacctccaagacaaagtctattaaataatcagataggcctcaaagccaccttaaaagagcaagaaacaaaactaaaaagcaaaccaaccaaaggcccaagttccttttccacctccaaatctctgagatgttcaaacaagtaaatggtagataagtaaacacaccttacccacgtttacagagcactgctgagtgcatttccctcattagaccctcattatatgactgtcattctaactgcttgctgttggaggcagcacatttcaagttctccaacagaaagacctgtaaactgaaagggcaaagccaactttaggggcctaaacaaaagaaacataagccaactgaatcccaaggaaatctccccaacctcagggacacttgagataaagactaagaagtcccaacaaaggggctggggaaagcaacacaggtgagtggcacagagccagttcttccatacgcactattttaactgtttaagaattaggtatcattcactccyactcctgcttacaaatgtgaa

SEQ ID NO: 472713 - DNA, 617 bp, Homo sapiens
attttcacaatcacagatgtataaaagctactgttctacatgaaaacaagacacatgtggcattataagtctaatccctagaaatttattttatcatgactgtgatctaaaactcttccatgcgcttttttgatttcactctttggactggttccagcctacacatggaattttgatatctacctgggccaacattgaagtcttgtgattcttctgcctggcctgctctcaggaagaattgtgacatcattggatscagtacttaggtgacgttacattcatgcttgccccatgcccacacacatccttgtgacatattatgttgtccatcactgaggtgatataactttcctctctgaaacgggccctgcacacagggcaggagagtgacatattcataagccaggcacacaggtaatgatacttttctttgccagggccatgcacaaaagataagattatgacatgttacagggcctattgtataggtgatatggctctcctgcttgaaaactgcccactggaatagtgacatattgctagaccaggtgacaaaggtgattgtactcttttgccaagaccatggtttcaggaaggttatgtgacatatatctggg

SEQ ID NO: 472714 - DNA, 549 bp, Homo sapiens
cagctgggcgtggtggctcacgcctgtaatcccagcactttgggaggcgaggtgggttgatcaattgaggtcaggagttcgagaccagcctgaccaacatggtgaaaccctgtctccactaaaaaaaatacaaaaattagctgggcgtggtggcaggtgcctgtaatcccaggtactcgggaggctgaggcaggagaatcccttgaacccaggaggtggaggttgcagttagccgagatagtgccattgcactcctgcctgggtggcaagagcraaactctgtctgaaacagatacacacacacacacacacacgttttgtgggtagcttgctcaataaagctaaataatgttaagcaggagggtgaaaggagagacaaagtgtcttgaaataaaaacacagcagagcatgatggacaatggggattctggagtcaggactaggtttgaaactcaacttccttacttattacctgcgtgaccttattcaaattacttagcctcactgagcttcagttctctcattaataaaatagtagtaatcatacct

SEQ ID NO: 472715 - DNA, 548 bp, Homo sapiens
cactgcccaggatccagcaactaaaggtctcccaggggtctcatctattctcattggtcactgcaggtgccagtcagctctgcataggtccaacctctctgccaccgccaatggtacctcgggggttggctgtgtccagcctatactcctgttctgtggagggaaatgggatgagcatcgggagaatcttgggtgggtggtaccccagccagtttaccttggttctggtgtaagcgcccctgtctccacacgtctgacaggccacaatggatggagtcctggtgggtgagagggcattcctagtggtggtgctggcaccccagggggcaaatgccccaggccatggccaccgccagtggaggcacccttagagatgctcttgcatagctgctctcagcaactgcagcctmcatgaaactctggctctgagaaatcctgggagagactgagtgagcatgaggcagaaatgtgagtccacaaacacaggggctctgccagcgcatttgacagatgagagggctgcttggtccagatgacacatgcagaag

SEQ ID NO: 472716 - DNA, 611 bp, Homo sapiens
tggtgttgagagccaggctggtgttgccctgccctcattgctgagctgcctgagttgattttgccaatgccaggagagcccacctaccagccctaacccctcaggctggctcctttttgatactgatgctcccagctaggaaaagttcaggttttcttcatatcctttagaaatgatgtttggattttggtccaaacctctatccctcccttgctatttccaggacaagccacatcatagctcctggccctacgttgcctctctgcttctggcttcctccttctctgatttctgccactgcatctcagcacacctgacatgagatcattgaaagggcaggtcatacatgtgcttaaccattaacaaggaaggagataaggacattagtgaggctcaaaacaagggctaagtggggggtccagagaagggcgggaacactttctactggaggagggatgaaagggttcatggagtagctgcattgtcctgggctttggagctaagcaacatttcagcaggaggagctagacattggagggtggacacagacrcccaaagtgcagtatgaggtcaaaagcagcaaagaatgcaaggagcccagaggatggggt

SEQ ID NO: 472717 - DNA, 487 bp, Homo sapiens
ctttctttccccagcatctgcagccgtcctgcctggggccatgagctcatctgatctcttactccaagctgccttacatttgacctggtcttggccatgacactgtcaatgaaagaccaagtggtaaagtggtatttgtgagtcagtcctccctctgagtcagaaatgaaacaatgcctcagcatgttagagggaatatagagccatcctgagatgaagcctraaggattcttcccccttagttctttgaggtgcaaagtgacttggtatacgtattggggagttgttaataggggtgaggagaacccctcagggcagccagatgcattctcatttttccttctttcttttcccctctcctttcttttcttctttctgactttttacttctttcaaaatataggagctaatcattcaggagaatttgtttctctttaatattttgatcaatgaatttattcccaatttaaattctgtcatttgtaaa

SEQ ID NO: 472718 - DNA, 303 bp, Homo sapiens
attggatggtgcctgcccacgttgagggcagattttccccattcagtccacagactcacatgcccatcttttccagaaacaccctcacagacacacccggggcagtccagtcattctaatttagaagcaaaaccatctgggtttcactttcagcagaagcgtggcaggctcagggcctcctgaagcattgagaataattaatgcaatgattgagaataaataatgctttaccagctatctgagtacccyttaactcagtgaggtagacacccaaaagcaaccatcctgcatttttttccgtga

SEQ ID NO: 472719 - DNA, 643 bp, Homo sapiens
gccagtccatgatatcttctatatataagtaacaatgctttgttttatcatctttctgccacacatggattcatgcacgctaagttctatttggtgtaattaaaaccccaggataaaattttaactctacctttgaaataatatagttagaagggaagaatctattgaggaaagcccacagtaaaagataagcttcagcatttcctagtttatcatcataaccatgtttttgaaaccactgaaatctatggtgtaaaagatattatggtgaaaaagaaacaatgactcattctatctgtattgtctcttttgaaatagaaatctttgttttatttctaaacatattttctcatagaatggaaatcattttctatgccatccttataaaagtaatttaagtaacagacataatatagaaattttctcattttatattcccaaatggccctgtgtcattctatagttttgagtactcatgggatcatatacaaatctgtaaaacaatgaattcattctcctcttgttagcaaaatttgcattttcaaaggaacaatacgatttagtccatcartctgaaccaagtaagataactcagtttcactatgaaccagacatttttctagactcctaaaataataataaa

SEQ ID NO: 472720 - DNA, 564 bp, Homo sapiens
cacagggaagtcggtcaccatttgccacactttctctgatgttttcctccattcgttgtcaattaagctgggtccccaactctcactaaagattaatttaactgctatgctcttccttttttcctgagaagtactgtaagaatactggtctcacacttgtccctgccctccctggtatcttgctgtgttccaataccactggtactttcctctttgtttttaaatcagaatctcttcttcagggtggtggctggaycttcacatcaccttactactgcttctactcaccactttgtctcttactttcctttccctgattcacttccagaagcagcaggatacattggttgtctatgccataccattgatcaaaaggtgttccatagactacctaatattcagaatcagaaggaatacttagttaaaagcgttaattcattagtccataccagaccttctggattgaagtttccttgcgtagggcccagtaatctatatttttaacaagttttcaagatgattcttaagtaaattttgagaaccactgatctctttcctcaacac

SEQ ID NO: 472721 - DNA, 492 bp, Homo sapiens
taaacctttattgtttttggttacagacatttggggatgtttgttactgcagcataacattccacctaactaattcaagtagccaaaaaaaaaaaaaacctgcttttattttcagtcctgttcttcctcaacatacttaaaagttcttctctattaattattgacgcaactaacaacccaaatccaatttggtcagaccatgttgcagaatctgctgcttggaacatgacaaaaacatcaagaaaaaactgttcagattacagagtttactacactgaagtacataaatgtcttcctccctccttgtcctcctgtgtcctagtacattcattggagtttcacattcatacaaataaaataaaagatgaggatacacggttttgctgaaaatcttcmcattccttaaagtttttaatatggaacattgcatgtttttcatacttgatatgaacacttcatgcacattttcccacgtgcaatgcatgcttgtgg

SEQ ID NO: 472722 - DNA, 492 bp, Homo sapiens
taaacctttattgtttttggttacagacatttggggatgtttgttactgcagcataacattccacctaactaattcaagtagccaaaaaaaaaaaaaacctgcttttattttcagtcctgttcttcctcaacatacttaaaagttcttctctattaattattgacgcaactaacaacccaaatccaatttggtcagaccatgttgcagaatctgctgcttggaacatgacaaaaacatcaagaaaaaactgttcagattacagagtttactacactgaagtacataaatgtcttcctccctccttgtcctcctgtgtcctagtacattcattggagtttcacattcatacaaataaaataaaagatgaggatacacggttttgctgaaaatcttcccattccttaaagtttttaatatggaacaytgcatgtttttcatacttgatatgaacacttcatgcacattttcccacgtgcaatgcatgcttgtgg

SEQ ID NO: 472723 - DNA, 594 bp, Homo sapiens
tgccacttgggtcatgttatgaagcccccttcctctccagggactgtgttgccacacttaaaagcattttaattgtctctgaaagtggccatattctccagagaaaagtgaaacctgcattcagctctctggaaggaatctaattatcttgaaattactgaattctctaggtgacttcttccggataaacaggatccttgtttttactttttttttttagggaagatggtttggtattactcgtaatagactgttctgtgctccccctctcactttggttcaatgagagacgcagtggaattcttcaatgcctcctctacacctggcctttatcaaactgtataaacacccaacactgcgtataagtatttgttttttctttttaaagcaaagctttggtagtgagcatattcattaaactttaaaaatgtctstataatcttctttttatttagctcttagtacttctacatccatagtcttcattctgaaataacgtttgttttgtggttgctggtagatgtgatgaaatgatctaaaatctgcattccacaatgctttacaacagaccaaaatagcattcttgttcacgct

SEQ ID NO: 472724 - DNA, 594 bp, Homo sapiens
tgccacttgggtcatgttatgaagcccccttcctctccagggactgtgttgccacacttaaaagcattttaattgtctctgaaagtggccatattctccagagaaaagtgaaacctgcattcagctctctggaaggaatctaattatcttgaaattactgaattctctaggtgacttcttccggataaacaggatccttgtttttactttttttttttagggaagatggtttggtattactcgtaatagactgttctgtgctccccctctcactttggttcaatgagagacgcagtggaattcttcaatgcctcctctacacctggcctttatcaaactgtataaacacccaacactgcgtataagtatttgttttttctttttaaagcaaagctttggtagtgagcatattcattaaactttaaaaatgtctctataatcttctttttatttagctcttagtayttctacatccatagtcttcattctgaaataacgtttgttttgtggttgctggtagatgtgatgaaatgatctaaaatctgcattccacaatgctttacaacagaccaaaatagcattcttgttcacgct

SEQ ID NO: 472725 - DNA, 506 bp, Homo sapiens
ctgacaatagtcccccttacttgagaactatctccagacaacagtaggacctcccattgcacaactccactgggtatcatgcacacacaacaaaatatgagtagtgcccctggaggtgtgcaatgaagaattcttgctcaatagcctactctggaacagaggaccctacctacccccctgcagttggttgaaccagggataaacccttgaccatactgagccaatcagggccatcagatcatctcttttaggatttggaatttggattgaaaaccttccaattaatgcaggctgttgccttatatgaagataaggcaaactttagtcacctggagcagggtgtgtgtatgtgttrggtggtggttggaaaaggggcatcttctacctgcaattgcatattctgtagaggggaaataatataagcaataatcagagagaagtagcagtaagagatagagagaaggccccaccaaggctcctgacaacttttctcttcctagctgcag

SEQ ID NO: 472726 - DNA, 569 bp, Homo sapiens
ttttccttatgtaaaccaaccaacaaagaagccccttacagtatctttgaaaacatcagtgccattcgcttgattgccawtcttagcttttctttcctttagaccaaatcctattctattcaagacttcttcccatcctagtcctgtaagagagcaaagacagacataagggtacatatttcaccaaatctatctgttccttctctgcaggactgccgtttttctattttgctgggcatggaggaatacatagcttccctgcaagtctatctctcccatgggtcctcaggtcttatgctcttcctgggttgcatcctgtcccctatcagtgagaatccctggttaatctggcagctcattacgcctaattaaagttctataaactttactagtatagcattttatttaaaacatctctctaaaacagatctttctctattcaaagtcatccaagatcatctcctaccaaaatcatcttttatctcttgggttttaaattcctaatcttctaactccacattgtctaagtccctttattagttcccagttccttgtcagagtttacttct

SEQ ID NO: 472727 - DNA, 569 bp, Homo sapiens
ttttccttatgtaaaccaaccaacaaagaagccccttacagtatctttgaaaacatcagtgccattcgcttgattgccaatcttagcttttctttcctttagaccaaatcctattctattcaagacttcttcccatcctagtcctgtaagagagcaaagacagacataagggtacatatttcaccaaatctatctgttccttctctgcaggactgccgtttttctattttgctgggcrtggaggaatacatagcttccctgcaagtctatctctcccatgggtcctcaggtcttatgctcttcctgggttgcatcctgtcccctatcagtgagaatccctggttaatctggcagctcattacgcctaattaaagttctataaactttactagtatagcattttatttaaaacatctctctaaaacagatctttctctattcaaagtcatccaagatcatctcctaccaaaatcatcttttatctcttgggttttaaattcctaatcttctaactccacattgtctaagtccctttattagttcccagttccttgtcagagtttacttct

SEQ ID NO: 472728 - DNA, 429 bp, Homo sapiens
ctttttgtttcaaagacctggttagcaacagaagaaatgcattgctacatactggagaaagcccacttgctgctcataataacaataaaacctttatatcctgtatatttttacctctgtaaagcatctcattttcaaaactactcgtaagacttttcagagcaaacagcatggatttgggcaaagagcaaactattagagacaggggtctgctatttatttatttatttttttaattttttttgttatactttaagttttagggtacgtgtgcacaacgtgcaggtkagttacatatgtatacatgtgccatgttggtgtgctgaacccagtgactcgtcatttaacattaggtatatctccaaatgctatccctcccccattcccccaccccacaacaggccctggtgtgtgatgttccccttcctg

SEQ ID NO: 472729 - DNA, 429 bp, Homo sapiens
ctttttgtttcaaagacctggttagcaacagaagaaatgcattgctacatactggagaaagcccacttgctgctcataataacaataaaacctttatatcctgtatatttttacctctgtaaagcatctcattttcaaaactactcgtaagacttttcagagcaaacagcatggatttgggcaaagagcaaactattagagacaggggtctgctatttatttatttatttttttaattttttttgttatactttaagttttagggtacgtgtgcacaacgtgcaggttagttacatatgtatacatgtgccatgttggtgtgctgaacccagtractcgtcatttaacattaggtatatctccaaatgctatccctcccccattcccccaccccacaacaggccctggtgtgtgatgttccccttcctg

SEQ ID NO: 472730 - DNA, 270 bp, Homo sapiens
gtgttgaaaggagtaaaagccccagagtgcagccyaggctgacagtcaagtaattacattttgtttaaaaaaaaaaaaaaaaaaagtgagcgaattaaaatgaggaatgtcaggagggtattgcaacatgaatctttccagccctggcgtatttggaggagtgggctgctgctgtgtgctgaggttgtaggggggctctagggagggaactgatgaatgtgttagggagacaaagattccatccccatctcccagctcttaattctcaca

SEQ ID NO: 472731 - DNA, 615 bp, Homo sapiens
tcacctccagaagcacccccrtcaccatcacctccagggagcacctccttcactgtcacctccaggagcacctccttcaccatcacctccaggagtacctccttagctgtcacctccagggagcagctccatcaccgtcacctctagggagcacctccatcacctccagggagcatctctttcatcatcacctccaggagcacttccttaaccgtcacctccagagagcacctccattacctccagggaacacctctttcatcatcacctccaggagcaccttcatcaccatcactttcagggagcacctctgttgttggagggcagcatctctgtcactgtcccctccctcctgggctccaggtcatgactggtcagcctcagtggggctctaaggtctgaggcctctctggcatcaacctcttaataaatctctctctgtggccaaaaacgttccacgtcatttcttcctcaatgtcactttcctcgctgaataaccgattaatgcgacatgagaataatttacaataagatgactgtatttgctgtgaagcccaggtcagatgtgaggggtgtgaccgtcggatcagacagtcctagagcccgcagcgtcag

SEQ ID NO: 472732 - DNA, 503 bp, Homo sapiens
cctctgtctcccttcctcttcttttctcccaaggctctgcttcagccaaactcaaccaaaggtgagcaggcatggagctggtygaagctgtccttggcctgggctttgggggcagagcgcagggcaagaaggccagggatgcccaggctaactttgaaatctgagttctcgaccttgataggataggaggtcagaagcaccttgttataaccccattaggatttcttcctgggggcctaacagaaactggctcctccaaaagactccaccgctggcaccaaccacctgcctgatgccacccctcctttcctgcctggtaagagaccactgaccagaggctggttccggatgaccacaggctggttccggatgaccacaggctggttccggacaggctgcggaggatgcgcagggagggtttttgtgtctgctgcttcacctttagacctcagagggctggaaactccaccctcgggccgtgataacaccaccacttttgcaca

SEQ ID NO: 472733 - DNA, 515 bp, Homo sapiens
tgctggaggggctgggaagcctttgttaattctgggacaccccacatggccttggggccatattcacaactcatgtgcccctggcaggcaccgggtttcccagaggctcagctctcagctctctccccttgcccatgtccccagccgagaaagcctcggagagaggtgtgggaaaggaggggaggcaggagtgtggaccacgcggagcttggcgagaggcagggctgcatcctggtgggagtgggtggcaaaggctgggcctctggggacgctgcaaacttggggcagctccgtcagtgccttcacaggacctgagcagaggaggcttgcaggaccgcccctgacgggtgctcctcggggcacaagtcacactcatcctgtgccgtctgccatgagctccgcacaccccgtgaagcctggaccgtctcacggggaccagagactgcgagttaactggttttcctcacaacagsgatgccgtgacattgaggcatttgctggtggtgaacaactta

SEQ ID NO: 472734 - DNA, 557 bp, Homo sapiens
tagattaaaatttgactacttgtttcaaaacaaaatataaactgattttaattmtaatactcaaatattttgcactaaaataatttctatggtttttaaatttatgctgtgttttttaagtgaaaaatgagaaatatttagttgtatttatcaaataatgcattgtgaacatgtgtagtcaaatcataggtcctttttctctttgtttgtgactttctgatacacctgtggaattttgattacataaattttatttataatctgggtaagcatatcctgagacaaatttgcggaaatcattcctttcatgattctattaatttgtttcctatcatcagtgttctttatgttacaatggtctctggtggtatccattaagcaacatatggccaagaaccattgtagggtggctggcaagatggctgaataggaacagttctggtctgcagctcccagcaagatcaaagcagaaggtgggtgatttctgcatttccaactgaggtacctggctcatctcattaagacttgttagacagtgggtgaagcccacagagggc

SEQ ID NO: 472735 - DNA, 552 bp, Homo sapiens
gaactgaattaaaccctgtgcacagaaataatttttaaagyttctcccttcctcattcactttcgctttcccaatttgcaagttctttgatttgattttctcatgatttccctaacctttatatggccagaatattcacactgaatgacttaatgagtgctgtaggagcagaaggaaatagagaagcatcgaagtacctggcatggctaatgaacagagccgggaggactagtgccctttgcatgcctgctctaccaccaagtagactcaggattcattcccacatctaacatggaggcttacaccagatcagttttttaaagcaataaggattctttgagctttcttgaaaacacctctaacaatgtacttttaatgtttcaaggagataagggaacaaacaagggcaagtgggacctctattttaatagaacagctttgcttttagctattttgtttttgaactttcatatgatttaaattggataaaacagaaaaggtctaaaaactgccgacccaagtgatctctaaggccttttctatccctataat

SEQ ID NO: 472736 - DNA, 552 bp, Homo sapiens
gaactgaattaaaccctgtgcacagaaataatttttaaagtttctcccttcctcattcactttcgctttcccaatttgcaagttctttgatttgattttctcatgatttccctaacctttatatggccagaatattcacactgaatgacttaatgagtgctgtaggagcagaaggaaatagagaagcatsgaagtacctggcatggctaatgaacagagccgggaggactagtgccctttgcatgcctgctctaccaccaagtagactcaggattcattcccacatctaacatggaggcttacaccagatcagttttttaaagcaataaggattctttgagctttcttgaaaacacctctaacaatgtacttttaatgtttcaaggagataagggaacaaacaagggcaagtgggacctctattttaatagaacagctttgcttttagctattttgtttttgaactttcatatgatttaaattggataaaacagaaaaggtctaaaaactgccgacccaagtgatctctaaggccttttctatccctataat

SEQ ID NO: 472737 - DNA, 531 bp, Homo sapiens
agagggtgacaagaagcaagggaagagtggaaagtatctgcaccagcgatttttatgccctcgaagcaatacggtaccttccaggattcctaggtttttcctcctgctatctgaagaagagatctaacaaactactcttttcaaaccattcaaaacccaatgtcaacacaggatccctagaccattttgcccaccaactagaggagagagagagaraaaaaaaatgtaccaaatagactgcttgttttagccttacttcccagtatcctttgaacaaatatcctatctttccttactggcaacaaagtagaggaccatttatggaatgaatgaccaaataatttgtcaacatgtctgcaaccaattcccattggaatgcagggccttcatcttttctttaatagggctatgttatggcaagtatatctcattatctttgccataatacttcagttcaatttgaagtgtctaatatgggaccttaatttgggggctaaaaagatatctggatcagggagcgcacatggtaca

SEQ ID NO: 472738 - DNA, 531 bp, Homo sapiens
agagggtgacaagaagcaagggaagagtggaaagtatctgcaccagcgatttttatgccctcgaagcaatacggtaccttccaggattcctaggtttttcctcctgctatctgaagaagagatctaacaaactactcttttcaaaccattcaaaacccaatgtcaacacaggatccctagaccattttgcccaccaactagaggagagagagagagaaaaaaaatgtaccaaatagactgcttgttttagccttacttcccagtatcctttgaacaaatatcctatctttccttactggcaacaaagtagaggaccatttatggaatgaatgaccaaatamtttgtcaacatgtctgcaaccaattcccattggaatgcagggccttcatcttttctttaatagggctatgttatggcaagtatatctcattatctttgccataatacttcagttcaatttgaagtgtctaatatgggaccttaatttgggggctaaaaagatatctggatcagggagcgcacatggtaca

SEQ ID NO: 472739 - DNA, 619 bp, Homo sapiens
tgcaggaattcagagcatgtctgagaaacgaattttgtctttctctctttcatccattgctctgttttcttctgcattgtttttgcttatcctttattgcacagtctctcttctggcagcctcagggttatattctaacacatttccaaccacctaaaattaaggttccttctattaaccastagattcagcagatttccctcgttatttctctttgacttggtttagaagataatgttctaccatattctacaacttctaggtaacactgactatgacaggactcaatcttggtcaaaaggaatactttgtgtccctagtcatggtgtctagctcatatattatctttcaagctaggttaaggagaaacaatttgaaacattttttagaactatagaaaaaaggagtcaatattttctgaaaggtttgaaaggcttctagaatattgcataggtatgcatcaaatatttcagacatactgaaaatgttttcatggtttatcaaaagtttatatttaactaagtgtcctatattttacatgctaaatctggcatacttaagagattatttgcctacatgatgaattggacttttcagatatgttaatatgcatgcccta

SEQ ID NO: 472740 - DNA, 619 bp, Homo sapiens
tgcaggaattcagagcatgtctgagaaacgaattttgtctttctctctttcatccattgctctgttttcttctgcattgtttttgcttatcctttattgcacagtctctcttctggcagcctcagggttatattctaacacatttccaaccacctaaaattaaggttccttctattaaccagtagattcagcagatttccctcgttatttctctttgacttggtttaraagataatgttctaccatattctacaacttctaggtaacactgactatgacaggactcaatcttggtcaaaaggaatactttgtgtccctagtcatggtgtctagctcatatattatctttcaagctaggttaaggagaaacaatttgaaacattttttagaactatagaaaaaaggagtcaatattttctgaaaggtttgaaaggcttctagaatattgcataggtatgcatcaaatatttcagacatactgaaaatgttttcatggtttatcaaaagtttatatttaactaagtgtcctatattttacatgctaaatctggcatacttaagagattatttgcctacatgatgaattggacttttcagatatgttaatatgcatgcccta

SEQ ID NO: 472741 - DNA, 619 bp, Homo sapiens
tgcaggaattcagagcatgtctgagaaacgaattttgtctttctctctttcatccattgctctgttttcttctgcattgtttttgcttatcctttattgcacagtctctcttctggcagcctcagggttatattctaacacatttccaaccacctaaaattaaggttccttctattaaccagtagattcagcagatttccctcgttatttctctttgacttggtttagaagataatgttctaccatattctacaacttctaggtaacactgactatgacaggactcaatcttggtcaaaaggaatactttgtgtccctagtcatggtgtctagctcatatattatctttcaagctaggttaaggagaaacaatttgaaacatwttttagaactatagaaaaaaggagtcaatattttctgaaaggtttgaaaggcttctagaatattgcataggtatgcatcaaatatttcagacatactgaaaatgttttcatggtttatcaaaagtttatatttaactaagtgtcctatattttacatgctaaatctggcatacttaagagattatttgcctacatgatgaattggacttttcagatatgttaatatgcatgcccta

SEQ ID NO: 472742 - DNA, 487 bp, Homo sapiens
aaaaggggcagttccaacaaacaaaacatcattttggtgagattcatataggtttgtacttgtagttatacttcatactcattagtgcatttgttcccattgtatgaatacaccaaaatgtatttcatgcattctctgttgatgggcatttgaatagtttccagtttgggtctattaaaattatgttgctatgaacattttgtacatgtcttttgataaacatgcatacatttctgttttgttcatatttataagaaggaatgctaggtcagagggaataagtatattctgttttgacaggtacaagtaatcaattttctaaagaggttttacccatttactttcctaagagcagtgtatgaattctaactgctctatattctatccaaacctcacacttttctgcctktttatgttacctattcggatttttaaagaagtcagtaaattgagatagattatctcaagtaatgactgttaattggca

SEQ ID NO: 472743 - DNA, 638 bp, Homo sapiens
gtaaaggttgtgacttgttgatgaatccaagtctgaaaaatgctatgcatgtcccactctgtttctttcatctcattctgtccttaatcttactattatataaatgtcacttgcataccaatatttaaaatactaaaccactttaacaacttacagaaattttagaataaattttcttacaagattgcagtcctatttctattaatagctattataacatatatttattcacataagaaaaaatagctacactagagttactacagagtatacccatgtaacaaaactatgcatgtatccgaattcaaaataaaagttgaagtaaatatataagaacaaaaaagtatacaaaaggaaataaatacttaatytttaatcaattcagtcgtttccttcttttccattccataaagatttacacagtgcctatgatgtgctgtgcatcattgtaaatattataaacattgtttcaaggatttttttgaaaagagagcaaatgaggaagatcagtaggtattaaggttagagtggtaggaagtggctagaatatgagagactgtaacaatgataaagagtttaaatttatatctatatgaagctatcagaaagttttaagcagtattaaatgatactttcac

SEQ ID NO: 472744 - DNA, 634 bp, Homo sapiens
cctcatttatactcacaattttaaattgtcaccctttccctgtctttctctttctctattttttaatcactcctgttacaggtttgtcaattgtgttaatagtttaaaagaacaaacatttttatgtattaatatactgtttgtccatttcctgtgtcattgattgcttttcttatctttatcagttctcttcttctacatactttgcattcaatttacttgttcttttctagctttgtaaatggaacattcagataattggttttaggccattcttcctttctattataagaataaaaaatctatacacttttatctaagcattttagttccctcccacaaacactgatgtttaatatgttcattctgatttattcaaaatattttcaaattttacctatgatgtcttctttgatccaaggrttatttaaaagtgaggttttttttgttgttgttgttgttgtttttttgttttgccagtaacagaggctctacatttctctgaggtggagctcccagaggcaaccaaagactccattgtcactaccactgcattgatactgcccttgctggcctcagactgggtaaggagcaaagacccggagtgctttaacaacacctcaagcaagtcaca

SEQ ID NO: 472745 - DNA, 634 bp, Homo sapiens
cctcatttatactcacaattttaaattgtcaccctttccctgtctttctctttctctattttttaatcactcctgttacaggtttgtcaattgtgttaatagtttaaaagaacaaacatttttatgtattaatatactgtttgtccatttcctgtgtcattgattgcttttcttatctttatcagttctcttcttctacatactttgcattcaatttacttgttcttttctagctttgtaaatggaacattcagataattggttttaggccattcttcctttctattataagaataaaaaatctatacacttttatctaagcattttagttccctcccacaaacactgatgtttaatatgttcattctgatttattcaaaatattttcaaattttacctatgatgtcttctttgatccaaggattatttaaaagtgaggttttttttgttgttgttgttgttktttttttgttttgccagtaacagaggctctacatttctctgaggtggagctcccagaggcaaccaaagactccattgtcactaccactgcattgatactgcccttgctggcctcagactgggtaaggagcaaagacccggagtgctttaacaacacctcaagcaagtcaca

SEQ ID NO: 472746 - DNA, 653 bp, Homo sapiens
tggataacagatgcttttatgagcataaaagcacaaatggataaatataagggaagatataaaggacataaaaatcagtctaaggtgtccagcatatgttcaataaaggttcaaaaagggcaaatgaacgatcatgcccccatattgaaaggacattccaaagttcatgaaaaaaaaatgtatcaaccctgacactataatatattgtgaaatagcataaacaaaataacaaaatgtttaaagttttttttttatttaasagggcgaagaaaagtgaagaaatataattgttgaggaagtagctacctgcaatattataagaattgaattcgcatcagtatactcatcagcaacactagatgtcaggtgccactgcagtggtgtttgttacattctgagacattattttagccaagtgttcaatactcaataccttcaattaagttttagccagaataaaaatattttcagacacaagaagaatcagaaaacttccttctatacattctgtcctaggaaattacttacggatatgcttagcagtataaggatataaactatgtgagagaagatcacaaaggaagtgatatcacagttccagtttctataacagacctaaataagatggaaatcagtctacattgagcattgaa

SEQ ID NO: 472747 - DNA, 653 bp, Homo sapiens
tggataacagatgcttttatgagcataaaagcacaaatggataaatataagggaagatataaaggacataaaaatcagtctaaggtgtccagcatatgttcaataaaggttcaaaaagggcaaatgaacgatcatgcccccatattgaaaggacattccaaagttcatgaaaaaaaaatgtatcaaccctgacactataatatattgtgaaatagcataaacaaaataacaaaatgtttaaagttttttttttatttaacagggcgaagaaaagtgaagaaatataattgttgaggaagtagctacctgcaatattataagaattgaattygcatcagtatactcatcagcaacactagatgtcaggtgccactgcagtggtgtttgttacattctgagacattattttagccaagtgttcaatactcaataccttcaattaagttttagccagaataaaaatattttcagacacaagaagaatcagaaaacttccttctatacattctgtcctaggaaattacttacggatatgcttagcagtataaggatataaactatgtgagagaagatcacaaaggaagtgatatcacagttccagtttctataacagacctaaataagatggaaatcagtctacattgagcattgaa

SEQ ID NO: 472748 - DNA, 551 bp, Homo sapiens
gattaatgaaagttatagaagactgtaaattgtcagataaatgatttacattgtgatacaaaataaacattttgtcctggtttaactagaaacagtgacaatttaatttctgaagatgggcgtgaaggagttgaggatctttgaaaaataaatgttaatcacaggagagaaaattaagaaatcaaaaattagttatttaagcatttagtttttaaatatagaattcaaaggggaatgaagcaggaaactacttttcattaaaagtctttctgctttctcaagcatttgtaaatattactttgattattcttcaaatgaatttttcacatgaaccaatcatcaatttgcattttcttatttcataacaaatttgttgacatttttacagtgtcaaaaagtggcaaatatcatatataattttaatataaataaataaaacacatggaatggattcctgagtcacttctccttgtattcttctcaaaacacaatcacattgttttgctttatctraaattttcttttcctgcatggttctttatgatataatt

SEQ ID NO: 472749 - DNA, 658 bp, Homo sapiens
cagttttattgtttcaaaccccaaatatgtgacaatactcaataaacatttttaattattgttcaatgactaaatcactaaagtatgtctttaattaacaaatacaagtaaattcaaaataaatttatatgtaaatggactcacaggtggaccttaaccacctgaaacaacttaaatgctggtaaaataggggtacaacaattcacaatacaattaaagttatgaaatgtatcatatacacaaaaaagagtctggaaagatctacrtcttattgtaatgattttctaggctctaaagcactaagatgaaattttggtttccaaaatttctaaactgaatctccatgtaaaagtcaacttttaagatttttaacaaaaatcttattttccattttactttttagtgcacataaagtgctatttatcactgccctatccttcatttaagctcttcttgaccctttaacatttattgtttgcataatacattctatttcaaaacagtcccaagagttttctttatgatttccataatttccctgtgagataattaagaatgtcatcctcccctggaatttacagataaaaatattacctgatcaatttacatggcttgttcacatagataatgtagtcaaacttcattaatttagtaattt

SEQ ID NO: 472750 - DNA, 501 bp, Homo sapiens
aaacattaaggtataagtacatctaaagattaggaagcctgtactcttactcctatgttagactggaatctgctctgacagttttcgctaattagtgagtttattcatctatgatttcagcaaaacaagatcaaaaagttcatttatttatttattcattcattmattgaatatttattcagtgatatactccacagacagaacacaaaagtgaaaagttaaaatccttgctcttattacctttggattatcatggaaggagagagacaaaataaaaaaaaattaagtaaaaagacatgatgttagatattggtaagaactatgaatgaaaacaaagcaagctacagagaagggcattgttaaatagaatggggagctcaattttaaataagatcatggtaaaggcctcactgaggaagtttctggggcacacatcataaggaagtgagagcaaaccatgagtgttattaagaagagctttctagtcgataacaaaacaaa

SEQ ID NO: 472751 - DNA, 536 bp, Homo sapiens
gtcctctctgatgtcctattttagattgttatttccatgttaargtatccctctacaaatgctcataggagtagggcacaaagatataacaaaaggtttctttgacaaagactgggccttgtgcttatccctgctatctgaaggtttagaatgcggttgggaggtgcacagatactcccattaggtaataataggtagttaataattaagtaatattgtccccatttcacatgtgagaaaattgaggattcgttactgaactcaaagcacagcaaggcaggtagaagagacaaaatcagaaggcaggagctcccacccccagattccagccattctcctgtcccacacgtcccggctgacccacctgaagtgcaccctctcaccccatccccatcccgtgaccccaagctagttcctcaaacttactctcaaattgaaccccttttgtaaccaacaaaaattaatgatgctagaggaaggggttaaaaaatatactctgtgattcatgaaataaaacaaagttaaccaaggagacc

SEQ ID NO: 472752 - DNA, 652 bp, Homo sapiens
aaaaagcagcttgtggcaaagttggcaaaacatatgaagacatttattcttcagyagttcttcaatggagtggaaaaccaaagcctgtattttgaagaaaggggtatgaatattatcttggaacaagattccctgagatgtgaggcagcacatcacccgaagatgatctgttgaggctcgatgagcatacaagtctaccaacgacttactctatgaccatattagcaatggtttttggcttttgaaaaaaaacatgttacctttagacagtcacccatggggtcaattcaggtacaaacttttaagaaagaggccctcttttaagcacagaagtctccttaacataaactcacccccaaagaaaagtgaggaacagaaggaagaagagggaggaacaggggccacctcacgatggcaggtcaaaaaacttgcaagagatttggagagttaggcatccctttccagatagagtggtcagtcgcagcttcacaaagacggttctcccactttaaaggagcaaagccaccttcttctgagaaggtcaccgttttctgctgggaatgaaatttcaggagggactttcctgaaatggtaaaggagaaaggagcagcccagtctggacagtcagaacaactgaataaaccctggttat

SEQ ID NO: 472753 - DNA, 658 bp, Homo sapiens
acgcaaaaagcagcttgtggcaaagttggcaaaacatatgaagacatttattcttcagcagttcttcaatggagtggaaaaccaaagcctgtattttgaagaaaggggtatgaatattatcttggaacaagattccctgagatgtgaggcagcacatcaccygaagatgatctgttgaggctcgatgagcatacaagtctaccaacgacttactctatgaccatattagcaatggtttttggcttttgaaaaaaaacatgttacctttagacagtcacccatggggtcaattcaggtacaaacttttaagaaagaggccctcttttaagcacagaagtctccttaacataaactcacccccaaagaaaagtgaggaacagaaggaagaagagggaggaacaggggccacctcacgatggcaggtcaaaaaacttgcaagagatttggagagttaggcatccctttccagatagagtggtcagtcgcagcttcacaaagacggttctcccactttaaaggagcaaagccaccttcttctgagaaggtcaccgttttctgctgggaatgaaatttcaggagggactttcctgaaatggtaaaggagaaaggagcagcccagtctggacagtcagaacaactgaataaaccctggttatca

SEQ ID NO: 472754 - DNA, 570 bp, Homo sapiens
ctgtttctaattacaccttgatccgataataactaaatattgtttaaagttctggcagtgactacttaaggagatgtgcaagatcaataaaggaaagtaacacttccaggcataagcctgcataaattagaacctgtagaaaacacaaacacaattcagtaggtggcactattccctcagccagaactctcttcattccctgtgacttgagtagtcctcctacggcaatcacctttaccaatttcttccacggaattctgtgacctaaattagtatcaacagactaacctcaaatwtattgcctggcttcttccctttgagatacacaacccagatgaaaactatgtgaattgcagatgtaagagtacagaagtttgatttcatctcaaatccttcgataattaggtcagcatattgttacaggttacctgaaagtaaattaattcttcatgcccaatatcgacaactcaactgatttgacctcttccattgatatgagccaatgagataacttaaaatatttaaaccagccaatgagcaggtttttcaatctcagaattattgacattt

SEQ ID NO: 472755 - DNA, 632 bp, Homo sapiens
tgcctggtgactcataaatgccaatctgactaatgtctcatttagagcactcagtacgcacagaagcccagacatcatttctcttgccaagaaacgaatgtatattttcattaaaaacaaagaaatgaacaactggcacacccaggaacacatctgcacctgttgttacagtggtttttatattctactagctggatagtcaggagctgaaacacccagggatgtaatgaaaaaaaaaatcccycttcatatttaaaagaggattttatgaaatttttatgaccccgtgttatttattgccactttttggtcatatcttatttgttaccattttctctatagttcattgacctctacattcaaacctggggcgggggctgtatttgaatggcagtattttatttatatagtactgctcccacaaaaaagttcgaagtactttataaatatctctttaaacttgaaagtaacttaagtgtcactgtcttcatcttaaataaagatacaagaaaggaaagttcaaatggctaaaattagcaagttagagaggatttaacaatccagagaggatttctgggaaaagatggcaaattgtccttcaatatgtatcgcctctccttctcaaagtctac

SEQ ID NO: 472756 - DNA, 632 bp, Homo sapiens
tgcctggtgactcataaatgccaatctgactaatgtctcatttagagcactcagtacgcacagaagcccagacatcatttctcttgccaagaaacgaatgtatattttcattaaaaacaaagaaatgaacaactggcacacccaggaacacatctgcacctgttgttacagtggtttttatattctactagctggatagtcaggagctgaaacacccagggatgtaatgaaaaaaaaaatcccccttcatatttaaaagaggattttatgaaatttttatgaccccgtgttatttattgccactttttggtcatatcttatttgttaccattttctctatagttcattgacctctacattcaaaccyggggcgggggctgtatttgaatggcagtattttatttatatagtactgctcccacaaaaaagttcgaagtactttataaatatctctttaaacttgaaagtaacttaagtgtcactgtcttcatcttaaataaagatacaagaaaggaaagttcaaatggctaaaattagcaagttagagaggatttaacaatccagagaggatttctgggaaaagatggcaaattgtccttcaatatgtatcgcctctccttctcaaagtctac

SEQ ID NO: 472757 - DNA, 495 bp, Homo sapiens
ttagtcaataaataacaaaagtgaggtcacaaaggataaagagctttgccaaagccaccacggctgttggtggaaagaccacagtatagaattcgaagttgtaagtttggacctgcggtgaagaagtttacattaaaaccacatgtataatatccttccgcgctaggtacactagcagtagcataaggagtgtgtatttgaacatatatttaaagatcaacactaaaacaatagatggaggcttcagctacccctggagccatatccactttctctcctgactccactggaayaaggaggttaggagaatgagcactggacagggtgaagagggaggagcaaggctgagcgtggcttaagttcctgctggggacgaggagattcctccggttttcaaaatattccttttccattgattctgctaggtccttggtccttaaatatcagaggcaggtagatgtttatatgtaagtgtacaatcctgacagtgtgcaa

SEQ ID NO: 472758 - DNA, 612 bp, Homo sapiens
gctgctcctctctgcctcacytgcatgttaggtgcaaagaaaccaaattaaattggccacaaaaaatacagtgcctttttggtaaggcttatgtaagctcgccatgtgtgtttcgcgatggtcttggcttccactgatatttcaggatggttctctctaccagactggacaaaggaactggtccattgtacccagaagcactctgtggcatttgagtgaaatttaaaccttctatttaaaaatgccttcacagggagccttgtattatttcatagatggaccatgtgacgttattttgtttaaaaatataaatggatacttaagagactttgcaaagtatttaccaaatcacagcaacccagtcctctgaagtagtgatcctaagtgatgacaattaagattctttccaggttgctaccaaaatttaaatgtctaaattcaaggaaaattttcaaaataatgcagttctttatttgcgcacaatgatttaatcatctaatagctgtgttttgctgatttttcaaacttgttcataggtcagaccactagaatcgaacacaaagagcaatgttaaaataaaacctaaaatagcatgtcatatttacagtaaac

SEQ ID NO: 472759 - DNA, 609 bp, Homo sapiens
tgctcctctctgcctcacctgcatgttaggtgcaaagaaaccaaattaaattggccmcaaaaaatacagtgcctttttggtaaggcttatgtaagctcgccatgtgtgtttcgcgatggtcttggcttccactgatatttcaggatggttctctctaccagactggacaaaggaactggtccattgtacccagaagcactctgtggcatttgagtgaaatttaaaccttctatttaaaaatgccttcacagggagccttgtattatttcatagatggaccatgtgacgttattttgtttaaaaatataaatggatacttaagagactttgcaaagtatttaccaaatcacagcaacccagtcctctgaagtagtgatcctaagtgatgacaattaagattctttccaggttgctaccaaaatttaaatgtctaaattcaaggaaaattttcaaaataatgcagttctttatttgcgcacaatgatttaatcatctaatagctgtgttttgctgatttttcaaacttgttcataggtcagaccactagaatcgaacacaaagagcaatgttaaaataaaacctaaaatagcatgtcatatttacagtaaa

SEQ ID NO: 472760 - DNA, 609 bp, Homo sapiens
ttatatctacatctacagagttaccaagtacataagaagccaataaatacattctcaggtgtcaacaacttcaaaatttatcattcatatcctttccagaaaacaaaacaaaaacaaaaactttaagcrcagtggtcttccaagggagtgaattcgtgagtctccagttaaatggattgttgattcatgacctagatttaactaactcaaactgtaccaaatggacaagtaatttaaaaagattctggaaagaagagacagataaaataaaatgctgataatacaaggacaactaaacatgaaaatgagctgacacgtctccttttactaggacaatctcctatttctcatacaaacacttcctctcccacttttacaaactaaaagctaattctcatcagttgaaaaataattggaattattaaggacattatatggactatggatgtatagccactaatttttaacaattcccactcctgggaaagcacagtattgagagaatcaagtcatgaaggggcctcatatcaccttgtgatcagggggctgggaccccagggccagaagaggagtggggccttcagggaaagcttcacttagaatctcact

SEQ ID NO: 472761 - DNA, 601 bp, Homo sapiens
ggaaatggccagaaaggtatcaatctccctgaagaggatggcacaggtgagctggtagctgcttctgctggaatcctgcagcccaatgaggtgggatcagaaggaactggrtgagcagggaagccttgccctgtgagctgaccccatcagtagggttgttcaccagtttccattcattatgtcattaatgccgcgaaaagagcccttcaccagtgtaagtctactcaccattctgttgctgttctcctgatgacttctcggctttggagtttttcccacgagggttgtcacttttgtttgcccgtgttccattgacttgattcttagtttctccagacgtctttttctcagctttgccagatgcgccttcttcagcctggcttttggcttccatttccttttgctgctcctctgcggccaggcgagccttttcctctgcttccttcttggccttctcctctgcatccatggcaagttgggaaagccacagaaaagagaaaaagaggtcatgccgttaggagaatggcctgttttagtacacaaagagtatctaaggtgtttactgagtgtttgggtacatttttgcttaattcatcagatt

SEQ ID NO: 472762 - DNA, 643 bp, Homo sapiens
ggaaatggccagaaaggtatcaatctccctgaagaggatggcacaggtgagctggtagctgcttctgctggaatcctgcagcccaatgaggtgggatcagaaggaactggatgagcagggaagccttgccctgtgagctgaccccatcagtagggttgttcaccagtttccattcattatgtcattaatgccgcgaaaagagcccttcaccagtgtaagtctactcaccattctgttgctgttctcctgatgacttctcggctttggartttttcccacgagggttgtcacttttgtttgcccgtgttccattgacttgattcttagtttctccagacgtctttttctcagctttgccagatgcgccttcttcagcctggcttttggcttccatttccttttgctgctcctctgcggccaggcgagccttttcctctgcttccttcttggccttctcctctgcatccatggcaagttgggaaagccacagaaaagagaaaaagaggtcatgccgttaggagaatggcctgttttagtacacaaagagtatctaaggtgtttactgagtgtttgggtacatttttgcttaattcatcagattggcatgtatacttaggaaacgaataaaataggttcataatga

SEQ ID NO: 472763 - DNA, 643 bp, Homo sapiens
ggaaatggccagaaaggtatcaatctccctgaagaggatggcacaggtgagctggtagctgcttctgctggaatcctgcagcccaatgaggtgggatcagaaggaactggatgagcagggaagccttgccctgtgagctgaccccatcagtagggttgttcaccagtttccattcattatgtcattaatgccgcgaaaagagcccttcaccagtgtaagtctactcaccattctgttgctgttctcctgatgacttctcggctttggagtttttcccacgagggttgtcacttttgtttgcccgtgttccattgacttgattcttagtttctccagacgtctttttctcagctttgccagatgcgccttcttcagcctggcttttggcttccatttccttttgctgctcctctgcggccaggcgagccttttcctctgcttccttcttggccttctcctctgcatccatggcaagttgggaaagccacagaaaagagaaaaagaggtcatgccrttaggagaatggcctgttttagtacacaaagagtatctaaggtgtttactgagtgtttgggtacatttttgcttaattcatcagattggcatgtatacttaggaaacgaataaaataggttcataatga

SEQ ID NO: 472764 - DNA, 538 bp, Homo sapiens
aaagcaaaacttttagacatcaatggaaactagagttctcataatcgactagcaaaaatactctaaattttcatgaaagcacgtactatataatagcaactttcatgtactttttctacctgtcacaaaaagctagtcattggccaccagtaagatctagaaatcatttcttaaatcagagtggggcttgtggtgtagagcaggggttggcaaaccatggctgtgagtaaaatccatcctacctamtcttccaactacctagtagttttactggaatacacgcacacatcataaatatgtgacacatttgtcactttggaaaaaactggcttttgcatttttcagttttcagaggtctgcttgctccagaggcaacaggtacatattgtcatttctggatggttattgtcatttttttttaacttccagtacgaaaatgaggatgagtttgtgtgtgtgtgtgtgtgtctgtgtgtgtgtaaaaattttcccaattcctaagaattgggagtcgccaagtgagtcttgaagaaatact

SEQ ID NO: 472765 - DNA, 582 bp, Homo sapiens
tctttcctttgtcttgactttagataacctgatgactatgtgccttggtgatgatctttttgcaataacttttccaggtgtttttttgagcttcttgtgtttggatatctagatstctagcaaggccagggaagttttcctcgattatttcctcaaataatttttccaaactcatagatatctcttcttcctcaggagcaccaattattcttaggtttggttgtttcacatagtcccaaacttcttggaggctttgctcatgtttttaaaatgtttcttttttgtctttgttgtattgggttaattttaaagccttgtcttcaagctctgaggttctttcttctactgaccctgcagagaccctgcagggactcagggaagcttttaagcttccaaatatagaagaatttttaatacttgttgtctgttcagagaaaaatgataaaattaacacaacaaaattttgaggaaaagttaaagaaatgtggagagtttaaactcaggaatataaggttgggatgaaatctggtaatgggcttttcatatttgaggttatacaggacacaagcctctttgctctaa

SEQ ID NO: 472766 - DNA, 665 bp, Homo sapiens
ctggaaggcagggtgctgtacttggttcttattctatttccctgtgttttcagactttcacttaatgtttctctttgctayttagaggtatacctcattcattttcctggcttgtttagctttttaaaaataaaatatacgaataatttctctcacatcctcttcctaaagttcttcttgtttgtgcctctggctgaatactttgtgtggagggacatttcctagaatgcactgggccaccatcacttcttcctcaactccttttgctaccttactgttttctggaatttccagtcccgatatgaatgtgggaagactgggagagggaagaggtcaggggttatcctccaaccgccttgaagaatactgcaagaagtgcagaggatgattgatgtctcatccttcacagatgcaggccctacaactccagggcagggaacagattggtggggagaggcacaagcatctctcctcttcctattgacccatggtctctatttcttaaagtctcacttactgaagcctgagtacattccctgcagccacagtctactttccacataactgaggctgatgtgcagccagtactttccactatccctttagagttgttcatgactgtcttggtaggttcatgcagggtcctggataataaatattttgaa

SEQ ID NO: 472767 - DNA, 665 bp, Homo sapiens
ctggaaggcagggtgctgtacttggttcttattctatttccctgtgttttcagactttcacttaatgtttctctttgctacttagaggtatacctcattcattttcctggcttgtttagctttttaaaaataaaatatacgaataatttctctcacatcctcttcctaaagttcttcttgtttgtgcctctggctgaatactttgtgtggagggacatttcctagaatgcactgggccaccatcacttcttcctcaactccttttgctaccttactgttttctggaatttccagtcccgatatgaatgtgggaagactgggagagggaagaggtcaggggttatcctccaaccgccttgaagaatactgcaagaagtgcagaggatgattgatgtctcatccttcacagatgcaggccctacaactccagggcagggaacagattggtggggagaggcacaagcatctctcctcttcctattgacccatggtctctrtttcttaaagtctcacttactgaagcctgagtacattccctgcagccacagtctactttccacataactgaggctgatgtgcagccagtactttccactatccctttagagttgttcatgactgtcttggtaggttcatgcagggtcctggataataaatattttgaa

SEQ ID NO: 472768 - DNA, 567 bp, Homo sapiens
ctgtttacagatgcattaggaaggcgaggctctggaactgagttgcacaatttctcctgtgcaaaagaaaagccaaaattgtcagagagggaggaagtctaggggatataagtaaatttaattttcagcgagagctcaatgtgctaatcctgagtattactgctgcaatcagtcagaatctaggtttctactggtcacaggaaaggtgatttatgttctgaatagtcaaatcactcctttatttcccaatatatatatcagctactcttatacatgtgtgccagtctatcttacatttagaatatttataaagctcattcatgctaaggaatttttagkgtttgaattgtctgtgggttgcaaggctgccaattttcagaagtttgcaccatgataaattcagaattgtaggtagggactaaaacatcaagtcttctggagctttggtaataaaaagcttttcattgaaaagcatagagcttcaaatgggaattatgagaattaaagggtctgggcaacatggtaaaacccaatctctacaaaaaattccaaaaaaattagccaggc

SEQ ID NO: 472769 - DNA, 537 bp, Homo sapiens
tgtgttcactctcccctccagcagactcccagcactccagccacactggtctttctgttctttgaaggccaagttcttcatctccaggcctttgggaatgctgcttcgtccactagaaatgttctcaattctcttcttccttcaggtcacagcttacgttaaacttctgcagggaagcgatcctccccatgctatattttccctcatcggatgtatcatcmtatgtgtttataatttacttgtatatctttcaccacgggataagctgattggagacagggaccatgtctaattcattctcttgtgttaggctgcgcataacacagtccctagcacacagtgggtgctcaagaagtctttgttaattaatgactgtctcaaatgttcttctatttgtgtattttcatggttatttctaaaataagctggaaaattgattcccttccatctatgcttatgctaccatcttacagtgatattgccagatgctggtgtttaattgctgctcctcctattacataaactaatttctagaag

SEQ ID NO: 472770 - DNA, 537 bp, Homo sapiens
tgtgttcactctcccctccagcagactcccagcactccagccacactggtctttctgttctttgaaggccaagttcttcatctccaggcctttgggaatgctgcttcgtccactagaaatgttctcaattctcttcttccttcaggtcacagcttacgttaaacttctgcagggaagcgatcctccccatgctatattttccctcatcggatgtatcatcatatgtgtttataatttacttgtatatctttcaccacgggataagctgattggagacagggaccatgtctaattcattctcttgtgttaggctgcgcataacacagtccctagcacacagtgggtgctcaagaagtctttgttaattaatgacygtctcaaatgttcttctatttgtgtattttcatggttatttctaaaataagctggaaaattgattcccttccatctatgcttatgctaccatcttacagtgatattgccagatgctggtgtttaattgctgctcctcctattacataaactaatttctagaag

SEQ ID NO: 472771 - DNA, 588 bp, Homo sapiens
tgattagctcattgcccattgcttgggtgaaggggattcccctggcacatccaccatctgtcctttgctgactttccccacagttatcacaggtttcatagccaagtctctgctgggtctccatcggtccccaagyctgatggcccactgcaatcttggccatggctcaccaacccccaacgcctgcaccccacaggccccctggatctcatctcagcaaccaaacacaggaggtgaaggaggctgatgtgtgccagcccgacctatcctctgtaactatgctgctctgtcctgttggctagaccaaacaaactgccctatattggaaccccctccctccttgtttcttacagatggggagttagcagatgccaacccgttctcaatgtcctaccctaattatataacatacctcgtgggcagatgaattagagacacaccatgaattagagacacatgaattaaagacacacatctgactacttttctctcttcctttccctctttctccaatgcttctcatgttttcctgaggctagagagaggaagttgccttttactttctatatgtcctgttttctaccatga

SEQ ID NO: 472772 - DNA, 588 bp, Homo sapiens
tgattagctcattgcccattgcttgggtgaaggggattcccctggcacatccaccatctgtcctttgctgactttccccacagttatcacaggtttcatagccaagtctctgctgggtctccatcggtccccaagcctgatggcccactgcaatcttggccatggctcaccaacccccaacgcctgcaccccacaggccccctggatctcatctcagcaaccaaacacaggaggtgaaggaggctgatgtgtgccagcccgacctatcctctgtaactatgctgctctgtcctgttggctagaccaaacmaactgccctatattggaaccccctccctccttgtttcttacagatggggagttagcagatgccaacccgttctcaatgtcctaccctaattatataacatacctcgtgggcagatgaattagagacacaccatgaattagagacacatgaattaaagacacacatctgactacttttctctcttcctttccctctttctccaatgcttctcatgttttcctgaggctagagagaggaagttgccttttactttctatatgtcctgttttctaccatga

SEQ ID NO: 472773 - DNA, 634 bp, Homo sapiens
caaaggtggagtagttttctagagtggaatgtgtgcaataaaaagcagaaggtttgaaggtgcaccccacaggtggaagggagagaagccagacagagtagtcatcacagcggaagctgagtcaagttaccaattaagagaagttgaaataaaacctgagtgggaagtggtagtyttctaattataaatatcctcagttaggatatattatagagggtaatgccaccaaatagagatgaagtggtatatgattggtgtggattatattatcatctcatttttaaatgaatggtctcgtgctaatgttgggtttgagaatcagaaaaaaaagtggggacaatacttgattaacttctagtttgggggagaaaatgtaaataatgctgaaattattaccatgagattttttacatggcactgaatgacatatagattagaaacaatttacgaagaaaggaaccccttaatgaaaggactgcagtttaaaaccaattatctatgagttcgtagtgcttacatgcctccctctctctctctctctctctctctctctatatatatatatatatatatatgtaaaatttcatttaaaatatcccattgagctatataatatataacatatacacatata

SEQ ID NO: 472774 - DNA, 330 bp, Homo sapiens
aagataaaaaaataccagctgttccagagaaacacacattttgctacactgaagtctacacaaaactctcctacggttcatcacagaagggacactgaggaaattttggggagcgtcatcctctataataaacctgcaatacacagagagctccatagagttgtttctcactgtggctgccccaccttattcaccracttcatgccaaagcacaatttaatgtacagaattcgaaaggactgccaaaaccacacaatctaagcaggcagctttctgattgcctaactttattcagggatacatttttatgctatttagcagactagatgg

SEQ ID NO: 472775 - DNA, 604 bp, Homo sapiens
gatcaagatttcttctataaaaatctaccatgrtttaaaatatacaaatcttatgttacatcttaaaatcaggttttcccccaattctagatcttttgtctttccttctcgtgttctccttaaaggagctcactcatgcctatcacttcaatgattatctccacattaatgcctattactgaccctggcatctgtcctcacttctgtttctagtaatcggtaacaaatgtcactcatggagtacatccttgatatattaaaaactaataacatcttttttggtccaaatctctttttttccccatgaatgtcctctagtaataattgaatcttctccagtaaataagtgacaacacattataacagccattcaagctaaaaaaaaaagtcatttattctcagttgttatcctacatagctctttatgatcattccccaaacccttctttgtatttctcaaatccacctactatctctattttcaggcatctatcccttctcacttggacaatcatctttacacatttctcttaaaatgttgcaaattatctttatataacatatgtctaattatattggtcttctactttaaaaaaaaatcttt

SEQ ID NO: 472776 - DNA, 604 bp, Homo sapiens
gatcaagatttcttctataaaaatctaccatgatttaaaatatacaaatcttatgttacatcttaaaatcaggttttcccccaattctagatcttttgtctttcyttctcgtgttctccttaaaggagctcactcatgcctatcacttcaatgattatctccacattaatgcctattactgaccctggcatctgtcctcacttctgtttctagtaatcggtaacaaatgtcactcatggagtacatccttgatatattaaaaactaataacatcttttttggtccaaatctctttttttccccatgaatgtcctctagtaataattgaatcttctccagtaaataagtgacaacacattataacagccattcaagctaaaaaaaaaagtcatttattctcagttgttatcctacatagctctttatgatcattccccaaacccttctttgtatttctcaaatccacctactatctctattttcaggcatctatcccttctcacttggacaatcatctttacacatttctcttaaaatgttgcaaattatctttatataacatatgtctaattatattggtcttctactttaaaaaaaaatcttt

SEQ ID NO: 472777 - DNA, 604 bp, Homo sapiens
gatcaagatttcttctataaaaatctaccatgatttaaaatatacaaatcttatgttacatcttaaaatcaggttttcccccaattctagatcttttgtctttccttctcgtgttctccttaaaggagctcacycatgcctatcacttcaatgattatctccacattaatgcctattactgaccctggcatctgtcctcacttctgtttctagtaatcggtaacaaatgtcactcatggagtacatccttgatatattaaaaactaataacatcttttttggtccaaatctctttttttccccatgaatgtcctctagtaataattgaatcttctccagtaaataagtgacaacacattataacagccattcaagctaaaaaaaaaagtcatttattctcagttgttatcctacatagctctttatgatcattccccaaacccttctttgtatttctcaaatccacctactatctctattttcaggcatctatcccttctcacttggacaatcatctttacacatttctcttaaaatgttgcaaattatctttatataacatatgtctaattatattggtcttctactttaaaaaaaaatcttt

SEQ ID NO: 472778 - DNA, 536 bp, Homo sapiens
cacaaaagtccttccaaataatcctccctgggaatgtgcaccataatatcagaacatgggctagcttgaggtcaccaatgctgacagttcctgcctttggggagaaaagagacagtggagacttcccaacaaatgtgtatttgacttacttctcctttatctgttcacagaacaagtgtcacacaagggattacaaagtcaatggcgatttccctatttaaatactgtatgtattaggctgagttccaagacaggaagaaccartcatctactaatgcttcatgacttgtcaggtcctgagcaactcagccttgtagttaaacgtagtacttatcatgagggctttgatgttcaacacaaaatgaaactgatgtatttagaaaacaataagcaggacaaaattgctgaattgacccaggaaaaggacatttctacagaggtcagttaattcatgacaattttagaatgcattactgagagctgctttgtttgctttgattttctatagaaaaacaaaaccagacaaatgtgacaag

SEQ ID NO: 472779 - DNA, 536 bp, Homo sapiens
cacaaaagtccttccaaataatcctccctgggaatgtgcaccataatatcagaacatgggctagcttgaggtcaccaatgctgacagttcctgcctttggggagaaaagagacagtggagacttcccaacaaatgtgtatttgacttacttctcctttatctgttcacagaacaagtgtcacacaagggattacaaagtcaatggcgatttccctatttaaatactgtatgtattaggctgagttccaagacaggaagaaccaatcatctactaatgcttcatgacttgtcaggtcctgagcaactcagccttgtagttaaacgtagtacttatcatgagggctttgatgttcaacacaaaatgaaactgatgtatttagaaaacaataagcaggacaaaattgctgaattgacccaggaaaaggamatttctacagaggtcagttaattcatgacaattttagaatgcattactgagagctgctttgtttgctttgattttctatagaaaaacaaaaccagacaaatgtgacaag

SEQ ID NO: 472780 - DNA, 411 bp, Homo sapiens
ctggggcatcactaaccttgctgggcagaaaagaatgtcagagaaggtggagctagtaaagtgcctacacacctctctttgcaaaacaaacaaacaaacaaacaaacagaaaaagcagaaaacaaaacaaaacaatacatcaatccttctagctgagtgggagggaaaatgttagcaagcaatctttcagttgattatttgatatrcaaaagtaaaataaactccaagttactgcataaaatctagtggcaaacatgattgcataatatggaaagtttatcccagagaaaaatcaaattctaggacagtcttttgttgggaaacatttcaagacacaaatttgaatgcaagctacctgaatatctaactcactccactgatgtgctttctaacattatcctctaatgcata

SEQ ID NO: 472781 - DNA, 411 bp, Homo sapiens
ctggggcatcactaaccttgctgggcagaaaagaatgtcagagaaggtggagctagtaaagtgcctacacacctctctttgcaaaacaaacaaacaaacaaacaaacagaaaaagcagaaaacaaaacaaaacaatacatcaatccttctagctgagtgggagggaaaatgttagcaagcaatctttcagttgattatttgatatacaaaagtaawataaactccaagttactgcataaaatctagtggcaaacatgattgcataatatggaaagtttatcccagagaaaaatcaaattctaggacagtcttttgttgggaaacatttcaagacacaaatttgaatgcaagctacctgaatatctaactcactccactgatgtgctttctaacattatcctctaatgcata

SEQ ID NO: 472782 - DNA, 411 bp, Homo sapiens
ctggggcatcactaaccttgctgggcagaaaagaatgtcagagaaggtggagctagtaaagtgcctacacacctctctttgcaaaacaaacaaacaaacaaacaaacagaaaaagcagaaaacaaaacaaaacaatacatcaatccttctagctgagtgggagggaaaatgttagcaagcaatctttcagttgattatttgatatacaaaagtaaaataaactccaagttactgcataaaatctrgtggcaaacatgattgcataatatggaaagtttatcccagagaaaaatcaaattctaggacagtcttttgttgggaaacatttcaagacacaaatttgaatgcaagctacctgaatatctaactcactccactgatgtgctttctaacattatcctctaatgcata

SEQ ID NO: 472783 - DNA, 680 bp, Homo sapiens
aatgccaatttttttacaaatgcaggacaattacactgagtggaaaaagccaatctgagaatattgcatactccatgattccattcagactccatgattccattcatttttgaagtgaccaagtyatagagatggagaacagatgtgtgcttgtcagggcttaaggagggactgtgaatagaaaagggtagcaagggaatccttgcgatgaaacacaagtctgtatctcgaccacagtagtgcacacaggaaattgcactgtgacaacattgtgtagaactaacacacacacacaagtgaatgtaaatctgacatctgaataaggtagatgcattgtgtcagtgtcaacttcctacttgtgacattgtcctgtagttatgcaaaacgttaccagtgagggaaaatggtgaaaggtatatggaattctctctgtattatttcttaaaactgcaaataaatctacaataatctcaaaattaaaaaaagatcaaaatgtcaaaatggtttaaaacaaccataaataaatttgaatggaaaataagaaactggaaaaacctgccaagatatatgaaaattggctcatttcttctaacttattaatttttaaaaataggccaagattatagacagataattcacagtaagagaaactcaaaagagttttaaatatgtaaaaacct

SEQ ID NO: 472784 - DNA, 680 bp, Homo sapiens
aatgccaatttttttacaaatgcaggacaattacactgagtggaaaaagccaatctgagaatattgcatactccatgattccattcagactccatgattccattcatttttgaagtgaccaagtcatagagatggagaacagatgtgtgcttgtcagggcttaaggagggactgtgaatagaaaagggtagcaagggaatccttgcgatgaaacacaagtctgtatctcgaccacagtagtgcacacaggaaattgcactgtgacaacattgtgtagaactaacacacacacacaagtgaatgtaaatctgacatctgaataaggtagatgcattgtgtcagtgtcaacttcctacttgtgacattgtcctgtagttatgcaaaacgttaccagtgagggaaaatggtgaaaggtatatggaattctstctgtattatttcttaaaactgcaaataaatctacaataatctcaaaattaaaaaaagatcaaaatgtcaaaatggtttaaaacaaccataaataaatttgaatggaaaataagaaactggaaaaacctgccaagatatatgaaaattggctcatttcttctaacttattaatttttaaaaataggccaagattatagacagataattcacagtaagagaaactcaaaagagttttaaatatgtaaaaacct

SEQ ID NO: 472785 - DNA, 680 bp, Homo sapiens
aatgccaatttttttacaaatgcaggacaattacactgagtggaaaaagccaatctgagaatattgcatactccatgattccattcagactccatgattccattcatttttgaagtgaccaagtcatagagatggagaacagatgtgtgcttgtcagggcttaaggagggactgtgaatagaaaagggtagcaagggaatccttgcgatgaaacacaagtctgtatctcgaccacagtagtgcacacaggaaattgcactgtgacaacattgtgtagaactaacacacacacacaagtgaatgtaaatctgacatctgaataaggtagatgcattgtgtcagtgtcaacttcctacttgtgacattgtcctgtagttatgcaaaacgttaccagtgagggaaaatggtgaaaggtatatggaattctctctgtaktatttcttaaaactgcaaataaatctacaataatctcaaaattaaaaaaagatcaaaatgtcaaaatggtttaaaacaaccataaataaatttgaatggaaaataagaaactggaaaaacctgccaagatatatgaaaattggctcatttcttctaacttattaatttttaaaaataggccaagattatagacagataattcacagtaagagaaactcaaaagagttttaaatatgtaaaaacct

SEQ ID NO: 472786 - DNA, 680 bp, Homo sapiens
aatgccaatttttttacaaatgcaggacaattacactgagtggaaaaagccaatctgagaatattgcatactccatgattccattcagactccatgattccattcatttttgaagtgaccaagtcatagagatggagaacagatgtgtgcttgtcagggcttaaggagggactgtgaatagaaaagggtagcaagggaatccttgcgatgaaacacaagtctgtatctcgaccacagtagtgcacacaggaaattgcactgtgacaacattgtgtagaactaacacacacacacaagtgaatgtaaatctgacatctgaataaggtagatgcattgtgtcagtgtcaacttcctacttgtgacattgtcctgtagttatgcaaaacgttaccagtgagggaaaatggtgaaaggtatatggaattctctctgtattatttcttaaaactgcaaataaatctacaataatctcaaaattaaaaaaagatcaaaatgtcaaaatggtttaaaacaaccataaataaatttgaatggaaaataagaaactggaaaaacctgccaagatatatgaaaattggctcatttcttctaacttattamtttttaaaaataggccaagattatagacagataattcacagtaagagaaactcaaaagagttttaaatatgtaaaaacct

SEQ ID NO: 472787 - DNA, 592 bp, Homo sapiens
gaaatttatttttcatgtaaattaagatagatgagtgaccaggactggcaataagccctttggtattccagatctaaattccatcacttttgttgcactgccatcctccctgaaatggcatatacacttcttacatgctatggatcaaaatacacccatgagcatacatctagctctaaggaaggatgggaaatgaagccatgaagccaactaaaatccaagagttatatttataagggaagaaagggaraatgaattttcaatgaaactagcaatgtcagcaacaccacccctggtattagagtgggcactcagagcattgaatccctttggctgatagaaatggtttagagatgcagttcctttatactgcagagaacattataatcctctcaccacagagactgtaacaggaatgcaaataaactaagaatggcaaatttgcttgtattctggggaactcttcttctagacttaatcctgcattgatgtaagcctggagctgctagtggcatcatgagagtaaaggcaaaaaagaatactgattcaagagatggggagacagacagactgacaacattaaaccctgggg

SEQ ID NO: 472788 - DNA, 587 bp, Homo sapiens
acttcaaaagtagaaaatgcacattcttcaaaagtagaaaacctacacattgctttttaaaatactttyggtggtagatagccatgtctatacatgacattgcaaactgaaaacaaagataaaaactagcagatttgactacaaccacttaattaagaaaatcctttgccataaaatactataaacaaatgaaaagactgacataaaacttcgggagcattattaacaagaaaaagaaattaatgccacaacagagaaatgggaaataacctaacaagtatctcatagaaggatacatatacatatctagtaaacatatgaatccacccctgaaaaaattaaaataagaccatttccctctcaagttggtaaaaattaatttttaataataattttccacgtgggtgtggatgggggtgtgggagatgtgatattttcacactgctgggctggtgggtgtgtaattggtaatacctatctggagaacaatttgataatagatattttgctttaaaaattgttaccttgttttgtaaatattttgcttttactccaggatatctacactaagaaagatactataatgg

SEQ ID NO: 472789 - DNA, 523 bp, Homo sapiens
aattgacttaatattactgtgtgggtcaactgactaccctatactaaacgatgtattggtatgatagctgctcattttttagttgactttctaatgttgagaaaaaaataaaatatattttattctaaattttcccgtgayatactttatactttttcagttttattttgatttgtttgaaaatgaggaaagaaagacaggaaggggaaatcaagaagaattgagaaatatcaagtatatgttctatgctaatgattctgcatgcattgtgccatcaaatccttaaattaatctcataaaaatataatattttacccatattacagacaataaaacagactcagggcaagatcatttgttgaagcttacacatctagtatgcacagatgctactctactaggaaatacagttaataagagttaaagcccaagttctctccaggaagccacccactctcctgtcatctgttcttatccacgtagtcagacaaaaggtttggggtagcaggttgaggtttcctag

SEQ ID NO: 472790 - DNA, 523 bp, Homo sapiens
aattgacttaatattactgtgtgggtcaactgactaccctatactaaacgatgtattggtatgatagctgctcattttttagttgactttctaatgttgagaaaaaaataaaatatattttattctaaattttcccgtgatatactttatactttttcagttttattttgatttgtttgaaaatgaggaaagaaagacaggaaggggaaatcaagaagaattgagaaatatcaagtatatgttctatgctaatgattctgcatgcattgtgccatcaaatccttaaattaatctcataaaaatatawtattttacccatattacagacaataaaacagactcagggcaagatcatttgttgaagcttacacatctagtatgcacagatgctactctactaggaaatacagttaataagagttaaagcccaagttctctccaggaagccacccactctcctgtcatctgttcttatccacgtagtcagacaaaaggtttggggtagcaggttgaggtttcctag

SEQ ID NO: 472791 - DNA, 449 bp, Homo sapiens
attttttaaatctctaaatcacctaacattatgctaaagaattttatggtcaacttcagaagacttaattcatgaaatttctagctgtatttatctctctgtccatcatgattgaataatgccttattttgtgtgtaaaaattaaaatcgtaagggctaaccttccagatagatkgttgagggtctttatactttagtaaagaatttcacctataatgcctatggaaaaatatctcacatcacctgggcagaattacatttatcagctaaatgtaattaaaataagctacctggtaacagaactgctgaatgtgtacttataaatcagaataaaggtcattgtgtccgattagaaaagtgtattgcatctctccactgatgaatgaaggaaaagttaaccttgtacttctgttctcatgttctggcttcaatctgattaggtactacta

SEQ ID NO: 472792 - DNA, 619 bp, Homo sapiens
tacattggggaacccctaagtcctaccaaatgaaggtttttgttctagggcaccagtgttcacagtatctgttctagttctaatttgtttagtttctctckaatcttttgtctgggaggagttgagggtccacatttggctgctaggcattctgtattagggtagagggattttgaaggaaggtgtcaactaatctctgcaggactttaaatcagtccgcttgtctttagctttgtgtctcagtcccatgctggcagaaccagatgttacccactttggaccctcttggtgctctgcaaggcatgttggcccctccacactgcagtctcacctgtgcgacttggggcagctctctctgccacttgttacttaccttcgccctgaaactctctcatccatcagttgtcccttcctgtactctatactattgtagattcatatcttcatatgccttgtaacattttcatgcggtctcaaaagggagagaatcacatgtgatctgttatcctctttattcagaatatcttgtttcttcaacctgtgttttccacttgcatcttttttcccctttgaatctatcttcaactctttagtttatgtataatagtaattgattttg

SEQ ID NO: 472793 - DNA, 598 bp, Homo sapiens
atgtctttcaggggatagcggtgtttaaggattaaacactcttattgaagtgtgtgtggactaagaggaaatgagggacatagactatcagcccattgtgctgctattgcctgtatattatatatgttataaacctactaacaattcagtgttatagttgttgctttatgaaatgtgatgtcttaaggaaattaagagaagagcaaaaatttatgtttactcttttctgtttactcacatacttatttaaaatttaaaaaatttatctatgtatttttattacaattttaaacataacataaaattcacgatttttaccattcttaggtgtatggttctgtggtattaagtacattcacattgctgtgcacccattatcaccatccatccacagaactgttyaatcttcacaaactgaaactccgtacctgttaaatacttaactcctcattcccttctgttcccagccctggcagccaacattctttctgtctctttgaatttcagtactctaggtacctcatagatgaggactcatgcaatatttatcctttggtgactggcttctttcacttcgtgtaatgttttcaaggttcat

SEQ ID NO: 472794 - DNA, 598 bp, Homo sapiens
atgtctttcaggggatagcggtgtttaaggattaaacactcttattgaagtgtgtgtggactaagaggaaatgagggacatagactatcagcccattgtgctgctattgcctgtatattatatatgttataaacctactaacaattcagtgttatagttgttgctttatgaaatgtgatgtcttaaggaaattaagagaagagcaaaaatttatgtttactcttttctgtttactcacatacttatttaaaatttaaaaaatttatctatgtatttttattacaattttaaacataacataaaattcacgatttttaccattcttaggtgtatggttctgtggtattaagtacattcacattgctgtgcacccattatcaccatccatccacagaactgtttaatcttcacaaactgaaactccgtacctgttaaatacttaactcctcattcccttctgttcccagccctggcagccaacattctttytgtctctttgaatttcagtactctaggtacctcatagatgaggactcatgcaatatttatcctttggtgactggcttctttcacttcgtgtaatgttttcaaggttcat

SEQ ID NO: 472795 - DNA, 361 bp, Homo sapiens
tgtctaggaaaatgttaactttaacaacaccactaatcagtttagagaatatttgagcgtgtagcacttgctgatcattcattcagaaaatgaattgcctgccataaactaataagcatgatttggtttatgttttgatttaattatctctgagtagatgctgcttgaagtaatgactgtaatcacttttgccaagcataccccccgtttataatttaagaaaaaaawtttttttttttttgagatggggccttgttatgttggccaggctggtcttgaactcctggcctcaagcagtcctccccacctggtgtctcaaagcactgggattacaggcatgggccaacatactgaacataat

SEQ ID NO: 472796 - DNA, 593 bp, Homo sapiens
atacagcactgctcccctcttatgtctattctcaattggtgcaaaaaggagaaaacacaggctctgctacaggtaaagctgaatcccatcatggcaatcatcacaataacagcaacaggcactcagagagtccttactattgttacatgctcttgtgtrtgagtgtattaaatcagctcatttaatcctcaacacaacactacaaaataggtgttttcagctgaagaataagacctgggaagggtacatgatttagctaaggccattattattaaactggcacagcttggaaaagaagtaaaaagttctagagttgaaatgatagtttagggtattggggttagaggttaaaggcaggaaaaaaagagctaataccaagcttattgagttggtgtcatggggacattgtaggatcaacttagataaactagaatttggaaaagtgctatgggattataaatgttatcctgaggctgctcagataattgatagatgactaaacatactatttttaaaaatcacataacaaaatgaattcaagttattcttcaactagaatagcagcctagaacaattcttaaatgtataaaaaa

SEQ ID NO: 472797 - DNA, 538 bp, Homo sapiens
tgtcacccacttcagtaccaggaagaagagagagactcctatcaccagagacagtcggcaccaagatgaatcttgatagataataatgttttgtgatgctaattgtctcaaaatgaagtcactgatgacaagtgacagtgaaactgttgacccctcaaagtgataaacatatgcataatggtctgaggtgataatacctgctgtggctaggcaccctaagacctgacgagaaaytgaagtcacatggcagctgagatagtaagtgtgcacactccgtggagggccataaaaacagcaaagcaactgaccatggagaagcatctgtagaacttctgtctgtggtaactttgaggccgcctctggataccagccgtggcggccagaagttctgcccaaaaagagcagttaatcccctgctggtcagcatttttagaaaattctggccctctctagtttgtctgtgggtgtgtgggtctccctggctactcgctgtggtttgtccccttctctctcatcactgcctatgcgctgaatatac

SEQ ID NO: 472798 - DNA, 607 bp, Homo sapiens
acttgagggggcagatctctagaggaggctctctgggcagcccttttctctattctctctcctactttatcctaggaactccaaatgccttggtcttcccagattctcagctccatcacctcaacccaggtagtcttctgtgctctgtctggttcctcctttctatgctgcatcttgaaagtaagctgggacaatggtaaggctcaccttgtttcccatctcccagggaacatattgataaagtgcctgatgcccagagtcttgtttcatatattttgcccttttttattgttgttgttgcttttgtagaagggtaaatcctgaccctgttactcctccctggcttttatcctttcaataactatcacacatctagaagcccctttactctttaataccaaccaaataactagaacatataatccataaacaactttagcaccatttacctgtgyagaaagaaaaatagcagagagaagatacccctgactttaacttgcatatttttacttgtctttcaaattttccttaatcatatcagacattttcagggtttatgattattttttgtcaaaaagaaaacaagaggcttaattaagggagtatt

SEQ ID NO: 472799 - DNA, 645 bp, Homo sapiens
tatacttaataatcatcttctttctaaacaaagataacagcaaacagctctgaggaaatgtttatgcaaagaaaaagctatgtagtttatttctaatgaagatggtatgactgtctgcataacaggttattaaatacaccatcaaaaggagattctctaaaaaaataaactatgttgaatttcaagatgggcctcattatttaagaagtcatttccctaacagtttctagatgatgctaacatamcaaacttttagttagtattccatggttttccttgcattctttcttttctcttaatatcacactatgttgctaaagaaaaggttatgtattttaaaagaataaatgacatacatctgcatataaaatgattggatttgacataaggaagaaatcttatgagcaagactgtgaaaactaagctgcaaaataagattttcttcaaatgtcactggactctgaacctcccttttaagaaaatcagaaatacatctaatggattagaatatatagtgcatcaattaaaattatacttacataaaatatctattagccttctaaaagaatactgctttaaaaatattgcagaaactatccagacatgactaatgggaacaaatatgattcttctaagtagttataa

SEQ ID NO: 472800 - DNA, 625 bp, Homo sapiens
ctgtaaacatatacaatttctcaagtggaggtttccaaagactgggaatgcaaccgataagrtataaaatcagaggagaaacagtggaaaagtaaacataatataagagaatcacaacatgtaatgcagtcattaatttcatgagtctccttggataggtttaaagcacacttcagatgcattagtaggatatcattttatatttcagaaggagtactctcaagccaagcttctttgtagtaaatgaatcatccagctatattttgtgaaaaggggtcattttaatttcagggtcttttattgcccagcaaggtaactgtgaaatgacattcacaatataaataaattcagttgtctttgcttcaaagaaggtagttattattcaagcatttactttctagcttatcttacatactgagatttgcataatagatattggccttgttaacactgaacataaagcaaactttactagaacaatttacagtaattaattatgtacaattgcttctaataaaaggcataatgaaaagggagaaactatgtgcagaaaatagcaaaagtaagatgaagagatggtaaagttcacatatctgtttgtagatgacagttttaaatgtactgt

SEQ ID NO: 472801 - DNA, 678 bp, Homo sapiens
aagggaatcttcctaatatctagcctccaaatctctatcttatgtttttgatgtactcctttaatgggaaacaggattcaagccccatggagtccagcagatattggattgagttccacctctgccactgtctaggtatatgactcttggaaactatttaagtggtttgaccycagtacactcatttgtaaagcagagatggtaatacctgccttgaggattaatataaagtttaaattaggtaaaataattcatgcacaatctctgagtaagtttgcaaagtctgatgccagccaacatgagaagctattattattggaaggcaggggtcccatactgaggtcccatgggagctggggggaatgcctctgaaatgacatttcatcaactcaggggcttttctgtttgactctgtgcaacctgtgcaggtgaattggccttgtatgtggctgtttgtcttggtgagtgttgggggtttgctgtctgcacaggtatgtgtgatgggagcttgcattaggtgtttacaatgtaggagtagaaagtggctgactattatttactggcaagtgtagcatattgtgaaaggagtttcagggcagagaattatcagtgtttgaggtcctcagtgtggtagcagcagcagaagcagctctttaatttatcagttgtgcccaataa

SEQ ID NO: 472802 - DNA, 664 bp, Homo sapiens
catgagatctgatggttttgtaaatgggagttcccctgcacaagctctcttttccctgagccacgtaagatgtgcctttgcttctcctttgccttccaccgtttccttagccatgctgaactgtgaatccattcagcctctttcccttataaattacccagtctcgagtatgtgtttattarcactgtgagaacgaactaatacagctttgaatagtcaacatgttgaaatgatgttcatcagacattgaagtaagtatgtcaaagtcctgaattttgtcactaatcagacctttttactggagaatcatatgtgcttgaatgaatgaagtgcactgccttaatggctagtattcctgattataaaaacaatgttggctatacatcctaacaccttgtgagtcagaggacctcagagtaaacattttgtccttgacctcttccagacctgaactctttcagcagcatggggttaataaaccaagggtgggagggaacagcttgtgatctctggcggccttcacagcccaccctgtcattagaatgttccctctcaaattctgggtcctctgatttgcccttaattgttgaaaatgcacaggaaattaatttggtaagtggcaaaaattagtgccctcttaagtcagaccttttcattctgcaaa

SEQ ID NO: 472803 - DNA, 484 bp, Homo sapiens
tgcttacaggtgctactcagggttcccaggagagcaccccctgccctcctcggcttgtctcattgctttccttctcacttgaaattaaaagcttgtttactgctggccaggtgtggtggctcacacctgtaatcccagcactctggaaggccgaggcgggtggatcacctgaggtcaggagttcgagaccagcccggcyaacatggtgacaccccatctctactgaaaatacaaaaattagccaggcgtggtggcaggcacctgtaatcccagctactcaggaggctgaggcaggagaatggcttgaacccgggggagggcagaggctgcagtgagctgagatggcgccatttcactccagcctgggggacaagagcgagacttcgtctaaaacaaacaaacaaacaaaaaagcttgtttactgcaagtagaattcaaaaggggtgatttttgagtcatgtagtgattttcagtgtacacagtt

SEQ ID NO: 472804 - DNA, 484 bp, Homo sapiens
tgcttacaggtgctactcagggttcccaggagagcaccccctgccctcctcggcttgtctcattgctttccttctcacttgaaattaaaagcttgtttactgctggccaggtgtggtggctcacacctgtaatcccagcactctggaaggccgaggcgggtggatcacctgaggtcaggagttcgagaccagcccggctaacatggtgacaccccatctctactgaaaatacaaaaattagccaggcgtggtggcaggcacctgtaatcccagctactcaggaggctgaggcaggagaatggcttgaaccygggggagggcagaggctgcagtgagctgagatggcgccatttcactccagcctgggggacaagagcgagacttcgtctaaaacaaacaaacaaacaaaaaagcttgtttactgcaagtagaattcaaaaggggtgatttttgagtcatgtagtgattttcagtgtacacagtt

SEQ ID NO: 472805 - DNA, 484 bp, Homo sapiens
tgcttacaggtgctactcagggttcccaggagagcaccccctgccctcctcggcttgtctcattgctttccttctcacttgaaattaaaagcttgtttactgctggccaggtgtggtggctcacacctgtaatcccagcactctggaaggccgaggcgggtggatcacctgaggtcaggagttcgagaccagcccggctaacatggtgacaccccatctctactgaaaatacaaaaattagccaggcgtggtggcaggcacctgtaatcccagctactcaggaggctgaggcaggagaatggcttgaacccgggggagggcagaggctgcagtgagctgagatggcgccatttcactccagcctgggggacaagagcgagacttcktctaaaacaaacaaacaaacaaaaaagcttgtttactgcaagtagaattcaaaaggggtgatttttgagtcatgtagtgattttcagtgtacacagtt

SEQ ID NO: 472806 - DNA, 664 bp, Homo sapiens
catgagatctgatggttttgtaaatgggagttcccctgcacaagctctcttttccctgagccacgtaagatgtgcctttgcttctcctttgccttccaccgtttccttagccatgctgaactgtgaatccattcagcctctttcccttataaattacccagtctcgagtatgtgtttattaacactgtgagaacgaactaatacagctttgaatagtcaacatgttgaaatgatgttcatcagacattgaagtaagtatgtcaaagtcctgaattttgtcactaatcagacctttttactggagaatcatatgtgcttgaatgaatgaagtgcactgccttaatggctagtattcctgattataaaaacaatgttggctatacatcctaacaccttgtgagtcagaggacctcagagtaaacattttgtccttgacctcttccagacctgaactctttcagcagcatggggttaataaaccaagggtgggagggaacagcttgtgatctytggcggccttcacagcccaccctgtcattagaatgttccctctcaaattctgggtcctctgatttgcccttaattgttgaaaatgcacaggaaattaatttggtaagtggcaaaaattagtgccctcttaagtcagaccttttcattctgcaaa

SEQ ID NO: 472807 - DNA, 555 bp, Homo sapiens
gtgtgattttaattcatccttccaggtttcctttgccctcctgcatttttccccctcctacactgcctcccatagcggctactcttacctcagcactcctctttatttcttcttttttgagttgggtccatctctcttggctctactcagcccttttaatcttggtttattttccaatggattctgggaggtgcccatcccctacctgctccacctccaccctgctgacctcctctgtagaatctgatgagccattgctactgaatgaggaaaggcttaaccttcctttccccaccccatattcctttccctggcccctctttttcctccatagcttctgtctctgtttttattctttgtttcttgtccaccgcaaggtaaaattcagcctcttccttatgttccccatctcacccttgcccacatttgtgacatgtctgtggtcttccctttgtcatgtgaagaayggcagtgggatagagagcctagtgaagaggatgcacgcagtgccgggagtcagtcattcagacagggacataggtcttggaacttata

SEQ ID NO: 472808 - DNA, 622 bp, Homo sapiens
aagcttcctgtgttctgatatgattgtattacctgttctgagatgtgctttctgccactagtgtgattttaattcatccttccaggtttcctttgccctcctgcatttttccccctcctacactgcctcccatagcggctactcttacctcagcactcctctttatttcttcttttttgagttgggtccatctctcttggctctactcagcccttttaatcttggtttattttccaatggattctgggaggtgcccatcccctacctgctccacctccaccctgctgacctcctctgtagaatctgatgagccattgctactgaatgaggaaaggcttaaccttcctttccccaccccatattcctttccctggcccctctttttcctccatagcttctgtctctgtttttattctttgtttcttgtccaccgcaaggtaaaattcagcctcttccttatgttccccatctcacccttgcccacatttgtgacatgtctgtggtcttccctttgtcatgtgaagaayggcagtgggatagagagcctagtgaagaggatgcacgcagtgccgggagtcagtcattcagacagggacatagatcttggaacttatacatttct

SEQ ID NO: 472809 - DNA, 622 bp, Homo sapiens
aagcttcctgtgttctgatatgattgtattacctgttctgagatgtgctttctgccactagtgtgattttaattcatccttccaggtttcctttgccctcctgcatttttccccctcctacactgcctcccatagcggctactcttacctcagcactcctctttatttcttcttttttgagttgggtccatctctcttggctctactcagcccttttaatcttggtttattttccaatggattctgggaggtgcccatcccctacctgctccacctccaccctgctgacctcctctgtagaatctgatgagccattgctactgaatgaggaaaggcttaaccttcctttccccaccccatattcctttccctggcccctctttttcctccatagcttctgtctctgtttttattctttgtttcttgtccaccgcaaggtaaaattcagcctcttccttatgttccccatctcacccttgcccacatttgtgacatgtctgtggtcttccctttgtcatgtgaagaatggcagtgggatagagagcctagtgaagaggatgcacgcagtgccgggagtcagtcattcagacagggacatagrtcttggaacttatacatttct

SEQ ID NO: 472810 - DNA, 491 bp, Homo sapiens
ttttatttctgaatttcagttgatcacttctggcatataggaaagcattgtattctacaaccttgctatatttacttattagtttcaggattattttttgatctgttctttgagagtttctacacaaagaatgatgccatctaccaaaaaggatagatttcttccccatctgtatactttttrtttctttttaaaaatcttactacagtagttatgacttccaatgtgatgtcaaataggaagggagacccttcccttgttccctacattaggaagaaagcatccagttcctcacagttaagtacaatgttagctgtagggtttttgtagatgttctttagcaagttgtagaagtttccctatattcctcatttgctgagagattttaatcatgaataggtgttgagttttgtcgaatgcctttttggtctcaattcctataattatgatggattttattgtatagttttcaaatgttcaaccagccttgt

SEQ ID NO: 472811 - DNA, 471 bp, Homo sapiens
tagtatgtctaaacctcctggaaagcccctgagctgcttggtaatgaagttcttttagcattacagtgaccaaactacctagaacagaactcaagatgaagttcctgttgtttttcctatagtagaggattcatgataaactttctagggtctttcccacaggtggggttgatatactttggatgaattaaaataataaactgatttcctggtggattttcatttacaaatatctgggccttaggattgcaaggtaggccttgtcatagtaggctccaaatgagatgccaaaatgacaggcgtgccaggcagcattgaggactstgctacccaggatgcaccgcctcgtgctggcgctggccatggtgctggcctggagctgacattggcctgatctggcccaagagctgttggcagcctgggctgggcagtggctgtgtgctatggcaacagggagcagaatgatcacca

SEQ ID NO: 472812 - DNA, 378 bp, Homo sapiens
cttcttatcttcttgttcattcctttggggtatatcttctgttccactgcatgtccccctcactcttatattcctaagacttgtcccatgacctggcatatagtagacgctcagtaagatccatttgatgttgaatggatgaactagtaaaaacaaagagctcagtgatggcttctgtgttaaattagtgcttctctcatcatgatcctttaattacttatccaagttagagactcctggcttaatcacggacttagaaaaaaactatggtgtatatcatatatatatacatatattctaacagagtgctcactagctstaccctaaattttaatggggctctggtgcccttaaagttggagtatgtattccgttacg

SEQ ID NO: 472813 - DNA, 526 bp, Homo sapiens
tggggctgtcttactgttcagatgttggagagcaacctgtgcacatatgttctggcagtgttgtccgaaagaacattgtgtgcatatttgtttactgatatccatttgtttccttaaacctgcttctgtttaaaagttatcgatttattggagggctgtgagtcagcatctgggttaagcacttaatgtgtgttggctcacgtcagcctcacaacagtgctatgagaaaagcatgattttgagacctgactcctttttcaaacggggagattgatggctgaaggggattattttacccagkgtcacatcgataggaagtagctgagtccagacctgcacagcacagccctttctcttaaccacagtgttctctcttccctgatcagcatcacattttcattgtaaataactagaaactagggacggggaaaagaaatttaaaaatatacctgtagatttctcataattctactacctaccacctacccactcataattctaaccactggtaaatttttggtttcta

SEQ ID NO: 472814 - DNA, 625 bp, Homo sapiens
ggggaggtggggtgggtgtagcactggctttaggcctgcacacaggtggtatgatgatttcagtagagttctccccacccatgaggttctctctcctctctctcctgctgtccctggtcttaccttctcttgggataggcccccttcttgtgcttgcaggagggccctcagcagccataagcttacattctgttaacatagtaccccaggaaaagagagattyccatttccagacactcctgcatgcctcatgagatttccttgctctgaggtgaggcacatacccatccctgaactttctaaccataggaggatggatggactatgctgatcggccaattctggctcaatttgtactgctgtgggagctacccacagagactgggagcaagaggcaggcggacacccagaggaaaacctaggtactattaccagaagagtgaatggatcttgaagagatttaaacaacagatggccctaacatacagcttccttttcatctcatattatcatacggatgagcagtgagaaaaacgaccccactagagatcatgaatgtcacaatcattagggctttttatggaggggaggggagaggtagaatgactgcaaggaagtaagtaca

SEQ ID NO: 472815 - DNA, 555 bp, Homo sapiens
tgactgcctttggagttcagttgcaatattggctcttgctggcctttgatgggaccatcagctttccctgggtctcctgaatcactctgctgatgttggatttaccagcttccataattgtgtgagctgattccttatatttttctatatatctctacctctatttctatctccatctctccaagtctctatcgcctattggttctgtttctgtagagggccctgatgaatagaatgttttctactgctcttctataccatctgcctttctattcccatgaacttcaaaggccttgtcctgatatgatctatctcttgcactcaggagatccccatttgtcctgggacagcatcaacaggagtggaggtcttgggactgtcacatctagtgaaaatattcacatttactacacagacctttatcctgggagtggtgcccttattagatgatgcaagcaggctgtgaaggactattttcacccctttctattaactacttgaactctgcctcacacagtagtagtgcrctaacaagcttagcccttttcatttatt

SEQ ID NO: 472816 - DNA, 645 bp, Homo sapiens
gaaaaccaatggtcacccatggtccacggacattctttccagaaaaagacactcagatgactgtgcccctcctggcacacacactctgatagaaacagaacacacactcttacacacttgcacacacctacactcacatacatgctcacacatttcagccaacaatttcaggggggttcacaaagytcctggttccatgtttagaacctttgcttgacagtacttccttcagtgatgttatggaatcctagacttgtaactatcacacctatgaagaggtatctcagatgccaggttcttttctatatccagtcctttgtttccaaccgccctcactatttctgatgtaaacatcctgcccttccctatggctaacgctgtagccatgttgatctcctctcaagaaacacttctgggcacgttcaaattctgttcactctccaagccccggttcatatactaccatctctgggaagtcaatctctaatcagagagaattaaactttccctttgtgatctcttagactatttttttaagttttcacattaaatatttcagactttctactgtttataattgcctgagtagataggttcttaaggaaagaaaacatgtctggtttcattttgcagcttctatcataa

SEQ ID NO: 472817 - DNA, 643 bp, Homo sapiens
acccttgatacctgtctagataggcattttctttccaacctgtcatctggtctaacagaactcatcttacagaaaaagaaaacaggcttagaagggttaagcatctcggctaaagaatcacagctagtacaatgctcattcacttctactatcctgcctaagtaataggtaagtgacttcattgttaccttgaagatgagagaactgaagtgtttttaaagaactcactggctcctttaaaatcaataaaaaaataaacaacaaaaataccctgatttcccaacactgaaaaggaagggagaatctccccatggggtaggaaggctgaagattccctgcagggctgcaccacatgcgaagactcatcttgagagatggtccttcccttgatgattcactcaagatcatttcaccattccttatgggaaaggaagtctcgggaagcagacaaaacgcctctgcaaatggagtttatgccttcactgacaacaagggaagattctagtgggataccatgaattgaccataatgcaatcagtgactgactcagtgtattaggctgatcagacttccattaccaaataccatggagtgtgtggcttaaacaacataaatscattttcccacagttcaggaagccaga

SEQ ID NO: 472818 - DNA, 312 bp, Homo sapiens
aacaatggaatgcaaagagagagagccaaagtgttagcagaaggaagaattttaaggaagtgcaagagagaaatgctgctggcttgtatgatcatggccaagactgacttgaaaagaggtagtgacagggtaacttggagatggagctggcaaggcatactgctggaaygaataaaaggcatgttggaaagaaaggaagtaagaatgaccattatgtttttatcttgagcaactgggtgaatgaatgatgaatggtagtgccctttgctcagattggctaggtggggaagtgatggaaggaagaggggatca

SEQ ID NO: 472819 - DNA, 539 bp, Homo sapiens
gggtgaacaatggaatgcaaagagagagagccaaagtgttagcagaaggaagaattttaaggaagtgcaagagagaaatgctgctggcttgtatgatcatggccaagactgacttgaaaagaggtagtgacagggtaacttggagatggagctggcaaggcatactgctggaatgaataaaaggcatgttggaaagaaaggaagtaagaatgaccattatgtttttatcttgagcaactgggtgaatgaatgatgaatggtagtgccctttgctcagattggctaggtggggaagtgayggaaggaagaggggatcaatgttgtgataaggaaagtggaaatagagcagggtaatgtaagctggcacgggtatcagaggaggaaatgacttttaacgtaacaccttaggtcattcacacattcctaaaggtcatttaggaaacgtaagccattctctcttgcttgaatgaccttcttcatggcctctctagccaaccctactcatctttcaagctccagataatacatcccttccaatg

SEQ ID NO: 472820 - DNA, 329 bp, Homo sapiens
acgagacctggcatctgcccagagtgtagtgggcagggcccacagcccacccctgtgaagtgttaggcctttgggaagaaggcccaggctagatgacttgcttycaagccccagcgctgccacctcctagcttgtagagacctcctcgccttggtcttgtcatctgcaaatatgcggattacgatcatatgtacttgccagggatattgggagcttgctcacaggctctcagaagccccagagcctcacaatcgagttctcctgagacccccattggcagggagatggcagtcctggggctggcccacgcccagcaagctccccagcca

SEQ ID NO: 472821 - DNA, 329 bp, Homo sapiens
acgagacctggcatctgcccagagtgtagtgggcagggcccacagcccacccctgtgaagtgttaggcctttgggaagaaggcccaggctagatgacttgctttcaagccccagcgctgccacctcctagcttgtagakacctcctcgccttggtcttgtcatctgcaaatatgcggattacgatcatatgtacttgccagggatattgggagcttgctcacaggctctcagaagccccagagcctcacaatcgagttctcctgagacccccattggcagggagatggcagtcctggggctggcccacgcccagcaagctccccagcca

SEQ ID NO: 472822 - DNA, 590 bp, Homo sapiens
aggtttaagattaaaaaaaaaaaatcacrtgaagccaaaatgccctcagaggtcccttaaattgtccttagagaccagaactgcatacatggatttggtatctagtccataaacagtttccctttatcagtcaatatttatctatggtcctcattactgttttttcaatttcttcctcaaaaatgttgaaaagccaacagcatgtacttggcctggctgtcgaaataattcattccatttatttggtgattgtcaggaagctcttaatattttctgtaagtttttttcttggtttcaccaacaggcttcatcgatccacctctgtttaatataaatgatgcaatagggatgttgctcagctacggaattggaacaggcaagataggattcaattctcaggagaggattttgcttccccattttttgacaataaaattcacttatccgaactgggtctaggcatataatctttggccatgaaagagaacagaggcaacatgatttaatcaggttctcgctttggaataactaggctctctttggtaaaaagtgttattagaacaggagtcagagtcctcagctcaaatcaa

SEQ ID NO: 472823 - DNA, 590 bp, Homo sapiens
aggtttaagattaaaaaaaaaaaatcacgtgaagccaaaatgccctcagaggtcccttaaattgtccttagagaccagaactgcatacatggatttggtatctagtccataaacagtttccctttatcagtcaatatttatctatggtcctcattactgttttttcaatttcttcctcaaaaatgttgaaaagccaacagcatgtacttggcctggctgtcgaaataattcattccatttatttggtgattgtcaggaagctcttaatattttctgtaagtttttttcttggtttcaccaacaggcttcatcgatccacctctgtttaatataaatgatgcaatagggatgttgctcagctacrgaattggaacaggcaagataggattcaattctcaggagaggattttgcttccccattttttgacaataaaattcacttatccgaactgggtctaggcatataatctttggccatgaaagagaacagaggcaacatgatttaatcaggttctcgctttggaataactaggctctctttggtaaaaagtgttattagaacaggagtcagagtcctcagctcaaatcaa

SEQ ID NO: 472824 - DNA, 379 bp, Homo sapiens
gagcgaaactccgaaaaagaaaaagaaggaagggaggaaggcagggagacagattttcctggatgagataaagatttttcactggatttattttcagaggctyagtaaaatattctccccaaactattttacttcccatgttctaattctatgctcaccaaaaaaattttataatcgacaactacatgtctcaattatatctatctgtggaatgattaaggaaaaggaatatgcttatatctaaaaccagatactcccattataaatcaataaattggcattcttacttctattgtagccttatttgaatgtaatacttgaccatccatcaacatgtgtgtgaaaattttggttgatatatgaaacattcagaatttga

SEQ ID NO: 472825 - DNA, 379 bp, Homo sapiens
gagcgaaactccgaaaaagaaaaagaaggaagggaggaaggcagggagacagattttcctggatgagataaagatttttcactggatttattttcagaggctcagtaaaatattctccccaaactattttacttcccatgttctaattctatgctcaccaaaaaaattttataatcgacaactacatgtctcaattatatctatctgtggaatgattaaggaaaaggaatatgcttatatctaaaaccagatactcccattataaatcaataaattggcattcttacttctattgtagccttatttgaatgtaayacttgaccatccatcaacatgtgtgtgaaaattttggttgatatatgaaacattcagaatttga

SEQ ID NO: 472826 - DNA, 583 bp, Homo sapiens
gcagttgtatattagacagtcagatctggcatgattatagctgaaagccttgctacatcctagaccagcctgtttgtgtccgttttctgaatgttggttctcaaaccttccaagtagatcttttaggaaattcctcctttgtcagtttggaaaagttgattcttctctttagtggttaagaacctgactgatagggttcccatcyggagctcctatatacacttatttccagtgagaataggttgagaggaaaataattatacatctaatactcttgaatatgcagaaacgtcacatctccctgactaaattcacaaagtataaaataaagaacaggacatatgttcccagtaaattgatagggtgtagattttgatatgaaaccaaatgtatttttaattaagaatcgaaatttactactcagtttctgatactataatttgctttttgtcagtcaatagaaaatgaaacttagcatgacaaaagaggaatataaaatttacaaataggaatagaaatatagaataaaagtatatattttaactgtaaagaggaaaacaagaagaaaggaaggtaaatggaa

SEQ ID NO: 472827 - DNA, 641 bp, Homo sapiens
tggcagttgtatattagacagtcagatctggcatgattatagctgaaagccttgctacatcctagaccagcctgtttgtgtccgttttctgaatgttggttctcaaaccttccaagtagatcttttaggaaattcctcctttgtcagtttggaaaagttgattcttctctttagtggttaagaacctgactgatagggttcccatccggagctcctatatacacttatttccagtgagaataggttgagaggaaaataattatacatctaatactcttgaatatgcagaaacrtcacatctccctgactaaattcacaaagtataaaataaagaacaggacatatgttcccagtaaattgatagggtgtagattttgatatgaaaccaaatgtatttttaattaagaatcgaaatttactactcagtttctgatactataatttgctttttgtcagtcaatagaaaatgaaacttagcatgacaaaagaggaatataaaatttacaaataggaatagaaatatagaataaaagtatatattttaactgtaaagaggaaaacaagaagaaaggaaggtaaatggaaggtgaggataaaaagttaacgcaaacctatttataattttgctgatatacctctta

SEQ ID NO: 472828 - DNA, 641 bp, Homo sapiens
tggcagttgtatattagacagtcagatctggcatgattatagctgaaagccttgctacatcctagaccagcctgtttgtgtccgttttctgaatgttggttctcaaaccttccaagtagatcttttaggaaattcctcctttgtcagtttggaaaagttgattcttctctttagtggttaagaacctgactgatagggttcccatccggagctcctatatacacttatttccagtgagaataggttgagaggaaaataattatacatctaatactcttgaatatgcagaaacgtcacatctccctgactaaattcacaaagtataaaataaagaacaggacatatgttcccagtaaattgatagggtgtagattttgatatgaaaccaaatgtatttttaattaagaatcgaaatttactactcagtttctgatactataatttgctttttgtcagtcaatagaaaatgaaacttagcatgacaaaagaggaatataaaatttacaaataggaatagaaatatagaataaaagtatatattttaactgtaaagaggaaaacaagaagaaaggaaggtaaatggaaggtgaggataaaaagttaaygcaaacctatttataattttgctgatatacctctta

SEQ ID NO: 472829 - DNA, 641 bp, Homo sapiens
tggcagttgtatattagacagtcagatctggcatgattatagctgaaagccttgctacatcctagaccagcctgtttgtgtccgttttctgaatgttggttctcaaaccttccaagtagatcttttaggaaattcctcctttgtcagtttggaaaagttgattcttctctttagtggttaagaacctgactgatagggttcccatccggagctcctatatacacttatttccagtgagaataggttgagaggaaaataattatacatctaatactcttgaatatgcagaaacgtcacatctccctgactaaattcacaaagtataaaataaagaacaggacatatgttcccagtaaattgatagggtgtagattttgatatgaaaccaaatgtatttttaattaagaatcgaaatttactactcagtttctgatactataatttgctttttgtcagtcaatagaaaatgaaacttagcatgacaaaagaggaatataaaatttacaaataggaatagaaatatagaataaaagtatatattttaactgtaaagaggaaaacaagaagaaaggaaggtaaatggaaggtgaggataaaaagttaacgsaaacctatttataattttgctgatatacctctta

SEQ ID NO: 472830 - DNA, 414 bp, Homo sapiens
ctgatttatggggccccttatctcgtaacttttagaatcttgaccaagtcaggctacccggcaggaggaaatgtcaaaggcagaggcaaaagtggccctctcactttatctgtatctccagggtcttcctttgcatggtctcctttccttccaccctcaagtccattcctctcctgtttctctccgcccctccaggtttcctcctttaaccrcatcacctagagtcatcttcaccgtgcaaagtggttttgttcaaactaatgtattaacactcaactcagtgcagttgccctttgaatgatcacacccaggagacttttttctaattagtgttcaccttgactgtactatatttcagtgttgatcattttgtcctttggctcagatagctgtaaactgccttctatttcactg

SEQ ID NO: 472831 - DNA, 315 bp, Homo sapiens
ccattggtcatctcccagaaccagactttctgaaaagtcctyaaggaccagctagtccaatccctcactgaataaaggagaagcaaagtctagggaggtgaggtgattcgttgtcctcctaattagcaggtgagctcctggcagggctggggtttcatcttctgggctctctgcaaggtcgtgcccggcacgggccaggaacaatttcataaactcgtcatctagacggcctttgactgacaccatctctccgtgtggaggagccgctggggtgcgcggggcaggtgtcgtccgtttcagaagtaaaataaccca

SEQ ID NO: 472832 - DNA, 263 bp, Homo sapiens
ggcccagtttgtgcatgaggtgaagaagagcccctttggcaaggatgttcggctggtctccctcggctcccggcaggtaaacagtagccagtatttccaccaggggccatcctgctcctttccccacaactttgtcctgctcgtccaggcctgggagacgctgggtctgtgacaggctgaaccgtgtgaggagcagccccctccctgrcctggccggcccatcactggaaggcaaaggagaggtggcgggggcaggtccacgt

SEQ ID NO: 472833 - DNA, 263 bp, Homo sapiens
ggcccagtttgtgcatgaggtgaagaagagcccctttggcaaggatgttcggctggtctccctcggctcccggcaggtaaacagtagccagtatttccaccaggggccatcctgctcctttccccacaactttgtcctgctcgtccaggcctgggagacgctgggtctgtgacaggctgaaccgtgtgaggagcagccccctccctggcctggccggcccakcactggaaggcaaaggagaggtggcgggggcaggtccacgt

SEQ ID NO: 472834 - DNA, 525 bp, Homo sapiens
agatcttaagtgctttgtcacaaaaaaagaagaggtaactgtgtgaagagagggatgtgttagtcagctaattcacatatagtcacgctagatgataacagtcagctcactatatatatcaaaacrtcacaccacataccttcaatacgcaattgtaatttcaaaaaattatggcaaactttgtaagagtttagtcaaattataaaataattacatatctactctgtgaccagactgtgtttgatagggagatgatgtttctaaaatggaaagctatctagtcacatagccagggcatatatgaaatagccttggaactagcaaggagaagatgatcagtgggataaaacactggtaatccttaacgtcccttattttttccttttacaaatcctatcatacatatctataagaaattgaagcatccaattatccttggaaggaaaaaagaaaaactttaaagaaaaaaaaatatggctaaacttacattttccaagtagaaaagaacatggtcattcttgactt

SEQ ID NO: 472835 - DNA, 525 bp, Homo sapiens
agatcttaagtgctttgtcacaaaaaaagaagaggtaactgtgtgaagagagggatgtgttagtcagctaattcacatatagtcacgctagatgataacagtcagctcactatatatatcaaaacgtcacaccacataccttcaatacrcaattgtaatttcaaaaaattatggcaaactttgtaagagtttagtcaaattataaaataattacatatctactctgtgaccagactgtgtttgatagggagatgatgtttctaaaatggaaagctatctagtcacatagccagggcatatatgaaatagccttggaactagcaaggagaagatgatcagtgggataaaacactggtaatccttaacgtcccttattttttccttttacaaatcctatcatacatatctataagaaattgaagcatccaattatccttggaaggaaaaaagaaaaactttaaagaaaaaaaaatatggctaaacttacattttccaagtagaaaagaacatggtcattcttgactt

SEQ ID NO: 472836 - DNA, 525 bp, Homo sapiens
agatcttaagtgctttgtcacaaaaaaagaagaggtaactgtgtgaagagagggatgtgttagtcagctaattcacatatagtcacgctagatgataacagtcagctcactatatatatcaaaacgtcacaccacataccttcaatacgcaattgtaatttcaaaaaattatggcaaactttgtaagastttagtcaaattataaaataattacatatctactctgtgaccagactgtgtttgatagggagatgatgtttctaaaatggaaagctatctagtcacatagccagggcatatatgaaatagccttggaactagcaaggagaagatgatcagtgggataaaacactggtaatccttaacgtcccttattttttccttttacaaatcctatcatacatatctataagaaattgaagcatccaattatccttggaaggaaaaaagaaaaactttaaagaaaaaaaaatatggctaaacttacattttccaagtagaaaagaacatggtcattcttgactt

SEQ ID NO: 472837 - DNA, 594 bp, Homo sapiens
gaactctatcctccttcacctccttgcaagccctcctcaggtaattcctatattatataaaataaaatttttatgtctcaccatatgcttcctttctgaytctgctgccaaaacacactataggaaccatcagagtttttgaaagataattgcctttgataacctaaaatagaacattgtaggaaattattttttaacctaagaaagttagaagagaaagaatagtgcagtgcaagccctaggtattggtgttagacacaaatcactaggatgatcatttccatttgaacttctgaaactcaggttctgtattcataagggagaaaaaataactcttactttataggattttgatcacaagataatacacatggatatgtctggctcagtaattgcctcgtcattggtacctactaactattcagtatatttcccctaaggtcattttatttcagtgttatctttctgagaagaaaaaccaaagaagattattttatgctcctggacttgtccttaacctcacatttcacaacattggccctctttctgtatacaaagccaatcacttcactgcaacagaccacagctgagcaa

SEQ ID NO: 472838 - DNA, 594 bp, Homo sapiens
gaactctatcctccttcacctccttgcaagccctcctcaggtaattcctatattatataaaataaaatttttatgtctcaccatatgcttcctttctgactctgctgccaaaacacactataggaaccatcagagtttttgaaagataattgcctttgataacctaaaatagaacattgtaggaaattattttttaacctaagaaagttagaagagaaagaatagtgcagtgcaagccctaggtattggtgttagacacaaatcactaggatgatcatttccatttgaacttctgaaactcaggttctgtattcataagggagaaaaaataactcttactttataggattttgatcacaagataatacacatggatatgtctggctcagtaattgcctcgtcattggtacctactaactattcagtatatttcccctaaggtcattttatttcagtgttatctttctgagaagaaaaaccaaagaagattattttatgctcctggacttgtccttaacctcacatttcacaacattggccctctttstgtatacaaagccaatcacttcactgcaacagaccacagctgagcaa

SEQ ID NO: 472839 - DNA, 629 bp, Homo sapiens
tagttaagaagaaatgtaaaacaytgaatgtgcttattactaaaagaaacagctaatatattttttaaaccccaacaaaatcaactacaaatattagaaaaaagaattaataagatgaaagagaaaataaattatttaggaacacaaaataatataagaaagaaaatagtaaaaataagaaccaataacatagacgaaactttcgtgggcatgatttaggacaaagagtgagagagaacaaaattgtgagataggtgctaacacaacacagcccacatctggaagaaaaattcccattttagaacatcattggaagtgaactttttgtctattagaaaattgtaaacgatcttaagagcatacttagatagccacatgtacaacacaggggccagtgagattttttttctaaggctggaaacccaggaacataaggaaggtgggtatgtcaaaaatatgacaaagtaaatgagttgcctatttaaataatgggcttaaaaaaaaaatgcttggaggatggaaggcagtacttacaatgaaagtttccatttcacatgaacagaaaaacatgggtaattaagagttctcaaatccaaattgataacaaaaatatgaaaagttgctcaaac

SEQ ID NO: 472840 - DNA, 390 bp, Homo sapiens
aaacaatgaagatcataaaatgtaactggaaataattttttgtcccacaataagtcattgtttaaattatggtatatccatccaatgaaaaatcatgcagtcattaaaaaaaaaaatccactttaagataccactccacacccacraggctaaccataagaaaaaagacatcataataagggttaaaaattcagagaaaccggaatcttcatatactgctggtgggaatgtaaaatggtgtagttactatggaaaatagtttggcaattcctaaaaaagaaagagctaccatgtaacccagtgtttccactcaagagaagtgaaaaaaaaaggtctcatacaaatatctgtacttgaatgttcgtaatagccagaaagtgaaacaaccca

SEQ ID NO: 472841 - DNA, 439 bp, Homo sapiens
ggaggttattgagggcacagctcaccatactccaggatcagccaagcattccggcaacagggccacaaattcactggatgcccttgggccagtcagcccctcccagaacccagcttagtccacagggttctgaggaagaacgaatgagacgctgattatcaacaggctttgtcaactacacagcagctctccagagccaaccaccaccgtcaacagtgccatcctgccagcaaagtgaagaccstcttgagaacaggctctgtctttaaacaaataaactctagaaactcttgtaagccacctgtttccaaaccagggaaaacgtctggccttcattcccaccagcgtcattcatatccaacaaggccgtctccaactaagatactcccgcaaaacgctcctgcggcatcttccaaaagattgcatctgaggaggcacc

SEQ ID NO: 472842 - DNA, 407 bp, Homo sapiens
gaagtcagaaggcctcgggctccctgctcacaggaacagtgcagctcaattctaactctcactacaacgcrgctgactccacggctcctactccatgaggctctcaactgacaacaggaaacaccgcccaccctccccacacttcggggctgctgaaacctgcagcgggtcagacagccccagggacttccaccagcagggtcctgccaaggcgccaggtcctcgccctgcgaattcagtgaggaaagaggccccttcacaattggcggatgtgctcctccctgatgaagaccttctgcggctcctgtgacctgcaggacgcggtccaaaccaccctcaggacaggacagatccctgccaacctgtccagcttctgccacatcccaggagaactgtggttagaacca

SEQ ID NO: 472843 - DNA, 644 bp, Homo sapiens
tcccactccaagagtgaccctcgcatgacccgtggactctgcgtgacactgatgtgtccaggcaggttcatcaccgtcacacgtgctccactctaccagggtaggctgtgtgtgtaggagcgggcgcagggggtacacaggagctttaccttctgctcattttgctgtgaacctaaaattgctctagaaaataccatccattaaaaattaaagtcattgaggtcacaaagttccttcgctaaactgccccaggtcctcagcagcctccatgcctcaggactctcctgtgggaggccttcctgggctgcaccaggggcctcgaagctgcttccaatactgagcctcagcatccactccagggcagctcttcccagcgccgacctcccagccctccgcgtactgggagctggcattcacactgcacactgccgggctgctgtgctcaccacctgccctcggggagctctccaggagcaaaagtctgtctcaagtctggtccaggatggcactccatggtaaaacatcccacccctcccgtgtcaagcccacttctgccactctagcagcacgtgtgacagctcagtctttccaayagtgaggacaggcttttccctacggtacccagtccccttgggacacagaca

SEQ ID NO: 472844 - DNA, 598 bp, Homo sapiens
ctcctgcatcttctcctccgccccggcctcccgctcctgaagctgccggatgcgcgtcaggagctcctggttgcggtcgacctcacgctgttaagagagcaagagtcagatgccacgtgccgcccacgggagggtcagcggggagccctcacccccacacctctctcagaacatgccgaggcacaaaaaagagccgagcaggacccatgagccaagtcatargcagaaccaggacgggacctgggacccagccccagcgttggcacccccgctgtggcaccatgacggtgagcactgtgcgaggtcagggctcccaggaagggcacttggcacagatcacacacacatttatcacaccgtctgctcagcagttgcctctgcagggagagggggcatgggaaatctaaaattcagcattgaccttggggagaagctgagctttcatagcaccagcaaatcctgtctaattacgctctgtccggcactgaaaggagctggcactcccccagcgagcagacaacaggggcagagacaggcagcgtggacaggaggctgtgggcagaagcagtttacactgggctcaaatctgccacacatg

SEQ ID NO: 472845 - DNA, 565 bp, Homo sapiens
caagcaccacgctcagacctcctgactctaatgacccgcaggccctccagagttcactgccaggtaccggcgtcccaggaggtgaaggcggtgagtcctggtggagcccggcactccgggaccctctcaccctgccttcctcgggaagcaccaagcactcccggagccccgggtggagtacgagcttgtgctgtcctcatccagggtactccagcccaaaacccaggagagctgtgacagaggtggccrccttctgagagaggctgacccgcgcacctcggagggactccagcccttgtgagctgcaagggctgcctcacaacaaccaagagacccttctgtgatgcaggacaagagctggggttggcacggggctccgctcagcaccatcacagccagatgcggcaccgggcctggaactgccagtcccagcgcagacagggcagccagcaggtctttggacttcagacacttaagtctcgccccctaataggtatttccaggtggaactccaaggaacaattggaaaactactggttctgactgttcctggggtcccatgcag

SEQ ID NO: 472846 - DNA, 325 bp, Homo sapiens
tgaaaggttgagaagcaccagagtagagtggtggttcccagtggggtccagttttgcccctgggaacatctggccctgtctggagacacctgattgtcacaggggggtggtcacatgtgtctgctgctggctggcrtccagggggtagaggccagggaagttgttaaacagcccacaatgcacaagaaagtcctgagaaaaaagaattacccagcccaaatgccaagcgtgccaaggccaggaaagcctgggacaggggagggaagtttctctgtcctcccacctgtgttctctggtggcccaagcccacacttcctttactcct

SEQ ID NO: 472847 - DNA, 574 bp, Homo sapiens
agccgcctcggaaagccctacactgacactggccccaggtgcagcactggccagcggcccccctgccccctccaggcgctccataaccaaaaacgcaagacaaaataaaaagcaggcacaaagctcatgggaaacacatattatgaggctactttgggacccagttcaattttaaactactcatgggccaatttaatactcaagggctgtaaaatctactcttgaatcactgaattcaggtgggaacgttcacaagtgctttaaatcacggctccgtgtggtcatttaactagaagaacgccaccattccctgtactctgcttcaaagccagaatgtgcaaaggcaagaatgtgacaggtgctgtctttcaggtgacaggcacagcacaggcatctggccagagagaagggtaaggggctgcgctgggaagcaccctcagctcagcacaggatggctgggcagccttgaagggggcccagcaaacccacaccctgcatcctgagtgagggtgcrctcacatctgtgtgggggcacatgtggggctggagtccccccgccacgcagagcagatgt

SEQ ID NO: 472848 - DNA, 470 bp, Homo sapiens
tgggcttccttacagacccggtctgaggaaatgcagtggctgcaggatgtagcgtgaagcgtgtgttcygcagcaccccagagggtagacagaggcataggggcgtggggctgagcacaggctggaaaagctcatccgccaggttgtgaagcaaacctctccttcctggcagtgaaatccacatcatgaacggagatgggagaagtgaaccagagcaacacacattcccggctgagggacggcgtgggcagcagagagacacccactccaggaccgtccaggtgcaagcactcgggcccgcgtcatcagggccacatccccaaggcctgatggctgacactgaaatcttctgaacaacagaactagactgtaaaaatccaacaccaagacgtgacaaggagacgacactgtggaatgctcgccaagaaccatgtccgggatgtttgccactcacacctgactggcaggcg

SEQ ID NO: 472849 - DNA, 659 bp, Homo sapiens
cctctccttccaacgtgcaatgcagggtaggtccccccgcaagccctggggactctttccggagctcagggaaggaaaccgctcacctcctaaatgttaaaacacgaagggaactacgcacagcccgcctggagatgggattcctggcacagcctgagggctgacccacccagtcagagcccggcttccccaggggccggacaccgcagtgaggggctgttctgaaaagaggtctgccgggaagaaactggctgtgcctctgcagcccgggagagcctcactctctgaggccacaaacaccgcaccgtcctgcttggggatattccagtgagcagaaagggaaggtctctgccgacaaggggttggttactaacaaagggcactaacacacgagctggcttcaggtggtcacagcctgaaaggcaacaaagccagcagcgaggtggagtgagggsgcccagctaagagcaggggaggaaggccactcagggcagaacaggccgcagaaaccgcagtgccctacggggcggtctctgctggcctggcagcagcaggcagagcaaagcgtgggctccacgggagggtgggcgggcacagcctgcgctggggcaaggcagggagcgtggatcatcacccgaggcattcataaaggacaaccc

SEQ ID NO: 472850 - DNA, 436 bp, Homo sapiens
tcacccgaggcattcataaaggacaacccaaatgtctgctttgtggctgctcctacactgccctgaagccaggaagtaacgaggccaggaagccctgggaccagccatgcagccttgccaaggccagccacgcactgtgaaggttctgagggaaaatggggcctctctcaccacagccctgctttacctggtggcctcggcctgtctcctcacccccgcacggtccagtaagagaccaccttccagatgagaccagaaagtccaggcacgtgagacgcccagccaaaaccccagtmccaccagctccagctctctcctcctcaacgctcctcacccaccccgctccccagctccagggtagggcagcaggaaaggcccccatcgtcacagatgccacctagcaacaccttctggagcacagtcccagagccctatc

SEQ ID NO: 472851 - DNA, 541 bp, Homo sapiens
ctgcacagcagaagggcaaatgaggctgtatagacagttttttttaatcaaccagaatgaaaaagactcaaaatgaaacaccagctctaagcggtaaacctaagggaaccacaaacaaagaacacaacaccaggcagtgggaaacacaacggcacccacggtgctgagaaaacgccacttccactgggaacggtaggccaaggacagaacggcctgtccacagacactgcaccctcgcaagtcaacctctcctcacagagccatggattagcaattccagaaagaccctgtgcgcacgtgaggactggatgggtaagtaaaacatggtgtgtgctgacacctgggcttctcaagaccaaggagacagcacaggaggcgaggacagcccaggggtgctggatggagccagtgtcagggtgtccaccgaggggccctggggccctgacrcacccggagcaggcagcaccccacacccacatctcatctctaagcagcactcggcaacaagaggaaacagggctcactgggaaagtggcggact

SEQ ID NO: 472852 - DNA, 562 bp, Homo sapiens
tccaaggctgcaggcagggatcagaaaaggatcccaacaggctggtgtggcctccagggcggggcgaggaaggtcttcacccctgcacctgctctagggcaggcgcagacctgacgtggggaggcccagcaaggaagacaggcggctgccatcacagcacaggtggactcgagggagatgggcccaagtggagtcgcacggtgacggcagggctcctgcagaggcacaccagccccagccgcaaggacactcccggcgcaggctcccagggcaggcgccccgccacagcattcaccaggacgagctggaccaggtggctctggggcccttcccgcctgaggcctcacgatctgagtctccactcactggtgagccccatttccatgtgaggtgtaggcgctgggtgctgccaagaggacaagcccagatgcggctcctccgcctctcccaacctctgytcagcgtcagagcgaggctctgcaccaggcccccagcacctgccaggcaccgtggggacaggcagggatgagggaggctgcggatacgccacacacactcggtc

SEQ ID NO: 472853 - DNA, 616 bp, Homo sapiens
gacaagcagaactgccactgtctcatgtcatccacagaaaagccatcaccaagagaggtcggagcagtggccaccccgcatgtggccagagggctgggacagaggaaacccgcggrggctggagaaatgctcagactgcccgcgtcagacctgtccacctcgtgtgccttgcctaatctcatacctcaaagtgtcttaaaatattatctagcaccttgataactgttacttaaaacagccaatccctggctgggtgcagtggttcacgcttgtaatcctaaaagtttagtaggccgaggcaggcagatcacctgaggttgggagttcgagaccagcctaacacggacaaaccccgttactactaaaaatacaaaatcagccaggtcccagctactcgggaggctgaggcaggggaatcacttgaacccgggaggcggaggttgccatgagccaaaatcaggccacttcactccagcctgggcgacagagcgagactctgtttcaaaaaaaaaaacagccaatcaccaggtcccagaatcacaaaccagggagttgacgctggcctgctccaggcaggtgagactcaggcaggaaggatgcagccttggtccaagca

SEQ ID NO: 472854 - DNA, 624 bp, Homo sapiens
tgcctggggcccctgagggctcctcagagccatggacaagctgagcagcaggtgccgtgtcaggctataccacatggggtgccagaaactgatttcactgggaagtcttttgttaggagtactccaagggcaagcgtcctctgggaagcgtgttgggaatggatgtttacaggggcgtcaggcagggaaacagccaggcggaaagacaaccattcatgcagagtcaacacctgtgcaccccctgcattccacgaaggagcccccggcaggccaagacccacgctccgcacacatcagagaggaggggctggcctcagagaagcgagagcaggagcagggtgaccacggacaagggcagaaccctatcgtcctcgccacgcgcacagccacagcyccgccacagccagccatggcatgactccatatgccaacaggcttccctggccccttcatgtgagcaacagagcacaggcagcggcgtagtaggagccccaggcctgccgccaccacagttggtaacagcctcaggaagaccacacagacagaatgcccaacagacagcaagcaacagcacccaggagggcgccggacagctcactagggcccaggcacagcaggcaggga

SEQ ID NO: 472855 - DNA, 352 bp, Homo sapiens
ctgtgcaagggtgtgggtggtgcactaggttgccttggggatctggacggcccattgctgccatcagtattatagatatatatctagcaacttgccctcctcaatatagtacgcttagttctcactgtatgatacttaccmtaagctagttatctcacttatatacgagccatgcacaccaactgcaacagtccttcttggctgggcgcagtggctcacacctgtaatcccagcactttgggaggccaagatgggcagatcacttgagctcaggagttccagaccatcctgggcaacatggcaagaccctgtctctacaaataatacaaaaattagacagtcgtggtggcat

SEQ ID NO: 472856 - DNA, 559 bp, Homo sapiens
tgcaagggtgtgggtggtgcactaggttgccttggggatctggacggcccattgctgccatcagtattatagatatatatctagcaacttgccctcctcaatatagtacgcttagttctcactgtatgatacttaccctaagctagttatctcacttatatacragccatgcacaccaactgcaacagtccttcttggctgggcgcagtggctcacacctgtaatcccagcactttgggaggccaagatgggcagatcacttgagctcaggagttccagaccatcctgggcaacatggcaagaccctgtctctacaaataatacaaaaattagacagtcgtggtggcatgcacctgtgatctcagctactgggaaggctgaggtgggaggatcgcttgagcctgggaaggtgaggctgcagtgagccgagatcatgacactgcactccagcctgggcaacagagtgagaccctgtctcaaaaaaaatccacaaaacacacaaaaaaacagtctttcctgtataaagtaaaatgaaaggaccaagtgaataaaaggtaca

SEQ ID NO: 472857 - DNA, 348 bp, Homo sapiens
tcttggcacctgttcttgttgctctattttattattccccaagttgtattggcacattccatttgattggtattaagtattctgcaactgggtaagaatttactcgataaaatgatagtaggaaaccagcttcctaaagaactaacaagtaagaaaataggtgaaaggcaagaaactttatgtggttcagggaaaaaatatcatattttggaacttagacttggctgtcrctgggtcataatctaagaacctttggcagttttgttacttataattttattcttaaaaatgttataatattgttaaaagtatttaaaaagaggattttttgtttgtatgtttagtttg

SEQ ID NO: 472858 - DNA, 547 bp, Homo sapiens
cactaggaagagtctgagaatgacgccagccagccttgatctgagtatcaaagcccctgtgacctagactggggctgggctgggggatattcccatgaaagaccaggctttgtgggagagagtgcaaaggagatgggagaggaggaggagaagaaggctaggagagggcggtgctttcttcctatttctttccagactgctctgtgaatcgctggtcagggcttggtctgttttctgactcagcctccctctgagagcatgaatcaaccttgcacaccttcctttaagcaccgcgaagggggacatccaggaagactgaggagcagtgcctgttttgggataaactctgcaggaggtctctgagcagttcactttctgactccttctgggttgtccttttgagcttcagactttgggatccagtccttgacctgacaagctcccgcccatcctgacaaatggctggaagtgcctccattcttcacacaaaagtgccctgattcagccccatcccrcacactgactgcaggctctgcacagagcatgg

SEQ ID NO: 472859 - DNA, 228 bp, Homo sapiens
cccacacaaagacggggcattgaagaggactgataatggaggtgaggcgggctcatctgctgaggtcagcagggccccctgagcagggtctgggaaggcaggaatggactgagttggggtggrggccgggtttcctttccctggctggcgctggaatctgatgggaaggctgtggaggagggaacagtctgcagcgtggggtcataaggggtggagtctccggcttgc

SEQ ID NO: 472860 - DNA, 543 bp, Homo sapiens
ggggtggaggggcaattggaaggctgtttgcctctggcaaagtctgggatctgtgcttgtgtgaggttaacccacccccacttccactctaggccccaggtgagactccaccaccagtcctgctagtgagggttccccggtgagggtaaggttggtgggggtgcagcgcttcacaatgctaaagccttagccctcctccaagagctgagacctctcagggcctgaatcttcttttccacaagataaatgatgcaaaggccacacacacaggaaaaaaaaaaaaagaggcagaactatctattctttgcacaaagtttccactgcaagaggaggaggtgatgcaggtgccacctccaccctgcacttgctcctcagaaccagggataaactgcatttgtaaaaggcactgttcttagcaatttctggacattcaacaacgtggggggcggccactggtcagaggcaggacagcagccaagatggggagagaaacggggagagaaagaaacrattctaactgactcctatatgcagccagttgga

SEQ ID NO: 472861 - DNA, 594 bp, Homo sapiens
tcattagacttttttaaaaggcagcaaacagatattgctgggttcatcacttaacaaaaaaagtcattgttataaacttagtttcatgagtgtttcttcaaagatgcttgttaaagtcccatcaaagaaaggatcccatggcctaatgaagatgtacctccaccttaggatattttgcagaccaaaataagrcaggagtggtgaagaagtagaaagagaacaatgttctcttgtatgttggtctgccactaaatgcaatgttagatgactgatttctatagttaatgaatggtaatagtagctaacatttttgatcctttatatgcattatttcatttgaattaatacatataacaactctataaattaattatcattcattctgatttacagatatccaaggtcacatagcatgcaagtggcagagttgacatttagacacaggcatttaaattttagaatttgaactgttaatcataaagcctatgataccttcgatttacaacatatactaaataatataccagtatattatttgtaagtgaagagtcgagtaaatactgtgtttaaggacaaaaaaaaaaagagagaaag

SEQ ID NO: 472862 - DNA, 594 bp, Homo sapiens
tcattagacttttttaaaaggcagcaaacagatattgctgggttcatcacttaacaaaaaaagtcattgttataaacttagtttcatgagtgtttcttcaaagatgcttgttaaagtcccatcaaagaaaggatcccatggcctaatgaagatgtacctccaccttaggatattttgcagaccaaaataagacaggagtggtgaagaagtagaaagagaacaatgttctcttgtatgttggtctgccactaaatgcaatgttagatgactgatttctatagttaatgaatggtaatagtagctaacatttttgatcctttatatgcattatttcatttgaattaatacatataacaactctataaattaattatcattcattctgatttacagatatccaaggtcacatagcatgcaagtggcagagttgacatttagacacaggcatttaaattttagaatttgaactgttaatcataaagcctatgatamcttcgatttacaacatatactaaataatataccagtatattatttgtaagtgaagagtcgagtaaatactgtgtttaaggacaaaaaaaaaaagagagaaag

SEQ ID NO: 472863 - DNA, 618 bp, Homo sapiens
ctttctgacaacccaagacacatggactaggggttacaaggcctaagcctcactttggccttgctgcaggattgctgagtgccttttatacaaggaattgtgtttctttggccctcaatatcttatttctaaaacaggcctcttcaaagtcaaaaggctggccaggtgtggttgctcatgccataatcccagcactttgggaggctgaggaggatcacttgaggtcaggagtttgagaccagcctggccaacatggtgaaaccccgtctctactaaaaatacaaaaaaattagccaggcgtggtggcgggtgcctgtaatcccagctactcgggaggctgaggcaggagaatcgcctgaaccctggaggcggatgttgcagtgagctgagatcaygccactgcactccagcctgggtgatggagtgagactgtctcaaaacaaaacaaaaaacaaagtcaaaaggcaaacaaaatacttgctaaaaaaatttagaacccatagacgataactcacagaaattaactcattttcccaaaatacgctacaaattaatgagaaaaagactaatgactcaaaagaaaagcaggcaaaataatggaaaatttagagaaaaaga

SEQ ID NO: 472864 - DNA, 618 bp, Homo sapiens
ctttctgacaacccaagacacatggactaggggttacaaggcctaagcctcactttggccttgctgcaggattgctgagtgccttttatacaaggaattgtgtttctttggccctcaatatcttatttctaaaacaggcctcttcaaagtcaaaaggctggccaggtgtggttgctcatgccataatcccagcactttgggaggctgaggaggatcacttgaggtcaggagtttgagaccagcctggccaacatggtgaaaccccgtctctactaaaaatacaaaaaaattagccaggcgtggtggcgggtgcctgtaatcccagctactcgggaggctgaggcaggagaatcgcctgaaccctggaggcggatgttgcagtgagctgagatcacgccactgcactccagcctgggtgatggagtgagactgtctcaaaacaaaacaaaaaacaaagtcaaaaggcaaacaaaatacttgctaaaaaaatttagaacccatagacgataactcacagaaattaactcattttccyaaaatacgctacaaattaatgagaaaaagactaatgactcaaaagaaaagcaggcaaaataatggaaaatttagagaaaaaga

SEQ ID NO: 472865 - DNA, 498 bp, Homo sapiens
tgtaattataggaaggggtcattaatcaccacagagtgaatgacttaaattataaagaagaccaaagaaaggaccagccaagaataccaaagggaggaagaataccaaatgagtttctccacaaaggaaacagcattcaggactgaagagcagacctcgtggggaaacaagttccagcccttttcaacagcccagtcactacttgcatgcacccaccccagatcacacataggacacacacaaatacaggcacacttgtgcctacccacacgtcatcaacctacgasttatcagcgcatacatacacaggctcatatatgcacaggagcacagttacaggaagctgcacacagaaatttcccacaaatacaactaatcacagatggctggaaaacagcccagtctccctgaactgtcaaagataaatatgggataggaaacattttaatggaacattagcatgcaaataggggctgtgccttgattcaggtgacttga

SEQ ID NO: 472866 - DNA, 498 bp, Homo sapiens
tgtaattataggaaggggtcattaatcaccacagagtgaatgacttaaattataaagaagaccaaagaaaggaccagccaagaataccaaagggaggaagaataccaaatgagtttctccacaaaggaaacagcattcaggactgaagagcagacctcgtggggaaacaagttccagcccttttcaacagcccagtcactacttgcatgcacccaccccagatcacacataggacacacacaaatacaggcacacttgtgcctacccacacgtcatcaacctacgacttatcagcgcatacatacacaggctcatatatgcacaggagcacagttacaggaagctgcacacrgaaatttcccacaaatacaactaatcacagatggctggaaaacagcccagtctccctgaactgtcaaagataaatatgggataggaaacattttaatggaacattagcatgcaaataggggctgtgccttgattcaggtgacttga

SEQ ID NO: 472867 - DNA, 615 bp, Homo sapiens
cggttacccctcccctgctcagcactctccaatttgatggacaccaaaatccttgccttggtccccttggtcctgcgtgccctcctctctggcctcatctcaagccactgccctcgtgctgcactcttcctctgtaatccacactgctggcttcttttccttgaatgtgctatgctccctcctgctgcaggagggccttgcacttgctgcttcctcttctttcttctagtgaattcctattcctccttcagctctccattcaagccagtgcctcagggaagtcttccctcacctctagaccaggwctggtgtccctgccatgaagcctcacaacaccatccagctttccttccttgcatctgtcatagcttttgatcatacaatgatgtgtgggactttctgaatagtggtccctctttaccaattaactgtgagcctcaagaggaaggaataatgtctgtttgctcctcctctgtatccctagtggtggtagaagaggaggtcaataattatcctcaaatgaactaaaatgaatggatgcttagattttttttttttgagacagggtcttgctctgttgcccagatgtgatgatcatggttcactgcagcctca

SEQ ID NO: 472868 - DNA, 615 bp, Homo sapiens
cggttacccctcccctgctcagcactctccaatttgatggacaccaaaatccttgccttggtccccttggtcctgcgtgccctcctctctggcctcatctcaagccactgccctcgtgctgcactcttcctctgtaatccacactgctggcttcttttccttgaatgtgctatgctccctcctgctgcaggagggccttgcacttgctgcttcctcttctttcttctagtgaattcctattcctccttcagctctccattcaagccagtgcctcagggaagtcttccctcacctctagaccaggtctggtgtccctgccatgaagcctcacaacaccatccagctttccttccttgcatctgtcatagcttttgatcatacaatgatgtgtgggactttctgaatagtggtccctctttaccaattaactgtgagcctcaagagraaggaataatgtctgtttgctcctcctctgtatccctagtggtggtagaagaggaggtcaataattatcctcaaatgaactaaaatgaatggatgcttagattttttttttttgagacagggtcttgctctgttgcccagatgtgatgatcatggttcactgcagcctca

SEQ ID NO: 472869 - DNA, 615 bp, Homo sapiens
cggttacccctcccctgctcagcactctccaatttgatggacaccaaaatccttgccttggtccccttggtcctgcgtgccctcctctctggcctcatctcaagccactgccctcgtgctgcactcttcctctgtaatccacactgctggcttcttttccttgaatgtgctatgctccctcctgctgcaggagggccttgcacttgctgcttcctcttctttcttctagtgaattcctattcctccttcagctctccattcaagccagtgcctcagggaagtcttccctcacctctagaccaggtctggtgtccctgccatgaagcctcacaacaccatccagctttccttccttgcatctgtcatagcttttgatcatacaatgatgtgtgggactttctgaatagtggtccctctttaccaattaactgtgagcctcaagaggaaggaataatgtctgtttgctcctcctctgtatccctagtggtggtagaagaggagrtcaataattatcctcaaatgaactaaaatgaatggatgcttagattttttttttttgagacagggtcttgctctgttgcccagatgtgatgatcatggttcactgcagcctca

SEQ ID NO: 472870 - DNA, 527 bp, Homo sapiens
tttttagagatgggctatttttacgttgcccagactcgtctcgaacacctgggctaaagcaatctgcccacctcggcctcccaaagtactgggattacaggcaggagccactgtrtctggcccaatgcttaagatcttttgagacaaaaaggaggaagtgggagatagtttcaataccacaggaagctcagaaaaaaaaaacaccccccaacccccccaaaaaacatacatgtatttatttgatatttggctgtgcaggttaaaaagttatttatttatttatttatttgcttttggaaaaactcgagtcagcttgatgaggtcactttttcctgctactccttcttatttggggagtaaagggacttccatgatctggatggatgattgtgatgaggaggttaccgggattgccctgagagaatggactgtgagctttcagggatggaagctgcatcttcatctctataatcccttgtttggcacagtgtcagcctgagaagatgcttggcggcaaatatgaatta

SEQ ID NO: 472871 - DNA, 527 bp, Homo sapiens
tttttagagatgggctatttttacgttgcccagactcgtctcgaacacctgggctaaagcaatctgcccacctcggcctcccaaagtactgggattacaggcaggagccactgtatctggcccaatgcttaagatcttttgagacaaaaaggaggaagtgggagatagtttcaataccacaggaagctcagaaaaaaaaaacaccccccaacccccccaaaaaacayacatgtatttatttgatatttggctgtgcaggttaaaaagttatttatttatttatttatttgcttttggaaaaactcgagtcagcttgatgaggtcactttttcctgctactccttcttatttggggagtaaagggacttccatgatctggatggatgattgtgatgaggaggttaccgggattgccctgagagaatggactgtgagctttcagggatggaagctgcatcttcatctctataatcccttgtttggcacagtgtcagcctgagaagatgcttggcggcaaatatgaatta

SEQ ID NO: 472872 - DNA, 468 bp, Homo sapiens
aaacaaagtgtccagtgtcagktgatgactcaaggttggtttaagccaggctggggccttttgttcctttttgcctgatacttgaaagagtttacagtagggactgtcctgtggtccacttctggataatgagacataaggagaagtctgctgtgtccttctaagaagattttcttcactggttaaaggcgagagacacatcaagaaaagccccctttgacatagcttcctccatcttgttcctggagtctgaacttggtcatgacggctggagctataacagccatcctgtgatcatgaagctccaagggtataaagcagtaatattcaggaaggtggagcctttggacaaaatgataaaaggaatctggggcctcagctacatcactgagccttttcaagtccttgccttcttcctcttaaatcctgttatgttacataactaaatgtctttattgcaaaagccac

SEQ ID NO: 472873 - DNA, 503 bp, Homo sapiens
cagtaaaccatgattaccagttagggaaccctcttgaaattcaagtcctcagaagccagcctaggaccaactgtgcagacagacagaccctccttcacaggataatataatagtctcagatctgcgttgttaatttttgtttgcatagagttttataattggaaggtgtctcaaatgctacatatttctgtctaatggactttagtaagagtgttgtatagtatacaacatggaattattctccattataggcaggctgtgataagtgttctaatgtttatacaaaagaactctgtaactttgagcagagtaaaragagtgttaacgatacttttgactgcaaatagtggaaaaatgttgtgtttaactctgaaatatgctttgcctgatattagtatttctactctagctttctcttgactagcgtaagcatggtatatattattccattcttttattttaacctgtttgcatctttgtatttaacttgtgtttcttgaagg

SEQ ID NO: 472874 - DNA, 653 bp, Homo sapiens
aaataggctatgatcacacatctaaaggccatgaacatggcaaagagtattttaaagaatctaaaaagtgtactttgaattttaaagtattttaagagattaattttataaaaggaaaaacagtgttatcacgcagaaggaccatatttagtataatcaaaagtttaagaaattggccaggcgtggtggctcacaccagtaatatcagcattttgggaggcygaggcgggtggatcggatcacctgaggtcaggagttcaagatcagcctcgctgacatggcaaaacaccacctctgctaaaagcacaaaaattagccaggtgtggtgatgcacacgggtaatcacagctacttgggaggctgaggcatgagaattgcttgaatctgggaggcagaggttgcagtgagccacgatcatgtcactgcactcccgcctgggcaatagagcaagattctgtctcaatcaaaaaaaaaaaaaaaaaaaagagtttaagaaattaaggaaagctgagtgtaatgaaaccttttcaagggtagtagtggtatagctcaaacctggtttgaattccagctttgtcacttactgggtaagtaagtagcagccttaagcccaactggtgtttgctatttgcacgtattttcataaataaaag

SEQ ID NO: 472875 - DNA, 653 bp, Homo sapiens
aaataggctatgatcacacatctaaaggccatgaacatggcaaagagtattttaaagaatctaaaaagtgtactttgaattttaaagtattttaagagattaattttataaaaggaaaaacagtgttatcacgcagaaggaccatatttagtataatcaaaagtttaagaaattggccaggcgtggtggctcacaccagtaatatcagcattttgggaggccgaggcgggtggatcggatcacctgaggtcaggagttcaagatcagcctcgctgacatggcaaaacaccacctctgctaaaagcacaaaaattagccaggtgtggtgatgcacacgggtaatcacagctacttgggaggctgaggcatgagaattgcttgaatctgggaggcagaggttgcagtgagccacgatcatgtcactgcactcccgcctgggcaatagagcaagattctgtctcaatcaaaaaaaaaaaaaaaaaaaagagtttaagaaattaaggaaagctgagtgtaatgaaaccttttcaagggtagtagtggtatagctcaaacctggtttgaattccagctttgtcacttactgrgtaagtaagtagcagccttaagcccaactggtgtttgctatttgcacgtattttcataaataaaag

SEQ ID NO: 472876 - DNA, 428 bp, Homo sapiens
tgctggtatagcgctaactgccccgggtacgcggtgccgttgctccttggcggcagcatttcgggctgggccgcagagtcggtttgtgcgcgatcccaactacagccctgcgacccccaggcagccccatcgggcaccccgaggatgcgccccctcagccaagggaccctcgagccccagagggcgctcaccatgagctgcgccgggtcccggagcgcgcggggacttctcttgcytcctgaagcgcctctggctcggtggccgtggtgcgcccctccagtctccgcgatgggcacaggaagcggctggtgcccgctgacagccagggctgttctcgggagtctgcggcgcgccagatggcagcgacagcggctgtgtctggttcggagcgagagaagagagcaagccgccactgaggggctggggca

SEQ ID NO: 472877 - DNA, 242 bp, Homo sapiens
cacagctccggctgcgacctgctggcccagacacctgcagcatggtgaggtctagtaacagactggactttctcctcccttcctagtctcccccttcaccaaatgcacttgcaccctggaccaacacctgcaagtggcccagcttctcagacttaggctgctcarcctacacagtcccttcccccaacctctttccccttcagtgctttctgccactggagaaggcaagaccatctgtccag

SEQ ID NO: 472878 - DNA, 442 bp, Homo sapiens
gctgcacagctccggctgcgacctgctggcccagacacctgcagcatggtgaggtctagtaacagactggactttctcctcccttcctagtctcccccttcaccaaatgcacttgcaccctggaccaacacctgcaagtggcccagcttctcagacttaggctgctcaacctacacagtcccttcccccaacctctttccccttcagtgctttctgccrctggagaaggcaagaccatctgtccaggtgcctaaacctgaaactgaagagccatcctcaccttcggtctctcctcatcttctaggagctggaccactcctctggccatggacatccctgtccagaattgtgcctcctgcaccctgtttgaaggtggcattctcctggcctccaggctctgccctgaccctctgtcttcccagaggcagtgatctttcctgaa

SEQ ID NO: 472879 - DNA, 442 bp, Homo sapiens
gctgcacagctccggctgcgacctgctggcccagacacctgcagcatggtgaggtctagtaacagactggactttctcctcccttcctagtctcccccttcaccaaatgcacttgcaccctggaccaacacctgcaagtggcccagcttctcagacttaggctgctcaacctacacagtcccttcccccaacctctttccccttcagtgctttctgccactggagaaggcaagaccatctgtccaggtgcctaaacctgaaactgaagagccatcctcaccttcggtctctcctcatcttctaggagctggaycactcctctggccatggacatccctgtccagaattgtgcctcctgcaccctgtttgaaggtggcattctcctggcctccaggctctgccctgaccctctgtcttcccagaggcagtgatctttcctgaa

SEQ ID NO: 472880 - DNA, 623 bp, Homo sapiens
ttacctggcaatacctgagtattagcccccccagtgggatctttgttgtagacaaccagcaactatcagcccagccaataaacaagtaggaaaggggagtgctggagaggccaagaagtgggattttccatgctcctgggctgtgatccagagggcacggctgtgaggctgatctcaatgaacactctgtcttggaagtacagggatcctctgctacctgaaaacgttctgagtattcactttcatggattgcaaagtcatttacccaaaattcactctccaaatgaaaagtgagtatgatgaatcagtattcaagttccacctgggtcctgggagagggcatggacatcatatcccagctgttccgacaggaggacccaatctgagtctcactgcctgcctgcatcgtttgtctgctgccagcctgcacagtaggaagggaaaacatgatttgtatctgttttaggtcaggttcccaagaagtagagcctgagattggaattcttggaaaatggtgtttgcrggagcgctgtcagcagaagctataaggaagttggggggacagaaaacgagaggtaagaagccagtcaaaaaggcaggtccagcttaagtccgcctcagtc

SEQ ID NO: 472881 - DNA, 540 bp, Homo sapiens
tgacatcataatattatgggaatttgtcgtatatgcagtcagtcattgactgaaacatcgttatatggcacatgaatgtattttactmttcaatatctaacatctttaaaaccaaagtgtggcttatattttaaaaccaaagtgtgattagcactttgtgaagcatacattgccaaagatcaatttaagtataaattttcaataggttcaccttccatgccaaaattcttgcaactctcaacccctcgtcactaccactgtcaaagaatatattgttatggagagtcacatgagagcaatacagaaagaacattaaaagaagcctaaactcacacctgcttacttcacttatttaaacattagtctttcttttcagttattcatggatatgtactgagctatgaggaaaagcaccttactctgctaaagcaccataagttgttaatgatttttaaagaaaaatttaacaaaaatattctttgaaattgctaacattttcaagacaatgtaagatacaaccaatagataaaacttctaagt

SEQ ID NO: 472882 - DNA, 540 bp, Homo sapiens
tgacatcataatattatgggaatttgtcgtatatgcagtcagtcattgactgaaacatcgttatatggcacatgaatgtattttactattcaatatctaacatctttaaaaccaaagtgtggcttatattttaaaaccaaagtgtgattagcactttgtgaagcatacattgccaaagatcaatttaagtataaattttcaataggttcaccttccatgccaaaattcttgcaactctcaacccctcrtcactaccactgtcaaagaatatattgttatggagagtcacatgagagcaatacagaaagaacattaaaagaagcctaaactcacacctgcttacttcacttatttaaacattagtctttcttttcagttattcatggatatgtactgagctatgaggaaaagcaccttactctgctaaagcaccataagttgttaatgatttttaaagaaaaatttaacaaaaatattctttgaaattgctaacattttcaagacaatgtaagatacaaccaatagataaaacttctaagt

SEQ ID NO: 472883 - DNA, 614 bp, Homo sapiens
ctgtgaccagattatctttatggtgggctgtgactcttcatccctggacctcagaaaaatctccagcaactgcccgaagccatgtggtgcctgctrtctgactgcctcatgttccagcaaaaggagtggctccatttgccccagactctcaccacaatttttctgctgcaagggtcgctccccaagatggaggggaatacctctaaatcgtccttttatcaaacccaagctgatgagtttccttcctgactactcaacacaggctgtcttgagcctgaccttactcccagccactagggagccaatctgagcccgccatgccaaggagccctgcccaccaacgaatcaatgttttatctctgtcctgaagttgcatcaggatctcatatcccccaccctgttagatgagggggtcctgatgtgctttcccagttcctctaaaattggaaaactcttaaagattgagcccctgcccccctccatcattttattttttggcttagaagatacctctaaattgggggaactccttcatctctcatggctaaaatttgtagcagggatttcactcagaacctctatgggatttgtgcctgatgtgacttccactggac

SEQ ID NO: 472884 - DNA, 614 bp, Homo sapiens
ctgtgaccagattatctttatggtgggctgtgactcttcatccctggacctcagaaaaatctccagcaactgcccgaagccatgtggtgcctgctgtctgactgcctcatgttccagcaaaaggagtggctccwtttgccccagactctcaccacaatttttctgctgcaagggtcgctccccaagatggaggggaatacctctaaatcgtccttttatcaaacccaagctgatgagtttccttcctgactactcaacacaggctgtcttgagcctgaccttactcccagccactagggagccaatctgagcccgccatgccaaggagccctgcccaccaacgaatcaatgttttatctctgtcctgaagttgcatcaggatctcatatcccccaccctgttagatgagggggtcctgatgtgctttcccagttcctctaaaattggaaaactcttaaagattgagcccctgcccccctccatcattttattttttggcttagaagatacctctaaattgggggaactccttcatctctcatggctaaaatttgtagcagggatttcactcagaacctctatgggatttgtgcctgatgtgacttccactggac

SEQ ID NO: 472885 - DNA, 614 bp, Homo sapiens
tccattagcagtttctaccagcaaaataaatctcttttccaccaccaccaaagatttttccacatctttgccaacacttgttctggctgtctttttaaatttcagccactctggtaggtgtggcatggtatctcactgtggttttgattttcatgtccctgatggcaaatggtgctgagcatcgttttatgtgcttattggccgtatgtttatctgccttggcaaaatgttcattcagaccctttgctaactgttttacttgggtcattttttaaataaaattattaacttgtaagagtttaacagatatgtcttatcagaaatgtaatttgcaaatattttctcccattttatgggttgtctttttactttcttatggtgtcctgtgaaggacacacacgtatgctcggtctctctctctctctctctctctctctctctctctctctctctctctcaaaacttttggaccaaagagggaagtataactgtgatttattaagcagccccattgagggctaacagcacatttctgaccactttgtatgctggtrccagccgggggtgccccagcggttgctccctggggtgtctgcttcagggctgctgcaagg

SEQ ID NO: 472886 - DNA, 634 bp, Homo sapiens
atctatctaattaaaaaaaaacctgaagaccaatgagaagtgcttatactttaatactatttgaatgtgaatgtaggtgtgtggaaggtttgggaatataaatgtggtgggggcagtggtaacatcctttgctattttggccttcttggcacttgtttttgtggactgccagcccttcaacagtaaagaagtcatcatttctgctttattagcctcttgttggaataaatttaatcatcctcctctgggaattctatatgatcctatgagaacatatgaccttaccataatacgagaagagtctctagcaatccctatgactctagtactgagaaatgacaatgtgctagcagcccttcctggctcttggtgcctcctcggcctcggcgtccactctggccgcactccaggagcccttcagcccgctgctgtgctgtgggggtccccctctggggctggcagaggcaagagtccgctccctctgctctcaggccacacgggttccaggtgggcgccggcttggtggccrgcccgcgcctgctgggcttgtttgggggacaagctccctctgggctgctggagtgcctgggctaggtgccacaaagtcccgtggccagtgccattgagaggtgaa

SEQ ID NO: 472887 - DNA, 634 bp, Homo sapiens
atctatctaattaaaaaaaaacctgaagaccaatgagaagtgcttatactttaatactatttgaatgtgaatgtaggtgtgtggaaggtttgggaatataaatgtggtgggggcagtggtaacatcctttgctattttggccttcttggcacttgtttttgtggactgccagcccttcaacagtaaagaagtcatcatttctgctttattagcctcttgttggaataaatttaatcatcctcctctgggaattctatatgatcctatgagaacatatgaccttaccataatacgagaagagtctctagcaatccctatgactctagtactgagaaatgacaatgtgctagcagcccttcctggctcttggtgcctcctcggcctcggcgtccactctggccgcactccaggagcccttcagcccgctgctgtgctgtgggggtccccctctggggctggcagaggcaagagtccgctccctctgctctcaggccacacgggttccaggtgggcgccggcttggtggccagcccgcgcctgctgggcttgtttgggggacaagctccctctgggctgctggagtgcctgggctaggtgccacraagtcccgtggccagtgccattgagaggtgaa

SEQ ID NO: 472888 - DNA, 415 bp, Homo sapiens
aaaaccagatttgtgatataggaacaactgttctttactgttgctctaaatatctaagaaccgctgacattttgaagatgaatccaaacagcgtttgtgatctctgcaacaacgggaatgagatgtgaaagcctctgtgatttccactcacagcaaggtcacggtctgcaattagctcggtgtgggggcttcatytgcaatggaaggaaatgctacattgcagttagacattgatggaaataaagatatattttttctgggttcaattcgtgaagctctcgggttctctctatagaccccacatgaaaagcccctagaatgggggagaccagagccctctttcaccagagcaggtaagtgtgggcacaggagcaggcaaggcagggcaggatctgcttgtcaggaaaggtggaac

SEQ ID NO: 472889 - DNA, 616 bp, Homo sapiens
ctttgaggtaaagcattccttccaatgggacctagaattccttgagttgcagaattttactgactagacccaggaggtctcaggagtccagagttgactggagcttggctcagaattccaagggggcccataactccatgaggcccagatttcctggctcaggaaaattgggaggcctgggatactgtggcttagacccaagcygaaagatgaacacagatctttatggcttgaaggtgtatgaaattatgtcactacattagagcagcacctctactcacctatgggaatctgcagttgagctgtgacacatagaagctggccatgtccagattggtggttctgaaatgggcagccatgtgcacataattgtacaatgtgaagctcacttgttgatactccatggccagcatgctgtggaggtaacgttcccaaagggcagctcgagcccactgctcctgggattcctgcgattcttaagctatgggacactcttggatttcaggaacctctggcttcaactgccccagcatccatcggggcaaagccaaggctgaggccatcagggccccagggtaactggagcacgggcacaggaacagtcagtggagtctgc

SEQ ID NO: 472890 - DNA, 586 bp, Homo sapiens
ctaagatttgttgattttagttttatttttctctttgtgaggatgggggtcatgatttccaaactttttacatgttgaattagaaattggaagttacagtaaactatttttaatactaatatgcacaagctttaattatatattttttccattttgtttaacccttcctattgtgttttaaatacttgcagatatcattcatcttgcaatactgaagtccatttctgtcaactttatttttttatgccttgttattcattttcaattgtcagttttcctcctgatgtttttgccttcttgtatggctttcttaaaaattgatgcagtatttataaattgtagagatatactgaggtcctggatacttttgcagtatttatttatgcttcttgtaggcagccagggcaaggcagatcttaatttattcaagattgcaacattctatatatgcatttcagtacatgttasgacatgtctatttccaggtcacttttatttgaaagataccattctttaggtatccaacaaagcctttgatattcaccttgcctgggaaggccctgaattattattattatttttttgg

SEQ ID NO: 472891 - DNA, 538 bp, Homo sapiens
tgcttccaaaacgaacaagacataattcatgttacaaaccaggttctaccagtaactgtcctctttaaccaccttatatttttcagaaaaacttggtgtacttttattttcttccaaggcagaatctccaaaaattttggtattatgtaactctatcactttaagcattttattaaaactagtccttgctggatttaaatgccatgcccttttccttgaaatgcctccttctccccagtcccttaacaccctttcactaatttccgtttttcagattttagcaaattgcttatatcctcaagcaaattgcttgagaaaatgtccacatgacattttctcaaaattgcagttggcctttgaacaacrcgaggtgttggggtggcagtctcccccgctgtttaaaatccatgtataattttgactccccagaacttaaatactaatagcttactgtggacaagaagccttatcgataatataaatagttgattaacaaatattttaatgttacatgcatcgtatactgtatttgtaaaat

SEQ ID NO: 472892 - DNA, 538 bp, Homo sapiens
tgcttccaaaacgaacaagacataattcatgttacaaaccaggttctaccagtaactgtcctctttaaccaccttatatttttcagaaaaacttggtgtacttttattttcttccaaggcagaatctccaaaaattttggtattatgtaactctatcactttaagcattttattaaaactagtccttgctggatttaaatgccatgcccttttccttgaaatgcctccttctccccagtcccttaacaccctttcactaatttccgtttttcagattttagcaaattgcttatatcctcaagcaaattgcttgagaaaatgtccacatgacattttctcaaaattgcagttggcctttgaacaacacgaggtgttggggtgrcagtctcccccgctgtttaaaatccatgtataattttgactccccagaacttaaatactaatagcttactgtggacaagaagccttatcgataatataaatagttgattaacaaatattttaatgttacatgcatcgtatactgtatttgtaaaat

SEQ ID NO: 472893 - DNA, 550 bp, Homo sapiens
gcaatatagtctgatctctgcattttcagtttaacaggatctctgtgatttgctttttgccatagagtcagtaaattttccctcagcagaaagctggtggtcatgggactcatgatgtgagttcctttctctttgagggctgtcgtcttgaaatgcttattatttaatgcatgaaaacactcgcttcatatattttgtccagttatatatttgtttgttgcaggagggagagtcttgttctggtacttcatcctgaaaagaagcagaagtctgagagaatgtatctctgtatatttttcctaattcaatcttacgtttgcatgaatatgtgaatttgttcttttctttgcccaaaataagaataacaaataagttgcagaattatttattccatattaagttgaaactttcttgtcaagataygtgttgatgtttgggagataacatcttgtgaggaatgcaactagattaggagtgacacctgtaagggaaaggtaaatgcgtgttttgggataatatgctaatactataaaaggttaagagaatatat

SEQ ID NO: 472894 - DNA, 623 bp, Homo sapiens
aggcaaaagagtaaaaacgatccccctgacttatgaaagacagctttttaaagatttgcagatatttttaaactgttgtccttctgctaaaaataattacaattctccttaatctactactacattctgaaatatattctgattaccagaacgttaaggtcttttgtatctgctgtatttttctagaaaatagaataaataaccattatgggatggcatattatgcagataaacagttattagaagagttatggatagaaattatatgtagttctgtaattacctttattacatatagaaatcaacataggaatcagcacattccataggaaatatggaacacattctggaaaaaatttctggcagaattattttcaagatgttatttatcaaggaatatatttaactatttaaagataaattaaatattgaacatattttaaaatcagtatctatgtttaaagatgtctatggcaatgtttgccaaagatgctataayagtttctaggactgttgtaacaaattacctcaaactgtgtggcttaaaacaaagaagtatattctctcccaattgttgccatcagcagtacagagtctaattaatggtggagatgcatgtcctg

SEQ ID NO: 472895 - DNA, 570 bp, Homo sapiens
aaaatataagaatgttacaccattatataatggaatcattattcataaaaatcagaatggtatttattcctaattattcctaatgccgaatttcagaagaaaaccaactcatctgccatctcacagagcccaaattaatcataatagtcatcttgattttatttatttatatcctttttttggttagataggagagtttatagacgacaaggaaaataaaaagtaaaaaatattctgcaactcgcttataaaaaaacccaaaatattagaatacaggatttgctgacaccatttctctaaccaaaaatgaatgtagatggtctgacagattttttatgaactgacatgaaaattcttaaaaaggaatcaagaccatatgattttaaacatttatcaaatcacttagtaaaaaacagagttatcatatactagggctatattggaaaatcaaggtgttggactaatctctaagatccatctaattctaccaccctttcataattcagtaattattaaatattgccaatayagagttgctagttgaccaaacactttgtactaaaattttgt

SEQ ID NO: 472896 - DNA, 445 bp, Homo sapiens
catggcacaaggaaggcaacctgcctggctctgcagaacaagtcactgttaggttataagcaccccaagggtaggaattaggtttcattactcttttatcccsatttattcctagcaaagtttcaatgatgaataacatctctggaaaggttgctgtgcaatgaaacccaatgtctgagtcagaatctgatcagcaacctttcatattccaaaggggaggccttctgtgtaaaccagtatctcaatgaattgccaatccaataacagggcatcctgttactttacctacaatccttttcattctctcatccttaatacttcttctttcttaaaaagctatacggtgcactcctataacatggctattctcccaagaaagcaaaagttcctgccaatacaggaactacaagtggttagtgttatacatcatgcaacgagtccggcc

SEQ ID NO: 472897 - DNA, 377 bp, Homo sapiens
ggtgtggtaacctattaaagaaacaagttcaactgggtgcggtggctcatgcctataatcccagcacattgggaggccaaggcgggaggattgcttgaacccaggagttcaagaccagcctgggcaaccatagagagagcctgtttcttaaaaaaawaataataataaaattaagtagctggttttggtagctcacacctgtagtcccagctagttaggaggcaaagccagggggattgcttgagcccaggagtttgaggccgcagtgagctatcatcatgccactgcattccagcctcagcagcagagcaagaccctatctctaaaaagaaataaaaataaaaaataaagaaacaagtgctttttgacacaacaaa

SEQ ID NO: 472898 - DNA, 641 bp, Homo sapiens
gttttctaggatttctcgtgtataaatycactctctttgatgggagaagctagaagcagatgtagtttactttcaaggaattaatgtcatcaaaattcatcatttctgtgagatcaggaagaatatgtttaggttgaactactgctattaaagtgttctgatcataagtcaaagctgctcttaacaggagaaaaataaatatattttagaggcttaaacatatttcaagtccttttttaaaaaatcattagtgaattgttactgttgccttctaaaacttctcttcatgcctgcttttcactacatatttttgaagccataacaactacagataagcagtgataagataagcaaagtgttttaaaccaaagaaacatgggctagtatatacagccagatgtcaatgagggtaccctggtatcctgggtcaagagtcattaatatattgcagttaaaaagtcattttactgaaatttatggaaaaacaaagaaaataaaaaatgttttcttttacattaatttgctgtgctgtaaattttaggtgttgcctgattagttgttctatgggattcttctttgacctttttaggtacagacagtgcaaaggtggtgtgcctagtgagcttggatgtatcaaacag

SEQ ID NO: 472899 - DNA, 583 bp, Homo sapiens
agaatttaacaggacatcgttttaacacttaagaattgtgtgacctaacagatgggaagactataaaagagtaaggcttaattaaccaactttgtaaacagaaccagttcacagttcccttaaaagtgattacgatttgctaaacttagaaagtaaagatttgtaagctgaacttaaccttaagcacaatacatttttgcattctaataagttgattatgaacttaaaaaataaatttctgattaggcttttctgcacaaaaaaaacacctttgaggtgatcacaaaaaaaaaaatgtcataggtcagcagaaacagatgccaaagatttttttttttgagacggagttttgcactgtcgcccaggctggagtgcagtggcatgatctcggctcactccaagctccgcctcccgacttcaygccattctcctgcctcaccctcccgtgtagttgggactacgggcgcccgccaccatgcctggctaatttttttctatttttttttttttagtagagatggggtttcaccgtgttagccaggatggtctcgacctcctgacctcgtgatctgcccgcctcagc

SEQ ID NO: 472900 - DNA, 386 bp, Homo sapiens
gaatccctttcttaaaagcctatgatttccatctttacttaggcttacagatttactttttaccctaaaattatgtaagtattctcaaaattatttatttatatttatttttagagctggagtcttgctctgtcacccaggctgaagtgcagtgtcataatcataactctctgcagcctcaaacytctgggctcaagtgatcctcccacctcagcctccagaatgtaaattattatttaaaattatctcttcatattacttcctcttacatctttttggccagaactggatcacatgggcacccccaaaccagtcatgaccagaaggagtaagatcatcatgtctggttaataccagtcatggttcataccctgtaagttcctgca

SEQ ID NO: 472901 - DNA, 386 bp, Homo sapiens
gaatccctttcttaaaagcctatgatttccatctttacttaggcttacagatttactttttaccctaaaattatgtaagtattctcaaaattatttatttatatttatttttagagctggagtcttgctctgtcacccaggctgaagtgcagtgtcataatcataactctctgcagcctcaaaccyctgggctcaagtgatcctcccacctcagcctccagaatgtaaattattatttaaaattatctcttcatattacttcctcttacatctttttggccagaactggatcacatgggcacccccaaaccagtcatgaccagaaggagtaagatcatcatgtctggttaataccagtcatggttcataccctgtaagttcctgca

SEQ ID NO: 472902 - DNA, 386 bp, Homo sapiens
gaatccctttcttaaaagcctatgatttccatctttacttaggcttacagatttactttttaccctaaaattatgtaagtattctcaaaattatttatttatatttatttttagagctggagtcttgctctgtcacccaggctgaagtgcagtgtcataatcataactctctgcagcctcaaacctctgggctcaagtgatcctcccacctcagcctccasaatgtaaattattatttaaaattatctcttcatattacttcctcttacatctttttggccagaactggatcacatgggcacccccaaaccagtcatgaccagaaggagtaagatcatcatgtctggttaataccagtcatggttcataccctgtaagttcctgca

SEQ ID NO: 472903 - DNA, 463 bp, Homo sapiens
cactgctttagactggcaaaaaaatccatctcatccctttgtcacactgaataaaaaagaactctgcatcattctgttgcctctgtcttcttatctattccctctaattatgtaatatcattccacggtaaagttacactttataaaagcaaaaaaatttgggtcccttttgttttggctgagaacatctttcgttagactaaacaaactgtttagcttcactctgtgcttttgacaggctggctggaatgaatgcttctgttggcttaataaacaaagaataataatccaaaatggcttttattacggggtggatttacactattcatgagattggaatgatctaattgttcaygtctctgcttagtttaagtatttatgtgtataagtgacgctgaagttttcctatttcaaaagaagtttcagttaggacacacatataaacctgctttgtcttcccaaa

SEQ ID NO: 472904 - DNA, 543 bp, Homo sapiens
gcctgcctgggaccagcatgaagacaggagaagctcctcaacacagggatagaattagtgagtaagagtcctcaggggatccatacttcccacagtgacctgtgcaatcctgagaatgtgaaaaaccccatgactcccttgggcctctagactgatacagagagctacccagagtttttgcagaggcaacactcaagtccgtggggacccccmcaggccctggactctggaacagcctggttgaggtgccatggccctgacagaagctgcagtcatggtgctggagatggacagattgctctactccctcttgacagaaaacctgctaaacccctgtggtttaggagagctttgtgttcccccaggaagcacttcgatggtgaattgggtgactccactcatcctgctcctaactgggcaggattcaacttcaccctgctcctaacttgggcagagccccaagcagggggtggggaggacgccctccctctcagaatactgaaaagggtgagatccctgggctctcaggatgttgggggagca

SEQ ID NO: 472905 - DNA, 543 bp, Homo sapiens
gcctgcctgggaccagcatgaagacaggagaagctcctcaacacagggatagaattagtgagtaagagtcctcaggggatccatacttcccacagtgacctgtgcaatcctgagaatgtgaaaaaccccatgactcccttgggcctctagactgatacagagagctacccagagtttttgcagaggcaacactcaagtccgtggggacccccccaggccctggactctggaacagcctggttgaggtgccatggccctgacagaagctgcagtcatggtgctggagatggacagattgctctactccctcttgacagaaaacctgctaaacccctgtggtttaggagagctttgtgttcccccaggaagcacttcgatggtgaattgggtgactycactcatcctgctcctaactgggcaggattcaacttcaccctgctcctaacttgggcagagccccaagcagggggtggggaggacgccctccctctcagaatactgaaaagggtgagatccctgggctctcaggatgttgggggagca

SEQ ID NO: 472906 - DNA, 636 bp, Homo sapiens
tggaagccattatcctaagcaaattagcaccttaacataaaaccaaataycacacattctcacttataaatgaaagctaaacattgaatatacatagatataaagatgggaatagtacactggggaatgattgaccaagggaaatgtgggctgaaaaactacctattggatactatgctcaccacctgggtgatgggaccatccatatccccaacctcaacctcaacaacatgtaatatacccatgaaaccatcctacactgtaccccctccaaatctgaaattaaaaaaaaaagaaaagacaatgtagtgtcccagtgctctacattgtttttggttttgttttgttttgttgcttacttttttttcagacaaatgtgatcaagtcattaattattttttaaaaaaacagaccaggtgcggtggcttatgcctgtaattccagcacttaggaaggcagaggcgggaagatcacttgagcccaggagttcaagacaagcctgggcaacatagcgagaactccatctccacaaaaagaaaaaatatgtagttgtaaattgtctcttacaaacaaaactaccaaaatttagaaataactcaaacaatttcacttacacttaagtaagagctgttaatc

SEQ ID NO: 472907 - DNA, 624 bp, Homo sapiens
ccctaaaaggataaattagctgcccacctaatcaggataaattgtcattctttggccactgttaatgtttctgccactagaggatagcagcggatgggggtggggtggctaaagtgatttctaccatttgtccaagaaaatcactagagctatgacaatgaatgcatctgtagtgttggcagtccctgcacctagagttccagggtcattgcagctctgtgtactcttgtgtggggtacttgttccatgacatctggtagttcaggaatttgtttgctattcacactgacagtgcaattgtgttyttcattctccctccacatccttgttcatttttccttttcttttttctcctccttttcctttgttcatcattgtcaatctaagacctgagttactcccatgcataagaaattggcatgtgcatacttctatgatataacctttgttaatgtggacatttaacatttaacacagtgtgcttgtttgatctgagaattttctatggatgttctttaaagggtggttagaatctatatttggagtgggagggaaagggtcaagtcagtgaaaatgggaactgtctgctgagtggctaccatgtgccaggtagaggactaagca

SEQ ID NO: 472908 - DNA, 569 bp, Homo sapiens
ctactttgtgggaagaaggacattctaatggagagaacagtgttaacagtatttttataaaggagctttgagtgtcacatggaattttggttaagaaacttgaagacacagtgtaaggarcatggctgtgctttggtcaaggacaggctgaggtaaacatccagagtgactcagcaagtttagagtgcaggcgtataactccacctgttatcacagccatgtggccataacatgggaagatttatcatttggctctaagccactattgtctgtaaaaggtataattgccctgctgacactgtataggcacacttgtgcccagagagagagagttaagctgctgaccctgaaggcaatggagagcaggctgtgcagccagctcaagcagccaagacagagagaacagtgcgtgagagctgtggatgggaaagctgctgaataaaactacatttcacctgcttacggccccgagtgttctttcagctatctgtccatccacccactcccctcggacctcagcaggggctggaccctgggcatgacgtttggtgtactcatgaacctgacag

SEQ ID NO: 472909 - DNA, 491 bp, Homo sapiens
ggtgagcctagggaccctccccccaccaccgtggtggaacacattttatatggtgcctgcacccccgctatgttgcgggagtcaagcaagtaatgtcggcagtcatgtacagacttagtgcaagtcattcaggagaaggacgttggtgtacaacctggtcctgcccgagtrttccagttcacagattgcctgctgcagtcaggtggaagtgtaaagccttttctgtttgataagagactggccgagatgcctggcttgggtggcaccagacaaccaaaggccatatgcggacttggcaatccactagtctctgaacccggataaatttccgggcagagctgtgtttattaatggttatgaagaccagtcagtgaaagtggaacctgtgtctgcaccttggcgttcgccacttggctgtctgcttgtccactgtgcacatctctcccatgcctggagacattctgggggtggatgttttgcacagcttgaca

SEQ ID NO: 472910 - DNA, 586 bp, Homo sapiens
agtaaggatgaggtgaattgaattctgtaattgaagttggaatactgtaaagctgtaagacagcatgggaacacatattttttttcagatagtaaacatatattaaggatttattcaacattagatatattatgaggcttcaaaagtaatacactaaatttttaagatttattttctgtattattacagtgagggcaaaacaagaaaaacattttctttatagaatagatggaaaatagcccaagaaacattcagacttttctatcacaccatgaaacacattgaatgaaggyggaagagatggcttaggctgaaaatatggcgtggaaagctggtatcttctttgactttgtggctacgtgtagaagcttttctctagaaattcttatttgccattccgttgctcccttttccatgatgaacaacaagatttttcttccactttagggtctcagtctttgttgcacagtgtcaaacagattggaagcccaggtagggtgcagtgatctttgtgtttatacaagaggcttggtaaatcttcactttcagtctcataagtacaaggttaaggagtatttgctgttgg

SEQ ID NO: 472911 - DNA, 447 bp, Homo sapiens
gtgactgagataattaggggatggtgaggtagacaatgggaggtttttaaaaggcctgtgggactggagcacggagatccagcaaggaagaataacttgtgatgaggccagagaagaagtttgggactttttttttttttttttgaaacagggtttcactgctgtgcagtagcgagatcatagctcactgcagcttagaattcctgggctcatggctgggcaccatggctcacacctgtaatcccagcactttgggaggctgaggcaggtggatcacttgaggtcaggagttcgagaccagcctgatcaacrtggtgaaacctcgtctctactaaaaatacaaaaaaaattagccaggcgtggtggcttgtgcctgtactcccagatactccagaggctgaggtgagagaattgcttcagcccgggaggcagaggttgcagtgagct

SEQ ID NO: 472912 - DNA, 262 bp, Homo sapiens
aaagaaggccgaaaagtgagctgtgatccagaagcctgctggctgactaagcctttcttgtaaataggcagaagtcacagatttactctgatccttcaaatgcataatgaagagaaaaactagatagttagttgccctggatcaggaaartctggcgggaaacctctgcactgcttacttacaaaccaagtgaaaaattacctgcctgattttcttttattaataaataaatatatttatcatattgttgaacggcatccta

SEQ ID NO: 472913 - DNA, 616 bp, Homo sapiens
ctccacatcccatcatggaacaggaagcaggctacagacatttcccttttccacaccatcagacatgcccgcattgctgtgctgtgagtcaccaaggtggcatatgcacaccaccagccctctggacgtgtcatgaactgttccacctccagagaagcacgcagcatctggagaktgaagttcatttcttcaacatctccacatttagggtaccagaacttggagcagattacttcactctgttagtgcagggcttctcaacctcagcattattcatattttaggccagataattccatgttgttgggagcattgtaggatgtccggccacacccctggcctctacccactaaatgccagtggcctccccctaccctacccctgagctctgaccaccaaaaatatttctaggcagtgcctaatatcccctgggggcaaaatctcccctggttgagaattgctgtctcagggcatttggggtgtgtttagcacaaagcagagaaaccacccctcattctagaagtttgtgcttgagccgctggattatgtgatagagattacagctaggttgagaagatacagcatttaaatgccacaaatcccgcagggcttaaaa

SEQ ID NO: 472914 - DNA, 616 bp, Homo sapiens
ctccacatcccatcatggaacaggaagcaggctacagacatttcccttttccacaccatcagacatgcccgcattgctgtgctgtgagtcaccaaggtggcatatgcacaccaccagccctctggacgtgtcatgaactgttccacctccagagaagcacgcagcatctggagattgaagttcatttcttcaacatctccacatttagggtaccagaacttggagcagattacttcactctgttagtgcagggcttctcaacctcagcattattcatattttaggccagataattccatgttgttgggagcattgtaggatgtccggccacasccctggcctctacccactaaatgccagtggcctccccctaccctacccctgagctctgaccaccaaaaatatttctaggcagtgcctaatatcccctgggggcaaaatctcccctggttgagaattgctgtctcagggcatttggggtgtgtttagcacaaagcagagaaaccacccctcattctagaagtttgtgcttgagccgctggattatgtgatagagattacagctaggttgagaagatacagcatttaaatgccacaaatcccgcagggcttaaaa

SEQ ID NO: 472915 - DNA, 613 bp, Homo sapiens
gttcggctctggttccctcctcagtgcactggtgggactggggccgggcaacatgcttttcgtrtgttgactacagtccccaggcagaagtggggagattcaggacagattgccatctctcggctgtgattttcctggtcctccgtgttcatttactggaaagttttctcatacaaaatgactcccaggagctctgtccagaaccaaaaaataaataaaacaaaaacgcaaccaaaaaccactgccttctcaggaggccaaaataggaagtgaggtccagtgtcattgttgtctctgccagcacaggccagacaggagggccatcactggtcctggtgccagccagagccctgtcgacgctgcctcccatgggccctgaatctgaggcacctggaagggttattagcaggattggaactcatccctctgctgggaccagatcataattacagtaattttctaacagagctcggcagtaggactgtttaatcagcatctgactcccttgtgctcccagccctcattactcaaggagaggagtgggatgcctcttaaagagacagtgcccgcctttcagcgttttgaacagatgtgccctaattggtagaatata

SEQ ID NO: 472916 - DNA, 639 bp, Homo sapiens
gcagatgaaagggttcggctctggttccctcctcagtgcactggtgggactggggccgggcaacatgcttttcgtatgttgactacagtccccaggcagaagtggggagattcaggacagattgccatctctcggctgtgattttcctggtcctccgtgttcatttactggaaagttttctcatacaaaatgactcccaggagctctgtccagaaccaaaaaataaataaaacaaaaacgcaaccaaaaaccactgccttctcaggaggccaaaataggaagtgaggtccagtgtcattgttgtctctgccagcacaggccagacaggagggccatcactggtcctggtgcyagccagagccctgtcgacgctgcctcccatgggccctgaatctgaggcacctggaagggttattagcaggattggaactcatccctctgctgggaccagatcataattacagtaattttctaacagagctcggcagtaggactgtttaatcagcatctgactcccttgtgctcccagccctcattactcaaggagaggagtgggatgcctcttaaagagacagtgcccgcctttcagcgttttgaacagatgtgccctaattggtagaatatatctaagtctcacag

SEQ ID NO: 472917 - DNA, 591 bp, Homo sapiens
aacttgactcaaaactaaattctaaacaaaatatttttatcctacaaaacagctcaatgagccactccccacagctaatcctccatctttcatagaggtcatctggccacagtggctagacctgggcacacgcagggacagagcaaaacagaagaggggcctatggcactatctggatggagaggaaaactcatgtgcgctatttttcggatgaccctaggcttgtattattagaaaagtgctttccttcctaggacttctccttccaagrcctatactcagttaagagagagactgaaaagagatggtgcctggccttagattaactgaggtgctgttgtatgcatgctgctaatggatcattaaaaaagctgggagtcagaaaaatcacatccatgtctttgaatggctcctgctgtcccagcagcctagccggctggcagaactagctgctgagcaccaactccaggaagaaaaggagcaaacagaagaaggccaacccagcttgctgtttttttggctgagtagggaattgacacagaccacctccagctcctgtctggaagtttcgagatcagagagcttcaggca

SEQ ID NO: 472918 - DNA, 621 bp, Homo sapiens
gtgaaataaaaataataatagaaatcagctccaaaggttgctgtatgtaaagcacttagcaaatgcttaatactctgcaagcactttgcaaatgataatcattactattgtgacctttcttgagccaaatagccaccgtcacctgcatcctatacttaggagtctgcagaactattttagcatgctttactcaacatgggtttgtctctatgggaataaacattttaatttctccatttactttgtttcaaagaataacttccagactagttacaaatgtttgcttatatggtaagattaaaagcgtaagaatggcggggaatggtggctcatgcctgtaaccccagcactttgagaggatgaggtgggtggatcccttgagccaaggagtttgagaccagccttggcaacatggcaaaaccaagtttctacaaaaaatacaacaaaattagctaggtgtgatggtgcacgcctatagtctcagctactcgggaggctgaggctgaaagatcgcctgagcccaggaggtcaaggctgtggtgggttgagattgcactgctgcaytgctgcactccagcctgggtgacagagtgggaccctgcctcaaaagataaataaatt

SEQ ID NO: 472919 - DNA, 511 bp, Homo sapiens
tatttcacatactatcaaactcttcctcattgtcatcagtctactgcattgaatcaacataacaaagctaaatgactcctgagggctgaatcagaaagaagaaaagaaagagatacaaaactttggccagcccagtggctcacacctgtaatccyggcactttagaaggccaaggcgggcggatcacgaggtcaggagatcgagaccatcctggctgacacagtgaaactccatctctaccgaaaatacaaaaaattagccggacgtggtggcaggcaccggtagtcccagctacttaggaggctgaagcaggagaagcttctaaataactcataaacactaattactgttgtgacactttaattttatataatatttataagtatacagaataacatttcagtgctattttggcactcaagggtattaatgtattagaaacacagaaaaaatatttgtcttcattgataaagtgtaataaccagcttttacaaaacaggtaattttttat

SEQ ID NO: 472920 - DNA, 511 bp, Homo sapiens
tatttcacatactatcaaactcttcctcattgtcatcagtctactgcattgaatcaacataacaaagctaaatgactcctgagggctgaatcagaaagaagaaaagaaagagatacaaaactttggccagcccagtggctcacacctgtaatcccggcactttagaaggccaaggcgggcggatcacgaggtcaggagatcgagaccatcctggctgacacagtgaaactccatctctacygaaaatacaaaaaattagccggacgtggtggcaggcaccggtagtcccagctacttaggaggctgaagcaggagaagcttctaaataactcataaacactaattactgttgtgacactttaattttatataatatttataagtatacagaataacatttcagtgctattttggcactcaagggtattaatgtattagaaacacagaaaaaatatttgtcttcattgataaagtgtaataaccagcttttacaaaacaggtaattttttat

SEQ ID NO: 472921 - DNA, 511 bp, Homo sapiens
tatttcacatactatcaaactcttcctcattgtcatcagtctactgcattgaatcaacataacaaagctaaatgactcctgagggctgaatcagaaagaagaaaagaaagagatacaaaactttggccagcccagtggctcacacctgtaatcccggcactttagaaggccaaggcgggcggatcacgaggtcaggagatcgagaccatcctggctgacacagtgaaactccatctctaccgaaaatacaaaaaattagccggacgtggtggcaggcacckgtagtcccagctacttaggaggctgaagcaggagaagcttctaaataactcataaacactaattactgttgtgacactttaattttatataatatttataagtatacagaataacatttcagtgctattttggcactcaagggtattaatgtattagaaacacagaaaaaatatttgtcttcattgataaagtgtaataaccagcttttacaaaacaggtaattttttat

SEQ ID NO: 472922 - DNA, 581 bp, Homo sapiens
tatctaataataaaagctaacatttaattaagcataatcctcattcaacagatgaggaatctaaaacccaaggagtcattatcactgttccacttatctctgtatccctacaaaaatactcactcttgatctgtaacaatgcctccttaaactccctgaatggcagcttcaggtaaaaacttcccagaaagtttgaaataacaaggataaaaggaaaattcttggagccacataaaaaagaaaacagatcattacaaaaaaagaagaatcgggcatcagttctcattaccaatactgaattaaaaagaaaccccccccaaaaatcattattttcctaggtctataagaaattatttaaaaccaaaattttaatgtctgttaagctaacattcaartccatggataacaaatgtaaatagtttaaattctctaataaaagacagcaactttcaaaatatgcaaaatatactacttaacacatacacatattttacatgtaactatactacagacttcatttatgtatgtgtgtgtgtacacatatataatataaaatgaatgaaatactttggatatttgtc

SEQ ID NO: 472923 - DNA, 513 bp, Homo sapiens
gttttattatggatagagttctgtaatgggtgggagggaatatttgagggagggctgggtcttaaggaaaggaatggggaatcaacattattatgaagtgtctctatttgcctctactttgtattgttcagaaatggccaatgcaatataaaagtgttacatggttttaatgtattaaactttaatcagttttttagaaaaaaataaaattaaaaattaaaaaactgtttatatttatgattataacataattttaatgaaaaattacatcaataaatatagtattccacaaatgaccccagaattgcagttgcttcagcatgtgaaaatatttaagaaactctctcagggtcacgacactgaaatgaartgggtttcattcattaagcaatgtgctgagtgcccactctgtgccatgtggtggagaagagaacccagttggaggcaatgacgcactccccctcccacacctgtcctgcggaggtggctgcccccgggacactgagccctgca

SEQ ID NO: 472924 - DNA, 563 bp, Homo sapiens
aaagtttactcaaaaggtgagtaaaaatcttttcctacatgaaaatctygttcaaaagagaaaaccagattttaccattgcatcagtgtattattaatactaaaactaattttaataaaaccttataaacaaatcaacccaacccctgtcagtttttgaatacataagattttcataaaccttttataacctcttaaaagttttttcccaaactttctatatttatttagttttatctatatcatttccccttcaatttgaaacatttacataacttctaaactagataaaattattttttctcaataaacaccacattctcatgcctttctttgaatcttccttaccaaaaacacacccaattttccttgtacactttgcatacaaaaggatttctcttttatatagtagttttaattacatacattaattataatgttaatgttggtaacccttatttttaggatgttgctaattttaattgttatgtaccagacgcagatcctgggaaagagacagggctgtgaattcctggagggtctgacccctccagcatggccagt

SEQ ID NO: 472925 - DNA, 545 bp, Homo sapiens
ccctggttaaggcatttaatatgggcatgtcttcattgcagattatactacagtcaactgcagtgcctatattgattaaatcctgggctaggatatttcctttgaatggttgtgtgactttgggcctgccactttacctatttggccttcaattcctaagatctgaaataagaaactatgaakaattgattttaaggcctcacgtccatctctgacattctgtctctaacctttggtcaatgtcttatgcccaagtaatgttctctaacataaagtacagtatcttccttgcatcaagagtcaaagaacaaaataaagactaggggttttatttcaaatcctgagtactcattgcttcttggagcatatttcctaattagtagaatgctgttaatgatatgtaatccatatgcatattgagggtgccaaatgaagtgacagtgtaatgtgcccagcacaacctcttgttcctttgtttaattattagttatcatcaacgtcgtcatcatcaccattgctttattgtaccaatcaacttaataatt

SEQ ID NO: 472926 - DNA, 569 bp, Homo sapiens
ctgctccctcctgggggtgagagtgagtgggagaaggtggtggcagagaaaggagaggcattgctgactccagcccggagctcarggtcctgttgattactttctatttctctgtcccagggcgtctgacacagagaaagtgcataagatgcaggaatgaatcactgagtgcctgggctttcttatcagaacctgtacaattggcacaagtacagaactagtttctccttggacatgttgcctactatgtacacacatgtcaaatattttgttcaaaatgttttttcttttccatgctgtcatttagtattgaaaattaacatctgtgtcatattgtaggtgacatgtaacatttttgttttgcatctatattttctacattatatgtgattattttgcaataaaaatgtgattgacatattcaccaaaattatcctgacatcaactagcaaacatgcctgctgatatgtggccccaatctgtgtcatgttctccgtagccagtatctacagcaaggttttcatagagattttctaagttgcttttttataggctgctattttttctga

SEQ ID NO: 472927 - DNA, 616 bp, Homo sapiens
gaatagccacactgcagcctgggcaacatagcaagagagtctctttaaaaaaatccagaacagagaacatattatcttgccaatttaattttytttttcttagagacagggtctcactctgttgtccagactggagttctgtggcattaatgtggctcactgcaacctcgaactcctggcttcaagcaatcctcctgtctcagcttcccaagtagctaagagtacaggtgtgtgccccatgcccagataattaaaaaaaaaaaaaacattttgtagagatagggttttgctatgttgcccaggtgggtcttgaactcttggccttaagcagtcatcccaccttgatcttccaagtcattgggattgcaggcatgagccactgtgcccagcctaatctttgtgcaaagatgttagggggcagagggctggcaatctcctggggatgacatgcagaaagtcaaacaccactgtgatggttaatactgagtgtcaacttgattggattgaaggatacaaagtattgatcctgagtgtgtctgtgagggtgttgccaaaagaaattaacatttgagtcagtgggcgggggaaggcagatccacccttaatctggtgggca

SEQ ID NO: 472928 - DNA, 271 bp, Homo sapiens
gccatcagctttatgacagttcctggccctcacccaacatatttacctttctctcctcagttyaatgtgtgctgtgttggagaacatcttacctaggaagtcctatttgaacataattgtgcagcagcaaatgtgaacttgaagtaaaatcttgtattacgtgagccctgaaatgcaaatctagacttatttattccaaattctcaagccaaagtgattagagaagcacacaccttgcaggttagatcccaggggaccctactgaaaaaag

SEQ ID NO: 472929 - DNA, 616 bp, Homo sapiens
gaatagccacactgcagcctgggcaacatagcaagagagtctctttaaaaaaatccagaacagagaacatattatcttgccaatttaattttttttttcttagagacagggtctcactctgttgtccagactggagttctgtggcattaatgtggctcactgcaacctcgaactcctggcttcaagcaatcctcctgtctcagcttcccaagtagctaagagtacaggtgtgtgccccatgcccagataattaaaaaaaaaaaaaacattttgtagagatagggttttgctatgttgcccaggtgggtcttgaactcttggccttaagcagtcatcccaccttgatcttccaagtcattgggattgcaggcatgagccactgtrcccagcctaatctttgtgcaaagatgttagggggcagagggctggcaatctcctggggatgacatgcagaaagtcaaacaccactgtgatggttaatactgagtgtcaacttgattggattgaaggatacaaagtattgatcctgagtgtgtctgtgagggtgttgccaaaagaaattaacatttgagtcagtgggcgggggaaggcagatccacccttaatctggtgggca

SEQ ID NO: 472930 - DNA, 495 bp, Homo sapiens
cttcacggtgggggcggagatcatctaggggtgaatccaggaggtagagttgaggattcagaaacatccaggtcaataaaaggggccactatttgagcccacagttgacatacaacatggaggaaggattaacgatgccatgaagtacactctaagtatctaaatattgcatcttttgaagcaaatttaccctattctcctgagcctttgcaccacaccagacctaatgggtggtaagtccagacagcacccatgggaagcagacaaaaagccaccctcgtaaggaatctgaaatcttattagagagacaagacttatgcaaatgaaagacaatgagtaagggtcccaaatgaatgttttggacaagtgtatttcatacaccccattrtagagcatcaaaacatgaaatagagtagaatagaaactatcaaaattagtcacacaaaatatgagtgtatgtaagctctgggaagcagtataaaactgagggtcatg

SEQ ID NO: 472931 - DNA, 572 bp, Homo sapiens
ggggtcctggtgcagacagcaagtagcacctctgcacctctttgtacagagcttcacagtggtccttccaagaaaacatatctggtgtgtcaataatgacratctctctatttccccagcttccctgacttttgctgcaagtcttagtcaaggtctgggaacccagcttcgattcaaatgcttgcttcctgaggatgctgttccctgcagcacttttgccagttcctgttttgcccaccaggatgattctcagctcagatctgctggcacattggccctttgcatgtggtcctgtgaggagcaagtttactgtgttatcgctacactgatcacggcagtggaatatttttttttcctttcatttctttttcttttttttttgagacggagtctcgctctgtcgcccaggctggagtgcaatggcgtgatctcgggtcactgcaagctccacctcccgggttcacgccattctcctgcctcagcctcccagtagctgggactacagatgcccgccaccgcatcccgctaattttttttttttttggtagttttagtagagacagggtttcacc

SEQ ID NO: 472932 - DNA, 653 bp, Homo sapiens
taaatatttaacattaaaacatatgcattttaaacattatttgcaagttatcttcctatcttacagatagcttatttacagtggagaaaaattgttttcctgtttcagaaagacacttggaaaaacatgttatttaaccttatatattaatagggaaaatcttgattctcccagtagttaacttcaattaattatattttaaatatcagcctatttaatttcagtgcaacaaaatttccagctaaaatggtttacttgtaagtatttaaagcaacaaaaatattttggcagctttatatgtatctcctcattgaccagccacctgactgacagctgtcaactgtccatgtgccaaatgtaacccagtaaagataaaaattacatattactcatccctgttgataatacctggtgccagtaggttttcaaataggaataactagactatagataaaaaacaagtaagtggggaatcatttctactrcctaccattcctcctttgtcattaactcatttccctttctttttcttattgatcccttttcccttgctgtccatatctacagagttattttccttaaaggaactttcagaatatgttacaagtctgtgtccatgaaaatactgggcagccaggtattgatgaccacac

SEQ ID NO: 472933 - DNA, 653 bp, Homo sapiens
taaatatttaacattaaaacatatgcattttaaacattatttgcaagttatcttcctatcttacagatagcttatttacagtggagaaaaattgttttcctgtttcagaaagacacttggaaaaacatgttatttaaccttatatattaatagggaaaatcttgattctcccagtagttaacttcaattaattatattttaaatatcagcctatttaatttcagtgcaacaaaatttccagctaaaatggtttacttgtaagtatttaaagcaacaaaaatattttggcagctttatatgtatctcctcattgaccagccacctgactgacagctgtcaactgtccatgtgccaaatgtaacccagtaaagataaaaattacatattactcatccctgttgataatacctggtgccagtaggttttcaaataggaataactagactatagataaaaaacaagtaagtggggaatcatttctactacctaccattcctcctttgtcattaactcatttccctttctttttcttattgatcccttttcccttgctgtccatatctayagagttattttccttaaaggaactttcagaatatgttacaagtctgtgtccatgaaaatactgggcagccaggtattgatgaccacac

SEQ ID NO: 472934 - DNA, 567 bp, Homo sapiens
agagttcaggagagagcagatgcacagacaacaatctcttgaaatctgcagagagtctcagagatctggatatgtgcatgaggaagctacccaaggctgaggaaagaagcatcggaaataattatacggggaacagtacctggcaccttcctagggctggaaataggccttttctcaccagtcasaatggaaaatctcttaattcatatgcaattaggtagaacctcagtagtgagaaatgaggtagactatgcactgctctggtctctcctagctaacattttaatcccaaaaaattgaaagcaaaaagagccaagtgaatctatctatatctagctggtggcataatcacaccaaaagaaacaattttacatgacttaaaacctcagtaatacatacatctttaaagagaagggggctgtacacagggtgtacacaggatgtgtacatcactactgatggtagtagtcttggtattattattctgagcctgttataagtgtatttgtagcataagcaaataagtacgctactatcattaagaattaagattgtaggatggtcagc

SEQ ID NO: 472935 - DNA, 641 bp, Homo sapiens
tgaaataagagaccatgaggtgcagcaccaggaagcatctgtgataattttgtaacaacatcactggaactgcatacatctttatgctacagtaatatttagaccacctgtggtattaagtgtaaggttttacataggtgtgggaataatcattattttccaacatacctaagtgggataccagcttgatgaccttgagcaagaaagcctatggataattctagattttggaattcattttgacccaattactctggcagcttttatatgaaatggaaggtcagtaacacttaggatccttggcaaatctgttatggggaatccttcactgactgtaacacagaaagaagttgtgtccactgtctcactttaaaaggraccactgagttagcacaagccatgaaaatcaagatggtgccagaagtattgaatttccagctcaaaaccaacgcagcaataaccagaggtgaagtccagctttgagatgggcacttgggttttcattcccttggcaagttgcaaaatttatgaggatggattcacaagcatttgtaacggcccctggaggattccagaaatgtttgggaagagtcaccatgagaaaagtctatgttctctttcagtgcagggcttggagcatc

SEQ ID NO: 472936 - DNA, 561 bp, Homo sapiens
ctgctagagagcatttagatatcatcgagatcccaattagcttgtaatgattccaatgccatgaaaactttaagatgtccacttgcaagtgattagacatgcactggtattgtttttgttatttataaatcaccagagatacataggacaatttataaaacattaaaaaagaccaggaccctgtctcactgggtttatgggcatgcaaaaaaataaaaaataaaaaaaaaaaaggtggacaggctgggcatggtggctcacgcctgtaatcccagcactttgggaggctgaggcgggtgggtcatgagatgaggagatcaagaccatcctggctaacacgrtgaaaccccgtctctactaaaaatacaaaaaaaattagccaggtgtggtggcaggcacctgtagtcccagctactcgggaggcgtgaacccaggaggcagagtttgaagtgagcagagatcgtgccactgcactccagcctgggcaacagagcgagactctgtctcaaaacaaaaaaggtggacaacgtatgaattatataagaaatcactggtggtcat

SEQ ID NO: 472937 - DNA, 655 bp, Homo sapiens
tggtctgcatgtatcgtcgaccatgtaactctccttgtcaaattaaaaattgaaaaggccctttgaacaacaagaacagcttttctgtagcttcggtatctgccatcaggaaacaaaattaaccatctgaaggccattcaataaggaatcaccttctgttgcattttgtcaggttgcaatggacaagatatttcagcatcagccggtgtctaaaacccacatggcccagtgctctcttcaaagggatactacagtggctatgtactacacctgaaagctaaatgtataatttattaaaattatcttgactcctgattcttttggtttatgtgttttcaatctatatctttaaaaaaatatgattcaaaaactctactcaataaatatcaaccaagtgtctgctgttttccagtgtctaagataggtattaaaaggatggagcaaagaaaatggcatttaaaataaataaaacatggtatctgcyttaaagaagctaagagtttaaaaattgccttagctacaaagtagttttgagccctaagagttgaaaatgagaacctagctaaacttttttttaaaggattgaaataatttttcctgtagatggagaaagctcagcccattgggaggtatgttgagggggtgtgacggaaga

SEQ ID NO: 472938 - DNA, 353 bp, Homo sapiens
ttcctggacaataaatcctaatcttaacatgcaatgctgcagaatgtttcacctttcttatgctgtaaataaaatatgccaaatgtgataataaatccatacatttaagcactatctatgtagtgtaggaaataaagtcatagtatgtacgcctgatgttaatagcagctctaagcctgaggatattgatggcagtatttgtgcatttgycatccaaatttttagcactctacaatgcttatgaaatttcatggcttttatctgcctgggaaggctggctctgcaaagagcatatgtaggttaagcataatcagtttttggtggcttgaattgaaagagatgtttcctgaaca

SEQ ID NO: 472939 - DNA, 593 bp, Homo sapiens
gttaaagtaggtcacaggtatagcccagattcagaaggagaaatagactccacatcttaaagggaggaatggtgaagtcacattgcagaatatgagataggagggattattgggctcatctctatgcctcctaaaacaatgggccctggtgactgatgaaagagatggcagaggctgggtgcagtggctcacacctgtaatcccagcactttgggargctgaggcaggtggatcatgaggtcaggagattgagaacatcctggccaacatggtgaaactctgtctctactaaaagtacaaaaattagccaggtgcggtggcatgagtctgtagtcccagctactcaggaggctgaggcaggagaatcacttgaacccaggaggtggaggatgcagtgagccgagatcgtgccactgcactccagcctgggtgacagagtgagactccgtctcaaaaaaaaaaaaagagagagagagagatggtagtccacagtcacactctgccatcattccagtcacactccagaaatgacttaacctctgtattctgttgaaatgcacctgcagagtgtgcaggcagttgcagggaagaca

SEQ ID NO: 472940 - DNA, 593 bp, Homo sapiens
gttaaagtaggtcacaggtatagcccagattcagaaggagaaatagactccacatcttaaagggaggaatggtgaagtcacattgcagaatatgagataggagggattattgggctcatctctatgcctcctaaaacaatgggccctggtgactgatgaaagagatggcagaggctgggtgcagtggctcacacctgtaatcccagcactttgggaagctgaggcaggtggatcatgaggtcaggagattgagaacatcctggccaacatggtgaaactctgyctctactaaaagtacaaaaattagccaggtgcggtggcatgagtctgtagtcccagctactcaggaggctgaggcaggagaatcacttgaacccaggaggtggaggatgcagtgagccgagatcgtgccactgcactccagcctgggtgacagagtgagactccgtctcaaaaaaaaaaaaagagagagagagagatggtagtccacagtcacactctgccatcattccagtcacactccagaaatgacttaacctctgtattctgttgaaatgcacctgcagagtgtgcaggcagttgcagggaagaca

SEQ ID NO: 472941 - DNA, 267 bp, Homo sapiens
cctttctgcgggtcccattttaccagacctctttcagcttatgacaagctgctgttctcccctggtggtcctcagacttcacatcactctcccttcactttgcccactcctcagatcatggtttcaggctgtatttcacaatagaatcattggggagtttttataacttgcctatacctgggccccactttagaaattctgattsatctaggggaaaatccaggccagtcacacttcttataaatcacccagtcggtcctaatgttt

SEQ ID NO: 472942 - DNA, 624 bp, Homo sapiens
gctggcttttgatgtggcacacgctggctaaatttggaacgaggttggcagcaaaaagagtaatgatggtcatggattttatcacgctgaacagaataatcctgaaggcaggatgttctgcaggaccacatgccttgactcgtcaaagaagtcagtgtcatgaaaaacagtgaggcagtggtattgtactggtttgaagaaggctcaggagggcccacagaatcattagaaatgtaagyatataaaggtcatgcagaaaggcacaaggggatcagcccaccataaaaaaaaaaaatcaccagttcatctaaaaaaaagcaaaacttatcaaggttacctaggttacatagtgtaaatacaactttccatcatgactaacatacaggccaggtgtcgtgttcatgggtgtaatcacagtgctttgggagtctgaggcagggggattgcttggggccaggagttcaagaccagcatgggcaacatagcaatgccctatctctacaaaaaaaaaaaaccaaaaacaaacaaacaacagactgacaaaggtcataaaatatattgcaatattagcactgtaaaatttaagaataaacttgcttttgctagaaagtttaggcttatggt

SEQ ID NO: 472943 - DNA, 624 bp, Homo sapiens
gctggcttttgatgtggcacacgctggctaaatttggaacgaggttggcagcaaaaagagtaatgatggtcatggattttatcacgctgaacagaataatcctgaaggcaggatgttctgcaggaccacatgccttgactcgtcaaagaagtcagtgtcatgaaaaacagtgaggcagtggtattgtactggtttgaagaaggctcaggagggcccacagaatcattagaaatgtaagtatataaaggtcatgcagaaaggcacaaggggatcagcccaccataaaaaaaaaaaatcaccagttcatctaaaaaaaagcaaaacttatcaaggttacctaggttacatagtgtaaatacaactttccatcatgactaacatacaggccaggtgtcgtgttcatgggtgtaatcacagtgctttgggagtctgaggcagggggattgcttggggccagragttcaagaccagcatgggcaacatagcaatgccctatctctacaaaaaaaaaaaaccaaaaacaaacaaacaacagactgacaaaggtcataaaatatattgcaatattagcactgtaaaatttaagaataaacttgcttttgctagaaagtttaggcttatggt

SEQ ID NO: 472944 - DNA, 379 bp, Homo sapiens
atttgactaaagtccaaatactagactctttttgccttatcttgcrtatttctgagcccaaataccatcatcaatgatatgtccacaaatatgaatatagagaatcaatatttcaattccaaattaaccaagacattgttttttccaataaaagttttgactaaagtatttctttctctccaatatgttgatctccaagtttttgccagaaatcaacttattttctgtctattcacaaaatggaaaaaaggtgatcctaccaggggtatgacaggatttttagaatatgacagaaaaaaatctaaataaatgtgtcaccttctattaaaaaataatactgttttaaggataaccaataatgtggtgaaagatggcaaaa

SEQ ID NO: 472945 - DNA, 379 bp, Homo sapiens
atttgactaaagtccaaatactagactctttttgccttatcttgcgtatttctgagcccaaataccatcatcaatgatatgtccacaaatatgaatatagagaatcaatatttcaattccaaattaaccaagacattgttttttccaataaaagttttgactaaagtatttctttctctccaatatgttgatctccaagtttttgccagaaatcaayttattttctgtctattcacaaaatggaaaaaaggtgatcctaccaggggtatgacaggatttttagaatatgacagaaaaaaatctaaataaatgtgtcaccttctattaaaaaataatactgttttaaggataaccaataatgtggtgaaagatggcaaaa

SEQ ID NO: 472946 - DNA, 379 bp, Homo sapiens
atttgactaaagtccaaatactagactctttttgccttatcttgcgtatttctgagcccaaataccatcatcaatgatatgtccacaaatatgaatatagagaatcaatatttcaattccaaattaaccaagacattgttttttccaataaaagttttgactaaagtatttctttctctccaatatgttgatctccaagtttttgccagaaatcaacttattttctgtctattcacaaaatggaaaaaaggtgatcctaccaggkgtatgacaggatttttagaatatgacagaaaaaaatctaaataaatgtgtcaccttctattaaaaaataatactgttttaaggataaccaataatgtggtgaaagatggcaaaa

SEQ ID NO: 472947 - DNA, 669 bp, Homo sapiens
cattttctttcttctgccaaaattctgcaattctaaatccattcatgtaacagcaaatgtgtttgagtaatatcacatttaaaaggcccctactattaattatattaaagcaaaatatgttttacgtaatgaataattaataaccacttcatcatttatattttgagtaaatgtagagtttctcatacaggattttcttagagtagagtaaactctatccagacctagtccatatgataaaatgactctattgatgcttaaattcatgtatgtgatcatattaaattgcatattttgaagaataacttgtgatatacaatttctaaactgtctttattcacacaaagttccatgaaaatcagaaaatgaaagtacctaatctcacttcacagctggagccatttaatgacraatactcaaccagaaaaaaaaaaaaagtgatagggagacagtaggcaagagaaacagaatttaaaactgtttggtaaaatgtagattaaaaacttcaaaaagataaaaaatattggtggctttagaatattttgaacaagttagttaatcttgcaattcttcagtttcctcagctgtaaaatgtggataacaaccagatctgcctcatgaagaccctgtgagaattaaacaagatgatgtgtgcagagtacagaagtc

SEQ ID NO: 472948 - DNA, 521 bp, Homo sapiens
ccttgggaggtgcagacctcagtgatcagccctaaatgctgatgccccagggcagatgccatcagtggacttcctgggttgtgacacctgtttcttcgaatcagagaaaccctggctccggagagaaattgggaacggggggtcttgtcccttaatgcttccctccttcacctccccaaagtggcccaggatggagggcacgaaccacccaaaaggtgtctccaggacccatgagcaccacctctctgtcccttcttggagccctcaacagaggctcctcctctcctctagcccccaaccccagcaaccctgtgacagcgacgaggtgtcgctgccttcatgtcacagaaatgcggtgtgcccagcccaagattgcttcctggggctgcgccagacttgawttttttttttttttttttttttgagatggagtcttgctttgttacccaggcaggagtgcagtggctcgctctcggctcactgcaacctccacctcccgggttcaagcgattctcctgcct

SEQ ID NO: 472949 - DNA, 364 bp, Homo sapiens
aatctcttgagcctgggaggcggaggttgcagtgagccgagatcacgccattgactccagcctggacaacratagtgaaacttctgtctcacaacaaaagaaataaacacatgatgatctttttttgtaatctttcatttttgaagggagaccctggcttacagctctataatggagttttgaaggatttcgtgaattctttgtcattcagttgagagttttagtaaaaacaccttctttcccatggataagggcttctctttgcttctctgcctagctgcaggctaggctgacagccatccttggggatcctgtgggaatggtgtcccccttattttcaggacatatccaatgatgatgatga

SEQ ID NO: 472950 - DNA, 364 bp, Homo sapiens
aatctcttgagcctgggaggcggaggttgcagtgagccgagatcacgccattgactccagcctggacaacaatagtgaaacttctgtctcacaacaaaagaaataaacacatgatgatctttttttgtaatctttcatttttgaagggagaccctggcttacagctctataatggrgttttgaaggatttcgtgaattctttgtcattcagttgagagttttagtaaaaacaccttctttcccatggataagggcttctctttgcttctctgcctagctgcaggctaggctgacagccatccttggggatcctgtgggaatggtgtcccccttattttcaggacatatccaatgatgatgatga

SEQ ID NO: 472951 - DNA, 571 bp, Homo sapiens
gtatatttaaattctgtttcactgttggtgggggacttttgactatacaaggatatttagggcttaaaatagtcaataaggttgtaatgcaaaagtcctttcatagagataaagatagagtgttatgcaaagaaagagaagacagacatccactgctgatggaaagaccaatatggagcagtatttggtggatgaccttaactcacacacactctctctctctccctctctccagggacttctgcatattatctgaaaaacctgcattcatgtatttgtccagtatatcttcttgtctttattatgtccttctcaaargagatgaaagaactcatgacattgtatatagtgttcacatatgtcacctggatgagagtaatactcaaactattctagtgagaatatcatgggctctggtagaaatgagatggcgttcctcttcatccaattgcagaactctaatatccatatcgcatgtctgtctaccatgatactgaatccttttgcagtcaagttgtaacacaaaataaaggcagtatttttctttagggctatcatccaatattcttat

SEQ ID NO: 472952 - DNA, 564 bp, Homo sapiens
aagagtgatcgcctataggcatagtatgggaagtgttagyatctgttagtatcatttcccatatattcatgctccaagattatgtctcgctgtggagagggtgtatttcaacaaaccagttgccgatgggaacatgtcatttgacacaggtgactaagaaccaagtaaacgttacaaagcataaacatgcatcagccagtgaatttcacaccaggttgattagaagaatcaggctattctgaagactagagaagtctgggatcactggaatatgcacatggcttattgtccaagtcaaggtaatactattatcaccacatttcaggtagacccagtttaagtaggaaacccctatagatttcccaaagaaggatcagcaattcaaagaatcagcagggcatcaagaagacttctgaaatttggtgattgaactgaagttcccaatattgagccttttgcgttctctgaaaactttggttctgatatatcctctagttcttaagattttaaatcaactttacttggacatgtcaccataccagctctagctccacatccaaaccc

SEQ ID NO: 472953 - DNA, 528 bp, Homo sapiens
agaaaaacatgaacaaatgggattaagatgcttctgtctcagatatttcataaggaacatccagagagcatagtttcatgtttggagctcttaaaaacaaaattcttaaaatatatatggaataaaatgtatcataatttacatatataattgatttaatttataaaagaacattaaatcttcaggttctttcatatttttgaagaaaaactggcaggtgcccatggaaaatgagtcacagatagaatgactatcccattgggaaatctttcagttgaacttcatgtaattctcttcaagttttgacataatctgagttgactacaaaccatatataatctcaaacacacatctatgcacttctttataactttttatatcattttggactcatttgastatattatgaagttcttgaaggtagagaacacatgatttctttttcatgacattctgcagagtctagacccaagctaatatgacaaacttggtaagccaatatgatttttactggatcttgtgtaggtt

SEQ ID NO: 472954 - DNA, 562 bp, Homo sapiens
tggcattgcccaggtcacagtgatggctggatggtgtcacagctccaaagtcctaggctccttcttgctctgccaccttccttyagccactgccactctgtcctgccctccctccattctccttctcactcaccttttcaggactctgcagtacgttctcttcatgctttgtatgcgtactttactaaaaactcctaactcatcttcctgcttttcacataacctccttggatccatgcttcataccagcagagatttgatttcttcaaatatggaaatacagttgattcttgagcaacatggggattggggtgccaatccccatagtttaccgatcacatagtttaaaatttacatataacttttgactctctcaaaacttaactgctaataggctactgttgttggtagccttatcaataacataaatcattgattaacacatattttggatgttatatgcattacgcactgtattcttacaataaaggaagctagataaaaactgtaattaagaaaaccataaggaagagaaaatatgtttactattccttaagtggaa

SEQ ID NO: 472955 - DNA, 632 bp, Homo sapiens
tgctatgacccaggccacattataaatagatttatagttttggatttaacctgttgaaaatggaggctgtgattttcaagtgtttttctgaccatttatttacaaaaatctttgcaaacatctcctgaaataaatgtgttttccccgayagttttgcagtttcattgcttcccttcagttctttagactgactggtcacaacagaggactgctgtcaataaaagagcaatctgtcttttgaaccaaactcacatcgtagctccttttgctgccactgactattgattgcagcctgaaatgttcaccttttctttcctaaggtcttgcagccattactttctgctgttaatgagactgaattccactctttcttgtgcatgactcttgatgtatatctgaatactgagctattcttcatgatgttgtattatgaaattccccaacctatactacgtggtcattagaggactgtgtgtgtagagaagaaacttgagtttcctttgtgaattggctttgaaatgagtatccttacaatatttttataacatgatttccaatttaaaactcggatttgaaaagggtactttatgtgctcatatttaaaagaatgatatgaaagagttactctgcaa

SEQ ID NO: 472956 - DNA, 632 bp, Homo sapiens
tgctatgacccaggccacattataaatagatttatagttttggatttaacctgttgaaaatggaggctgtgattttcaagtgtttttctgaccatttatttacaaaaatctttgcaaacatctcctgaaataaatgtgttttccccgatagttttgcagtttcattgcttcccttcagttctttagactgactggtcacaacagaggactgctgtcaataaaagagcaatctgtcttttgaaccaaactcacatcgtagctccttttsctgccactgactattgattgcagcctgaaatgttcaccttttctttcctaaggtcttgcagccattactttctgctgttaatgagactgaattccactctttcttgtgcatgactcttgatgtatatctgaatactgagctattcttcatgatgttgtattatgaaattccccaacctatactacgtggtcattagaggactgtgtgtgtagagaagaaacttgagtttcctttgtgaattggctttgaaatgagtatccttacaatatttttataacatgatttccaatttaaaactcggatttgaaaagggtactttatgtgctcatatttaaaagaatgatatgaaagagttactctgcaa

SEQ ID NO: 472957 - DNA, 632 bp, Homo sapiens
tgctatgacccaggccacattataaatagatttatagttttggatttaacctgttgaaaatggaggctgtgattttcaagtgtttttctgaccatttatttacaaaaatctttgcaaacatctcctgaaataaatgtgttttccccgatagttttgcagtttcattgcttcccttcagttctttagactgactggtcacaacagaggactgctgtcaataaaagagcaatctgtcttttgaaccaaactcacatcgtagctccttttgctgccactgactattgattgcagcctgaaatgttcaccttttctttcctaaggtcttgcagccattactttctgctgttaatgagactgaattccactctttcttgtgcatgactcttgatgtatrtctgaatactgagctattcttcatgatgttgtattatgaaattccccaacctatactacgtggtcattagaggactgtgtgtgtagagaagaaacttgagtttcctttgtgaattggctttgaaatgagtatccttacaatatttttataacatgatttccaatttaaaactcggatttgaaaagggtactttatgtgctcatatttaaaagaatgatatgaaagagttactctgcaa

SEQ ID NO: 472958 - DNA, 632 bp, Homo sapiens
tgctatgacccaggccacattataaatagatttatagttttggatttaacctgttgaaaatggaggctgtgattttcaagtgtttttctgaccatttatttacaaaaatctttgcaaacatctcctgaaataaatgtgttttccccgatagttttgcagtttcattgcttcccttcagttctttagactgactggtcacaacagaggactgctgtcaataaaagagcaatctgtcttttgaaccaaactcacatcgtagctccttttgctgccactgactattgattgcagcctgaaatgttcaccttttctttcctaaggtcttgcagccattactttctgctgttaatgagactgaattccactctttcttgtgcatgactcttgatgtatatctgaatactgagctattcttcatgatgttgtattatgaaattccccaacctatactacgtggtcattagaggactgtgtgtgtagagaagaaacttgagtttcctttgtgaattggctttgaaatgagtatcyttacaatatttttataacatgatttccaatttaaaactcggatttgaaaagggtactttatgtgctcatatttaaaagaatgatatgaaagagttactctgcaa

SEQ ID NO: 472959 - DNA, 578 bp, Homo sapiens
agtgacttgggcagaatttagacatagaattttgggctccccctctctggatttctcttttccagttgtcccctttcactttttagtggctgtggttcttcccaactcagaaagacaatgtgttttctacaggaattttagccactaagcagggcactgacatgctaaaagcacttaaatcagggaattcacagttcggtcttgtcttttaaatatcaactcccctggagaatatgcctgtttttgtttgctctctaataaattcatttaattttgagtaattttctctagagtttatagttgttacctgtgagaaggccagtcctgtaaaagtttastcaaccttggaagtagaactcacttaatctggtttggacatctgatttttagcaatagatgaagggattctttaatttgtgactttaatgtcaaaaaaagggattcattgtaattcattaaacagtaactctataataagaattgtgcatagcttactgaatctattaattttaacagatacctacatataaccataatatccagtccactttttttaactttataatccaatgaaaacc

SEQ ID NO: 472960 - DNA, 530 bp, Homo sapiens
gttgagtccaaaaacatttcccaaaggctccatcatgcaagaacattcaggaacattccagctctcacctcccatccctcacagggcactcagtcctgccctcttcccacagtatccgggaacttccccatccctctgctcccttcccgacaatccctgctctagccgtttccagcaacattcccaaagggcttctgggagacgtagatttgggtctcctccctgggctgggactgctccctttggaaaagcttgggaatgttcctaccccctgctctttgtattctagagactcatagaaattgggggtccttctgactcaccctgagaagcccttggrgtccacattctgaagccccagctccaccccagggcctaaggctttcaacagtagtccagatggttcaccttctaccctgcggaccttgggatgcccgcagtctgcacgggatgtgcgggccaagggcacagaactgcccggcttccattcatcagtgttaaaggccccaccaccacctctgggaagatga

SEQ ID NO: 472961 - DNA, 535 bp, Homo sapiens
ctgggccccttgctgggtgcccctccactccccctacctccacctctcgtctgatgtagaatcagaagatcctagattccatccccccagtagaagctcaggtcagcgctgctgtgagaggcccttctacctcgtgggtcctcctgacagtgtctgctgctcctctccgccaccattcactggcgcccagaggtgccccacagagaggagcttctcagtgggggttcctggaaaggagtggaggtcgcggttatccctcccgccaccgccaggcgtcaccaccrgcctggaaatgaaaggcacagtcaggccggtctggacgccaggggaactgtcagcctcgggactggctgaagggcctgggcaggactggcagggtggccaaggacgtccggagatggctgccacttggcgctctgaccccaatgtccatcgggagtccagagaggcacacgcccctgaattcaggccgctgtggccgcgacacacgccaagcccgagggccaggtatgcagagagggtccagaccctggac

SEQ ID NO: 472962 - DNA, 650 bp, Homo sapiens
aggcagcctctacagctacctgcatgtccaggagaccaagtttcagacattccagctaattgacattgcctggtagacagctcagggaaggractagttggcatgcagagaagatcatccacagagacataaaatccaacatatttctccatgaaggcctcatggtgtgaactagagacattttggtttggcaacagtgaagtcacaccgaagtgattctcagcagattaaggaaacccacaggcaatggccccagaggcgatctgaacgaagggtaaaaacccactcagcttccagtcccatgtcaatgcctatggcatctcattttatgagctgatgggaggggcacttcctttctcccacatcaacaaccccgaccagattatcttcttgacaggctgggggtatccccccattcctagatcttagcaagatacacaagaactgcccgaaagcaatgaagaggctggtagctgacccaaaaaggcctctgaaaaacaccagtttttcctgaggagccaactgcattgaccaagaccattgcatgcattcaacatcctcagcccagaaaggcttgctgttctgactggccccatgcttcagaggggaccacaaagagttgaagctgacgtctcatgagctgaggtcag

SEQ ID NO: 472963 - DNA, 650 bp, Homo sapiens
aggcagcctctacagctacctgcatgtccaggagaccaagtttcagacattccagctaattgacattgcctggtagacagctcagggaagggactagttggcatgcagagaagatcatccacagagacataaaatccaacatatttctccatgaaggcctcatggtgtgaactagagacattttggtttggcaacagtgaagtcacaccgaagtgattctcagcagattaaggaaacccacagkcaatggccccagaggcgatctgaacgaagggtaaaaacccactcagcttccagtcccatgtcaatgcctatggcatctcattttatgagctgatgggaggggcacttcctttctcccacatcaacaaccccgaccagattatcttcttgacaggctgggggtatccccccattcctagatcttagcaagatacacaagaactgcccgaaagcaatgaagaggctggtagctgacccaaaaaggcctctgaaaaacaccagtttttcctgaggagccaactgcattgaccaagaccattgcatgcattcaacatcctcagcccagaaaggcttgctgttctgactggccccatgcttcagaggggaccacaaagagttgaagctgacgtctcatgagctgaggtcag

SEQ ID NO: 472964 - DNA, 650 bp, Homo sapiens
aggcagcctctacagctacctgcatgtccaggagaccaagtttcagacattccagctaattgacattgcctggtagacagctcagggaagggactagttggcatgcagagaagatcatccacagagacataaaatccaacatatttctccatgaaggcctcatggtgtgaactagagacattttggtttggcaacagtgaagtcacaccgaagtgattctcagcagattaaggaaacccacaggcaatggccccagaggygatctgaacgaagggtaaaaacccactcagcttccagtcccatgtcaatgcctatggcatctcattttatgagctgatgggaggggcacttcctttctcccacatcaacaaccccgaccagattatcttcttgacaggctgggggtatccccccattcctagatcttagcaagatacacaagaactgcccgaaagcaatgaagaggctggtagctgacccaaaaaggcctctgaaaaacaccagtttttcctgaggagccaactgcattgaccaagaccattgcatgcattcaacatcctcagcccagaaaggcttgctgttctgactggccccatgcttcagaggggaccacaaagagttgaagctgacgtctcatgagctgaggtcag

SEQ ID NO: 472965 - DNA, 650 bp, Homo sapiens
aggcagcctctacagctacctgcatgtccaggagaccaagtttcagacattccagctaattgacattgcctggtagacagctcagggaagggactagttggcatgcagagaagatcatccacagagacataaaatccaacatatttctccatgaaggcctcatggtgtgaactagagacattttggtttggcaacagtgaagtcacaccgaagtgattctcagcagattaaggaaacccacaggcaatggccccagaggcgatctgaacgaagggtaaaaacccactcagcttccagtcccatgtcaatgcctatggcatctcattttatgagctgatgggaggggcacttcctttctcccacatcaacaaccccgaccagattatcttcttgacaggctgggggtatccccccattcctagatcttagcaagatacacaagaactgcccgaaagcaatgaagaggctggtagctgacccaaaaaggcctctgaaaaacaccagtttttcctgaggagccaactgcattgaccaagaccattgcatgcattcaacatcctcagcccagaaagscttgctgttctgactggccccatgcttcagaggggaccacaaagagttgaagctgacgtctcatgagctgaggtcag

SEQ ID NO: 472966 - DNA, 528 bp, Homo sapiens
tgtaaacagagcaggaaagaaactacgtgtttctggcttcaagcacaagtccaatgcagggcctcttccctaaggtacatcatcctgacagaccgttccagcagcacaggagtgggactggagaaatgcaaatgtatcacagtatattcagagaagcagcaacctcagattggtacacatgtatgttttactcaaagctgcctctacaaagctgctgacccmcccagagtatagaagagaggcccttgtaactaaatattgatggatcaaggcaaggtctagagcaggtacaatgggtttgggaagccatggattaggaccaatctcagtccattgagatacatgaataagagccctaaaacccctctggagtagttttgagcttctacacagcagcatagcctctccctttctccatattcccgagtccagctcatcagtgatttgaagctcagcacactcacagaaatgtggagagcagactacaaagtccacatctgagaacccagtgtgtgaaagctatgggaa

SEQ ID NO: 472967 - DNA, 528 bp, Homo sapiens
tgtaaacagagcaggaaagaaactacgtgtttctggcttcaagcacaagtccaatgcagggcctcttccctaaggtacatcatcctgacagaccgttccagcagcacaggagtgggactggagaaatgcaaatgtatcacagtatattcagagaagcagcaacctcagattggtacacatgtatgttttactcaaagctgcctctacaaagctgctgacccacccagagtatagaagagaggcccttgtaactaaatattgatggatcaaggcaaggtctagagcaggtacaatgggtttgggaagccatggattaggaccaatctcagtccattgagatacatgaataagakccctaaaacccctctggagtagttttgagcttctacacagcagcatagcctctccctttctccatattcccgagtccagctcatcagtgatttgaagctcagcacactcacagaaatgtggagagcagactacaaagtccacatctgagaacccagtgtgtgaaagctatgggaa

SEQ ID NO: 472968 - DNA, 571 bp, Homo sapiens
caagtaactcaagtctgacagaattgaaggtcagagggtgggttgagtacaggactcagtgcaggcggcctgcaagaacagggagttcagccaacagcaaattcagtctccaacatggatgctcagaggttagcctatgacaggcaatgggatcatcatcctgcacatccgaagcaatgcaaaggggacactctcccccatggctaaaatcttcagcatctgatcccctaccaccaggggggcaggaaccagattctccagccacatccctttgatcatccagttcttcatccttatagctaggagctgcaaaagggcaggctgtagctcctgccaatgcaataccgcatgtacrcacataacccctccaggacacctctggctcatggagggccagagacaacttacaggttgaagttcctggaggagctgcttgcatggctggtccaggcttggcaccagttgacccatgtttaacaccagtttaacaatttggcaacaaatgcccaaattgacaaatgggatctaaactaaagggcttccacacagcaaaagaaactcagagtgaaca

SEQ ID NO: 472969 - DNA, 571 bp, Homo sapiens
caagtaactcaagtctgacagaattgaaggtcagagggtgggttgagtacaggactcagtgcaggcggcctgcaagaacagggagttcagccaacagcaaattcagtctccaacatggatgctcagaggttagcctatgacaggcaatgggatcatcatcctgcacatccgaagcaatgcaaaggggacactctcccccatggctaaaatcttcagcatctgatcccctaccaccaggggggcaggaaccagattctccagccacatccctttgatcatccagttcttcatccttatagctaggagctgcaaaagggcaggctgtagctcctgccaatgcaataccgcatgtacgcrcataacccctccaggacacctctggctcatggagggccagagacaacttacaggttgaagttcctggaggagctgcttgcatggctggtccaggcttggcaccagttgacccatgtttaacaccagtttaacaatttggcaacaaatgcccaaattgacaaatgggatctaaactaaagggcttccacacagcaaaagaaactcagagtgaaca

SEQ ID NO: 472970 - DNA, 509 bp, Homo sapiens
ctacccatcaacatttcacatccactgaggtggtaagaccctcaggcttacactgggacaatgtttctgtatatgttttaacagatcagttttcagaagtcatagaaattaactcagattcatattacataggttgccagataaagtatttctaaaagataatagagatggatccaattytatgaataccaaatcataggaaaataccaggaaaaaaaaaatcaccaggaaacccaaatcttaattatatactagcttctaggaagagacattctggcattttgagattcagaaaaatcctttatctggtattcatcaataacctctggaacaaacaatttgggatcagcgttcagattcttagctccacagctacggtttctgcatgattctgccagaggaagtctaagctgcaggtagccactgcctgctcaaaagcaggaccaacaagaagctcccactaaagatgcctgctcctccttctgaggcaagagtaaactcagcaataa

SEQ ID NO: 472971 - DNA, 509 bp, Homo sapiens
ctacccatcaacatttcacatccactgaggtggtaagaccctcaggcttacactgggacaatgtttctgtatatgttttaacagatcagttttcagaagtcatagaaattaactcagattcatattacataggttgccagataaagtatttctaaaagataatagagatggatccaattctatgaataccaaatcataggaaaataccaggaaaaaaaaaatcaccaggaaacccaaatcttaattatatactagcttctaggaagagacattctggcattttgagattcagaaaaatcctttatctggtattcatcaataacctctggaamaaacaatttgggatcagcgttcagattcttagctccacagctacggtttctgcatgattctgccagaggaagtctaagctgcaggtagccactgcctgctcaaaagcaggaccaacaagaagctcccactaaagatgcctgctcctccttctgaggcaagagtaaactcagcaataa

SEQ ID NO: 472972 - DNA, 327 bp, Homo sapiens
attttagctaggaaatgctgagcatcggaattacttgcaaacagctctttggaaggtattcagttctcaaatacttttgagatttctcatgggtaaaaaaaaaatactgtcaaggaactagatataatcttcctattactttccagtgtaactttaagaatattaaaattcatcaggaaatgagagggatgacatccttaccaggttcaatgctcacagaacctygtggtgaagaggagcaagtaggccctttaaaagccattgccctcctaaacaactagcccctggctaatactggagtcccagaattcctgagtgtagagaaga

SEQ ID NO: 472973 - DNA, 620 bp, Homo sapiens
ccctttttcctaagacttctatagaactgtcatttcatctgcagcaagatcatttctactttttgactacttgagttataagatccaatgcacagatgtagcacttggcctacttttaatgaagactcacaaaaatgatacaggcttacccacggtaagtgttaatcttctaaagattgccacctaaacatgtgctgaagaggcactgcagagcaagggatgtttatctctgcaattcattggccaaactaaaccacccaccaaaggaatggccaagtcattttagctaggaaatgctgagcatcggaattacttgcaaacagctctttggaaggtattcagttctcaaatacttttgagatttctcatgggtaaaaaaaaaatactgtcaaggaactagatataatcttcctattactttccagtgtaactttaagaatattaaaattcatcaggaaatgagagggatgacatccttaccaggttcaatgctcacagaacctcgtggtgaagaggagcaagtaggccctttaaaagccattgccctcctaaacaactagcccctggctaatactgsagtcccagaattcctgagtgtagagaagaaagtaatccactgc

SEQ ID NO: 472974 - DNA, 312 bp, Homo sapiens
gatgcctgccctgggtagagtctgctgctgtccttgagggagtctgcacaactgcagtgatgacttctgccccagaggttttgctggcctcccgggacagaatcacagcaagggctggggaagagacagtgcaatctccaaaggcagcctatggagtcagatggtgtgtggtctgcmgaagtctccctgcaggcagaggtggttttgtttacctccagcttcatggtagaagagcctggatccagaaaagcaggaagggcacgtcagtgcattcttcttgccccctgcttgcaattttccacccctatacct

SEQ ID NO: 472975 - DNA, 312 bp, Homo sapiens
gatgcctgccctgggtagagtctgctgctgtccttgagggagtctgcacaactgcagtgatgacttctgccccagaggttttgctggcctcccgggacagaatcacagcaagggctggggaagagacagtgcaatctccaaaggcagcctatggagtcagatggtgtgtggtctgccgawgtctccctgcaggcagaggtggttttgtttacctccagcttcatggtagaagagcctggatccagaaaagcaggaagggcacgtcagtgcattcttcttgccccctgcttgcaattttccacccctatacct

SEQ ID NO: 472976 - DNA, 590 bp, Homo sapiens
gaacgcaggatgaacagatacatcctcacagtgctagaagccttggggggacacgccatgacaccgagcatgcaagtgtccaaccttggcacagaccatgacaatgggttatgccatctgggtacagggacttctggattagaggacgggcctgcccgactcattgtcacaacttgagggccaagggaacgtcattgagttctgttcaaggcatrcacagattttcagcattaatttgggggtggggtcaaactgatttcagttatagcgatcgtcttccaaatcacctggactttaaagtgatggtaggcaactgttctagaaattttttcaaggtaattttaagatgggagttctgggcctttattctggaacccattagaataaactttcctgggatgtgtctgacccacagaatcactgccctgttcatttcatgtaatcctgtaggaggtgaatggcagtaggggctcacacagctaccaggaatccccaagtcaagagtggaacacagattagggtatctggacacaggttggaggtctcagtcaattcaggggagcctctcaacacattcctcaccttcagta

SEQ ID NO: 472977 - DNA, 590 bp, Homo sapiens
gaacgcaggatgaacagatacatcctcacagtgctagaagccttggggggacacgccatgacaccgagcatgcaagtgtccaaccttggcacagaccatgacaatgggttatgccatctgggtacagggacttctggattagaggacgggcctgcccgactcattgtcacaacttgagggccaagggaacgtcattgagttctgttcaaggcatgcacagattttcagcattaatttgggggtggggtcaaactgatttcagttatagcgatmgtcttccaaatcacctggactttaaagtgatggtaggcaactgttctagaaattttttcaaggtaattttaagatgggagttctgggcctttattctggaacccattagaataaactttcctgggatgtgtctgacccacagaatcactgccctgttcatttcatgtaatcctgtaggaggtgaatggcagtaggggctcacacagctaccaggaatccccaagtcaagagtggaacacagattagggtatctggacacaggttggaggtctcagtcaattcaggggagcctctcaacacattcctcaccttcagta

SEQ ID NO: 472978 - DNA, 609 bp, Homo sapiens
agaacgcaggatgaacagatacatcctcacagtgctagaagccttggggggacacgccatgacaccgagcatgcaagtgtccaaccttggcacagaccatgacaatgggttatgccatctgggtacagggacttctggattagaggacgggcctgcccgactcattgtcacaacttgagggccaagggaacgtcattgagttctgttcaaggcatgcacagattttcagcattaatttgggggtggggtcaaactgatttcagttatagcgatcgtcttccaaatcacctggactttaaagtgatggtaggcaactgttctagaaattttttcaaggtaattttaagatgggagttctgggcctttattctggaacccattagaataaactttcctgggatgtgtctgacccacagaatcactgccctgttcatttcatgtaatcctgtaggaggtgaatggcagtaggggctcacacagctaccaggaatccycaagtcaagagtggaacacagattagggtatctggacacaggttggaggtctcagtcaattcaggggagcctctcaacacattcctcaccttcagtaccactagcttcttcgcag

SEQ ID NO: 472979 - DNA, 476 bp, Homo sapiens
tgaaggctgtcagctctttgattcccacttcattcctgtgtctctgtctttaattcctctagtgccactgggttagggtctccacaaccaagctggtctttggcagtctgggacactgaaggacacttgatcaacccacagccagtggcaggtctctgctgactggactccaggccagttgccttacactgccatcttccccatggcaggccttcctgcaccagcagagatgtcagggatacatctgagttttgccttagagtttctacctyatgccttaacatctaggtggtggacaatacctgggggtttcaggacgcttacagaaatgccaaccagcattgggaggtagaaaagactcttggatcaacctccacttgagtatggagaagtcaggaggcaaggagtggaaccttcagagagatcgaggaagataatcccatgtttgaacaaccatcagtaggaactgaagaggg

SEQ ID NO: 472980 - DNA, 633 bp, Homo sapiens
caagtgggcacgtgaaggtcaagtgctgtgtttaaccttgatcctaagactttgtaggctggcccctttcccatggttctccccttagggtgggctgcccgcatgcacagggccctccttacccttgtgaacatgcacagtgcgtttcagaagttgtatgcgcgcccacttgaggctttcttcccttttccagtggtatacccctgtgtaaggtaatggctgtgatttggtcaaggagtaagtcaaggtggatatccaggcctgcatgaytcagtgagcttggtgcacaagcgcatatctccatttgttatataacctgtttgtgtaagttcatacttggctcaaagccagtattgtctgtagaaggtataagtgtcctgctgatgctgcccagggggtccttgggggcttggctcagctcaacatggcttgacatggtgggagtactggcccccagagaaagagaaccaaagcttgtagatgcacagagagagagagagaaccatcttgcagatggacagagaaccatcttgtagatggacagcagggagacaggacccagcgtggcttgcttttgcccaaagaggtaaagagttaaactgctgaccctgaaggcaagggagaggtggccat

SEQ ID NO: 472981 - DNA, 585 bp, Homo sapiens
ctgctcctcgtccagtcataaaggaagggtgttgttttcagctctcaccacaaatggccacttccagcccaaatgaagctgaaggttagaggctggggttaggtacaggcctcacagcaccggcagcttgcagtgagttatccttacagtggactcagtctctggatcggtgctagattcctggccccasgctgtggaattatcctgcatagatgaagcagcctggaagaatgagaacattcaggatgaaacctcagaagcacctgccagtgtagagctgctcactggatgctgggcaacactcagcaggaccctgaggaggtgccatcaggctggctcttagccccaagcctcacctggccctaataagatcccaacgtgggttaccactcgttattgaagcaggatagtttagttgccaaaatatatatcatgcttcaggtagaactgctgagtctatcaaaattctcactgtactggctctctaaaatcacccaaggcacatcagcctcaagcaccaaggtacacgtctgcagtacaaaaagaatactacccttaaagatgtaggttggatgtggtaggcaa

SEQ ID NO: 472982 - DNA, 585 bp, Homo sapiens
ctgctcctcgtccagtcataaaggaagggtgttgttttcagctctcaccacaaatggccacttccagcccaaatgaagctgaaggttagaggctggggttaggtacaggcctcacagcaccggcagcttgcagtgagttatccttacagtggactcagtctctggatcggtgctagattcctggccccacgctgtggaattatcctgcatagatgaagcagcctggaagaatgagaacattcaggatgaaacctcagaagcacctgccagtgtagagctgctcactggatgstgggcaacactcagcaggaccctgaggaggtgccatcaggctggctcttagccccaagcctcacctggccctaataagatcccaacgtgggttaccactcgttattgaagcaggatagtttagttgccaaaatatatatcatgcttcaggtagaactgctgagtctatcaaaattctcactgtactggctctctaaaatcacccaaggcacatcagcctcaagcaccaaggtacacgtctgcagtacaaaaagaatactacccttaaagatgtaggttggatgtggtaggcaa

SEQ ID NO: 472983 - DNA, 199 bp, Homo sapiens
gtggttgtcagcagagctgctagaagaggcaaaatgctttcccmcacactgacaagttctttgtggggggggaaaagctctagaattacttattttccttattacagccatggcataggaccctcagccatcctttgcaaaaaaccgttgccaagaacaaaccagaaggcaaagaatgactagaaaccatgactaacag

SEQ ID NO: 472984 - DNA, 199 bp, Homo sapiens
gtggttgtcagcagagctgctagaagaggcaaaatgctttcccccacactgacaagttctttgtgggggggraaaagctctagaattacttattttccttattacagccatggcataggaccctcagccatcctttgcaaaaaaccgttgccaagaacaaaccagaaggcaaagaatgactagaaaccatgactaacag

SEQ ID NO: 472985 - DNA, 425 bp, Homo sapiens
acccttcaggaatcttctgggagaagggctagtttccttccttgcaggaagatgagcaaatttattatgtttatgaatctctgccctcrttaggaaacaaagacagtcaccggaatataacaagagtcctaagttgggcatcaacatactcgataaacttgaaaagtgatctggtagaattaacgcatttatcacagaattattgctttaatacaaaaagtaaaagggaaggaagatatttggctgtttggcaaatatcaagttgagttctgcaaatgcagtactgtaattgaacatattttccgagaaggtaataaggctgtatatggaacaaactggcagtttgaaaatcaacatcttcacagagaggatgccaagacttgtgaatcatagggcattagagactaccataaaacagcaaatca

SEQ ID NO: 472986 - DNA, 425 bp, Homo sapiens
acccttcaggaatcttctgggagaagggctagtttccttccttgcaggaagatgagcaaatttattatgtttatgaatctctgccctcattaggaaacaaagacagtcaccggaatataacaagagtcctaagttgggcatcaacatactcgataaacttgaaaagtgatctggtagaattaaygcatttatcacagaattattgctttaatacaaaaagtaaaagggaaggaagatatttggctgtttggcaaatatcaagttgagttctgcaaatgcagtactgtaattgaacatattttccgagaaggtaataaggctgtatatggaacaaactggcagtttgaaaatcaacatcttcacagagaggatgccaagacttgtgaatcatagggcattagagactaccataaaacagcaaatca

SEQ ID NO: 472987 - DNA, 576 bp, Homo sapiens
ctggcttccacctcctgccttcaagtctgcactttgcatttggaggttcaagcagcaacatgcaaacagaccatatgtctgctggggaatggtaaggacaactaacccaggtggatcacccttcgaggatcaggatgtgatacatttctgggtgaagcaatcctcagcaaactaacacaagaacagaaaaccgaacaccgcatgttctcactcaggctaggggagggagagcattaggaaaaatacctaatgtacgcagggcttaaaacctagaggacaggttgatacgtgcagcaaacaactatggcacatgaatacccatgtagcaaacctgcacattctatacatgtatcccagaacttaaaagtaaaattaaaaaagaaaacgtattctcaggcagagagcctaaaagcagtaaaataaagaccctgcaggttagctatggctgtgtctgcagttatgaccatgaaggcrctaaattcactactaatgaaagcaatgattggataatcctctgtggccgcaaaacctagatctcagagcccaggttgtgctagccttggggataaacgcagg

SEQ ID NO: 472988 - DNA, 619 bp, Homo sapiens
cccttcataaacccttaccgccttctccccagaaaggccaagtggctactttggattgcaatcgggccagttctccattactagttttggttaataaaaaaccactctaccatacctcactcttgccactggagtctgcaaatggtgagtggctgatctgtgtttggttacaatgggmgagtggtaatgtcaccaaaataccttcaacaaccaagagaagccaggatcaaagtaggtgggagcagctacaccaaaacaaggtgaaatatgacgtgtcactattgcttacttgttattgtgaagtggtctgagcctcggtgaaaggttccttgaaaaaaataaacaaatggcaatgagaattcctaagtctcatgagaggctcatgctttgaaaactgcttgtaattgatagacactgacccggggtgctcacctccctaggtaccaagtaacagccagtggcaagagccaagaaatggacagggcttaaacccctcaggccccacctatgtgtctatgggctgatctaaaagatgacagctccttgctgctcccaatgaaaatatgtgtcctgatcccataaatgctcaggtgctgtgtgagtggaggaaactgaagag

SEQ ID NO: 472989 - DNA, 619 bp, Homo sapiens
cccttcataaacccttaccgccttctccccagaaaggccaagtggctactttggattgcaatcgggccagttctccattactagttttggttaataaaaaaccactctaccatacctcactcttgccactggagtctgcaaatggtgagtggctgatctgtgtttggttacaatgggagagtggtaatgtcaccaaaataccttcaacaaccaagagaagccaggatcaaagtaggtgggagcagctacaccaaaacaaggtgaaatatgacgtgtcactattgcttacttgttattgtgaagtggtctgagcctcggtgaaaggttccttgaaaaaaataaacaaatggcaatgagaattcctaagtctcatgagaggctcatgctttgaaaactgcttgtaattgatagacactgacccggggtgctcacctccctaggtaccaagtaacagccagtggcaagagccaagaaatggacagggcttaaacccctcaggccccacctatgtgtctatgggctgatctaaaagatgacagctccttgctgctcccaatgaaaatatgtgtcctgatcccataaatgctcagrtgctgtgtgagtggaggaaactgaagag

SEQ ID NO: 472990 - DNA, 408 bp, Homo sapiens
tatgccaatgaaaagcagcaggtgatgaacagtacaatactcaagcatcttagagcagttcacgtgtatctcagcaatttagtgctattttctcgtacaaggccttcctgcactggtacacaggtgagggcatggaagaaacaaagttygccgaatccaagagtaatgttaatcaatgaccagagcctgagtatcagtggtgatagaatgccaggtgcagagaccaaaactttctaacgtccatgttgctcaaaggaagagtgacaattgtgaatatcttccatagtcatcttagaactatccattaacatgaaagggagatctggcaaattacataagcctattttaaatacttcagtacacaatctcacctgttttggggtgagaaaccaagatttcaaatgatga

SEQ ID NO: 472991 - DNA, 408 bp, Homo sapiens
tatgccaatgaaaagcagcaggtgatgaacagtacaatactcaagcatcttagagcagttcacgtgtatctcagcaatttagtgctattttctcgtacaaggccttcctgcactggtacacaggtgagggcatggaagaaacaaagtttgccgaatccaagagyaatgttaatcaatgaccagagcctgagtatcagtggtgatagaatgccaggtgcagagaccaaaactttctaacgtccatgttgctcaaaggaagagtgacaattgtgaatatcttccatagtcatcttagaactatccattaacatgaaagggagatctggcaaattacataagcctattttaaatacttcagtacacaatctcacctgttttggggtgagaaaccaagatttcaaatgatga

SEQ ID NO: 472992 - DNA, 510 bp, Homo sapiens
ttccacctagaactcttcactggctcaaagtttgggccaaaggttagctcatctgacagtgccactgcagaatgatggtttcagcattgtgccccatgtttccagcctccacctgtctgcccacagaaggtgcactgttgcccatggaagcactctctgcctatctcatttctagtcgtgcctaagccatccaatgaagatgtatagaagtggggttccagctcttgtcccctagcatttaggtcttagcatcctcagggcaattkgaacaacagatgtcacagcttcagaggatatccaggttcagtacataatgaccttcaacacggatggaggtcacttcagccagtttaaaaaaacaactgtttctcaataaagcccctctatcagtttataagttcaggcaagaaagccactacaagaactcacaggataaggtagtcacctaaggtacacagtcattttcagaaaactaaacttatagagcaagaaggaaattaagttcaagac

SEQ ID NO: 472993 - DNA, 510 bp, Homo sapiens
ttccacctagaactcttcactggctcaaagtttgggccaaaggttagctcatctgacagtgccactgcagaatgatggtttcagcattgtgccccatgtttccagcctccacctgtctgcccacagaaggtgcactgttgcccatggaagcactctctgcctatctcatttctagtcgtgcctaagccatccaatgaagatgtatagaagtggggttccagctcttgtcccctagcatttaggtcttagcatcctcagggcaatttgaacaacagatgtcacagcttcagaggatatccaggttcagtacataatgaccttcaacacggatggaggtcacttcagccagtttaaaaaaacaactgtttctcaataaagcccctctatcagtttataagttcaggcaagaaagccactacaagaactcacaggataaggtartcacctaaggtacacagtcattttcagaaaactaaacttatagagcaagaaggaaattaagttcaagac

SEQ ID NO: 472994 - DNA, 585 bp, Homo sapiens
tccacaactcctcaaaaagaaccttcaaactgtcaaataacttcaaactgatttgatgttgagctttcaaaacctaaggtgtttatttcacctttgaagcctttctcataaggagttctcaaaaatacctcactccagatctgctcatctcaactcaaaaagtattttctattctaataaactatcttagctgttcccttcacaggatggagccaaggctatctgctccgcctttaaaatcaaactgtaggatttgctcttaaaaaaaaacaacaaaagtctcattgaaaatttattaataagtgaccatgttgaaagctgtcctaycatggtttgtcatcctgtctgataaatagtaaaattatacaaaagacttgaggtgaggaaccacctctgaatgaatcaaggaaaccaagaaaagaaaacctaagaaagtgtcaaaaaatgaacttagccagaccacgctcaagaacaaatttacaaatttagaataaaatcaaactcatcatggcaaacaaaatcctatacagtcttatgtaatcaaaatcctatataattcccgcctgcccacttctcagatctcaa

SEQ ID NO: 472995 - DNA, 633 bp, Homo sapiens
tggacagtagatacagtgaggataaagaatgatgttgaaacactgaagcttgtctgtttaactaagcatgactgtaatcatgcctccatgggccagatgcctcttcatttgtatcaggactgtgcatatgcccctgggtacttcatttacctcacctgggcagaataagacagaagaagagagaggaaaaatagtcttaacttgattaggtttgaatattaaatttgagttcattttacaaaaagaaaacaattttaaccaaaagtgacaaagataatgtagagtcataatcatcaagtggatttttttttatcttcatgagaactcatggtttcaaagctaagttggggtctcttaaaaaataaattgtatttctacatttctaaattttgctatccattgtcatctacatacatttatgtatctctstacgtggatatatttatttgtctgcatgaaacaagttaactcaatagtctcaactatttgaggcatagataaagatttttattttgcccccgtatctttgaacagtgatttgccatttcctcatatcacacactgtagtattatttgtggcatatttcattaattcctaatgagccttggtagttaaacttggtcaaatcattt

SEQ ID NO: 472996 - DNA, 522 bp, Homo sapiens
ttacttacattaagggctttgggcattttgaagagaatagaagagagagttcaaagtgcaacaatggtgcaggatcacaagaggactgttagttgaacctcaaattgcactgactcagttaatgcttccacatttctaggattggattgcctgtcttaaagataatttctttgtgtttaaygacaaccaaaaaagcagcttgaaatttgggacatcgtaatcaatacgcaaggcagttgccttcataaaatttaatgagtcccaaagaaagcagtgatctcatttcaatactaacacttaagtattaacttttcttagaaagttaattcatcttaaatatgtgcattcatactcacatagtttcaatgggggtaaaaataattaaatatattaaaactcttggtataacacaatctactcaatttaagaagctctcttcactaatgatggaagtacatgatgccaagttactgaaaatgtgttcttccaaaagcatcatctggattcttgacaagagtattg

SEQ ID NO: 472997 - DNA, 673 bp, Homo sapiens
taaaattaaagttcaatataaacattatttgttggtatatagaataaagtcccttaaatattggaattccacaacttatttagtgtttggtgcacatataaaactcagattggtcaatatagttattttaaaatttggaacaaatttggcattagattgcaaagaaaaatatagcatagttgtctctttttaaaatatagtactgggatagtttacataattttyatttggagaatcatttatttcccttaggtttttctaaattcacaattattattacgattacaatgaagattaaaacagtgaattctggagtattggccagaatggaatattgagtgggtgattttcataggattaggattcataacttaatggatttatctgctgtgagcattttggcctgtcatacttcataagcacacatgacataagcttcattacctttcttatgtaacactgaaataatacattaatcttggaatcatcacatttttaaaaaaataaatagaatattggttttgatagtttacagttgttatttccaaggcagatatagttcaatattgtctccggtgaactttcgagaatgtaaattaaatgtgtaattgaacaaagtattgcatagtctaatgaagcaccactgtaggcagagaaaggagagcatcagagc

SEQ ID NO: 472998 - DNA, 673 bp, Homo sapiens
taaaattaaagttcaatataaacattatttgttggtatatagaataaagtcccttaaatattggaattccacaacttatttagtgtttggtgcacatataaaactcagattggtcaatatagttattttaaaatttggaacaaatttggcattagattgcaaagaaaaatatagcatagttgtctctttttaaaatatagtactgggatagtttacataatttttatttggagaatcatttatttcccttaggtttttctaaattcacaattattattacgattacaatgaagattaaaacagtgaattctggagtattggccagaatggaatattgagtgrgtgattttcataggattaggattcataacttaatggatttatctgctgtgagcattttggcctgtcatacttcataagcacacatgacataagcttcattacctttcttatgtaacactgaaataatacattaatcttggaatcatcacatttttaaaaaaataaatagaatattggttttgatagtttacagttgttatttccaaggcagatatagttcaatattgtctccggtgaactttcgagaatgtaaattaaatgtgtaattgaacaaagtattgcatagtctaatgaagcaccactgtaggcagagaaaggagagcatcagagc

SEQ ID NO: 472999 - DNA, 507 bp, Homo sapiens
cctcctgctgggattgtctctgttgttgtttgctctgcagcctgagcacctcttttgataacaggtgtggtaggcccactgcctgcaaaagtagagaccaatgccagcatcctggagcgagggtctttactgatgctgttactcttttcacwccattaattctggcctctggccgaagaaggaatcctgtttaaaaggggaaaattttcaaaaccaaaaattttcaaactctcggttataatttaaagtctgaattcccaatgaataaagctccctatcacacttattattagcttcttgtttgtactgtttgcttgtactgtggtcacacattgggtctactcaagaaaaccggaaaaaaagataaacttccagcaataatgcaatacacagtgaatgctgaagccagcagtcatgacagcagtcaatagtgcaagtctgtggttagatgctgccctagaaggggagcaaaagcaaaggtgactaaaaacaaaagtgggtaagcac

SEQ ID NO: 473000 - DNA, 507 bp, Homo sapiens
cctcctgctgggattgtctctgttgttgtttgctctgcagcctgagcacctcttttgataacaggtgtggtaggcccactgcctgcaaaagtagagaccaatgccagcatcctggagcgagggtctttactgatgctgttactcttttcacaccattaattctggcctctggccgaagaaggaatcctgtttaaaaggggaaaattttcaaaaccaaaaattttcaaactctcggttataatttaaagtctgaattcccaatgaataaagctccctatcacacttattattagcttcttgtttgtactgtttgcttgtactrtggtcacacattgggtctactcaagaaaaccggaaaaaaagataaacttccagcaataatgcaatacacagtgaatgctgaagccagcagtcatgacagcagtcaatagtgcaagtctgtggttagatgctgccctagaaggggagcaaaagcaaaggtgactaaaaacaaaagtgggtaagcac

SEQ ID NO: 473001 - DNA, 507 bp, Homo sapiens
cctcctgctgggattgtctctgttgttgtttgctctgcagcctgagcacctcttttgataacaggtgtggtaggcccactgcctgcaaaagtagagaccaatgccagcatcctggagcgagggtctttactgatgctgttactcttttcacaccattaattctggcctctggccgaagaaggaatcctgtttaaaaggggaaaattttcaaaaccaaaaattttcaaactctcggttataatttaaagtctgaattcccaatgaataaagctccctatcacacttattattagcttcttgtttgtactgtttgcttgtactgtggtcacacattgggtctactcaagaaaacmggaaaaaaagataaacttccagcaataatgcaatacacagtgaatgctgaagccagcagtcatgacagcagtcaatagtgcaagtctgtggttagatgctgccctagaaggggagcaaaagcaaaggtgactaaaaacaaaagtgggtaagcac

SEQ ID NO: 473002 - DNA, 530 bp, Homo sapiens
agctgctatattaaatagtcacatgttgggtattttcatccactgtcaacttttacatgcattctaagaagtacattgcaatgcccatgaaatccatctatactgggactccttatatgtatgmtatactgaaaactttgatacatgctagattttaggggagaaaaatgaatgtggcatcatgttagatggctagaggttgtaaaggagtcacctgaggtaatcagttgcaggacctgattgatggtcaaagtgcgtgatgtttggtacagcatgagactgcagttaaactgcccagacatagccttatggcactgaccatttactctggtgttaccagggattggtgttaccatgcaactataatgagaactcgtcttccaaagaacaggcttgaaaaaaggatattgtgtcctgaattggccagagaaaatattttgaagtccagggcagtgctacaccgatacacaggcagctcaagtgtaatatcagatgcatagcttattagttatttaaaattaaaatagcac

SEQ ID NO: 473003 - DNA, 637 bp, Homo sapiens
ctatattaaatagtcacatgttgggtattttcatccactgtcaacttttacatgcattctaagaagtacattgcaatgcccatgaaatccatctatactgggactccttatatgtatgctatactgaaaactttgatacatgctagattttaggggagaaaaatgaatgtggcatcatgttagatggctagaggttgtaaaggagtcacctgaggtaatcagttgcaggacctgattgatggtcaaagtgcrtgatgtttggtacagcatgagactgcagttaaactgcccagacatagccttatggcactgaccatttactctggtgttaccagggattggtgttaccatgcaactataatgagaactcgtcttccaaagaacaggcttgaaaaaaggatattgtgtcctgaattggccagagaaaatattttgaagtccagggcagtgctacaccgatacacaggcagctcaagtgtaatatcagatgcatagcttattagttatttaaaattaaaatagcacaggcagatgtcttaataatctcagccactgagatatgtccttgcctctgatgggtaactaaaaggagtagagcagccaacccagttgtctatcaatataggtagcattgatg

SEQ ID NO: 473004 - DNA, 601 bp, Homo sapiens
taggagcccttgataattcacagtagtatttaaaaggatagttttaaaaattaattatctgaagatgcttattgttgagataggttttgattaaaatttcaaggagcattaacagaaagtgtcccagatgctggcctgtctatattactgtagcagagtttgtctagttgtttatcaaactctttgtaaaggaaatggcttcactttagtcaggagtggcctgaggcggccttctggtgctgcatgactcggcgggtttggagcgcaggagcacaaccccacacattatgtaaccacaccacgtgaggcacattaggtgatcacccacgtgaactcatgcttggctcagagcccttttgtytgtaaaagtataattaccctgctaatgctgtacatatggcttgctcatgtgccaagagagagtaaatccatgtcaaaactatctatgattccttgagtgtttttccagctacctgctacttgcccactgactcctctcagacctcagttagaacctgacactttttggctcttgcttcctagaaagactatcacaaaactagcctacattcttcccttgcagttagaaatagctgtgcag

SEQ ID NO: 473005 - DNA, 528 bp, Homo sapiens
attgttgagataggttttgattaaaatttcaaggagcattaacagaaagtgtcccagatgctggcctgtctatattactgtagcagagtttgtctagttgtttatcaaactctttgtaaaggaaatggcttcactttagtcaggagtggcctgaggcggccttctggtgctgcatgactcggcgggtttggagcgcaggagcacaaccccacacattatgtaaccacaccacgtgaggcacattaggtgatcacccacgtgaactcatgcttggctcagagcccttttgtctgtaaaagtataattaccctgctaatgctgtacatatggcttgctcatgtgccaagagagagtaaatccatgtcraaactatctatgattccttgagtgtttttccagctacctgctacttgcccactgactcctctcagacctcagttagaacctgacactttttggctcttgcttcctagaaagactatcacaaaactagcctacattcttcccttgcagttagaaatagctgtg

SEQ ID NO: 473006 - DNA, 601 bp, Homo sapiens
taggagcccttgataattcacagtagtatttaaaaggatagttttaaaaattaattatctgaagatgcttattgttgagataggttttgattaaaatttcaaggagcattaacagaaagtgtcccagatgctggcctgtctatattactgtagcagagtttgtctagttgtttatcaaactctttgtaaaggaaatggcttcactttagtcaggagtggcctgaggcggccttctggtgctgcatgactcggcgggtttggagcgcaggagcacaaccccacacattatgtaaccacaccacgtgaggcacattaggtgatcacccacgtgaactcatgcttggctcagagcccttttgtctgtaaaagtataattaccctgctaatgctgtacatatggcttgctcatgtgccaagagagagtaaatccatgtcaaaactatctaygattccttgagtgtttttccagctacctgctacttgcccactgactcctctcagacctcagttagaacctgacactttttggctcttgcttcctagaaagactatcacaaaactagcctacattcttcccttgcagttagaaatagctgtgcag

SEQ ID NO: 473007 - DNA, 672 bp, Homo sapiens
gaccacgagtatctcccattagaatgctttctgtcatctgtgagtctctcccattggagtgactggggtcacccacgtgtctctaacattagactgtttgtggttgcacagctctctctaacattagattgcttggggtcatctgagagtttcccccattagaatgcctggagtggagtcccccaggtgtctctattatgagaatgcctggtgtcagccagcagtctctcccattagaatgcctgtggtatcccaggtgtcactattattagaattcctggggtcagtggagggtatctcccataagaatgcctggtgtcacccaggtgtctctaacattagattggctggggtcctttggaagtctycactattaggatgcctggggtcacccaagtgcctctaccattagactgcctgtggtcagttgggaatctcccccattagaatggctggggtcacctaggtgtctctatgcatggattgcctgggtttgtacagaagtctctctaattagaatgcctgaggtcatccaggtgtctgtattattagactgcctggggtcaggcaggagtctctcccattagaatatctggtgtcagttggaattctctctcattagaatgcttggggtcgcatacgtgtatctattatttgcatgcctgggcttgt

SEQ ID NO: 473008 - DNA, 613 bp, Homo sapiens
cccattgcatattcctgtggggctgaaagaagagaccacataccctcctgcctgcattgaacacaagaggctgtcaagtgcttgaaatgcagctggtctgaacagagacatactgtgtgaaatacacactggattttaaaaaccagttaaaactctcattaggaattgtgtatactaattacatggtgaaatggtaatatttttgatatattggggtaaatgagctatcgtattaacataattttactttttacttttttaatgtgaccactcaaaattttaacattttaaatgtagttcccattatatgtctattaaatttctactaaagctgtagggatttgatttaaaccagggtttctccacctcggcaccactgacactttgaccagataattccktgtgtgagtctgtcctggattgtaggatgtttagcagcaaacttagccaatacctgctgggtgccagtagtagcatcccccagctgtgacaatgaaaatgctttctgacattgctgaatgtcgctggggggcaaaatcacctcagatgagaatccctgggctggacattactctggacttcagggtgggaatgtgaggcctccctgcctgag

SEQ ID NO: 473009 - DNA, 541 bp, Homo sapiens
attagactgcctgtggtcagccaaaagtctcccattaaaatgcctggggtcccctaagtgtctctatcattaaactgcctgggttcgttatrgagtctctcttattagaatgcctggagttacccaggtttctctatccttagactgcctgaagtttgacaagagtctctcccattagaatcactggggttcaccaggagtctctcacattagaatcctttgcattgcccagatgtctctatcattacaatgattggggtggcccacttgtcttcatcattagaatgctggggttcagccaggagtctctctgattagaatgcctaggtttgcctggggtcacttagttgtcccttatcttgactgccttggttgcccaggtgtctctatcattagactgcctggagttgcacaggtatctctatcattagaatgcctggggtggtccaagattctttcccattagaatgcctggggtcacccaagtgtctctaacatcatagtatctggtgtcaactgggaatctctttcattagaatat

SEQ ID NO: 473010 - DNA, 541 bp, Homo sapiens
attagactgcctgtggtcagccaaaagtctcccattaaaatgcctggggtcccctaagtgtctctatcattaaactgcctgggttcgttatggagtctctcttattagaatgcctggagttacccaggkttctctatccttagactgcctgaagtttgacaagagtctctcccattagaatcactggggttcaccaggagtctctcacattagaatcctttgcattgcccagatgtctctatcattacaatgattggggtggcccacttgtcttcatcattagaatgctggggttcagccaggagtctctctgattagaatgcctaggtttgcctggggtcacttagttgtcccttatcttgactgccttggttgcccaggtgtctctatcattagactgcctggagttgcacaggtatctctatcattagaatgcctggggtggtccaagattctttcccattagaatgcctggggtcacccaagtgtctctaacatcatagtatctggtgtcaactgggaatctctttcattagaatat

SEQ ID NO: 473011 - DNA, 550 bp, Homo sapiens
tctgtatgcatagactgcttggagtcaaacaggagtcactcccaatagaatgctttcggtcagccgaaagactctcctattagaatgcctggtggcacccaggggtctttaattatactgcctgaggtcgtccaggcgtctttctcattacaatgcctagggtcacccagatgcctctatcattagactgtctgtggtcatccaggagtctctttcactgaaatgcctgcggttgcctatttgtctctatcattagactgcctgrggtcagcctagcaataaatgaaagtttaagctatactaaacccagggttggttaatttcatgccagccactgcggccattagtctctcccattagaatgcctggggtcacccaagtttctctataattagactgtgtgaggtcagccaggaatctctcccattagaatgcctccagtcacccaggtgtctctatcaacagactgcttgggtcagccaggagtgtctcccattagaatgccttgggtcagctaggattctctcttatttgaatgcctggggtcgcc

SEQ ID NO: 473012 - DNA, 511 bp, Homo sapiens
gctgctcaatatgccaggagaggaaaggcctggcttcctggtggtctttctgtgccctgtgtttgcacaccctgtactgagcactgcttgcagagtacatgcttctggaagctttccctgtgtttttttcttttyttttttttttttttttttttgctaaagcatgagagatgcttgagggacttatcattttggcagttactatttcttcttgttgctatataatcacaggaaaacagtgtgaaatattttatgtgacctccacattcatctgcccttgacttttctcatcccttctccagaataaccagtagctggagctaaggctgatatggatttaggggtcaagttcaccaggatagctgtattttgatcacaccctctgcccagatagcgaaatgagcaaaaccccaccattctctcgccatgttcctagcagcctccacgttcctgctagtttctagctggggaggtggctcatgtccattttcacacttctctctggtctctc

SEQ ID NO: 473013 - DNA, 549 bp, Homo sapiens
gccaggctggtctcaaattcctgacctcaggtgatacacccgcgtcggcctcccaaagtgctaggattacaggcatgagccaccacacctggccaagataacagtttttgttgatggactggatatggaaggagtgggaaagagaaaaatcctaaataactcctagcttttggaattgagtgaatagtgataacatttactgagatgtaaaagactagagaaggaaaagatttgagagtgtgaaaaataaacaggacttctcctttggctatgattaatttgagatgctttttgaccacccaggtacaaataagacaggctatakatatatatgactctgatcacttctcagccttttggccaagatcaagtgatatatgactctggaagtcagggggaaagccatcagtgaaaaacttaactaacttacaaggcagcccattatattttcgatagctctagttatcagaaagttcttgccattacactaaggtgactataaatgttatataaatttgatgtccatttccattcggggttcctgaaaag

SEQ ID NO: 473014 - DNA, 540 bp, Homo sapiens
accacctccttatcctgctaagtttctgaaacccacaccaagtcctccctctgcatagaagctttcttcatcctgcttgggctctgacwctccatgcaggtcctccatcccccagcaataatgtccatcttaccctacttaggatctgagttccctcactgggctaccccaccacatggacaccctccttatcatgcttggtctctgaaaccacaccaggtctaccctctgcaaggatgctctctctcctcatcctgcttaagtgctgagtcccaaccccaactgggccaacactaggcatgggtgccctcctcacctctcccacatgctgacatacataccaggctggccctagagtactctgctcagccatttgcgactctgactccctatagaaggtaacctcatacatggatgccctcctcaccctgcttgcactccaactcactgcacctgactatcccaccacatagatgccttctttacctctcagactctgacctctcacatcaggctacccctactatggacaccctcctc

SEQ ID NO: 473015 - DNA, 615 bp, Homo sapiens
gatggaaatgtctgtcctttttaatatcatggaggctgctagagttctaactagggagagctcaccaactaacaaggcactgaagagcccacagcttggggctcatggggacaaggtcaggagatggtgggaggggatgcaaatttagaagttccacctacgaggatcccgatatggcaagtacaaaatgcccaattaacctttttctacatgttttcttccaatggtgtttaagttcacaggacatagacttttttttttgacagggtctcactctattgcccaggctggagtgcagtggtgtgatcacagctcattgcagccttgacctccagggctcaagtgatcctcccacctcagcctcctgagtagctgggactacagacatgctctagcatgcctggcattctttcttttttttgtggagatagggtctcaccatgttgcccaggctgatctcaaactcctgaactcaagcaaccctcctgctttggcctccyaaagtattggtattacaggtgtgagccaccacacctggcccacaggacatggattctgaacaactggcataaatcgactggcctcaaggtaaggttttaaactaagcttaagctt

SEQ ID NO: 473016 - DNA, 563 bp, Homo sapiens
tacctctgaagaaaactcactttgacgagaactggcttgatgagcgtgtcacttcggcccttttggggaacaaaccccttctggcccccacatggttcattgctgtccagaatctttgtactaatagtaaagttaatgtgacctgagagaaagaagaagggaagccattagccctattgccagaggtaccagtgaggtccattcccatttggatcagcatttctgaaactttaatggggatcttgcaacagtgcaaactctgctgccatagacctggggtggggcccatattctgcatttctaacaagctcccaggtgatgccagagaggctagtccagtgtggtaggtaacctctaagggccctcagagatccctgcatcctgatatttacatccattgagtgtgagctggattgagtgactcgcttctgttaaagagaacagggtgaaagtaatgactcttctgggattaggttacaaaaaagactgcagcttccatcttgggygcaccccttttctcaaactgcttgctctggggaagacagctgttgtgtgatgaggca

SEQ ID NO: 473017 - DNA, 504 bp, Homo sapiens
gatgttccagtggtgggtttttgcktcatcagcacagagacaactggaggtctgagaatctgcccatgattctagctggtactcatgcgatttagccaggtcagtctgaacctacggaggatgtttaagagacaaagggtacaaacaaaggaggtagtgcatagaggcctggggaaacctgggggctgagacgccgacatctcctctctttcccagggaaaattgggatgcttccaatttagagacaaacttatgggggaggtgtgattccagggctgacacctgattcctgtatccccagctctcaccctgatgcaatcctttaggtaattgaagatggtggcagtaagacgaaaggattccccacggactactgagtaagggagagtcaggtcaacaaagaacggcttgaaagcagttagtccaacagtgggtgaaagcccgaagcctcttgactgggaagtgcagaaactcatcgccttccactcggtgatggcgtcagga

SEQ ID NO: 473018 - DNA, 504 bp, Homo sapiens
gatgttccagtggtgggtttttgcgtcatcagcacagagacaactggaggtctgagaatctgcccatgattctagctggtactcatgcgatttagccaggtcagtctgaacctacggaggatgtttaagagacaaagggtacaaacaaaggaggtagtgcatagaggcctggggaaacctgggggctgagacgccgacatctcctctctttcccagggaaaattgggatgcttccaatttagagacaaacttatgggggaggtgtgattccagggctgacacctgattcctgtatccccagctctcaccctgatgcaatcctttaggtaattgaagatggtggcagtaagacgaaaggattccccacggactactgagtaagggagagtcaggtcaacaaagaayggcttgaaagcagttagtccaacagtgggtgaaagcccgaagcctcttgactgggaagtgcagaaactcatcgccttccactcggtgatggcgtcagga

SEQ ID NO: 473019 - DNA, 597 bp, Homo sapiens
taacgtgtttaatttccatatgtgcattggtctattgcaaggtcccttagtctattgtatcgtgctttttatgtrtgaataccagtctttattcttttggtactatgggtagatatctgatagagcaagagcctctctaccttgtttgccagaattgaattgcaatttgtattcagtgttttactattgtgagcaataatactataaacatcctgtgaatatgctttgctttatatactggtgcctttgtcttgataagtctcatcaaggttggaattgatggaacaaaatacatatttaaaaaaatgtatggccaggcacagtggctcatgctgtaatcccagcactttgggaggctgaggtgggaggatcacttgaggtcaggagtttgagaccaaagggcaacatggtgaaaccccatctctactaaaaatacaaaaattagctgggcatggtggcagccacctgtagtcccagctactcaggaggctgagacaggagaatcacttgaacctgggaggtagaggttgcagtgagccaaggtcgtgtcactgcacttcagcctgggcaacagagcaagactccgtctctaaataa

SEQ ID NO: 473020 - DNA, 597 bp, Homo sapiens
taacgtgtttaatttccatatgtgcattggtctattgcaaggtcccttagtctattgtatcgtgctttttatgtgtgaataccagtctttattcttttggtactatgggtagatatctgatagagcaagagcctctctaccttgtttgccagaattgaattgcaatttgtattcagtgttttactattgtgagcaataatactataaacatcctgtgaatatgctttgctttatatactggtgcctttgtcttgataagtctcatcaaggttggaattgatggaacaaaayacatatttaaaaaaatgtatggccaggcacagtggctcatgctgtaatcccagcactttgggaggctgaggtgggaggatcacttgaggtcaggagtttgagaccaaagggcaacatggtgaaaccccatctctactaaaaatacaaaaattagctgggcatggtggcagccacctgtagtcccagctactcaggaggctgagacaggagaatcacttgaacctgggaggtagaggttgcagtgagccaaggtcgtgtcactgcacttcagcctgggcaacagagcaagactccgtctctaaataa

SEQ ID NO: 473021 - DNA, 615 bp, Homo sapiens
gtacaactcagaaccatctgaggagccacatcaatgagcgaggaaagaaagaaggaagcatttttccatggcttcccagcccccatttgtcaaaggctttccccatggggtgttgactccgccacacttctggactgcccttgcatcagtgctgagtggatttcctctaagtccargcaatgatgtcaacagagaagccccaaggtgagaggctagagaaatggggcatttatcagggtgcaccggtgagaagctgactggaattgacccacaactggttactccagcagtggctagactaagagataggtggggccaagaggacctgaagaggtgttcaatacagtctttgtgatgcacatgtaattttattactggctttttcactgaacattatatattttccatattgatcaatatttctcataagttttaatggttgcttgttaattttctaagtagatggaaagaggcacattttgaatataactagtttctacacattgtgtcatttacaaaccagtgacaagtcagcccgctgaaatgacctatgaagggtcattttatacctttgtagcatgtaaggaattgcctttcctcaacccatgtggggag

SEQ ID NO: 473022 - DNA, 269 bp, Homo sapiens
tgtgggacttgccattgcctgctatagtattggtgggaatttgggggtcatttctgcagtttccccagattctatagtcrgactggtcccaggacatcagagaggtctcatctgccaacaggagctcttggtggccatgccagccttgggcagggccccctctctggtcagatggtgctgcccttgtgacttgagaggcaggcccacgctgagggttttttccctttttccttggctgtgtccccgttccccagtaccttgggattctc

SEQ ID NO: 473023 - DNA, 516 bp, Homo sapiens
atgggcctttctgcatatgcattccaccgttgcccatacctaatgtaatcactgaagagatgtcctcataatgaagcatgtcacccacccctcctccacccttctcatycccactctcccttatctctgttgtcatatccacttaagtcccatctccagcctcctttttcacctttaatgagagccagcagatggaaaagcagcctgagactctttacacactgggaccctgaataggattcagtaattagcaacattcataagatgtcatgggagccagtttacaaggcaaccaaactatctcctcagtggttccaaggctcagagtgctgacacccttctaaggacttttgagagaacttagcatacaaagtgctgatggagacttaacatgcaccccctactaggctaaggtacttttataaacctcacttcatttcaacatcacaaaaatcctagaagtggatttttaaaactttttcttacataggtagggatacagaggctcaaacaagt

SEQ ID NO: 473024 - DNA, 565 bp, Homo sapiens
gctgctcctatacctttgacctaagaaggattcaactctatagataagcagtggtaagagcgagaaatgacacccatctagccagccagatcagttgaatcaaacctgaygttcagtggggtaacagatgtcgcagccagatagtcatcacatcctcaattgcaaattattatttaataccattgttatagtccatttttaatattgttcctcaaaatacaataatgctagcattatcagtgtaaacaaggtactgaataaagacagggccccatatgctactacaatgggagagattttcaaatctctcaaataatgttttggcactattcactgtgcttattatcactgtgatcacaagaaaagagcttccacaagatgtgttttcttccctaaagtgattcctccagggtgtgtgtgtgtgtgtgtgtgtgtgtgtgtgtgtggctgatagcctgtaagttgcttccattaaacactccattccccaaagcctttcattattggaatgaacacactaacacgaacagactcatcctgctcttttcctggcaacatgttaact

SEQ ID NO: 473025 - DNA, 558 bp, Homo sapiens
cagagtatcttcctattgtagcctgagctctcagaagctagaagagggcttgagtgcagagtgcagcatattagagagcacactcattaagaaaacaaaaacaaaagaacaaaaaacaaacaaacaagagtcttcatctgtcacacaggctcactgcagtctcaaaatcatgggctcaagggatcaccctgcctcagcctccaaagtagctagaactacaggtgtgcaygagcataactggctacttttttttttttttgtattttttctagagctggggtctcactatgctgcccaggctggtctcaaactcctgggctcaagcaatccacctgtctcagcttcccaaagtgttgggattacaggtgcgagctgccacaccccgcctatagcatgcactcttgattttctgagaaacgatcaacaaagtttaaccctgctactgcctaagctctcaaagtgtctgtcaaactcttgagtttatatgtatttttgaagttcagtagttgaggtcaaaacacccacctttggggttggatctgatcgaatttgatgtta

SEQ ID NO: 473026 - DNA, 558 bp, Homo sapiens
cagagtatcttcctattgtagcctgagctctcagaagctagaagagggcttgagtgcagagtgcagcatattagagagcacactcattaagaaaacaaaaacaaaagaacaaaaaacaaacaaacaagagtcttcatctgtcacacaggctcactgcagtctcaaaatcatgggctcaagggatcaccctgcctcagcctccaaagtagctagaactacaggtgtgcacgagcataactggctacttttttttttttttgtattttttctagagctggggtctcactatgctgcccaggctggtctcaaactcctgggctcaagcaatccacctgtctcagcttcccaaagtgttgggattacaggtgcgagctgccacaccccgcctatagcatgcactcttgattttctgagaaacgatcaacaaagtttaaccctgctactgcctaagctctcaaagtgtctgtcaaactcttgagtttatatgtatttttgaagttcagtagttgaggtcaaaacacccacctttggggttggrtctgatcgaatttgatgtta

SEQ ID NO: 473027 - DNA, 495 bp, Homo sapiens
ttgtgtgtttcagggatggacaagattgaaagatcactgaaaggaaagaacagaatgaagtttcctgttacctgcgtcacaccattgctattcttcggccagttgtttttctgccacctcttagatttcattctctggttctggaaccaggtcttcacctgcaggaaaaaatgatagaaattgtaaaatattcrtaatacagaggtactttgaatcaaagtatattgctaacttttattcctggccaggtgccatatctcatgcctgtaatcccaacactttggaaggccaaggcgggcagattgcttgagcccaggagttcgctacaggctagccaacatgaggaaacaccgtgtctacaaaaatacaaaaaattagccgggtgtaatgctgcacgtctgtggtcccagcttctcaggaggctgagacgggaggatcgcttgcacctgggaagtgaaggctgcagtgagccaagattgcatcactgcactccag

SEQ ID NO: 473028 - DNA, 633 bp, Homo sapiens
actaagacactcacttttcctatttctctggatattcttctttgtctcttttgccacttcatcctctgcaaacaatacattcaaagttggactttttttttwttattatttttttgagacggagtcttcctctgtcgactctgtctcaaaaaataaataaataaaaaaatataatctgatcctttcaccacattgctttagtgcctttaatggctctttctgctattggataagttaaactctcacttcaccctgcgtggtctgaccactaacttcctcttacacaagcccaatatctccacctggctagctataaaatagaatcttaaaccctaaggactgcttttctcattggtttctttctttcttttgagacagagtctccctctgtcacccaggagtgcagtggcgcaattgagaggtgacagcgtgctggcagtcctcacagccctcgctcgctctcagcgcctcctctgcctaggctcccactttggcggcacttcaggagcccttcagcccaccgctgcactgtgggagcccctttctgggttggccaaggccggagccggctccctcagcttgcagggaggtgtggagggagaggcggggctgcgcgcggcgcttgcgggccag

SEQ ID NO: 473029 - DNA, 624 bp, Homo sapiens
agaagacatgtcattgttttatgtaccaccattaacaagtatcattattttaattggtcagaggagagggaaaatatgatcatcttaataaacagcaaaaaatttgatagtttttaacagagattttattacaatactatacacaggaagataggaaacaaatattctccctgaagaatatttttaaaagaatttatctcaaagctagagtcagtattacgtttattgttaaaacactagaaaacactccatttgcaaagacagcagttacgatcaggattacttaacactttgaatgttcaaaccatttcattatacaactgataccaaaaaagaattacaagtagtaaaatggagaagtaaaataatcattataagtcactatatgcagatgatataattttctatctgcaaagccaagagaatgagcaaagcaaatgtggtagtttagtaaggcagctggcttctaattcaacaaacgaagcaaattasttttttgcatacacgctaatcaggtactaaatattatacaaaaattaaaaacacttaatataggtactaaaattccatattcttttatgtactttatctaccagattgagatgtaagtttaagaagcctatt

SEQ ID NO: 473030 - DNA, 624 bp, Homo sapiens
agaagacatgtcattgttttatgtaccaccattaacaagtatcattattttaattggtcagaggagagggaaaatatgatcatcttaataaacagcaaaaaatttgatagtttttaacagagattttattacaatactatacacaggaagataggaaacaaatattctccctgaagaatatttttaaaagaatttatctcaaagctagagtcagtattacgtttattgttaaaacactagaaaacactccatttgcaaagacagcagttacgatcaggattacttaacactttgaatgttcaaaccatttcattatacaactgataccaaaaaagaattacaagtagtaaaatggagaagtaaaataatcattataagtcactatatgcagatgatataattttctatctgcaaagccaagagaatgagcaaagcaaatgtggtagtttagtaaggcagctggcttctaattcaacaaacgaagcaaattacttttttgcatacacgctaatcaggtactaaatattatacaaaaawtaaaaacacttaatataggtactaaaattccatattcttttatgtactttatctaccagattgagatgtaagtttaagaagcctatt

SEQ ID NO: 473031 - DNA, 560 bp, Homo sapiens
agtaggagtacaaatattgggtcttatgaggtgatcctccatcataatcagattatgtcatactcagccaaaggaattctttcaattgataatcctaggagaagtgtctgaaaattgtcagtgcctcatgcccttttcaaaattagaaacatcaaagaataatttttgcacttttatatttatataaaatattattaaacttaacattttacartttaaattcacatttgaaatgtaactgtagtttaaaaattacatattactcttttttcattctacgactctgatttcatatacatttcttaagaataaattatatatttaatatacttatttgtattatgttgttaacttttctaatcttttttcttgaagtttcaaattctcttttgttatcagcaagtagagtcataccagagatattttcttcaatcaaacattatgtcaaatgactttgagaaaatatgattagctatcagcatattgtaagggaaaattagattgtttagattgtttaacaacccttgaaagaactcattaaaaaagtgttaaaatattaa

SEQ ID NO: 473032 - DNA, 536 bp, Homo sapiens
gcttatgaggcaagagtactgaattggggaagtttggagacctaggtttaatcccctcctttgtgtcagttgtgttattgtgggggaaagcactgacctagtatccagaagatatgaggttaaatcacaggagaatttatttttattttaaactatacagacagagtctgttaaagggaattaaacaaattaatgagtatatgtgtctacacatgcaggtacaccaacaaacacttgtcagtgttcaattttaagcagttrtactttttagtaattaaatctagcaacataaaaatacatttaactttaatcattaatactttctggaggagaaaagaccagaagttggtctcccacccctcagcctctatgattctgtgctatgttacagtcttggaacaggccccacctaggtcttcttaatcaaacggagtttctaatctcccccaaaaatgtctctgtcccaaaaaagagggtgaagcgtgggcataagaaggtgaaattgtagttctcagggctgtggagttgtatgttta

SEQ ID NO: 473033 - DNA, 572 bp, Homo sapiens
ctgtaaaatcagttgaagaatctgacaaatgcctttctttgtggttcatccacccactttaacaatgtggaccaaaaaaggaaaaggtctcaaagctatttgattgacatctacaaatatgctgccaagactggaacagagtaggtgggatggagtagatggggttggggtaggtcttctgaaaaccaaaagaataaaatttattttctttgctaccctgtggttttttgacactgaagatctacagtacaaccccatagtatactgccttgtccttgccaaaggttctagggtccctgagagagcaataagtgagagaaaagtatccagagaagagtagaagctaacgatttagcaacctataactctgacagctccattgcctaatttctggagttacttgttttggcataagaagcccactttataaaaattccagatggagatttcaattttgtaactacatagaatatttcttctttttttctttttttttaacttttattttaggtttgggggtgcatgtgacacggrggtttgttatacatattgtttcatcaacaagttataaa

SEQ ID NO: 473034 - DNA, 501 bp, Homo sapiens
aagctccccacatcagctattagctaagcataaatgtgctattctttaaatggtgaggagtgaattgtgtgtgtgtgtgacagagagagagagagagagagagagagagagagagagagaattacccctcttaaaacaattcctaataaggaaaaaataaaataataatttcattagtaatgaaaatagttaaggtaaatctgacttaaccaaaatcctgtagtcactatctatcttttaattttctgtaacagtggcatataagtttaaaacctccgatttaggctttgagaagtagaaaggagtctgccaattgtttatctcctcttatttcccagttactaatccagatgtggtccttatttcttctaagtgtcgaggcaaaacaaacaaaatggtatgtttaatcttatttwacaactgtgaaaactgagctgagagaagtttagcaacttgggtctgtcttatgcctaagtatatgatctttatggtactactctc

SEQ ID NO: 473035 - DNA, 451 bp, Homo sapiens
caaaattaagtgcatattgactgcactaggtgatagaaaaaaatctgattttatatacatccacagcaatagtgttatttgtcatctcagaaaacttatctaccagttcttttaattcttcaaggaaaggcagttggtgctttrttcttgggaaagtattgaggttttattttgtttttataagccatattccgtgatgtagatgaaatctgttttctctccttgttcattggagacataacaagtgttcaaggccacctctgtggttttccttcttgctacctgattcttgataagttgtttattctaaggactgaagcaattaggtttgggatccatttcagctctgtatagcctagaatgaaaattctgatctttatccattttcattgtcccaattactttatcttttcttctcttccgtcacttcagcaagagtagcagtcccagt

SEQ ID NO: 473036 - DNA, 573 bp, Homo sapiens
ctgctgtcccacccctgtctgcctactgagaaggagatttggcattgggaggcacaaggtaaccttgagattaacttagtttttttttttaagcagtgctgattttttccctaggtagtagaattgagggcttgagcttgttagatggattgggtgaaaacacgaaagatacatggacctcgttcctcatttccacatatttattaacttcccagcgaatgcccccaaattggaccataccctgtggccttgtcctatttaaaatgggccctgagatactttacatggtatagccaccttcactgtctaccttctgtacactcgtgattttttgccatgactccagctatcttgttgttttcctcacctgcttctataagcttgttgtgaggccttgtctgaggagagttccagggtgtattagcatcaagaccacttcttcccttccctggttctgagttactcaggcctgtctgtgtgcagccctctcattccttgccctttttttggcctatatkaactctggccagcagcatgcagggaaagtattaaaaacctttttgttggagggca

SEQ ID NO: 473037 - DNA, 556 bp, Homo sapiens
tggcccctcgggccttggactcttctatgagtcaaagaacacttggctgcttctccaaagatcctcctctgcctccagcttccttcatctgaaagagcaaggtctcgagtctatagcccaagagatcctaagggacaggattggcccctactttgggtgtaatgaggtgggggtgggagggcgtggggtgagaatrgaggtggagttggaaactgacatctgtgattttactctcttactttccagctctagcttcaggtcaggaaagctctggggagtccagttctcccagatgatgaattcaatgctccagatgacatcatgcacctgaatcatttccgtatctttcttccaggagcctgcagaattccctggaacccatattcaccaagcacttactacatgtcagggctcatgtatacatgtgtgatcttattcatttctcacaacgggcttgagaggttggcattggtcccactttagtgatgagaatcatgagcacagagaggttgggtaacttacctcaggtcacccagccagtaggtggctgagctgg

SEQ ID NO: 473038 - DNA, 256 bp, Homo sapiens
ccttcttttcccctcttctggacccacctttttgccatctcaccgttgatgagcagcttcagcttagagggtaaagacaggcatgatcgcgactggccagcayactggccggttctctctgttagcagacttttgccaagggtttggatggaatgggtggctcttcaggtggaaaacaggtcgtgggggtcaggttttgggtgcctgaaactgctcttccttcactccactgtgccatgactggctcccacccgaa

SEQ ID NO: 473039 - DNA, 666 bp, Homo sapiens
gcccgctgccggccttcccaccagccaggccgtggcggccccagcaggatccgcatccctactttggacaggagctccgaaagcaagggctgcttgwctgtgcagagcctgaggcccaagaacaggtagcagggcccccttctttccttctgcaggcccctggagacctccagggcctctggggcctagcttgcccctcacgaggccacgtgtcttgcttctttcaaagcggaagctcccaggggtctgtggctggcttctctctttctctcacgttgttgaaggcactgaattcctgagggtcctgtccttccctgcccctcgtcttgaagggagcgaggcattcagcagggaaacagttggctaataaatagagggcaggtaccagcaggagtcactgaagagtgtgacggtaataaatacacgagccgggtgcggggtctctctcctccaaggggtgggttacctccggggaacagcatcgccgcacctgccagagaccaagcacagacggggcgggtatcagcacactgtggagggtgcggtctcctcctatggaggagggggcaggcccagaggaggagcttgggcagggagcatggggagggcgcagtgctcctgggtccctgcttgcttcaagctgaggagaagctgggagctaccctt

SEQ ID NO: 473040 - DNA, 548 bp, Homo sapiens
ctaggcatggtggcttacacttatagctccagcactttgggaggccaaggcaggaggatgtctagagcccaggagttaagatcagcctggcatcacagtgagaccaatctctacaaaaaattcactggcatagtggcgttcgcttgyggtcccagctacttgggaggctgaggcgggaggatggcttgagcccaggagtatgagaccagcctgggcaacatagcaaggcccggtgctctacaaataataaaaaaatgagacaggcatggtggcacacacctgtggtcctagccacttgggaggctgaggcaggacgatcacttgatcccaggaggttgaggctgcagtgagctttgatcgcaccactgcactccagcctgggaacagagcaagaccctgtccctaaaaaaaaaaaaaagaaaataaaaaaaaaaagagagagacagagagagaatgacagggaggggatagccaaggaaggggtgaggccagaggtgtctccagttaaaacaggggcagtagtctgatttgcagatgccaccatggtg

SEQ ID NO: 473041 - DNA, 508 bp, Homo sapiens
tgtgtcgggcctctgtgctccgaatcctgtcccgaggctgttgcacgtggccttgggcgtcctccagagagacagtcatgctccacggccacgtgcgtgcgtgtgtgtgtgtgtgtgtgtgtgtgtgtgtgtgtggctctggcacatgcctgtgtgaccctgcagggctgtgtccaggggacctagggggacaggagagagctcaggggctgtctgagccgtagggggtgtctgtgattttcagtgtgtgtggccctgtggtgactctgagtggcaggtacatgtgcatttagaagaagcccctggggcccagcctcccccagcccccagccagcctggtgcatgttcycaggacacacccaggcctgaagagctcataagtggagatgagtccccaccagccttgcagtcctccgttccctctcctcctctcctttcctccccctttctcccctcctctcccccttggtcccctctccctgccgagtacaaggggagaagcagcctc

SEQ ID NO: 473042 - DNA, 319 bp, Homo sapiens
catttttctgactgacagtgagactgagggcttttctccccgacagccttaggcgagtccctgtaccctgaggctgtgggagcctgmagagtggtcccagggcacacagacctcccaggaaatgaacatgtgtgtgtgggggatggctctccgaggatcccagtcaaggaactccctgccaaaggccgtccctttggaagcatgagtgcccgggcatcgggaggtccacctgcgcccggcgcacccggcgctctgcttcccttgcctgaaccttaggaggcagacgctgctgtgttgtgatcagtgtctctgcactgcg

SEQ ID NO: 473043 - DNA, 490 bp, Homo sapiens
aatgacccacaaatacaggttagggatagactatggggctctgtgcytagagagaggagagtcacctaaactcctctttaccacagcccaatccaaatgagggtaattccaaagaaactaaactcaaagccagaaacagcactgctaggttaggcaagaatttgactcttccaaggtgaggagaaacagaggatggattaacacagtcttccctgggaaggaaactgggagttattttagcaactagggccttatagatcctggactctgtgtaaaaagtaaagtagaggttcctcttcaaagactttcctccccatctaattatgaataaatagtaacttctcttagaagcaaaatttattcaaagacctgtgctcctaaatatttgccctggcatgcttatactggtccaagcaagcattaggtcatagcctgttcctcttccttatttaaaagtgtttttacctttctcagcattccacaagttact

SEQ ID NO: 473044 - DNA, 636 bp, Homo sapiens
acaaaagtacgatgttctgtcagataaagatgtctccctgtgccagagccacatattttacacatgatcagaggctttcccagggaagcattgctctgcagcccttccacagacttaaccctgagaatttgacttagaagrtcactgatgaacacacgcccaagcgttctgatctacatgaatcctctcttaatggttccttccagggatctgggatctttcccaaagtcatctgtcacacacagattgactcaaaaatgtggacaaaagctttgatcctcactggcacacctgctctgtcttatcagcttctctagaagtatgctgctctaattgctcctgagagaccccatcttaaggtatctctctgtgccaacataattgatttcataaagtgggaagagaataggcaagagtcaagctatgctgggggctgtctaagattcccttacctatgtctctaatttacgcacatattgactaatacagattcatctctaagtggtaggaaatgggaaggaggagccccagttctcagaaagagaagccccagttcacagaaggagaaaatgtaatcaatgctgcctagcttccagcttcagcttacctatgggggactgagtctcttctgaaaaa

SEQ ID NO: 473045 - DNA, 567 bp, Homo sapiens
gaggctttcccagggaagcattgctctgcagcccttccacagacttaaccctgagaatttgacttagaagatcactgatgaacacacgcccaagcgttctgatctacatgaatcctctcttaatggttccttccagggatctgggatctttcccaaagtcatctgtcacacacagattgactcaaaaatgtggacaaaagctttgatcctcactggcacacctgctctgtcttatcagcttctctagaagtatgctgctctaattgctcctgagagaccccatcttaaggtatctctctgtgccaacataattgatttcataaagtgggaagagaataggcaagagtcaagctatgctgggggctgtctaagattcccttacctatgtctctaatttacgcacatattgactaatacagattcatctctaagtggtaggaaawgggaaggaggagccccagttctcagaaagagaagccccagttcacagaaggagaaaatgtaatcaatgctgcctagcttccagcttcagcttacctatgggggactgagtctcttctgaaaaaa

SEQ ID NO: 473046 - DNA, 637 bp, Homo sapiens
ccattctgcaatgataaataattaaacaattatggtcatgaatcaataagtttagcacattttttcatcagcaaattgcactgtataaacaagaaatataaattaccaagtctaatttccccctaaaattataagcattttatatctaataattaaaaaagtrttagaattcaattttggatagttagaactttaaagaattttcagtttccaccaaacaccattaaattgtcatgttttatgtctctgaatctgattaacattttgagatctggcctcagaaatctttctttgttagctcccagagacgctccacccaggctccagcttctcaccatcctcacagacggcgaatccactgggctccggcttccaagggtctggatctgcgggttccactggagagcgaggatttataggaatttttgattgaaagcacaggtgacaaacccaaggcttgtgggctctgcacaccctccacagtcttttgtgtggcctgttggcagtttgatttttacgtttttgggggatgttgtttgctttgtctttaagtttagatgtccgggttttgttgaggaaaaagaaacccacaccagatttacagtcccctagatcccccatctcattctgtgcagca

SEQ ID NO: 473047 - DNA, 596 bp, Homo sapiens
ctgccagccccagccaaggcgtttgctgaccctcagctccaggaaggcctgggtgaccttaagtctggcacacggggcaatgaactgtggtagctgccaggggtgggttcctgagggccaccttctcagcagccttctgcctaccccacctggcaggacatggatgtgcgtgcaggcctgtgtatgtctctctgtgtgcaactctcctctttggtggattcagggtccttgtgtcatttttcaaggtgtcagtcaagaagcatccttagactggagtcagagcctcatgtcttcaaccagtagctggggaaagctcataataattataccaatactaaggcatggctggtattatccaaartgagaaaagaagagagtaggctgaagaggccaaatagctcccacaaagtcacacagcttgttagtggtgcagacgacagcccagctctcctgaccctgggcgtgggtttttgcgttcatgtctcatgcccctgtcaggaaagaaaaacacacgagggtccttggatgaccatatatggcaccctacaaatgaaagctactgtgttattatcttgcactcgcagtaagtgcctcat

SEQ ID NO: 473048 - DNA, 560 bp, Homo sapiens
ctgaaaatcaaatcagttagagctaagtgaagcttagagctcatctgtcccctgcttaactgtatatatgatgaatgcaaggcctggaaaggggagtgacttacccaaggttatataactagctggtggcagagccaccattaggggtcacttctccgaatcccagcccagtgtccttcccaccatactatgctcttgaaaaatgatggaactacatggaatgactgaatattctgtattgatagactctaaaataaaaatatttcccacccatctctgtggtatgggtagatctttagagctattaagaccctcccctaccaaaaaaataccatacacacacacacatacacacacacacacacacacacacacacatacacacacacaggcactttgccaaggggataaggggtaatgaaaaacccttggcaagtggatacttcaaagctttagagagtttatctgaagaagactttgaatagagtgcaatgttttatgagttytcctaatccctcagtaaatgtgccttgctgaataagcagaaacatttttaatga

SEQ ID NO: 473049 - DNA, 644 bp, Homo sapiens
ctggtaagccccaacatcgtgtatcttaaaaagctaatgaggccaggacagaattgccatttaaattctttagtaacatttcctcttacagtctgagctcttatcctctgacttgtttccttaagtttctatcaagctcctcagtcaggttagttggaatattcccatgcttcttcctttttctgttagagaataaggtctattatataactccttcatctccttagaaatacagatagcctatcagcagttttggaaaaacatcccaactgattttagggcattgaggcgtttgatgggaggaagctatctatacaaagagtgaatgctgtacaaacagcaaactttacagggaaaaagttgatatttatagatactcatttataccccagggcaagacagacagacagayagatagatagatagatagatagatagatagatagatagatagatagatagcaatatattgatatctgtttatccattgagtcaaacaaataaacacacatagattacaaaggtccttttctcttcccatgcctgaagagaaaggaggcctgtggtttctttccatagatatgcatcactcctgaaaagcacactcacatcttgtttatatattacagccttccgctacttca

SEQ ID NO: 473050 - DNA, 566 bp, Homo sapiens
tttgaagatctggcatcttgtccagcctcagagtcattatttagattatcatttgggtcatcggtgacctcagtgctgtggaccctgggagaaggactgaggattagagccagaagacgtgggtttcaggattggctctacttagtagctgggagattctaggcaaattgctttttwaaaaaaattcaaaattctctaaatctgtttcctcctctgaagagtgagaataagacgcaaacctacctacttctcaggattatgtgaagattacaaaaatcctctgtgaaagcatttccatcaacctcaaactctccacaactctaagagctggaggcacctgaaaccaggctgaatctgtacaaatgggacaggtgggttctaaaagttcatttataaaaggaacctcccaagtgagtctaacttcttgttctttatctctttgtcctgtaaggggccactggaaaaaaatgagtcaaagttttccattcaagtgaattttcagatagttgtctgcatcctcacagaacagacaaagaaatcaagactttacaagttgtttatttgtt

SEQ ID NO: 473051 - DNA, 566 bp, Homo sapiens
tttgaagatctggcatcttgtccagcctcagagtcattatttagattatcatttgggtcatcggtgacctcagtgctgtggaccctgggagaaggactgaggattagagccagaagacgtgggtttcaggattggctctacttagtagctgggagattctaggcaaattgcttttttaaaaaaattcaaaattctctaaatctgtttcctcctctgaagagtgagaataagacgcaaacctacctacttctcaggattatgtgaagattacaaaaatcctctgtgaaagcatttccatcaacctcaaactctccacaactctaagagctggaggcacctgaaaccaggctgaatctgtacaaatgggacaggtgggttctaaaagttcatttataaaagraacctcccaagtgagtctaacttcttgttctttatctctttgtcctgtaaggggccactggaaaaaaatgagtcaaagttttccattcaagtgaattttcagatagttgtctgcatcctcacagaacagacaaagaaatcaagactttacaagttgtttatttgtt

SEQ ID NO: 473052 - DNA, 631 bp, Homo sapiens
cctgggtgagtctctggacatggattctcacattttttatttaagaatcagagagatataagaatgtcaaggaaaaatcctctcatggacaatgcagccccagtaaatgactgtcagccggcgtgtccagggcttcaaggccccaggaagtggccatgctggggctgccaggcctctggctccagggtcactggggctgaactstctgcccaggcccggagacaccctgcccctgaggagcccaccggcttggccagtccatcttcttggcactccctgaccaccacttaccttctagtcggacagtggagcctggggggacagcgtggcagagtgcctgatggtcggtgacaaagtcatctccaaagtccttgctggggccaagagccaggactccttgcccgtccccgtcactgccctgtgcccgcccagcacctgctggggactaggctgcccattggagaaggaaacacagtgctgggctgtgagctcctgaagcctgtctctgtgccccaggaccaggttcctgggtggagggagagaccaggggcaggtgaggaaaggcagggcccccagaatccctccatgcctgcccctcagtctccaggacttatgtgcaggtaccggttgg

SEQ ID NO: 473053 - DNA, 631 bp, Homo sapiens
cctgggtgagtctctggacatggattctcacattttttatttaagaatcagagagatataagaatgtcaaggaaaaatcctctcatggacaatgcagccccagtaaatgactgtcagccggcgtgtccagggcttcaaggccccaggaagtggccatgctggggctgccaggcctctggctccagggtcactggggctgaactgtctgcccaggcccggagacaccctgcccctgaggagcccaccggcttggccagtccatcttcttggcactccctgaccaccacttaccttctagtcggacagtggagcctggggggacagcgtggcagagtgcctgatggtcggtgacaaagtcatctccaaagtccttgctggggccaagagccaggactccttgcccgtccccgtcactgccctgtgcccgcccagcacctgctggggactaggctgcccattggagaaggaaacacagtgctgggctgtgagctcctgaagcctgtctctgtgccccaggaccaggytcctgggtggagggagagaccaggggcaggtgaggaaaggcagggcccccagaatccctccatgcctgcccctcagtctccaggacttatgtgcaggtaccggttgg

SEQ ID NO: 473054 - DNA, 537 bp, Homo sapiens
tctgtgccccaggaccaggttcctgggtggagggagagaccaggggcaggtgaggaaaggcagggcccccagaatccctccatgcctgcccctcagtctccaggacttatgtgcaggtaccggttggagctgtggtgcagttcccagtctcaccaccagatggcaccatgcccctgcagaagcagtgcccagagcaggccaggtggttctcgggggctgcggyggaggaatccacccagccgaagctctggcagggaaggggcagtgctagggggagccccctccccacttggatccgaagttcccatggggcctagggcaggggcttgccaggtagccagaagttcccttgctgagtctacggtgtctatcccacatttcacatggagacgaatcatcccagacaccccggcactgtcccggggccgtttgccacccctcccaaggggcagggctcctgtcttggggccttcccaagcatagtagccttcgggcagccccggcctggccccaggttgtcccacttgtcagtgggca

SEQ ID NO: 473055 - DNA, 465 bp, Homo sapiens
agaatccctccatgcctgcccctcagtctccaggacttatgtgcaggtaccggttggagctgtggtgcagttcccagtctcaccaccagatggcaccatgcccctgcagaagcagtgcccagagcaggccaggtggttctcgggggctgcggcggaggaatccacccagccgaagctctggcagggaaggggcagtgctaggkggagccccctccccacttggatccgaagttcccatggggcctagggcaggggcttgccaggtagccagaagttcccttgctgagtctacggtgtctatcccacatttcacatggagacgaatcatcccagacaccccggcactgtcccggggccgtttgccacccctcccaaggggcagggctcctgtcttggggccttcccaagcatagtagccttcgggcagccccggcctggccccaggttgtcccacttgtcagtggg

SEQ ID NO: 473056 - DNA, 465 bp, Homo sapiens
agaatccctccatgcctgcccctcagtctccaggacttatgtgcaggtaccggttggagctgtggtgcagttcccagtctcaccaccagatggcaccatgcccctgcagaagcagtgcccagagcaggccaggtggttctcgggggctgcggcggaggaatccacccagccgaagctctggcagggaaggggcagtgctagggggagccccctccccacttggatccgaagttcccatggggcctarggcaggggcttgccaggtagccagaagttcccttgctgagtctacggtgtctatcccacatttcacatggagacgaatcatcccagacaccccggcactgtcccggggccgtttgccacccctcccaaggggcagggctcctgtcttggggccttcccaagcatagtagccttcgggcagccccggcctggccccaggttgtcccacttgtcagtggg

SEQ ID NO: 473057 - DNA, 537 bp, Homo sapiens
tctgtgccccaggaccaggttcctgggtggagggagagaccaggggcaggtgaggaaaggcagggcccccagaatccctccatgcctgcccctcagtctccaggacttatgtgcaggtaccggttggagctgtggtgcagttcccagtctcaccaccagatggcaccatgcccctgcagaagcagtgcccagagcaggccaggtggttctcgggggctgcggcggaggaatccacccagccgaagctctggcagggaaggggcagtgctagggggagccccctccccacttggatccgaagttcccatggggcctagggcaggggcttgccaggtagccagaagttcccttgctgagtctasggtgtctatcccacatttcacatggagacgaatcatcccagacaccccggcactgtcccggggccgtttgccacccctcccaaggggcagggctcctgtcttggggccttcccaagcatagtagccttcgggcagccccggcctggccccaggttgtcccacttgtcagtgggca

SEQ ID NO: 473058 - DNA, 656 bp, Homo sapiens
cagggggaggagtgggtggaaaggaagctctggtcaggcctccacagtgacaccctccctgccccaggacctacctgcatctgactacaagagcctacttcatggaagaagctattgagcccttgtccatgctagcacaggttcatgacagagactgtggggccatggcagggccccctcgagccccattctgtactgctgcccacatctctctctccagtgattccacctactgcattaagtctggggccttcatgtgctgtaagtatcattcatctactgtgacctctgagcacccacattgccaggcatccctgggctgttgagggtacagaggtgaatgaagaaggtgaacaagaagggggagaatggcctgggaccagggacccacaggacaccactaccctctctgtgaaggcgctgtgtggtctccagctttgacttgaacctggtcaactacttcctgttccctcaggctgacagcagagaaccgctgctccagcgaggtgggtgctgtcctgaagggtgttgaacaggcaggggcctgagccaggygccacactacctcatccagagattgctgtgcttccccttcaatgcaggaactgcaagatcctgggtgacatcactgccccacttgctggtgccaggccagg

SEQ ID NO: 473059 - DNA, 571 bp, Homo sapiens
cttcccttcaagatccactttctcatgatacagttttctaactgggcttacttggatgctagcaaaatgcaggcttaccaggatatcaaagcaaagaaagaacaggaactgcaagatatccagtctcagtacaaataataacttaatttttacacacaaatatttgccacagtgtttcagccaatgcatttacagctctgacacatcatcagacaactgctctgcagtacagatgcctatcccaccaaactaacgtagacgttcaaacacctcgctttatgtytcaagctgctgggctttttctttagagcaaatactggcagtttcatgttagtcattttaaaaggcaacactttgacaaaataattgttcataccttggaaatttgtggaaggttcatatttattgctagaggatttctaccaagacactctatggaatatgttatactccttgaataggtaactgtgacatgccagcatcaaaagatgagaccataaattcacatatatgccatctatcctaaaataagtattatctacatagaaaataaaatgaaattggtgtgaag

SEQ ID NO: 473060 - DNA, 571 bp, Homo sapiens
cttcccttcaagatccactttctcatgatacagttttctaactgggcttacttggatgctagcaaaatgcaggcttaccaggatatcaaagcaaagaaagaacaggaactgcaagatatccagtctcagtacaaataataacttaatttttacacacaaatatttgccacagtgtttcagccaatgcatttacagctctgacacatcatcagacaactgctctgcagtacagatgcctatcccaccaaactaacgtagacgttcaaacacctcgctttatgtttcaagctgctgggctttttctttagagcaaatactggcagtttcatgttagtcattttaaaaggcaacactttgacaaaataattgttcataccttggaaatttgtggaaggttcatatttattgctagaggatttctaccaagacactctatggaatatgttatactccttgaataggtamctgtgacatgccagcatcaaaagatgagaccataaattcacatatatgccatctatcctaaaataagtattatctacatagaaaataaaatgaaattggtgtgaag

SEQ ID NO: 473061 - DNA, 659 bp, Homo sapiens
tcaaggtaggctgaagaagctgatctgagatggtcgagggctgctcctacttaccttkcctatttgccaccctcacagttttgaaactcgttcaaaaagtaaatgcttttgttcacctctttaacagcaccatttctggtctcgttttcaacactacgtcctttgctttgcaggtaaaattgcttattttcttgcctttttatgactaaagtaggcttgcagtttggagtcaggtgactgcactagctgagtcatcttcccttgaaaacaccaaggcattcttcctccctacagagtcacacatcttagttccccaaaacgctcagccacaatttgacttcgattgtcctacatttaaggtgatatttttctgattctcccattaactccctcttctcttcgcacccatggcccatcttttgctgctgtctagtagccattcatcccctcccatcacaaaagaagtctgtacttccttcagacagagcaacaagaaaattccccagaaagcaaacaattaaacaaattttaattttgccttttttaaatgaaaattctgtcaaaattgatgaaccacatctggtaggagcacctgttttattttcacaaagagttttctgatctggacatttttgttacttactgctaatatggaaaat

SEQ ID NO: 473062 - DNA, 659 bp, Homo sapiens
tcaaggtaggctgaagaagctgatctgagatggtcgagggctgctcctacttacctttcctatttgccaccctcacagttttgaaactcgttcaaaaagtaaatgcttttgttcacctctttaacagcaccatttctggtctcrttttcaacactacgtcctttgctttgcaggtaaaattgcttattttcttgcctttttatgactaaagtaggcttgcagtttggagtcaggtgactgcactagctgagtcatcttcccttgaaaacaccaaggcattcttcctccctacagagtcacacatcttagttccccaaaacgctcagccacaatttgacttcgattgtcctacatttaaggtgatatttttctgattctcccattaactccctcttctcttcgcacccatggcccatcttttgctgctgtctagtagccattcatcccctcccatcacaaaagaagtctgtacttccttcagacagagcaacaagaaaattccccagaaagcaaacaattaaacaaattttaattttgccttttttaaatgaaaattctgtcaaaattgatgaaccacatctggtaggagcacctgttttattttcacaaagagttttctgatctggacatttttgttacttactgctaatatggaaaat

SEQ ID NO: 473063 - DNA, 581 bp, Homo sapiens
acattaagatctcatacctgccatgagtttacaaagtctatttgaataatccaacatcaaacattttttctaagtgttagctgtactcccctgcacacagcttgtgtagaatgcttctacctgtaagacactggagagacggtttggtgggagtcagagagcagaattaggaagatgggagagtatgaatttcccaatatgactaagtgtcatcgcgtgtgaaataaaccccaagatggtcatttcccatatgtgttctacttgtgttgtcactaaactgcatccatggtctggttattctgacagttacatgaacttgacaaatgtgggcaagacagggagggtgaggatgtgagctttcattcactctcccttcatcatagctggttgctcccagggcacgtagcccccatgaattctcctcctcctgatgccttccccaggctgtgactgctggtggggccttaacatatgaaatctgaggtgctactgaggctgtcatggaccagcgtcctcagcagcaaaccytgccctgacatccccaacagccttctcctctgcagactcaaagactctgctca

SEQ ID NO: 473064 - DNA, 488 bp, Homo sapiens
ttcttctctaaaatactatgtctrtaaaataattttaaaattctaagaatttgagaaggaaataaaaatcgcatgtaattctacatttttcctgtggtacatcacataaactttatgttttacatctgaattgtgttgtttattttcaaagtccacttttggaattgcaagacctccatttttctgtcagcaaaaggtaactgaggcatgtcaaactattttggtattattatcttacatttgacatggattttaaaaatccgtaagtggaaaaaaaatcaaataggttatctatttattctgagccatacttccctgacagctggtgtacaatgctttctccatcataatactagggagggcaggttcatgtgagtggtgaaggagacagaaagtttggaaagtgggaagatagcaatttcccagcatgaccaaatgttatcatgtgtaaaactattcccaaaccagtcgtttctaacatgtatttc

SEQ ID NO: 473065 - DNA, 488 bp, Homo sapiens
ttcttctctaaaatactatgtctgtaaaataattttaaaattctaagaatttgagaaggaaataaaaatcgcatgtaattctacatttttcctgtggtacatcacataaactttatgttttacatctgaattgtgttgtttattttcaaagtccacttttggaattgcaagacctccatttttctgtcagcaaaaggtaactgaggcatgtcaaactattttggtattattatcttacatttgacatggattttaaaaatccgtaagtggaaaaaaaatcaaataggttatctatttattctgagccatacttccctgacagctggtgtacaatgctttctccatcataatactakggagggcaggttcatgtgagtggtgaaggagacagaaagtttggaaagtgggaagatagcaatttcccagcatgaccaaatgttatcatgtgtaaaactattcccaaaccagtcgtttctaacatgtatttc

SEQ ID NO: 473066 - DNA, 611 bp, Homo sapiens
tctgccccccagccagtggctctgcctctgagagccatgggacagggagctgtgcagggtggggccagcagagcctgtgcccctgcctgagctagtcgtgatggggcctgccctgaccccttcccaggctcatgggtgcggagcagggcggggccttacagtgagatgggggcctctgtgggcagtcctggaggccaggccctggggctgggactcactggcacagggcctaagtttcctcctgtgtccgcaggccttattgcctgcaagggaggtggaggggcacaggggcggtgcccagcgtgaggagggggctctgaggaggctgcagcagccggcaggcctctgagactgggatatttttagccaggattcctgctgacggtccaggctggccggggtttgctgccagccttagaggcgcttctcctagtctgtgtccggacatctggggtctgctggccccacccaccctctgctcaatgcccccgccccactggcccatccagccaggcgaggggctcccaggaggcyggccatggtgggagcagagcctggggccctcggggtgtggctgagaagaggccacatgggctgctgggggctgcctg

SEQ ID NO: 473067 - DNA, 602 bp, Homo sapiens
ttaaaacatattggtttatggatatagcatatgattaaatggaatttttatgtttaaaatgaaatgagaggtaaataaatttacaaaataagtattaaagctgtataattttactcaccctttaaatacagggaggtataggtgtctatgtagatataaacctcccagttaacagatatgtatcaaagagattaaaggcaggtcaatttgcagaaatgcatttaaattgtttagggagcatatagaaagttattagagttggttaatggaacatgacaaataaatcagttctttcctttcttcttactgmcttttaaaagcaaataaagctaatctgattgcattaaaattctgaatgttgggcttggcagaaatactacacgttgatgaagtttagaaggggatgaaggaaatactcctttccctactcccatatctacctgagttctgaaggtaagagaaatacaacaaaagagtgtagatggaggccaaaacacaattattgctgataaagcttgggagggggatgtatctgggtatgaaatacaaatggcttccaattattggattccaaagtttaaaaagcttactaacccagtaag

SEQ ID NO: 473068 - DNA, 602 bp, Homo sapiens
ttaaaacatattggtttatggatatagcatatgattaaatggaatttttatgtttaaaatgaaatgagaggtaaataaatttacaaaataagtattaaagctgtataattttactcaccctttaaatacagggaggtataggtgtctatgtagatataaacctcccagttaacagatatgtatcaaagagattaaaggcaggtcaatttgcagaaatgcatttaaattgtttagggagcatatagaaagttattagagttggttaatggaacatgacaaataaatcagttctttcctttcttcttactgacttttaaaagcaaataaagctaatctgattgcattaaaattctgaatgttgggcttggcagaaatactacacgttgatgaagtttagaaggggatgaaggaaatactcctttccctactcccatatctacctgagttctgaaggtaagagaaatacaacaaaagagtgtagatggaggccaaaacacaattattgctgataaagcttgggagggggatgtatctgggtatgaratacaaatggcttccaattattggattccaaagtttaaaaagcttactaacccagtaag

SEQ ID NO: 473069 - DNA, 505 bp, Homo sapiens
gggcattttgtaactttttagaactcattttgactaggcaaaataaaatcttcaccaagtacctcagcaaatctcagggcaaattggagaaaccgtactcactgaactcacctgggcttgaggtgtggaagcaaatagtatcctttgttaaaaaaaaaaaaaaaagctttttgagttttgtaaagtaaaataagatttccagagatttatatattagtgctcattttcccccaaatcaagcccaggctattagttgacttttcttaatgaggagtwaattaatgagagacagactaatttctgaagtaactggctttactaggatgagtagaaatagaggtagaatgtggaaactgtaaaggatctgaactttgaccacacacaagagcagtgggagatgatactccattagttctttatgaatctatattccaggagccaacagtactactgtaaccttccttcctaaggagagggaagatgaggaatccaacagtcaaaccat

SEQ ID NO: 473070 - DNA, 594 bp, Homo sapiens
ggtgtgaaccaccatgtctggccactgcaaacgtcttttaaaatagtcatttacattagaactctctactcaaatttcacttggactgcagtatgtcgtcactgccgtccatcccttttctgttgacaccctggccatttgctaaggcattagaactgaaatttaggatgatggtgttaggccaggacaccactggaggacagtgctgggacatcttgtgccttcatcccagtttagatttgggcaccatatgttacaaatagcctttatgttcttcatagtttgtatcatattatatactgaataaaatgcatattaaacttaccatcttctgaaagagaaaatattcttgaggtaaagaagtattattaattggaaaatactgcatgggaaaggaagatctgcccaccaccatttcttcattcctttgaggagatgaaagaagaagtaataaaatcttaaaattcctattacaaatgtcattttctcttaagaaaaacyactatctttcctcaggggatgcaaagttgtctgcatagaggaatcacatgtaaattcagaagtgtgatgggctgacatgtctccccaaaattc

SEQ ID NO: 473071 - DNA, 604 bp, Homo sapiens
cagatttccctacaagctccgcctcgtcctcctgcaccagtgcttaggtatcaatccattacttttctctaatcctccaactcccctcttcagacctgcacttccccagttcctcccacaattgttcaagatctacttcctacagtaaaaccgttatcccataacattcatcgtgactctgcttctctgcctgaaccctgactgacactgttatgtacaaggcaggtttaagaaaagctatgaacaattcaaccagttgattctaagctgagactttatcctacaggaaatgaggaatcatcatgtaattttttttttttttttttttgagatggagtctcactctgtcacccaggttggagtgcagtgacacgatcttggctcactgcaagctccacctcccgggttcacgccattctcccgccttagcctttcgagtagctgggattacaggcatacaccrccacacctggctaatttttatatttttagtagagacggggtttcaccacgttggccaggctggtcttgaattcctgacctcaggtgatccgcccgcctcggcctcccaaagtgctgggattacaggcgtgagccaccgcac

SEQ ID NO: 473072 - DNA, 326 bp, Homo sapiens
tgagagcatccacccttccgggtcggtccgttcagccaatcacagataactcccttctctaattggtcaaggggtgtggtcaccatgmgcgtcaccgaacaacattacgagttattggttgagattggaagcaggtttcgccaataggaagcgctcttaaagcggcagtgagggtggctgcgtgtttccggaagacgtggcggctctcgcctgggctgtttcccggcttcatttctcccgactcagcttcccaccctgggctttccgaggtgctgtcgccgctgtccccaccactgcagccatgatctccttaacggacacgcaga

SEQ ID NO: 473073 - DNA, 326 bp, Homo sapiens
tgagagcatccacccttccgggtcggtccgttcagccaatcacagataactcccttctctaattggtcaaggggtgtggtcaccatgcgcgtcaccgaacaacattacgagttattggttgagattggaagcaggtttcgccaataggaagcgctcttaaagcggcagtgagggtggctgcgtgtttccggaagacgtggcggctctcgcctgggctgtttcccggcttcatttctcccgactcagcttcccaccctgggctttccgaggtgctktcgccgctgtccccaccactgcagccatgatctccttaacggacacgcaga

SEQ ID NO: 473074 - DNA, 633 bp, Homo sapiens
atcttttatcctaaaagcttacataatttctggagggcaggtgtggggatgcactgtaacagaatcatcatttctgtgtgtaagtccctattaaatacctctttctgagaaactggatttgtcagtttttctttggcctctcagctctctcagcctttgggggtaggtttgcatatatatgctcatacaggaacaacagtgaggctctttcctctccttactccttacccaccctccaatcttaaagcccctgaaaacatcagctcttagttaggagaagagctggagcaaaaaagcaacaagaaatcaatttgcgttgcctgtagttaggtgaggctttaattggatgcgtgtctggagttttgataataggtagtaccagactttttattacctgagaatgaycagataagctaaattaataagaatttagaggagaaaaatacattcacaggaaaagcgttgagaaataaaaatgtttgctttaatttcttccctataaagtccagcttgttcagtaaatcagttatatgaactaacaaaacaaagaagaggtttcgagtgcaagatgaatccaggctgtacttacagcgaattggcaaaaaccaagataaaaatgagaagatatccaag

SEQ ID NO: 473075 - DNA, 633 bp, Homo sapiens
atcttttatcctaaaagcttacataatttctggagggcaggtgtggggatgcactgtaacagaatcatcatttctgtgtgtaagtccctattaaatacctctttctgagaaactggatttgtcagtttttctttggcctctcagctctctcagcctttgggggtaggtttgcatatatatgctcatacaggaacaacagtgaggctctttcctctccttactccttacccaccctccaatcttaaagcccctgaaaacatcagctcttagttaggagaagagctggagcaaaaaagcaacaagaaatcaatttgcgttgcctgtagttaggtgaggctttaattggatgcgtgtctggagttttgataataggtagtaccagactttttattacctgagaatgatcagataagctaaattaataagaatttagaggagaaaaatacattcacaggaaaagygttgagaaataaaaatgtttgctttaatttcttccctataaagtccagcttgttcagtaaatcagttatatgaactaacaaaacaaagaagaggtttcgagtgcaagatgaatccaggctgtacttacagcgaattggcaaaaaccaagataaaaatgagaagatatccaag

SEQ ID NO: 473076 - DNA, 619 bp, Homo sapiens
atcttttatcctaaaagcttacataatttctggagggcaggtgtggggatgcactgtaacagaatcatcatttctgtgtgtaagtccctattaaatacctctttctgagaaactggatttgtcagtttttctttggcctctcagctctctcagcctttgggggtaggtttgcatatatatgctcatacaggaacaacagtgaggctctttcctctccttactccttacccaccctccaatcttaaagcccctgaaaacatcagctcttagttaggagaagagctggagcaaaaaagcaacaagaaatcaatttgcgttgcctgtagttaggtgaggctttaattggatgcgtgtctggagttttgataataggtagtaccagactttttattacctgagaatgatcagataagctaaattaataagaatttagaggagaaaaatacattcacaggaaaagcgttgagaaataaaaatgtttgctttaatttcttccctataaagtccagcttgttcagtaaatcagttatatgaactaacaaaacaaagaagaggtttcgagygcaagatgaatccaggctgtacttacagcgaattggcaaaaaccaagataaaaatg

SEQ ID NO: 473077 - DNA, 508 bp, Homo sapiens
acccatgttggctgcctgtatctgacactctttctctctcctgtggctttctccttctctctcctctagctttctccttctgtccctatttgtgtctgttttattctctctctctctctctctctctctctctctctgtctctggtaaacccttctgctaaggaactgaagcagagatcctcgaagctttggggactggcgcaggttggtggtgcacatttttttrtagtggagagttttggaatcaaacagagctggtaaattggccaccttctagttttgctatgttgatggaggcctcactctgttgcaggcacaaactctggggctgcagcattgaaaacaaatccctgctctcaaggggtttgcagtctagtaagaagatacagaccacaaatgaatagataaataccagataatatgttcactagcaatatgtaccatgaaggaaaacaaagcagagtgaagcagtagaaagtgaagaggctggtagggctgctccgggaat

SEQ ID NO: 473078 - DNA, 557 bp, Homo sapiens
ctcctgtctgtcaggacagagttatcctrtatcccaaccttagggcagatctgagaactgacgacagcaaggcaagggaatgggttacgaggccaaggacaagtgtggctcctcagcgaaaaatgtcaaacgtaaagttgagttcccttcctctttcctataagaaaggctagggtttggaaatacgagggtctggaggaggtgacaattggctccctttcccccaaaagaagccagccaaccagaaagtgcttcttaagagcctgatttaagctgagactgagactaagaagtccagtggctcagaagtggtctctgcccccagagagtttgaggtctaataaattgttatattgtgtggcagagactgtgtgtatcatggaagcacgatgggaagagatgggtatgatgagctgcagctggcagaaaactcttggaagatgctggttttacaaggacaaataggatatgtgtgtatatgtgtgtgtgtctgtggaaacggagcaggaagagtgtagcatctgaccatggagtcacactgacctaggctcaaattc

SEQ ID NO: 473079 - DNA, 581 bp, Homo sapiens
tcccaaactatccttaaattgttcatttctagactcttgcctggggtggatgatattcctcagtgccaggtcactgggcagagatttttcactgtattggatctcttctgctttgtctactttcttatttgtgaaaatatgtgtgcatacacacagagacatacacacatgtgcacacacacatgcatgtgcacacacacacacacacacgagctgactsccttaaaccaggtagctgacctccatgggtccacactctgggtccaaactcaactgaaggaaagtgaactgaaggagacatttgtgaatttgattctccaacctaaggactttgcttttcaaaccaagagtgttcagaagggcacagactgcagaacatgaagacttctgttaccattaacatagttccccggctccatgagacatgaacagcctctctgagaatgcaccgacaactcagcatgccttgtaaacagaccacaattatagagcttggttttgactttttttccagggccttaaagttgatatatttttacatttcctggattggagggtagggagcatggctttgggtttag

SEQ ID NO: 473080 - DNA, 545 bp, Homo sapiens
ttcatagatctcgttagaagattgtccaacggccaaagccccaaggcaaacaaagacactcccatcaggcagggcattctatggagatcacttcccagaagctggggtgggtgggggggccagctgctgcaaaggcgctctttggttgaggttaattctttgccccacagccaccaaagagtcttcatctgagaacatctaaatggccaacttttggagatcagggggaaaaaaggggtgractaagtaatgagcatagttctgaaaactgttttattttttcaaggtaaaatttggtaacgaggagcttaaacaatttttttttccttctgggtcatgaaacgtcacacagcagataaataatggcagagctcaggtcgctgtgcatttcatgagtgcttgtcaaccagtggtgatggtgagccctgactcgggcagtcctgggatacctgcccaaatgaataaggggtgaaagaagaggacacaagggtggccccctttgggaagagcagaagttgaggctctcgttccttcccttctgtctt

SEQ ID NO: 473081 - DNA, 517 bp, Homo sapiens
agggcctgaactaagccatcagaagtacgaatggacaggagaggaagatcaggaggtttaagaagtagaccccatgacamctggggctgatcaaatgtgagtgtgtgggaggaaataacccaagggaatgcctctgtttcaggtgttgcccgctcaaagggtcatggttcagttcacgtggttgagttaggataaaaaagaaggtttaaggaacaagatgatccattctttttgtgacatttgagcttaggacattccactgaagatgctcactaggcagttggacaaatgagtttggagcttaacagagagatctgggctggtgataagaatttgagggtcctcaacaggtgggtggtcacttttagctaggaaaagagtatggggaagtgctggtattaaactcactgcaaccctgtgttccctctaacttcttaagaaagcaaactatagctgctctcccctcaccttccatccacttccttatcatctgcagtgttggttttactcccactat

SEQ ID NO: 473082 - DNA, 517 bp, Homo sapiens
agggcctgaactaagccatcagaagtacgaatggacaggagaggaagatcaggaggtttaagaagtagaccccatgacaactggggctgatcaaatgtgagtgtgtgggaggaaataacccaagggaatgcctctgtttcaggtgttgcccgctcaaagggtcatggttcagttcacgtggttgagttaggataaaaaakaaggtttaaggaacaagatgatccattctttttgtgacatttgagcttaggacattccactgaagatgctcactaggcagttggacaaatgagtttggagcttaacagagagatctgggctggtgataagaatttgagggtcctcaacaggtgggtggtcacttttagctaggaaaagagtatggggaagtgctggtattaaactcactgcaaccctgtgttccctctaacttcttaagaaagcaaactatagctgctctcccctcaccttccatccacttccttatcatctgcagtgttggttttactcccactat

SEQ ID NO: 473083 - DNA, 517 bp, Homo sapiens
agggcctgaactaagccatcagaagtacgaatggacaggagaggaagatcaggaggtttaagaagtagaccccatgacaactggggctgatcaaatgtgagtgtgtgggaggaaataacccaagggaatgcctctgtttcaggtgttgcccgctcaaagggtcatggttcagttcacgtggttgagttaggataaaaaagaaggtttaaggaacaagatgatccattctttttgtgacatttgagcttaggacattccactgaagatgctcactaggcagttggacaaatgagtttggagcttaacagagagatctgggctggtgataagaatttgagggtcctcaacaggtgggtggtcacttttagctaggaaaagagtatggggaagtgctggtattaaactcactgcaaccctgtgttccctctaacttcttaagaaagcaaactatagctgckctcccctcaccttccatccacttccttatcatctgcagtgttggttttactcccactat

SEQ ID NO: 473084 - DNA, 633 bp, Homo sapiens
gtgcagggcctgaactaagccatcagaagtacgaatggacaggagaggaagatcaggaggtttaagaagtagaccccatgacaactggggctgatcaaatgtgagtgtgtgggaggaaataacccaagggaatgcctctgtttcaggtgttgcccgctcaaagggtcatggttcagttcacgtggttgagttaggataaaaaagaaggtttaaggaacaagatgatccattctttttgtgacatttgagcttaggacattccactgaagatgctcactaggcagttggacaaatgagtttggagcttaacagagagatctgggctggtgataagaatttgagggtcctcaacaggtgggtggtcacttttagctaggaaaagagtatggggaagtgctggtattaaactcactgcaaccctgtgttccctctaacttcttaagaaagcaaactatagctgctctcccctcaccttccatccacttccttatcatctgcagtgttggttttactcccactattcccttgaaatttcctcacaagggttgcagatgatcttaatggcaaattctaatggacgccttgctgctcttaacttacttgawctctctgtcaagaagagctgtgcctcta

SEQ ID NO: 473085 - DNA, 657 bp, Homo sapiens
tctaggctgaatactcaaaatgctgttggcttgctgcctccttttccttcttgtcttttctttcaaaactctttgcagaatgctggctggtgtacggggtggtgcacttcatccctccctcgccgtccaacctctccaagtcacagggttgggttcattgtagttgcttgaaaaaagagtattagtcaagtcaaggtttttaggaaaatggctgtgcttgggaggtgcttagacattactgacagcccactcctgagtgtcactgccccagatgctcctgaagcggggccagggatgagagtgaaaggagggatggggaaaggccgtgagttccattgagggcccacctcataccaacactggtttgcatactttgccccacattatgacagtaacactgggaatgggtcatttctttcattttacttatgagaaggctgaagaggtttagaaacttgaccgaagcatacagttagtagtgtgcatgagtgtgcattgatgcacaccctgcttaccctatatctcacacacatgcacacacttgtacacatgcatgcatgcacatgtgcacgcacgcgtgcgcgcgcgcrcacacacacacacacacactctctgcttaccctgtaccaaacactgttctaagcactttacatatat

SEQ ID NO: 473086 - DNA, 555 bp, Homo sapiens
ctctctgggaaggcccgggggaccagcatggggactgctgctccaaatggctttgagttgtcacgtaggggtggtgcatgggaactgtgtctgtgtgcttgtatgtgtgtgtatgtgtgtgtgtgtgtgtgtgtgtacaagaggactggaagggctcccttgtcctgttgccattggatactgccttcaagatttgctcttcatggtaactggggctcttatctgcacaaccagtgacataaaccaatgatgtgtcacctacaggtggacagtgagtgatgaatttaatatggggtgctctgtctatgagaagtgatagtaacctccagcatgggcttgcaggaccagtgagcagtgaagaaggatgagacacaaagtgggcttcctgtggtgaatgagctgggaacatgcccaaccctgtgacccctctttgctgtcccccagtatccccctgaagatttatcctcaggctttgtagctgcgtgtttctccctctaagcctctcgctggtcctyttgaactttttccttctccctcctccaataatcctaagtc

SEQ ID NO: 473087 - DNA, 502 bp, Homo sapiens
ggccattgtcttcacccataaaaatcaatttttgacactttgcatgctaattaaccaagttctggtcattgatagtgatatgagggcagcaatgctcatagcagccacctctgagcttgggctgtctgaacacctggccttgagccttctcgattgctacctgagccatatcttcagttcagtaagacaaaactctcacactttctatgatgaartagttgaaagaaaattttacacattgtaacattttcctagatggctttcttatcttttaaagatgtctagggaaggacgcccgttggcttctccttgtaagccatcccaatatctcacaaagtcatcaaggtttccttttttcccttccaaaagctgtttccaggaacagatttattcttgtattcagggcctccttcaaaatatacacagccccacggcctgcccttccttgtaactttgatttaagactcgcagttcctgagggcagagggggtttggctgagtt

SEQ ID NO: 473088 - DNA, 408 bp, Homo sapiens
ggaattgttccagtgcaacaaggaaaccaagagttccactttgatcttgttaaccttgggacccttgttagccactcacggggaaatgtcaagtagactggtgggttcatgagattggaaaccaatgagctggaagaatatgattcactttgcttttctgtggttcccatcccrtgaactggggcaaatcatataactggcaaatggggtttcttggctattttagggtcattgggaatctatttccagtgctatgaactcctgtaaggcatttctctctgcttctgtcatgtggcctagtagttaagagcaggggcttttctccctcaacagattagagtttgaatattgggtctgcaacctaagggctttgtcaacttgggcaagatgtttcacctttaagcttcc

SEQ ID NO: 473089 - DNA, 627 bp, Homo sapiens
agacagaaaataaaccaagaagtaaatacaatggataggatgtcgtgtagggataagggtcaggagaaagaatagagcaaataaaggagatgaaaatgaagtgggagtgggaaggtattttaaatagagtagtcggagaaggtsttcctgatgtaatatttgaggaaaacagggagcaagccacatggctgtgagaagacagatacatgcaaggaaagcaaataacacagaagacatggtggtggcaattccagataaccagttagggtcccaataggaacaaatagcacaccccaattagggtaattcaaggtgggcatatgtatagagaaaccatttacaaagggattggcagggagttggggaatgccagggacggcgttgtaacctggaattaacaatagtagagctcttatcatccctagacctgcagaaagatagagaggtcactgcaacgtggaattgggtagaggaggtgaccttgagcaggtgactatttaggcagaaggccaggggtctcaatactgctgatggcagtaggaagccagagagcacagcagcctgttcatgtcagatagaggaccgtagagagtatatctggaaggggaagatggaagataggcacac

SEQ ID NO: 473090 - DNA, 642 bp, Homo sapiens
ctcttagagagtgtggccttatctgaacacagatatcctgcccacccatctctctcccacccctcgtgtataacatcaaagcttagatatcctcagtgacttctttctggtttcacaggaaaccaaatcctctgcctacctttctaacctcagcttgtgtcattctcctccttgcttagaccttccagctacccaggccttcattctgtctcgagctcattccagcctttgccctggttattcctgttgcacagactgcttttcccccagactctgcaaggcctgtcttctcggcttttgtgtctcagtgaaaacattgccgtcttcagattggcctcccccaactccccaatctgaagcagccattctgctttatttcttctgctattcttatcctcatctgctagtttctcattcgtgtgctggtttactcactgtaccttttctctacttggagaaaagttccagggaaggagggatcttgtgtctaggactggcagtatagcctcagtgcctggaaagagctcagagtwtagcaggtgcttgatgactcctggttgaagacatttgttggatgtatctctggacttacctctttacatcagacaaatgtggtcctgagcaggcttgggttcttcctcc

SEQ ID NO: 473091 - DNA, 538 bp, Homo sapiens
ctgggagttggcttgttgaaagttaaagtttgaggtctgacgatagttggtgggatgaccagggatatccctctgcctctggtgaaactgctctgcaaagcactgggcccctcttcgtatcagccatccagttaacatttcctctctttttctcaacaccggcgctatccccaggaacgtgcccaggtttggttttcagtgtgataacgagtgttgtgtgtcccttgtctcttcctcacgttgtgttcttatgttaggatgtgatgtctagatgccttgtgattgtgtgtggtggggcagttcatatccaatagcatccaatcctaaacgctgacgttaatgtacatgtgtctggttataaccctaaggccaaggtcattcttccttttgtttactaaccactcactgctctttggtttaggaacattccaggcctgagtatgaaaccaaagttcgagagaaaatgctaaaggagagcaaccagkctgctgtccagaaattggaaacaaacacgacggagtgtggcgatgaggtatga

SEQ ID NO: 473092 - DNA, 510 bp, Homo sapiens
tcactgctccctctccagggagaatttgtaggatttatttaggctcattgtttccctgtaggacagttggaagtgaaataccttcacttcaatgaatcttgtccctgtgatgtattacttaaataaataataaatgaatcttcctgggcaactaagctgtaggtgaaaacagaaaaccatggtgtagatttttcttgaggagacctagagcattccctatcttttgttatggagctacactgacctcaactttactttgcttaggtgtctcctactwatatcatcaaagagctctgctgaccggcagacacagcgcactatccttttgcaatgttattcagggtgtaaacgttctctttttcttcccaagacctgtgaagcctgaagcaggatatgagtgaggagcgcaggctctgcgtcacagtgcctggctgtgggtccctgctcctctgatcactgcatctgttaccttgggccagttacttaaactccacacttcagtttcctcag

SEQ ID NO: 473093 - DNA, 488 bp, Homo sapiens
cacaagaattaactcttgactcttagaattactaccacatggctatgcatttcagtttatttataattagtcaaccagtttttatttattacttatttatttatttttgagacagagtcccgctctgtctcccaggctggagtgcagtggtgcgatcgyggctcactgtaatctccacctcccaggttcaagcaattatcctgcctaagcctctcgagtagctgagactacaggcatgtgccaccacgcccggctaatttttgtactcttagtagagacggggtttcgcaatgttgaccaggctggtctcgaactcctgacctcagggtgatctgcccgtctcagcctcccaaagagttgggattataggtgtgagccaccacactagcctattatttatctatttttgagatggggggtctcactatattgcccaagctggtctcgaactcctgggcttgcaatccttctgtctcagccttctgatc

SEQ ID NO: 473094 - DNA, 488 bp, Homo sapiens
cacaagaattaactcttgactcttagaattactaccacatggctatgcatttcagtttatttataattagtcaaccagtttttatttattacttatttatttatttttgagacagagtcccgctctgtctcccaggctggagtgcagtggtgcgatcgtggctcactgtaatctccacctcccaggttcaagcaattatcctgcctaagcctctcgagtagctgagactacaggcatgtgccaccacgcccggctaatttttgtactcttagtagagacggggtttcgcmatgttgaccaggctggtctcgaactcctgacctcagggtgatctgcccgtctcagcctcccaaagagttgggattataggtgtgagccaccacactagcctattatttatctatttttgagatggggggtctcactatattgcccaagctggtctcgaactcctgggcttgcaatccttctgtctcagccttctgatc

SEQ ID NO: 473095 - DNA, 488 bp, Homo sapiens
cacaagaattaactcttgactcttagaattactaccacatggctatgcatttcagtttatttataattagtcaaccagtttttatttattacttatttatttatttttgagacagagtcccgctctgtctcccaggctggagtgcagtggtgcgatcgtggctcactgtaatctccacctcccaggttcaagcaattatcctgcctaagcctctcgagtagctgagactacaggcatgtgccaccacgcccggctaatttttgtactcttagtagagacggggtttcgcaaygttgaccaggctggtctcgaactcctgacctcagggtgatctgcccgtctcagcctcccaaagagttgggattataggtgtgagccaccacactagcctattatttatctatttttgagatggggggtctcactatattgcccaagctggtctcgaactcctgggcttgcaatccttctgtctcagccttctgatc

SEQ ID NO: 473096 - DNA, 326 bp, Homo sapiens
gtgttgtcttatccttccaatatagctccaaggaaaaataatggcaacaggcaacatttatggagtactcattatgtcctaaacacttaattagtactcacaataatcccatgagataggtgcaagttattcttgtcctttttttgcagacaagggaactgaggcacagagagattaaagtcaaagcacttgcataaggtcacataactgggaagtagcagakctgtgatttgaaccagagtccataatattaatagtaaccgttgtgctacatttgcatctcttggagaagtggctcttatacttgttcatgaggtagtaaatac

SEQ ID NO: 473097 - DNA, 643 bp, Homo sapiens
taatgtttaacgtaagctaagagatttacaatgctttaatcattaagcagtgacattttatccatgatactgattttttaataaaatatactttgatactaatttagctaccctagccttttaaacattgaatatttgtcatgtttaacattttggttccatttatctttaataactctaagtttggtgctctcaattgtttttcagcttattttcttgtgtttcctatgtgtgcaatgatatcattgtctaataatgtcaattttatttttttcctgttcacatgtaacatttaatttatatcctttatctagttttatagctggtctctctagaataatgttaaattgaattagtaatattgaatttctttgactttagtggggaagttccaaatgttttctcctgaaccatggtgtttactttagtgttgagtgagatatttctctaatttttaattttkaatatttgttgaaattttctaattactttcaaacctcagtgaagttgatcaaaatattttcctttagatctattaatgtaaatgcttaaacagatttcataatattaaaacatacttattactaggttacacctaaaatataaaatatttttactcttttatgtgtttctggacactgat

SEQ ID NO: 473098 - DNA, 659 bp, Homo sapiens
taaagatataggaatttgaaagtaaagcaataggaacatatttagcatacaaactttaagtaaaagcaagttaatacagctattttaaccccagacaaaaacagatgtttgaaaaagtacattaatagaaatctggaagtcatttcataataatcattatagctcaccaagaagatatttcagatttttatgtgcctratgatagtctcaaaatacataaaacaaattgaaataatgaaaacagtaatagatacatttacaacatcgtgaattttaacaaatctctatcagtaattgatagattagaaaatcagcaaattgaatccaataatatgttaaaaaaacgaatgtaccatgacaaagataggttaatcccaggaatgcaagtttaatttaacattaaaaaattattattgttttaattaaaaaaattaatctataaataaaaaacatacttgaaaaaattaaagttattcaggtttaaaaattttagtcaaaaaaaggaaaattctgaaactgagaaaggatatattcaaaaagcctaaaatgtacataataaataattctaaaatattagaaactttccctttgagaatgagtatttaaaatggacctagagatgtgggtcattccagtaagacaagaaaacaaaacagaat

SEQ ID NO: 473099 - DNA, 603 bp, Homo sapiens
ctaagtgttcactgggggctggacatcagggacatacttgcaggtatatattattcactaaccagaacacccaggaaagggtcatgactattctgaaaaccttaatggtttgasaaatggacatttgagcaatttataataagctgctcaagagttcctaatttaatttcttattttaactgctgtgagagtccagggtgtcaatgtttcttgagaatattacagtgaaaatgagaactaggagaagaatttcattcttttcttaggatagaagacaatgcctatcattcactagtctaagattagtcttttattaattagtaaagaaatactttttgagtgttcctatgagtgtgtgtgtggtcagctcaacgcttacctctgtaccagcagtacttggtcagaggaggtgaattactggattgtgggccaggttataaagcagtgagttactggtaaatgattaacaactgagtctcagagaaaaagaaaatgccttgattagtagagtttgccaatttcatggtgtaaatactcccatcatgaccaatttaaattaactggatgtcactgaacatgggtttgggaggggatgttcccagt

SEQ ID NO: 473100 - DNA, 561 bp, Homo sapiens
ggtatatattattcactaaccagaacacccaggaaagggtcatgactattctgaaaaccttaatggtttgagaaatggacatttgagcaatttataataagctgctcaagagttcctaatttaatttcttattttaactgctgtgagagtccagggtgtcaatgtttcttgagaatattacagtgaaaatgagaactaggagaagaatttcattcttttcttaggatagaagacaatgcctatcattcactagtctaagattagtcttttattaattagtaaagaaatactttttgagtgttcctatgagtgtgtgtgtggtcagctcaasgcttacctctgtaccagcagtacttggtcagaggaggtgaattactggattgtgggccaggttataaagcagtgagttactggtaaatgattaacaactgagtctcagagaaaaagaaaatgccttgattagtagagtttgccaatttcatggtgtaaatactcccatcatgaccaatttaaattaactggatgtcactgaacatgggtttgggaggggatgttcccagt

SEQ ID NO: 473101 - DNA, 561 bp, Homo sapiens
ggtatatattattcactaaccagaacacccaggaaagggtcatgactattctgaaaaccttaatggtttgagaaatggacatttgagcaatttataataagctgctcaagagttcctaatttaatttcttattttaactgctgtgagagtccagggtgtcaatgtttcttgagaatattacagtgaaaatgagaactaggagaagaatttcattcttttcttaggatagaagacaatgcctatcattcactagtctaagattagtcttttattaattagtaaagaaatactttttgagtgttcctatgagtgtgtgtgtggtcagctcaacgcttacctctgtaccagcagyacttggtcagaggaggtgaattactggattgtgggccaggttataaagcagtgagttactggtaaatgattaacaactgagtctcagagaaaaagaaaatgccttgattagtagagtttgccaatttcatggtgtaaatactcccatcatgaccaatttaaattaactggatgtcactgaacatgggtttgggaggggatgttcccagt

SEQ ID NO: 473102 - DNA, 646 bp, Homo sapiens
aatgaggggtaggagaggaaaacaagaacaagaagaaagtgtaaaatgaattccaaaaccaaytaataaacaaacaaaacctgatcatatctaccagtctcctacctttctcactacaggattttgagattatgaaagtaaagcagaagttctagcttacatcagacaataaaagtttgtttagattaaaccatgtattgttttgttgttttttttttttaaaaaaaaaaaacctgggaaaataaaactaatgagatgtgaaagtaaatgaaaatgctttgggatttatttgatatgtcttcaggacaggagtgttaaaaaatggtgcttaaaaaatgcaattgcttcttgctttaaatcccacaagtctagttgttcattaaaaaatatggctacaagtttttgctttctacattctgagccccaaatatatatatatgcctctttcatatagttcagtaaacttactcccaaactatgcatacatcttctgttagaatgccatgctacagaaagattctttgatgagtgcttagtccatagtagacccttaataaaaaccagttttattgctatgtattttaattatgccacccatagagtatatatatgtgtgcatgtatgtacctatgcatttaataaatgt

SEQ ID NO: 473103 - DNA, 646 bp, Homo sapiens
aatgaggggtaggagaggaaaacaagaacaagaagaaagtgtaaaatgaattccaaaaccaactaataaacaaacaaaacctgatcatatctaccagtctcctacctttctcactacaggattttgagattatgaaagtaaagcagaagttctagcttacatcagacaataaaagtttgtttagattaaaccatgtattgttttgttgttttttttttttwaaaaaaaaaaacctgggaaaataaaactaatgagatgtgaaagtaaatgaaaatgctttgggatttatttgatatgtcttcaggacaggagtgttaaaaaatggtgcttaaaaaatgcaattgcttcttgctttaaatcccacaagtctagttgttcattaaaaaatatggctacaagtttttgctttctacattctgagccccaaatatatatatatgcctctttcatatagttcagtaaacttactcccaaactatgcatacatcttctgttagaatgccatgctacagaaagattctttgatgagtgcttagtccatagtagacccttaataaaaaccagttttattgctatgtattttaattatgccacccatagagtatatatatgtgtgcatgtatgtacctatgcatttaataaatgt

SEQ ID NO: 473104 - DNA, 554 bp, Homo sapiens
agccaaaattgtattcagttgttttaaatgcttataatttaagagaaaaaaatattatgtaagatttaaattctgcaagttagaaaatttaagcaaaaaaatttatcaaaataaaatgaaattgtccacacatgtagataaagggctatataaatatacatggaaatgactctgccagatgttcagaaagaagggggtagggagggagagaaagagacaggtaagaagagaggagaaaaggaggaagaaaatcctgactttcayagaatcttcatcttagcaacatacaaagatgagaacaattgattaaaaaaatttagacacaaaaatatcaagcactgttcaccatcaaaatagttctcatggaacacattatctaacttaattaccttaatagctctttgtaatgaagcctgtcctcattactcatttttttggacaaggaaactgacacttatagataaattggtaggacttcagttttggtccttgaaaaatggaataaactttttccatgtgggttaagacaaagagaatatcagacctgttcaaaa

SEQ ID NO: 473105 - DNA, 583 bp, Homo sapiens
acagttctgactaaatgaagcctgtgcaaggatcttttccacactgctatgcctaaggcagagctgggccctgcagggcagccagcagggcagggaarcagcacacagaggatgtgatttctgctggctggagccttgctgcctggaccgccagccccacggggacaaagcgtacataacacacccaggggaaggagaccggggggcccctagctgcacctcctcttgcaccgcctctgccccagctggcctccctccagctctcgcctccacacttccatccccaaaagccctggtgtcagtattctgaggctccccacctcctgccccaactcaaacaccccctttcctgcttcataataaaacccacaagatagtccctttccatgagccccaggaatctgtgtaaagaaaaagaaaaaagaaaaatatatataaaaagacagttctataggccatggggtcatctgaccctgtcctgaaccttggccaaggaaacgtcttcttgttagctaaactgacacaaacccaccccaaagataaccctacatcccctcccacagaaagaagttggcttctcttc

SEQ ID NO: 473106 - DNA, 583 bp, Homo sapiens
acagttctgactaaatgaagcctgtgcaaggatcttttccacactgctatgcctaaggcagagctgggccctgcagggcagccagcagggcagggaagcagcacacagaggatgtgatttctgctggctggagccttgctgcctggaccgccagccccacggggacaaagcgtacayaacacacccaggggaaggagaccggggggcccctagctgcacctcctcttgcaccgcctctgccccagctggcctccctccagctctcgcctccacacttccatccccaaaagccctggtgtcagtattctgaggctccccacctcctgccccaactcaaacaccccctttcctgcttcataataaaacccacaagatagtccctttccatgagccccaggaatctgtgtaaagaaaaagaaaaaagaaaaatatatataaaaagacagttctataggccatggggtcatctgaccctgtcctgaaccttggccaaggaaacgtcttcttgttagctaaactgacacaaacccaccccaaagataaccctacatcccctcccacagaaagaagttggcttctcttc

SEQ ID NO: 473107 - DNA, 583 bp, Homo sapiens
acagttctgactaaatgaagcctgtgcaaggatcttttccacactgctatgcctaaggcagagctgggccctgcagggcagccagcagggcagggaagcagcacacagaggatgtgatttctgctggctggagccttgctgcctggaccgccagccccacggggacaaagcgtacataacacacccaggggaaggagaccrgggggcccctagctgcacctcctcttgcaccgcctctgccccagctggcctccctccagctctcgcctccacacttccatccccaaaagccctggtgtcagtattctgaggctccccacctcctgccccaactcaaacaccccctttcctgcttcataataaaacccacaagatagtccctttccatgagccccaggaatctgtgtaaagaaaaagaaaaaagaaaaatatatataaaaagacagttctataggccatggggtcatctgaccctgtcctgaaccttggccaaggaaacgtcttcttgttagctaaactgacacaaacccaccccaaagataaccctacatcccctcccacagaaagaagttggcttctcttc

SEQ ID NO: 473108 - DNA, 510 bp, Homo sapiens
ggggggtgtagaggtaagtccattaaaaattcagaaatgtgcaagattgctgtggtctggctaagcacggggaaacttcaggaaggagatgggagttgaagtggcctttgatggttgttggggttacgatagagtagatcagggcatagatattgtaaggtgcgttcaggtcagagaaaagagacccgtctgggctgggcacggtggctcatgcctgtaatcccagcactttgggaggccaagrtgggcggatcacgaggtcaagagatcgagaccatcctggccaacatggtgaaaccccgtctctactaaaaatacaaaaattagccgggcctggtggcgtgtgcctgtgatcccagctactcaggaggctgaggcaggagaatcgcttgaacccaggaggcagaggttgcagtgaactgagatcgtgccaccacactccagcctggtgacagagtaagactccgtcacaaaaaaacaagagagagagagaccagtctgacggaagtg

SEQ ID NO: 473109 - DNA, 550 bp, Homo sapiens
tgcattgctggagatgggaaaggatgtagatgtaagttctcctggctcctgctcttgataccctccttctcatgcgtattcctagagacattcacccatctttgtctctagtcacccttttaaggtcaagaaggataagatgatttcctgattacttgccatttttaaaggaatgccttataagttatagtcttcatcttcactttttaggacccaatggtgagtcagggtctayggtgtctcaagaattcggccacctccacgaccaacctctacacacaggccctgttggcttacattttctccctggctggggaaatggacatcagaaacattctccttaaacagttagatcaacaggctatcatctcaggtatgttggtcctgttgagagttctttgaaattgtgaacataagctgtgagttatctataatctccctagtaacctctgtcccacacatgtactctaggattcattttagtaacagttattaagtcatcaaattattgttgggaggtttgtgagaaacacacgcaagtgctcaaagg

SEQ ID NO: 473110 - DNA, 628 bp, Homo sapiens
cactaaaaagaaataggagactccttcttctagactgacttagcctgccattttcctttccagtctctcaggacctaattaaaaactgacagttgatttcttttcctaaattagaacaaggaatctcacaaaattaggaagggatgaaaggttaaacacctcagccattagctgagttgaactatctttcatttgcttattattcaaaaagttaggataataaatttatactgtattcttctttcctgcttaaggcttgtctttaaatttaagctgcttctctttaattcagtggcatatgcgctaaatgttttccctagattatgttcattcatcttcacaacccagaaaataggtataatttttcatacttcacagatgagaaaactgatgctttacagaattacttgttaaattacttgctgtacattacacagatattaaatgtgtgtgaagttactggggcaatttagacgattcgtggcataaagataactgctggaaaacttataaacataggggtgcaacaatcaggaagagaatgaaatggaagggcccrgtagcccccttttaatatgctacaattagattctcaaggtacaagagtttgtctatatactttggaaat

SEQ ID NO: 473111 - DNA, 454 bp, Homo sapiens
agtggagccaagtggacaggggcacagactctggagtcaaactgcctagtttctaatccccactttgccattttctaactgcgtccgctggccatgtttctatgtaaaactgggtaacagcagaacctctgtagagttactgtcaggagtcagagttaatacaaagtatacaaagtgctgagaaccacggctggtacacagaaatccctcaataaatctwcctgtataattacagtgaaataatagccacaaagataacctacagctaggcgaagactccaggaggccatgggcttggaaaatgacccagggaactgcaaggccaaaatgaaactgccttcctagagtttgatctaaggtatccttaaaatcaggagccgtctcagtgtaaaccaagtcttggaaattgtcccttcttggaataatctagtggtcactgtgagcaagacaacac

SEQ ID NO: 473112 - DNA, 455 bp, Homo sapiens
agcccactttaatcagagtatgacccctgattgctcacagtcatctcctgagcagtgtgagcgagtttcagatgaggaggctgaaggccagtcaggcatgctcgaggattccaagtctgtaggtgggagggcagagatttagtcctgttggccaaagcctctagggaatttctcactccagtggagaaggcaacacacttaccaaactgtgtggaaactatctcatttgattagaaattttacctcaagaagaggaagracagttgagaaagaacattttcttacacatgagacagctaaggcttacaagaaggagaggaataatgaggcaaaataatcctcattaatattttcattcctcccctggggattagaactactttcagacccgattttaatggtaagttaggtacttcctacagttgccatccaaatatcagtcaggatcagacatg

SEQ ID NO: 473113 - DNA, 570 bp, Homo sapiens
agccaattgtggttggcaaaagggtgtatttaatagaatctgcaggcagatttccaatctgcctgccctgccctaccctccccctttgggtttgtttgaggtttcattccacaaataagcagcagataaaatactttacaaggtacagcacagttgtattgaagaaaaaaaggacccaactcttactttargagtattaggcctggacttcccctgccccatgcaataaagcaagttttatatacactccccatatttttttctaacattttcttatataaatttaaatattttacaaaaaaaggcttttttcctccaaacatataaatctgagtgaaacatagattccccacccgagaacttgtttcttcactaaaatataaatgttgtctgatattaagggtaaatgtcttttgaccactggagatcactgaagtctgaattgcaccgtggagaaggcacttgtgttttctgaggtctccagcaagtatctcagtgagcactcatagaattgctgtctgtcctccagaacccgtgccaaggcctccgagtgcccagttactgaggcag

SEQ ID NO: 473114 - DNA, 542 bp, Homo sapiens
tctgcttgaactgacatcaacccttcaaaaagtctaaaacatatgcttttaaaagaatccaatttgttttctgcagttgtcagagagcaaatctgggccttggacaatgcgttatattctccatctgtacattttaacattacarcttataaacctctaaagaaaacatctttcaatttctgacccacatctccaaattgctgattttaaataactgattaaagacttctatccaattatttagaaaatggattctcttgaaccgttcagaagttcatagaaaaaaaatgaatcatcctattgagagtctttggagctttgcgggagttccagtcacttgtaaccagaagaaataagtaacactgtaattacagtcccaattaagagatagaaaatgaagctaaaacttgagttgtattctattttcagaaacttaacagaagacataagcttttcctcaagaaaatatttttttaaataaaaaaagagtcatccagggcctgatatctcatggtgttctgtcaatttccttgggccattca

SEQ ID NO: 473115 - DNA, 629 bp, Homo sapiens
tgagcaaaaatgtctgcttttcctgctgtttttatttggtagataaagtgcattacctacatatttcaagcagacaaccagctcatacacaggaacttcaacaggctacaaaatgagtgctatacaggtgctggaggagagtgtcttgaaaattgaatggtcataattaccttgaggcccagctctccaactatctttactccctccacccatgcaatttagacagaaacagtcatttctctagcaatgaaattatagatccaggggggaaaaatcaattctatgataccttccttcatggctacagataaggcaaatgagggaaaacacccctctctgaaacattattaccaaagcctggtacccaggaagaactttgagtttatttcttagactggctatgtgcttctagaacaacttatgctatgatcgacaagtctactgccaccyccccccccaaaaaaaaaaagctttaggtttgattcaggtaacatccattttgtagcaaggcatagtttagaaaataaaatccttcctttgtattcaaatttacaacgcttagtgcactgaagaataaccatttctttacatgtctgtctctcttgtctgtacacagaaggcaagttctg

SEQ ID NO: 473116 - DNA, 551 bp, Homo sapiens
aaaatgtctgcttttcctgctgtttttatttggtagataaagtgcattacctacatatttcaagcagacaaccagctcatacacaggaacttcaacaggctacaaaatgagtgctatacaggtgctggaggagagtgtcttgaaaattgaatggtcataattaccttgaggcccagctctccaactatctttactccctccacccatgcaatttagacagaaacagtcatttctctagcaatgaaattatagatccaggggggaaaaatcaattctatgataccttccttcatggctacagataaggcaaatgagggaaaacacccctctctgaaacattattaccaaagcctggtacccaggaagaactttgagtttatttcttagactggctatgtgcttctagaacaacttatgctatgatcgacaagtctactgccaccccccccccmaaaaaaaaaaagctttaggtttgattcaggtaacatccattttgtagcaaggcatagtttagaaaataaaatccttcctttgtattcaaatttacaacg

SEQ ID NO: 473117 - DNA, 574 bp, Homo sapiens
ctgtcccttccttccaggctattctgtagccgtttccactcttctagctttcatctatcattatgttttctttttctcctctatatttaaaattttgtcagataagatggtaagaaagacaactttctgttatttgttattacaaatatgcatgaccctcccaactaattgtgctcttaaatttttacccttatggaaagagacaagcatttgagaatcagtgtagmtttagttttgggatttggtagacccaattggaatcttgatattgttacctataatctgtgtgactttgggaatctcatttcaattctatgaattcatgtcatcattatcaaaagacacttatcaaaactctttttttctagaattgtgaagattaatcaacaaatgaaaggtacctattctgttttgtgcatagtatccactcaataaatagtagaaattatcaccttaagtctttttctcaaaatagagacaccaaagtatatcataacaatttaaatagttttattgcttgtcttaaataatgtcttgaaactaattttatgtactcaagtagagacttctgtgt

SEQ ID NO: 473118 - DNA, 574 bp, Homo sapiens
ctgtcccttccttccaggctattctgtagccgtttccactcttctagctttcatctatcattatgttttctttttctcctctatatttaaaattttgtcagataagatggtaagaaagacaactttctgttatttgttattacaaatatgcatgaccctcccaactaattgtgctcttaaatttttacccttatggaaagagacaagcatttgagaatcagtgtagctttagttttggratttggtagacccaattggaatcttgatattgttacctataatctgtgtgactttgggaatctcatttcaattctatgaattcatgtcatcattatcaaaagacacttatcaaaactctttttttctagaattgtgaagattaatcaacaaatgaaaggtacctattctgttttgtgcatagtatccactcaataaatagtagaaattatcaccttaagtctttttctcaaaatagagacaccaaagtatatcataacaatttaaatagttttattgcttgtcttaaataatgtcttgaaactaattttatgtactcaagtagagacttctgtgt

SEQ ID NO: 473119 - DNA, 664 bp, Homo sapiens
aaatgggtgagatgagactaaaagatgcaagcctcctttgaatccagagagaaaacacctagaaacagagagtagatctcctagccccgttttactgcattcaggggaaattcagaaaaaatcatgtgggtctcactgaaaactgtttcctaggtttgatgtggaaattgatgcctttaatctccgagttgtgatggcagttggcctggtgcgtgcccccacggtgtgaagaaaacttaaaaagtgatgctcttaaaaagatgtcaacatatcaacaaactcttataaaacaatatgttgatgggttgagtgtaaacaaatgagaaacagaaggatttagatttcctttsaaatacaccctagcttaagcatgaaggaggaaaacattgagttgtcaaaataggcttgaggttttgctgaacccagaaattctggagaatagtctgagatgtttttgccaaaccctaaatgctgcaggggtaaactttccctctaaccaattagataattgccatttcattctgtagatttctcaattgtttcttctttttcttttctttctttcttttttgcaaacaaaataattacactaatattttcataattaaataattacttcaacccctgaattaaaaactgcactgctgttcctgcggatacagta

SEQ ID NO: 473120 - DNA, 470 bp, Homo sapiens
taattactgtgaacaatgctgctaggaaaactggtatacacagatgtgttcaggaccctgtttttaactcttttgtatayacacttagaagtggaattgctgaaaccacttgatttttaggatcatctttttcttttaatgccctgccaaatgcaatcaatacccagcaatgtatactattaaaaatctattttccaatctctccgctggccatgaggtctgtaggtgcctgacctgtcttccaagttattgcccctgaggccaaatgctacctcactacatgccagggtcaccatgtcctccacctactcagggctccatcaccatcgctgtcacctgaagccaatgctgcatatttcaggttttgggtcattatgccatccatccctagcacctgtctcgaatccatcatggcgggctaaactaatctatggcaaaaggcggtgctgcaagttcagaggcctcaaaca

SEQ ID NO: 473121 - DNA, 470 bp, Homo sapiens
taattactgtgaacaatgctgctaggaaaactggtatacacagatgtgttcaggaccctgtttttaactcttttgtatatacacttagaagtggaattgctgaaaccacttgatttttaggatcatctttttcttttaatgccctgccaaatgcaatcaatacccagcaatgtatactattaaaaatctattttccaatctctccgctggccatgaggtctgtaggtgcctgacctgycttccaagttattgcccctgaggccaaatgctacctcactacatgccagggtcaccatgtcctccacctactcagggctccatcaccatcgctgtcacctgaagccaatgctgcatatttcaggttttgggtcattatgccatccatccctagcacctgtctcgaatccatcatggcgggctaaactaatctatggcaaaaggcggtgctgcaagttcagaggcctcaaaca

SEQ ID NO: 473122 - DNA, 620 bp, Homo sapiens
tgctaattgtacatttagctttatcaccagtaacatttatttatttatctgcattttcccatttagtcttcacaactgctatggcaagcttttattaaataattaactatcccctttaaattcaggaattgttggcagttgtggtaagttatgtactaactgctttggatataatgatgaacatggtactaccacagcctccaaaaagatcatatctagtggaaaaaacagagacatgaagagataattttaacacaagacatgctaaagatatacacagaaaatatactaggaggagagaggagggctggaaagccttacaaggggattaaaatcctatagtgagactttaagtataagaaagaaataccctagagaaaatattccaaagaaaagaggcataattagcaaaggctggttataaggtttaaaagactataatgtataatgttgctgaaacacagttggggtagaaaatgatgaaaggtaaaggtatcttccttgatccttggagtatatttatttattccccagyactgagaaggctccaaaaccctatgctagtttctttcacaaagatgtattgtccaaaaaaaaatgaggattcatttttacaatgt

SEQ ID NO: 473123 - DNA, 573 bp, Homo sapiens
gagacagaacataatacttggaatatagataaccagtaacacaccagtacaagagacttcattccacaggaaaacacattaaaataagcagtttcagattgcttgtgaataaygggaagagcaatggattcatagcaagaaatttgggttcttgctcttattctgacatgatacatctatgtcatagaacaagttattttaactctctgacttttgagtttatacctgtataccaagataaatatacctgtataccaagttcactgagatttgaaaaggatcaaatgaaagtgcttttaagactttaatataaaacaatacgtggcgatgtggtgtaaggcaagccttccaagcaaagaacatgttggtagaccatgaacttagcagtttctacatgagttctcttcattcactttcaagttggttcttctcttctacacttattaatcactcagttagatatgattttggtatctaatattgctttttgtatctaataatgattagagacattgatgatattgctttttgcatttaataatgatttattgaacaaatagtgagaggtgaagc

SEQ ID NO: 473124 - DNA, 429 bp, Homo sapiens
atatttaaaaggtaacccaaatattttctccaagtttcaaatctacaaaccaaatttctcctggatatctccaataagatggtccataaaacacagtaaacatattcagaatatcctagcattattctctttattgtttattgttcatattaacaagtgacaccagcactcatacatggtcacatgctggcctccttgaagctatctgtaggcaacagatatagttgtctcctagaatctgttgccctcttgtttgcctaggtacatggctaaactgtgttcccctgccttctttgtacagtagtctttgctgatctgtggttccgctttccatgatttcagttatccrtggtcaaatgtgatttcaaaatattaaaccaaaaatattggattcataagttttaaattgtgtgctgttttgaatgatgc

SEQ ID NO: 473125 - DNA, 675 bp, Homo sapiens
atgaaggtgaatttacaggtgtcaatctctaatatataaaagaagtgattgttcataaggggaaagtattgaaattgagaaaaatctacattatggtagagtacatgctaataaactaagcaatatattattgaaatgaatgagcatgttcttaccaaggaactctaaagaattttttcagagcctatgacctgaaaaccttcgggtaaatgaatagtagaagaggaaacagaggggtttttaccttccttctcttctgaatagtgtcactacactctcaaaagataagcaatggaaagtcacagtggcagcattgtaaaatctatcgtatttttgatatgtatgtaatacataatgataatattttaagagaacagagcatgcaaagtacaacataaaaagaaaaatctcagggaaaaaggtagatgcttgtagatatctatatgttgaaatatgtggagmcttaagttaaggtaaagtagcctctgggccaccatgatggacaaggtagatatgcatagccagaggacctattttgcctttggctcacagcagaacagttttgcttttatttttacatactatagttccaactaaaattgtgtttgaagacagtatttctactgatttagccaaaatgcacagtatttctctggatttttcatttttcatttg

SEQ ID NO: 473126 - DNA, 563 bp, Homo sapiens
taagaagagtagacatgtgacagctgacgagcatagggggagagagrgagagagagagagagagagagagagagggactcggtgcaaaatcctttttttttttttgatagagagtaaaatgaggatgagtaagaggccttcttcccttatccaaaaggttttcgtatttggactgtaccaagggggtctatgttccttaccacggctcagcattatcctaaggaagtatgcctcgttgttcatgtgatggagctttgccttcgtgtgtgcaggctgctataactaaatatcatacactgggtaggttattctcatagttctggaagctgaaaagtccaagatcaaggcagatttcgtgtctactttttggatcactaatggcaccttcttgcactgtcctcagattgtcgaaggtatgagatgtctctggcacctctttaataaaggcactaattccattcatgaggtgccccccagcaacataatcatcttccaaaggccccacctcctaatactatcaccttgggagtgagaatttcaacatatgaattttgtggggacat

SEQ ID NO: 473127 - DNA, 563 bp, Homo sapiens
taagaagagtagacatgtgacagctgacgagcatagggggagagagggagagagagagagagagagagagagagggactcggtgcaaaatcctttttttttttttgatagagagtaaaatgaggatgagtaagaggccttcttcccttatccaaaaggttttcgtatttggactgtaccaagggggtctatgttccttaccacggctcagcattatcctaaggaagtatgcctcgttgttcatgtgatggagctttgccttcgtgtgtgcaggctgctataactaaatatcatacactgggtaggttattctcatagttctggaagctgaaaagtccaagatcaaggcagatttcgtgtctactttttggatcactaatggcaccttcttgcactgtcctcagattgtcgaaggtatgagatgtctctkgcacctctttaataaaggcactaattccattcatgaggtgccccccagcaacataatcatcttccaaaggccccacctcctaatactatcaccttgggagtgagaatttcaacatatgaattttgtggggacat

SEQ ID NO: 473128 - DNA, 631 bp, Homo sapiens
tggaactcagaatatatgacaaatgacttcattcccataatgtccctgcattccaaggattagattttcagagtgtctaaaataggcaagacctactttcctragtggctgtttcaaagtcctgaaaggtcactaagttccctcttaacccaccctatggcatttcttggctcagcaccctgataatggagcacatttatattaatgatggatttcgttttgctttgcctccctttgattctaatgtttaaataggcattcgttgctaactttatgcaatttcacctccattccatgaggttaccttcttgttaataaagctgccttccaaaagtcaggtgttctcagagttcccgctctgaagaaatacaatatttggaaagcaaaaacaagaacaaaatgagctggatttagaagctcagcttaactaagaatcatagaacaccccgtatctcctcctcctgtaggctacaagcacagatttcagaaagtaaaaataatgtaacatggcctaaagaaacataattactatgattaaaccacactgccccctggcacacacagaggaataaaatctacccatcaagagaaaccatttgcattaaaaacaaggtgtccatgtggaaataaa

SEQ ID NO: 473129 - DNA, 463 bp, Homo sapiens
aaagggcaggagggtgagagcaatctactcgtgattctgtttgtggtgagtctgctcaccaagagcttcaaaggtctctttggaaccaaaggtttatcaagcagcttccagaacaagattttcagctggttgaacttcaaaacaacagcctctgagattcatkttgataatctccttcaaaagaaccacctggtccattgtagaagtcactggtagcaacctcatgggagatgcagctttcctcagcttacgaggtccttgctgcacacctaaaattatttaatcaggaaccttcctattgatggtgtgagtgttgtgatctgatcctctaaaatgcaaaataaccataagaagtctcctagtgcctcacaaccttaggtgtgcttctgtctcaaggctagagttatatctcagtcatcttagaattattttggtaaagaaatatgaaacctccaattaatga

SEQ ID NO: 473130 - DNA, 623 bp, Homo sapiens
aattgtatgccaaggacttcacataattatgaaagctggyatggtgtggtaaagcagtgcaaactttggagcccaattaaatctgggtttgtagccccacttttctgccttagatgactttgggtgagttacctgactcctgaataccttcattgtgtatattcaaatgtactacactatagtttagtaacacctccaaaatctcagtggtttagcatgacaaaagtttcccactcgtactacatatccattgcaggcaagcaggaagctctgcaccatgtagtcactcagggacctaggctgatggaggcttcaccaccttacaactatgtcatctggatcacgtggaaacttccagtgctacagcaggggaagagggagagagagtgtaaaggctctcacttaagcaattaatggccaacacagaagtgacctatgtcacttttagtcatagacccaacctcagtgggcctggaaaatgcaggcttccacatactcagaaagagaggggaaccagatgtcagtgaccactagaaatgtctgatgaataggcaggcgtggtggctcacacctgtaatgccagcactttgggaggcaaaggcgggcagatcacttgaggccag

SEQ ID NO: 473131 - DNA, 623 bp, Homo sapiens
aattgtatgccaaggacttcacataattatgaaagctggcatggtgtggtaaagcagtgcaaactttggagcccaattaaatctgggtttgtagccccacttttctgccttagatgactttgggtgagttacctgactcctgaataccttcattgtgtatattcaaatgtactacactatagtttagtaacacctccaaaatctcagtggtttagcatgacaaaagtttcccactcgtactacatatccattgcaggcaagcaggaagctctgcaccatgtagtcactcagggacctaggctgatggaggcttcaccaccttacaactatgtcatctggatcacgtggaaacttccagtgctacagcaggggaagagggagagagagtgtaaaggctctcacttaagcaattaatggccaacacagaagtgacctatgtcacttttagtcatagacccaacctcagtgggcctggaaaaygcaggcttccacatactcagaaagagaggggaaccagatgtcagtgaccactagaaatgtctgatgaataggcaggcgtggtggctcacacctgtaatgccagcactttgggaggcaaaggcgggcagatcacttgaggccag

SEQ ID NO: 473132 - DNA, 637 bp, Homo sapiens
taatctctctatatttttgaggaaatatagttaattattttaaagctggatatagacagaaaatrtacattgtttttacattctcctaacttatttaaaagaaaataacatttatttagtttgtataacatacatttagtaatacctcaatagatattttgtatataatacttagaaattctcctgttatacttctcatttattttaggttaatagcaggttattaggattttaacttgggttttgaaatatgacacattttaagcattttataatggaagaaactcatttacataaatatatttatatagcttggtggccatgaaaatatgctactcagatctcttactgctagaggcataatggactgatggcctctgttgttggcactcttgttccttcactgtgctcctgctaaagccaagcactctgtgagctgctctcattccatgtctgagcacaacaggggtattaaggcatttgctataaattgttttcagaaaaagataaaatcatgacttctatacggatataaaataaagttaaagattttattaaacttatcatgacagaaccagttattccacttactgaagtttctaaagtatcaaattcatagaagcagagaatagaattg

SEQ ID NO: 473133 - DNA, 637 bp, Homo sapiens
taatctctctatatttttgaggaaatatagttaattattttaaagctggatatagacagaaaatgtacattgtttttacattctcctaacttatttaaaagaaaataacatttatttagtttgtataacatacatttagtaatacctcaatagatattttgtatataatacttagaaattctcctgttatacttctcatttattttaggttaatagcaggttattaggattttaacttgggttttgaaatatgacacattttaagcattttataatggaagaaactcatttacataaatatatttatatagcttggtggccatgaaaatatgctactcagatctcttactgctagaggcataatggactgatggcctctgttgttggcactcttgttccttcactgtgctcctgctaaagccaagcactctgtgagctgctctcattccatgtctgagcacaacaggggtattaaggcatttgctataaattgttttcagaaaaagataaaatcatgacttctatacrgatataaaataaagttaaagattttattaaacttatcatgacagaaccagttattccacttactgaagtttctaaagtatcaaattcatagaagcagagaatagaattg

SEQ ID NO: 473134 - DNA, 640 bp, Homo sapiens
actattataaacatgactgaaaaaaaattcctcccttaacaccatgtattcctccaccacttgacttacctcttgtcttccatccacagcccagcttctcaaaacatatttttttataaccacaggattaatttgttcacttggcacacacttgtcatccccatatttctcaaaacaggggttccatgttgycaaagctcatgtgtattttcagtcctcatcttccttctttattcctaaaacactctcattggcttgtgtgattatgctttctgttgttattttcccctgggcattgctccttctcattctcctttcctggtttctcttcatttccatgtacaaggaatagggggtttccttaaagtgctgataccctctctctactgactcccagggcattatatatcaccatagtctaaattctgctattgagcattaattgattgcccagacctctcctgtgagcttgtgtctaactgccttcctaagacagcaactaggaggccttatggacaactgaaatttgacatgtttaagattaaacatatgatgtttcccaacaatacctcttgccatgtcctatcaactttaacttaaatatctttcaaatatttcagcttctttccatctgcactgc

SEQ ID NO: 473135 - DNA, 579 bp, Homo sapiens
tgggctaaagtaaagtaatatcctccagaaattggaactgcataggaagcagtgcccatcaaactgtcctcccgctgtagatatgaggaagtaaacataaggaaaacttgtatgtacatactttacctactgaaggaacaaaaacaaagtcagcattatatttactaaaaagtaataggtaagatgaggactgtcaacatgaagggcaagcaacacctgaggaaaggaaggaggcagaacaatcgttagatattttgtcatcctcagtaggtatacaaatgttgtgacctttatgagacataaacaaacacacacgggaagagagcaagataatataaagagtaagagttggaatgggggcttggtgaagttaaaaagccttgtggaacattaaaaatgtaatactataattaaaatctgtattagaacaagcaaagayaattgacagtccagaaaaataaatttataacaggaagataaaactgagaaactccattagactattgaggagtaagacagaaataatctatagggggcatatatgaataatacaaccaaaggaatagagctcttccttaa

SEQ ID NO: 473136 - DNA, 556 bp, Homo sapiens
gagtaaaaatttccaaatgtccatcctgaatgggataataattatcccatggatcaggcccaaatgcagtacctcagggaaataatgattaaagggattaaagagtccactcctaggacacaaaatatctctaaagcgtttgagattcaacaagaaaaagaagaaatcccctcttcattcttgcagaggttcagagaccaaatgaggaaatactcaggattagatccataggacccagtagggtaaggccttttgaaggttaactttgtaactaaaagctggcctgacattactaagaaactacaaaatattggtagatggaatgagaaactgattaaaaaatgactgagggaagctcagaaggtctttgtaaggagaraggaagagaagcagaaacaaaaagtgaaaatcatgtttttcactgtggaacaggtagttagaaaaaggttagattaagatctccctcaaaagagacaagggaatgataaattttgacacagagagagaagagaaatgcagggaaaagctcctaagactataaatggatgttacaagt

SEQ ID NO: 473137 - DNA, 383 bp, Homo sapiens
ctgtttgttttgagacagggtctcaccatcctggctggagtgtagtggcgcgattttgtgttgttgttgtttttagatggagtctagctctgtcgcccgggctggagtgcagtggcgcgatctctgctcactgcaacctccgccccccaggttcaagcgattctcctgcctcagcctcccgagtagctgggactacaggcgtgagccaccgcacccagcccccaagttccagcyttgattctgcctcttactagctgtgtgatcttcaacaagtcactcagtctctgcaaacctcggtttcctcatctgtcagtcccgcttcctctttgctgcgcgcgctctcgttgcctggcaacgggaggcgacgcccggattgagagaga

SEQ ID NO: 473138 - DNA, 604 bp, Homo sapiens
ctaaccagtttattcattatattccagacacaagtctctataaaagcttttaaattctgttcatcaataggattcaatcaacctggaatctcctcttctttgtcgatccaaagtctgcccttctggcctggcatggtggcttacacctgtaatcccagtactttgggaggccgaggctagtggatcacttgagcccaggagttcaagaccagcctgagcaataaagcaagacctcatctctacaaaaaaattagcagggctggtggcccrtgcctgttgtcccagctacccaggaaggtgaggcgggaggatctcttgagcccaggaggtcaagacagcagtgagcagtgatcacaccactgtactccagcctaggcaacagggcgagtcttaaaaaaaaaaaaaaaaaaatttggttaggcatggtggctcatgcctgtattcctagtactttgagagaccaagggtggagaattgcttgagcccaggagttccagaccagcctgggcgaagtagtgaacccacccgctagtctctaaaaacaaaataagataaaaatttttttaggtctacacttctcttagaatccagctcaaatcctagc

SEQ ID NO: 473139 - DNA, 604 bp, Homo sapiens
ctaaccagtttattcattatattccagacacaagtctctataaaagcttttaaattctgttcatcaataggattcaatcaacctggaatctcctcttctttgtcgatccaaagtctgcccttctggcctggcatggtggcttacacctgtaatcccagtactttgggaggccgaggctagtggatcacttgagcccaggagttcaagaccagcctgagcaataaagcaagacctcatctctacaaaaaaattagcagggctggtggcccatgcctgttgtcccagctacccaggaagstgaggcgggaggatctcttgagcccaggaggtcaagacagcagtgagcagtgatcacaccactgtactccagcctaggcaacagggcgagtcttaaaaaaaaaaaaaaaaaaatttggttaggcatggtggctcatgcctgtattcctagtactttgagagaccaagggtggagaattgcttgagcccaggagttccagaccagcctgggcgaagtagtgaacccacccgctagtctctaaaaacaaaataagataaaaatttttttaggtctacacttctcttagaatccagctcaaatcctagc

SEQ ID NO: 473140 - DNA, 652 bp, Homo sapiens
ctgtttccaagtatatctgcctattattgtctgttttaccacttcygctacataattcactgctttgaatacaccagaaactagctaagtgaacatctgcagagcatgtacagattttgagaaaacagattctgagagtctacttgatttttctcatgagaaactatgcatagtcttcagtataacgatgtcatagtatttcttccacctgccctttaatggagccagacaataagcagagaaaaaacaaaaatgcttggtggttaggtgataagtgctaagaaaaagtatcataaggaaagcctcactaaggaaagacacaaaaggaatagataattcattcttggaatgatttacttaaaaactagcaagagctttcaaactaaagatatataaagacacaggatgtaattatgaaattgtgcacatacactcacactcaagaccttgaggcaaagctacgagcgactacggagcatcctgcgtgtcgagcaccaccccgcagattaattttccccaaagctaactaaggacactgaagagcaaaggaatgtttgatctgaacaaacccaacttatttgaataaactttatagtgtgccagaataaaccaacaagagtactatacacaaacttctgataaagaaatagaa

SEQ ID NO: 473141 - DNA, 578 bp, Homo sapiens
ccagcgccatgtgggtctgcgtgggccgcgcgctctcaaaggtggtgtcgaacttgggggccagacctcgctcctccatggtccagactccgtggggacccctgaaggtggcaggccgggagagatggacggggagaggggaacagaaaaagagacagagggagaatcagagaggtatagagagaaagttggagagagagaaaatcaggagacagagagagacagggagacagagagagggaatcagaaacagaaatagagggtgagttgcaagaacagggagagggggatagaacaagacacagacagagagataaagagttaaagacaaagcaagtcagagacagaattggagagagacagagagagggagaggcagagagagagagatgaattcacacgaaggcaaaaatgacttattctattcaaccaacactgctgctgcaatgagccygacgatgctcacatgggcccaagccctgccctccagaagcccttgatcttgggggagacaggtggacacagatcctctggccccaagagtcaagcctggatcagaggaggtacctgggcctggg

SEQ ID NO: 473142 - DNA, 487 bp, Homo sapiens
taaaataaactgggaaatgtgtttccctgagttctctgagcagctttagcaaattaattgaactgaaagagaggagcatgrgaatctcacgttgaacccggttggtcttagaagttctggaggcccagacttaccactggtgtctagggggtgggcggtcttggggactgagcactcaacctgtgggatctgatgctatctccaaatagtgtcagaattaaattggaggatacccagctggtgtctgctgccgaattgattgcttgcttggtggtgggaagaaaccaccccccgccaatatgtagtcacagaagtcttctgtgacttctgttgattgttgtggtgatgtgagggcagaggaaaaatacagcttgagtttttccacactctcggggaatatgtgtccttctcttccagaatattttctttctttccttttttaaaaaataacttcttccttctgtttttttgttaatctccttctaga

SEQ ID NO: 473143 - DNA, 245 bp, Homo sapiens
cgtccgccctaggtagcttgctcatctgtaaagtgggtggggcaggagttcccacctcatggggtcctggcaagcctgcagtatccccgagtggcaccagcctgcttctggggcagagcagtttgtgccccctgaggtaccactgatcctctttccctgctattaggtattgctctctycctccggtgtttgccttttcagattatagaagtaatatgtgttcccatatttggcgtctctcagga

SEQ ID NO: 473144 - DNA, 602 bp, Homo sapiens
tggagccagaatggcatttcagcaacgtggctgaagaacatacgtgcatttgtttattaaaaagtgtttattgagcaccttctatatgcaaggcctygtacaataaaatggggataacactactaatatatgaataataaattgtcaataattatcaaatacccattgggttacaggcacagggtggtatatataataatagtaaaaataatgatgaaagtactgatgacagggataataatgtaaactacctggatgttttatatgtattatctcatggaagctttaaagaaaccaaatgaggaatggaatctttattattcccatttcacagagaaggaaactgaggttaaggagaggtcaagtaacttttcaaggcatggagtggacattggaagtacaggcatttgcacctggtcctcttattttccaaaactactgtagggtccaacgtcaccttgtttttccactcattcaataaatactgactttttatgctatgtaataggttgacactcatcatgagcctctgccctcgttctgcaggtggtgaaggcattgattgtcctgaccccacagtttctgtcccatgacaaggacca

SEQ ID NO: 473145 - DNA, 521 bp, Homo sapiens
ctggatgagaatcagattcctcactgcactgggccctgtctgcctctgctcagctcacctgcctcagcctgcaccaggtccccctttgccccgggtgctctaggccctcggccaagctcctttctccctggcwtgctcccctctcctctccctacactgatcccacacatcccccaagtctctgctaaaggtcccatcccagcaaagccctcttctcctattccttaccagtactccttgtttttcgcctacatagcacctactgtgactttaaacaaataatgtatttattggcatacatgttgactgtccgtctcttcaacaagaccagaagccccaggaggggaaatgtttatgcttcggtgtctgcacagtacctagcacgtagccataaataactatcaggtgcatggataagccaccaatcaaaccgaccatcaggagcctgggcctcaagcctaggagggcaaggccctgccacatttcacgagcattcctgaatgtacagctattcccgtatt

SEQ ID NO: 473146 - DNA, 521 bp, Homo sapiens
ctggatgagaatcagattcctcactgcactgggccctgtctgcctctgctcagctcacctgcctcagcctgcaccaggtccccctttgccccgggtgctctaggccctcggccaagctcctttctccctggcttgctcccctctcctctccctacactgatcccacacatcccccaagtctctgctaaaggtcccatcccagcaaagccctcttctcctattccttaccagtactccttgtttttcgcctacatagcacctactgtgactttaaacaaataatgtatttattggcatacatgttgactgtccgtctcttcaacaagaccagaagccccaggaggggaaatgtttatgcttcggtgtctgcacagtaccyagcacgtagccataaataactatcaggtgcatggataagccaccaatcaaaccgaccatcaggagcctgggcctcaagcctaggagggcaaggccctgccacatttcacgagcattcctgaatgtacagctattcccgtatt

SEQ ID NO: 473147 - DNA, 413 bp, Homo sapiens
ctgctcagggttcaggtttaagtgcattttctgagaaatcactcgcatctggaccataaactctgyatgtgatggcttatggtttatatttgtgttctcatgaaagccaccaccaggctaattcccacagccctctgactctctcaatcggagctctcttccctctctgtctctcaaatacctacagtattcagtcggctgcttctccacagggtccttccctctctgtccccttccccaccctcagtacctcccaagggtgtgctatttcatcaccatgtacttggtatttaattttacttggatatgggttgttctttgttctcttcttgtgttactcttttctcccctggttttaagtcccatgtttggaccttccgtgacctcaaaaaactttgtggggtgctgattgt

SEQ ID NO: 473148 - DNA, 413 bp, Homo sapiens
ctgctcagggttcaggtttaagtgcattttctgagaaatcactcgcatctggaccataaactctgcatgtgatggcttatggtttatatttgtgttctcatgaaagccaccaccaggctaattcccacagccctctgactctctcaatcggagctctcttccctctctgtctctcaaatacctacagtattcagtcggctgcttctccacagggtccttccctctctgtccccttccccaccctcagyacctcccaagggtgtgctatttcatcaccatgtacttggtatttaattttacttggatatgggttgttctttgttctcttcttgtgttactcttttctcccctggttttaagtcccatgtttggaccttccgtgacctcaaaaaactttgtggggtgctgattgt

SEQ ID NO: 473149 - DNA, 589 bp, Homo sapiens
ggctaatttttgtatttttttttttgttttttggtagagacggggtttcaccatgttgggcaggctggtcttgaactcctgacctcgggtgatccacctgcctcggcctcccaaagtgctgggattacaggtgtgagccaccgtgcccagcaggtaaaattttaaactaacctaatctgaagaggaggggagactggtctattctctgggtgattaagacatggcattttttttcaygggagggccgtggctgcttggaagggagcacacagactaagacacaagtaggtgtgagattcaagctaccagaacacgcggtgcatccttaagggtggagagcatggctgcaggctgaggcccgggagccacaaaaaccaaggcaagtgttttgtggaaggaaagtggatgaggaaagagcagaggaagaactacctttaagaagcggacatgacagccctgtaaaagacaggaggaggagaaaaactgccaggttagtaggagaaatgttacacacaggaagtgctacacacaattagtggtgtgagaaaacgagattgagtacaacacagcacaggttccaattatgatg

SEQ ID NO: 473150 - DNA, 503 bp, Homo sapiens
gactttgaacaaggggtctttcgccaayagcataattgaaaacaattcatccaggatcattcctgtcctcttgtgaagtgagctgggtgcatcaatcacatgaacaggggatgctaacttggtgtggaggaccccaaccagctccatgatgacagtgacattgtctagaacaatggtggccacagacagaagcagcagtggtctgtgtgggtacacaaacaaatgtgccaggatgctgcctggtcagggacacgttccaagctcccaaagagcttgcctacctgaggggagaaaatgcccagagctgtagttcctttatcattcacccaaatgcagccactcctgtcttaaccaagtataaagggcatctgacttcaaggctcctaagtaaaaacctgtaccaacaaaccaaacaagtacatgcgggggcccagaccagtggaggtaaaccagaaaggcttcctggaggaggagaaagaaaaaaacactgtggttgggtaagc

SEQ ID NO: 473151 - DNA, 637 bp, Homo sapiens
tgtacacaaagggcagcaatggcataaaatgatgacgctggagtagtgacagccggaatgtcgccatgacagtcagaaaaggttgagatgaccaactagcatccctccctgggcaggcagatgaaaaagaaaaaactcagtaaaaacaaaggttggatcatgtgtttcttaactctttaccagttccaaaaagagctagggtgcctcccttgctaataacaagaggaagagcagtaaaaacagtcatgaaacacttccatgagaggggcatccgccctggacactccacaggcatccttttaccttcccactcaccagcgccagcctcaggagggggcatcatggtcccrgtgctagagatgaggactttgaggctcagatgaatggaacagccatttgcaatgaaattattgtttggtactgctgggtgctgtattcgtttgttctcacattgccagaaagaaatatctgagactaggtaatttataaagaaaaggggtttaggccaggtgcagtggtttacacctgtaatcttaacactttgggaggtagagatgggtggaccacttgaggtcaggagtttgagactagcctggccaacatggtgaaaccccatctctactaaaaacacaaaaat

SEQ ID NO: 473152 - DNA, 505 bp, Homo sapiens
gaggagaagaaaagaggaagaagtttccaccggtgtattagtccattttcacaccaccaaacagaacttccctgagactgggtaatttataaaggaaagaggtttaattgattcacagttctgcatggctggggaagccttaggaaacacaatcgtggtagaagaggaagcaggcacyttcttcacaaggcagcaggagagagaaggagacatttctgtcagacatttataaaaccatctcatgagagttcactcactatcatgagaacagcatgagggaagccacccccatgatcaaatcacctccctccctcaacatgtggggattacaatttgagttgagatttgggtggagacacagagccaaatttatcaaccaggcaccattgtaatcacccatgtgaaatgcatataaagtgtttgctggggaagattctgaaagataaagtgacttgacatacattcttattcctccttcccctctctaattctaacacctcagctc

SEQ ID NO: 473153 - DNA, 632 bp, Homo sapiens
ggaaaaaaaactgatgtctcagctcaaagacagtcaggcaggagtaatttattttaatttggggggcagtaggagaggtcagccttttgtcctatctaggccttcaactgattggatgaggcccacccayattgaggagtgcaatctgctttactcagtctattgatttaaatgttaaggtcatccaaaaacaccatcatggaaacattcaagataacatttgaccaaatatctgggcatcccatggtctagtcaagttgacacataaaattaaccaacgcaatgcctaagacttccggccaatgctaagatcttcaaagaggacagtgtcacatcttgtgtggaaacacaaatttgaattctttctatttccaacattactgggagaattacagcaactaaaacccaggaggcacggcaccacaatcatttgtcataaaagaaatcactcactgagcctctttctcactctgttaaaaggagacaatagcaccttcagtattaacaagacactgcagggggttaaaaagaagaatgttgtgcatgtgtgtgtgagtagtgtactgcaggtcacatatgtgtgcaggagaaatcagggcatggcccctgtaccagttgtacctgttggcatg

SEQ ID NO: 473154 - DNA, 381 bp, Homo sapiens
gaaaggtttcccttccaaatcctgtcaatctattgtccctccccctagctgtagtcagagtctgttttgaatcataagttatgtggttgtacatccaggttgcctaagcaggtgactcatcaccatcactgccggaagcaaatcccaaatccttctcagtcaagtctggaaaaagacaaatactcatcctcccaggactccatgtagggaaaaagtagggaaacccgctgcttagattattcccctgcccttgctgtctttccagagggttgggcccatccagagatggggagtggaccaggagtcaacagtaggtttaattgctagaccctttctaaagatgaagaatctaaagcayagagagattaagtaacttgttca

SEQ ID NO: 473155 - DNA, 600 bp, Homo sapiens
tggccctgcactgccccccaacctctgcccgccttacccccatgtagacttgaaaggggacgctttctgcattgcatctgccagccacttccctcttcccattatctccctgctaaagtgtgtgaaaaggttattttcactagcaaattggcccttagaagctggagattaaataaacaaacgcgtgaccagtttattgcaaggtttgcatgctgccagcctgggcctcagccggcctgctgatgggggccatttgattgtgggtctgcttgacaatggctatgctcagtgtcctgtttacacaatgaatctataatgtaatttcacgaggttccgaaatgcaccaagaagcatgcgaggattccgtgcctcagcctaatccatatgaaacagtctggaaatgcgcctagtgaccacatggagatggagtggagctgcggccggggcccatccttgcttaaaaaggattatcatagagcgagtgggcaaggcagggacctgggktgaagtggatgcaaatcttatggaagtggatgggaaggattcatggacaattcgtgggcgtctccaaacccacccctcctgcaggaactgggatgc

SEQ ID NO: 473156 - DNA, 575 bp, Homo sapiens
tttttccagttaagcatttgctctctcccctctcaccctgttgtgctaagggtggcacagaaaaagaattttatttattttgggtctttgtttgtacctgtttgcagcccaaggaaaagagagaggcaaactctctggttcaggcttcggtgagagccttcttttactcaaagagactgtggaggctgccagagagcaagtcaaggagttgggaggtgcagcctgccttgagcagggcagcagggrcttgtgggatgagctatggctccgttaggaccctcctcacctggaaacaggactgtgggagacattgccatccctcctatctaacaattcgatgttagaaaactccctgctttgggtagtaccaagaaattagttgtaattatggaaatgaagaaggtggcactgaaagaaagcaccaccaggggaaagggccctgcaggtggaggtggagacctgggctccaggtgtagccttgccacaggctctgtgtgaatgtgagccctctctggggctgtatttatgaaaaagggggttgggcaatgatctctaaggtcccttccaactaggcc

SEQ ID NO: 473157 - DNA, 586 bp, Homo sapiens
tttttttttttttagtagagacggggtttcaccatgttagctaggatgggttaggaaggaattttcaccctggtttacattgtacctgcaaaagttccacttgcctcgactgctcccttctctgtgacatcttattgtgagccagctccaaagccagaaataccttgggttgtttattttccacttgtgcatatgctyaccccagtggatgagcctcccctgaggcttacactcaggagctgtaattgcaacctggcagccaatgcatggagccagaggacaagatccaaatgcaaagaaactctctatatggttcagacttctgcagtcttcgagaaaggacgatccaggaaggtttttaattgttatcgggctatttaagaggaaacagcgtgctctgagagggtcctttgtgagctaccaaaccagaagatgatgcaagtttcatcagttgtttcataggtttattagtccgttctcatgctgctatacagatactacccaagactggtaatttataaaggaaagaggtttaatggactcacagttctgcatggctggggaggcctccggaaacttacaatca

SEQ ID NO: 473158 - DNA, 584 bp, Homo sapiens
tttttttttttagtagagacggggtttcaccatgttagctaggatgggttaggaaggaattttcaccctggtttacattgtacctgcaaaagttccacttgcctcgactgctcccttctctgtgacatcttattgtgagccagctccaaagccagaaataccttgggttgtttattttccacttgtgcatatgctcaccccagtggatgagcctcccctgaggcttacactcaggagctgtaattgcaacctggcagccaatgcatggagccagaggacaagatccaaatgcaaagaaactctctatatggttcagacttctgcagtcttcgagaaaggacgatccaggaaggtttttaattgttatcgggctatttaagaggaaacagcgtgctctgagagggtcctttgtgagctaccaaaccagaagatgatgcaagtttcatcagttgtttcataggtttattagtcygttctcatgctgctatacagatactacccaagactggtaatttataaaggaaagaggtttaatggactcacagttctgcatggctggggaggcctccggaaacttacaatca

SEQ ID NO: 473159 - DNA, 654 bp, Homo sapiens
ggggtgagggtagaggaaggcctggagataagcttatcagccattagaaaaatctgtctcggctgggcgcggtggctcacgcttgtaatcccagcactttgagaggccgaggagggcggatcacgaggtcaggagatcgagaccgtcctggctaacacagtgaaacaccatctctactaaaaatacaaaaaattagcctggcgtggttgcaggcccctgtagtcccagctactcgggaggctgaggcaggagaatggygtgaacccgggaggcggagcttgcagtgagccaagatcgccactgcactccagcctgggcgacagagcaagactctgtcttaaaaaaaaaaaaaaaaaaaaaaaaaaaatctgtctcatggcaatccagacaggggatttcatattgagatttgtctggatggtagaatggaaaatctgtgggaaagtacaggacaagaagggggagaggcaggtgccactgccttctgcagaggtgtaagtctccacattgttgtaacctatgtcagtttccaagtgctccaaggaaagggaaattccccactgcgaagcataaacgtagacttatgcctctttcagaggcgaggccacccctttcccactactcacgtgcacacacaaccagggatgttcacct

SEQ ID NO: 473160 - DNA, 594 bp, Homo sapiens
attaaatagttgtcagaaagacagtataacccacaaagcttaaaatatttactaacttggttggtgctttacagaaaaatcttgctgaaccctttcctaaatgatacaaagtcaaaatagcaaaaacttcttagtattaaaacaagttaagcatcgtctggttaactggacaatacattggtgctacaaatattggtttataaagtttccttatccagattcccatgtgttttccttttatgtttccttctcaggaaagggctttatcccattagaaataactgggagttaatatttgtagtggagaaaatcgcctagtcagagcattcaaaagcatggcttcctatacacattgggcatagtggtaggtgggcaaaatattggtcaggtgagcctttaaaaaaaaacagctgtttatgttgtgaaactctattggtgaaccctggaagaaractggaagccagtggagggcatcaaggagagaaagatgatggaacaataacctgcccccacctggcatgatggatggaaagttagcggggccagggatagcacctgaagtagttcaggcaaaagatgatgtgggtgatgatg

SEQ ID NO: 473161 - DNA, 602 bp, Homo sapiens
tctatgtattgctttatttgtgaattttatgttagtgtcctttgtccatttttcaattgtccttatttgacttatatgttagggatattagtatttggttgtatgtggttgcagctaygctcatctcctttacaaactgcattctttagctacaaattgaatatttcatcacctaccacatagatctattgggagcattaaataagactatgaatgttaactcctcagaccagtaagaaggcaaagagtaaattcctggtaaatggcagtgattatttattgtggaattaactgcccaaggagatctggagacaggcagaaataaatctcttcaggctagttgtcttcccaagaccaagctttctgctcttgcactctgaagaggttgctgggaatatgaaaatgcctagaagttcgcttggcaaggaacaacgctttatggcatttgctgaagttttgtcacagagaaaataacagtaatactataattttagaattgcctactctcaattataacatctttttattaatttcaaaacttccttgagaagttaaaacaatttttacttccataaaaaggctgtataaaatggatttaattt

SEQ ID NO: 473162 - DNA, 619 bp, Homo sapiens
tgagggcccatgggaaaaatttatctcaggtattaggaaaagctgcattctgttgaacagttgtggtgtttttgtcctgtggacactataaatcttgtaactgattgtgtctctctattgtcacagcatctcagaagaatagagccaaatttgtggtccagcttttggaattaatcaagaccagacagaatacatttgagagtactaagttkactgcaggttgtttttcttcattgcattttctcattcatttattgttacatttttgcactatgtgtatgtttctatttttatcttaatcagattttcaggatctgatatgtctaccaagtttattgtaagaccagcagctttctgcctccctaccctcctccttcccatgcctcctgcacctggtgtcttcctctcccttagcttaagtccttgttttgctggaccatctgagacagatgctggcaggcacatttattgagagctaatgtgtctgaaaatgttattaggtgactatcacacttagctgatagtttggtgagtcacagaattctaggctagaaatagcttttatttagacttttgaaggttttgctccattgcttataggttctagcacttcagttgt

SEQ ID NO: 473163 - DNA, 288 bp, Homo sapiens
taattttatcaagactttcattactaaaaactcaaaagaagctaggcacagtggcacatgcctgtagtcccagctattcaggaagctgaggctggaagactacttgaacccaggagtttgagtccagcctagacaacatagcaaaactccaattctaaaaaacaaaygaacaaacaaacaaacaaaaacacctcaaacagtatcaacagtagaaaggataaattgtggtacgctcatataacagaagactatacgacaatgaaaagaaaactgacgttgtaagcaaca

SEQ ID NO: 473164 - DNA, 624 bp, Homo sapiens
ttataggtgttcatagaagcttgaaatatgaaatgttaaatatttgtactggtgaatttgtttggtattgaccagataattcagtcactttttctgtctcctgtcgtaatcctaaacctcaagccaattgcccttctaaccatgcttattagttattttccatgaaagaatgtttcaaaaacagaaaacctggtttctacacttggctcagctgtgtgactttaggcgggcaactgaatttctctaggcttgatttttcttatctgaagatgaggtgattaggctgtataatcyttaaaatctgttagaatgctttcttattctgtgtgtatgcactttttatttactattgtcttaacactatataaagtgttatgcatatattttgaaaatatgatttaaatatctttatttttatttttccataagttattggggtagaggtggtatttggttacatgagtaagttcttcagtggtgatttgtgagattttggtgcacacatcacccgagcagtatacactgcaccatatttgtagtcttttatccctcgccccccttccgctcttccccccaagtccccagagtccattgcatccttcttatgcctttccatccccacag

SEQ ID NO: 473165 - DNA, 621 bp, Homo sapiens
tacaaccttgcctgggttcaaatcctagggaatcttgggagaatcgctttacttttctgtgcctcactcccagtatatttacttcataaggctactgtgaggatacaatgaaataatgcatttaaaggkcttagtatgatttctggcccatagcaagagctcaacaaatagtagctgtgcccacgattactaccacgattagcaacagtaacatcattacttggctctgttttacctttagtggatttctttcccctgggcctaagaccaccttgactagaacacacccacaaatttggcacctcacaatgtccatataatgcctagatgagccagatgcaatgcagacaagttcttaaaaagacaacttgatattctttcagagggaattgttgccattgagatgcccttggaaaatctgaatttaatatatgaaattgactctacaagtaactttcagaagagaaattgttgcaaagaggtagatttttatatgaattttgtcagagctttttaggatttttttatgacttttttcacttgcctacttgcttaaatgcatataattgctctcaagaatgatgagtcagtgcctgggtttggcttgctaataaaatctta

SEQ ID NO: 473166 - DNA, 615 bp, Homo sapiens
tgtttctcccttgcctaaagaggactggaaaaacaagccttgtgaaatgcaagtgtgaatctgggagggggagcctaaacaaccagccattagatcttcaccagatgagctgatccaaattgcttctgtggaaggcaatccataggccaataagtggggatgagggaggaaggttcaagtgcccagagaagatatggcaatagggacacagcatgataggccgtagccagacctctgagtagcagatctaagtagagcccaggaattcatccaytgggctaccctgggcaaagggtgaatggtaatgttaatgcttcagccataaagcacacgccttgctgtcttctttcctgagaacaaggtgcccgcttgtgcacttactaatgctgtcccaacctggacatcaacctgcccaatatatttaccaggcctatgaatataatctgggcctttcctttggtatctacgcaacccctattcttggaaactctatgttattttattggataccaacaagaatcatatgaggtagtaatattattatccccattttacagatgcagaaactgaggcttagagagggtaagtaacttgcctatagtcatatagttacta

SEQ ID NO: 473167 - DNA, 423 bp, Homo sapiens
ttctaaaatttaattccaaccaaaattctagtaaggtgcataagtgcagtttgaggcctcctaaagataagcaatttgcaacaggattaatacccagaactaaagatctttttccaccacctcactatttaaaggarctagaagatcacagttattcatttaatgatattcacatgtgctcaactagtattcaatgagaaaacctgaatccaaggagaatttaaatgggattggttttgtgtgtctaaaacaaagtgtattaagagaaaacaaagcagattttaataattacaaatataatacagatactcaaggaaaattattagaggcagtggagttagataagggttagcaaaatattacatttaatggtaatataaatttttgacttttctattaccagcacagtattacccttgttaa

SEQ ID NO: 473168 - DNA, 548 bp, Homo sapiens
tctgtaatcccagctactcagaaggttgaggaacaagaatcactggaacccrggaggtagagactgcagtgagccgagattgccactgtactctagcctgagcaacagaatgagactctgtctcaaaaaaaaagaagacaaagtagtgaataactcagtattaaaaaaaaaaaactcaacagagggaatgggtaaatgcaaaaccaaacagttacctttccactttcatgtaaaatcccttgttttagggttctagccactatgctatgccatccactccagctccttgttagtcacttatgcaccaggattgatctgaaccaggtttgataaattatttcaaatcctttctcaccattaccatccaaatccttctcacttgccacgcaacttccaaatctggatcaattgaattgatccaccaccattgtttctatttccagactgctgcgccctggtggaagaaataacacaatgatataggcaggaatatcttgaaaagcatggtttctgtggaatattatgcagcagttaaatatgtaagatat

SEQ ID NO: 473169 - DNA, 478 bp, Homo sapiens
gcaaagtcaaaggtgactgagttagccaccaataagggagctactttgaatacaaaagcaagtccatttcttccaacactgttgctgtctggttgcagtcaggtatttccatgtgaattcagacaatgagtccctactattttaggtaatctgagccatttctttttttttttttttttttaagacaaggtctcactttgtcacccaggctgaagtgcagtggcaccatctcagctcactgcggcctcgacctcctgggstcaagtgatcctcccacctcagccctccacgtagctgggactacaggcaggttccaccacgcccggctttttttttgtatttctttgtagaaacagcttttctccatgttccccaggctggctaagtcacttttcaaaccaaacaaattctccccactctagaataaaggaatcttctaaacctttggatcctacattaaagggcttgaagacagcaa

SEQ ID NO: 473170 - DNA, 557 bp, Homo sapiens
tcatgtcactcacagcctttgaggctttctagctgaggccccagacattgtagcgcagaaactagctgttctccagtgtccttctcaaatttcagacctacagaatccatgagcataacgaaacggccgttttatgtcactaagttttggattggatcattatgccaatccaaatagttgtaacactgttcatgcttactttccaggtgaggctctctagaaacctcaactcagaaacatcactcttttttgagacaatgtcttgtcttgctctgtcacccaggctggagtgcagtggcaccgtcatacctcactgcagcctttaattcctgggctcaagcaatcctcctccctcagcctctcaaatagctgcatctacaggcgagcaccaccatcatgcttggttaattttttttattttttatttttgtgtaagacagggtctcactatgttgcccagtcttgtcttgagctcctggcctcgagtctcccaccttggtctcccaaagtgctggcrttactggcatgaacaactgcacctggcccagggctattcg

SEQ ID NO: 473171 - DNA, 609 bp, Homo sapiens
ctagaatgagaggaatggaaaatcaatttgtctagttttccaaccctacatttatatgctgacaccaagtgctgatagttactgagtcaagtatcagatgtttatgtaatgcctcaaacaccacaggctgccaggatttccttctgcaaattccaactgcctgacttcagttccmagtaggatttctttcttcttctgctcattcgtggtttgatattgaatattttccagctgtgtttggtatggtgcgataaatgacttaatagttatacacgttagacataatttttgttgcaataacataagaaaccttgactaatattgactttaaaacattggggcgtatttgtctatccaataagaattctaggagagggtagtctgaggctgagatgtcgaatcagtgatccaccaggaagccagcagtggtgagctggtaaatgtttaacaaccattctgaagggacagtacttatgttttgtcaatttccatagtgtttgtcaatttccatagtgtttgtcaatttccatagtgcacgtacttccaccatggtttgatttccagctatcaatgtgacacatctaagtgcagagctgggaagaaacactc

SEQ ID NO: 473172 - DNA, 534 bp, Homo sapiens
ggtagagacgagctctcactatgttgcccagattggtctcaaactcctgacctcaagtgatcctcctgcctcagcctccaaaagcactgggattaygggcatgagccactgtgcccagttcattttggttgaaatctttaaaacttctatttggcagtgagtgtggctcaaaggtaagcaatataacaagtatttttggaaagtgcaaattgagcaaatgcaatatgaaatgcaggggtaagttcatatatcagtagtgaacatagtaagtttgggcttaaaataaagacccagttgtactatgtaaataagagcatcctctgtgtttctttatggatggagtaagaggaattgattttgaaatcacccatgttaaattctttggaagaactattgtgtatttttaaaattctgtttgtattttaaactcagtgaaattcactctctcatattttagcctgcacctatagtaaaaataaaactggcaacttctagtgtttattccattagtattcaattatatttcccagagaa

SEQ ID NO: 473173 - DNA, 436 bp, Homo sapiens
agtgaggggaaggggtaggttggccacccaagattcaggcatgaggaaattaagtaggatttgttatccccagagtcatccccatgatgggccagygaactaaagacaattgctaggtgtgtgagtgtcagtcaccaattaataaaattgtctttgagctgtggctgcaaacccaggtgtacattagaatcactggagggaacgggtggtttcaaaataattcaatgggctgggcatgttggcttttgctaataatcccagtgctttgggaggccaaggcaggaggattgcttgaggccaggtgttcaagactagccagagcaatataacaagaccctgtctttacaaacaaccacaaaaaaaaaaaaaaaaaaaaaacccacaattcaatgctaggtatcattccaggacagttaaactagaatttctggggtca

SEQ ID NO: 473174 - DNA, 436 bp, Homo sapiens
agtgaggggaaggggtaggttggccacccaagattcaggcatgaggaaattaagtaggatttgttatccccagagtcatccccatgatgggccagtgaactaaagacaattgctaggtgtgtgagtgtcagtcaccaattaataaaattgtctttgagctgtggctgcaaacccaggtgtacattagaatcactggagggaacgggtggtttcaaaataattcaatgggctgggcatgttggcttttgctaataatcccagtgctttgggaggccaaggcaggaggattgcttgaggccaggtgttcaagactagccagagcaatataacaagaccctgtctttacaaacaaccacaaaaaaaaaaaaaaaaaaaaamcccacaattcaatgctaggtatcattccaggacagttaaactagaatttctggggtca

SEQ ID NO: 473175 - DNA, 482 bp, Homo sapiens
tagttctttatagcagtgcgagaacggactagtgcatctcattagctcatctgactcatgggtctctccaggaacaactctttgcaataggtaataatacatcttcccatgtcttttaaggtcaatgattccagaatgtattcatttgcaattattaatgtcataataatactttgaggytttgcagtttacaaggctctgtcttgtacaatctcatttaacaaaaagctacctaagaaaaaatacgagaattctactttatgaaaaagagtaatgaattctaattactaatgccctgtccagccccaggacatttcactccaaaagtcagtaaaattgtacttcccaattgagcattctcaaatccaggtaacatgataccaggattctaaaagccttcatctccatgacactgtcttcattagagcacgaagagagttctacaaaatactgatttccaaactgcatgggcagcctctgtt

SEQ ID NO: 473176 - DNA, 596 bp, Homo sapiens
gaaaagaaataaagaatcttaggtattttatgaggccagaataacttagataccaagactttacaagcaccttacaaaatacatacatgcaaaactcttaaataaaaattagcaatcaaatataacaatatacaaaaaatacattattaccaagtaaatttattctaggaggttaatagtagcttaatacttgaaagatattcattataactcaccacatgtggtgaaattcaaatacgwccacaaaggctttaatactcccccttcagtactgtggtagaacgtaattcccctgcccttgagtgtgagctggacttactgactcctttgtaactaatagaatgaaacatagtgatgatatctaacttcagagaccagtttataaaggacactgtgattttctcatctctccctttcttggattatagtcaaccctctatatctgtgggttcctcatccatggatttcattgactccacattgaaaatattcaaaataaataaataacaatgcaacaacaaaaataatacaaataaaacatacagtataacaactatttacatagtgcttacatagtatttggtattataaataac

SEQ ID NO: 473177 - DNA, 390 bp, Homo sapiens
aataaagaaagaaacagatatggaataggccattgtaaatgaaggaaagcagaactagcagattcaatatcagtcaaagcagaatttagggcaaaaactgctgagtgggagaaataagaatttatcattttaaataaaagtacaattcacaaaacttacatgaccaataaaataytagtgtgtagaaaatatactattaagcataaatcaagttaaatatgttagatattgtgagaaaactatccctaaccatgttttccctgtactctcacaccacaacaattattaacacagaagacttctgcgtccacatgagtggaggtttttttcccaacacaccaagcagcggtcaccagttgggtgtcctctaattcagtctcgatactatct

SEQ ID NO: 473178 - DNA, 390 bp, Homo sapiens
aataaagaaagaaacagatatggaataggccattgtaaatgaaggaaagcagaactagcagattcaatatcagtcaaagcagaatttagggcaaaaactgctgagtgggagaaataagaatttatcattttaaataaaagtacaattcacaaaacttacatgaccaataaaatattagtgtgtagaaaatatactattaagcataaatcaagttaaatatgttagatattgtgagaaaactatccctaaccatgttttccctgtactctcacaccacaacaattattaacacagaagacttctgcgtccacatgwgtggaggtttttttcccaacacaccaagcagcggtcaccagttgggtgtcctctaattcagtctcgatactatct

SEQ ID NO: 473179 - DNA, 640 bp, Homo sapiens
ggatgcatcaaaatctcacaaagcaccactaaagaatttactcatgtaaccaaataccacctgtaccccaataaattatggaaaaataaaacaataaaaatttctaaaaaattaaagataaaaaaatgagatgatttytttttttaaagaatccttggacatttcagttaaggtaaaacaattcctggggttttcacatctgagtcattgagtcgtcaaagcaaaaagaggcctcctcagtaaacaatgtattaatatttaggtaactctgtctttgagaacctaaagtttccaaactcttcatttatgtaaacttactgagtgacaccaagtcagtgtagtttcctttatgtaggtgactagtattttctttaatattgtaattatcagaagagacaaaaggaattgctctgttaaatctgtatctaaagatggtggtatggaggcatggctttttaacataatggcttagtcttgttgattcattttagaaaagagattaccataaaatatgtggtaaattggagattctcaataacgactactttaaatattttctaaataagtattcacacgactcttttccattgaagctgttagtacctgttcattagtacctgtataaatgttctaacacaag

SEQ ID NO: 473180 - DNA, 537 bp, Homo sapiens
catgaagaaatgcctttcccccaatgtgcttccctggctctcctgtcccctttcttgtcaatagccagtcaacatgtattgattgtgcagaggctaagggcttattcttctgtgcatgcttatccatctgccccttttcttttgacttacattgtctctccagggttttatttcgtttttataaacatctttctatctgcctgcttcttctcaccatatggcaattctgatatgtattttttgttggggggaatgtgagacagaaggagaggagaaagagtccctaaygacacaagatttagaatacttatcataagagtggatggtttaataaatactgctttcttcagcatgattttaatcagatgactactaaacttcttttcaaaaaaaaagactaatattcataaaaacaaatgttgtctacagccaatgtttctaactcttacctgtcaacattagacaattcaatctgacttcttgccttcctactccaataaaaccattttttccaagtcacaaatgacttccacataa

SEQ ID NO: 473181 - DNA, 262 bp, Homo sapiens
acattaaatgaagaatacagaatgagatccttaaaaaaagaagtcaggaaagtattacatagagtaaytgcaaaggccttctctccttataacacggaaattgatgtatttgagaataagggtattaaaaaagatctttaagagtctacaggaaatagaagagctaggacaaagcatggatgtcatgtagaatattttatgataaactgctgacctgagccaataattcttgggctggggaaaaaaactgtttctctataga

SEQ ID NO: 473182 - DNA, 262 bp, Homo sapiens
acattaaatgaagaatacagaatgagatccttaaaaaaagaagtcaggaaagtattacatagagtaactgcaaaggccttctctccttataacacggaaattgatgkatttgagaataagggtattaaaaaagatctttaagagtctacaggaaatagaagagctaggacaaagcatggatgtcatgtagaatattttatgataaactgctgacctgagccaataattcttgggctggggaaaaaaactgtttctctataga

SEQ ID NO: 473183 - DNA, 262 bp, Homo sapiens
acattaaatgaagaatacagaatgagatccttaaaaaaagaagtcaggaaagtattacatagagtaactgcaaaggccttctctccttataacacggaaattgatgtatttgagaataaggrtattaaaaaagatctttaagagtctacaggaaatagaagagctaggacaaagcatggatgtcatgtagaatattttatgataaactgctgacctgagccaataattcttgggctggggaaaaaaactgtttctctataga

SEQ ID NO: 473184 - DNA, 262 bp, Homo sapiens
acattaaatgaagaatacagaatgagatccttaaaaaaagaagtcaggaaagtattacatagagtaactgcaaaggccttctctccttataacacggaaattgatgtatttgagaataagggtattaaaaaagatctttaagagtctacaggaaatagaagagctaggacaaagcatggatgtcatgtagaatattttatgayaaactgctgacctgagccaataattcttgggctggggaaaaaaactgtttctctataga

SEQ ID NO: 473185 - DNA, 602 bp, Homo sapiens
ctattcagtaaatcattgttttacttcataggatagtaagtggccaaaaaaaaaaagatacatatttttcaaagtttttaacctgctcctggggtcaagtctcagtaatatgtagttcaaaagactctgacacagagtatattttatcattttgtcagaattatttaygtatacttcaagagggtttatttctacagttgcagcagaagccagaactgtagcaggaatgagaaaacagattgttcaactgaagagaatatttctgggaggccctgtagtagttgaaccaatatttttgtattcccattgtttaacaaggtgcttgaatgcaagatttatttttagtaactcaagagggcatcactaggaccagtttatggaaggacattttatctatcagagttgtccagcaatagaacagcccagaacaaaaagtaggaagtttggttgcaacagaagcaactctgggttgctgtattatgtagcagaatgagtgaaataaccaccaaagcttttttacaactctacagttctgtggtacaatataagactcaaacacacagaatgagagaaaacaagacaaaaatgtgaatctctatcat

SEQ ID NO: 473186 - DNA, 602 bp, Homo sapiens
ctattcagtaaatcattgttttacttcataggatagtaagtggccaaaaaaaaaaagatacatatttttcaaagtttttaacctgctcctggggtcaagtctcagtaatatgtagttcaaaagactctgacacagagtatattttatcattttgtcagaattatttatgtatacttcaagagggtttatttctacagttgcagcagaagccagaactgtagcaggaatgagaaaacagattgttcaactgaagagaatatttctgggaggccctgtagtagttgaaccaatatttttgtattcccattgtttaacaaggtgcttgaatgcaagatttatttttagtaactcaagagggcatcactaggaccagtttatggaaggacattttatctatcagagttgtccagcaatagaacagcccagaacaaaaagtaggaagtttggttgcaacagaagcaactctgggttkctgtattatgtagcagaatgagtgaaataaccaccaaagcttttttacaactctacagttctgtggtacaatataagactcaaacacacagaatgagagaaaacaagacaaaaatgtgaatctctatcat

SEQ ID NO: 473187 - DNA, 594 bp, Homo sapiens
atttcaatcttttaaatgaattttataatgtcttttaaatgaattttataatatgtataatatagacaattacattttctatagaataaaatactaaatataaaaatactagaaattccaaaatttaaaaagttgaattttagttattttactgacattttgtcttaagtatatttgagatcatttacttgtgtttcagaatttaaataattacattttttaatctgaagaattaaatattgcttytaaaatatctgatgaaaacttatttgttttgaatattcttttgcttttaggtgatctgggctcttgggatctgctcatttgcctgtcttctaagaaagcagaaggaacaccctgtatatccaaggaagtcatgtgccagttaggtttacatcaaaaggtaaatactctcaagatgtgcacagattttatcagccctacagatattaacactggcatttcctggtctataatgtttaagagtcttaaagaattagagtcattgtatctatggagaatcttccaactggccatgccttatatactttaccataaaatagtcaccactttttgtttgataagatctccctc

SEQ ID NO: 473188 - DNA, 577 bp, Homo sapiens
tgcctgtgtctgtgctgaggtgccatgtccagggtcagggacagagattcatgcagtacctgcttctcctcctgctgctgctgaaacaaactgctggtgyacatcccactgtactagtcattgtcctgcccagggcctgtcatccctttagttttccaaagcctgaataagtaaaaaataaattggattttttcagttcagtaggcaaaatccttctttattatttttttctattgtatgtaatattatagtctcaacatctcacagataacttgaaaaaaatgttttagtattgttttagcttttgacctaaaccctggagtggaagtggagcctgtggaatacaagaacagcatacaaaaaagtgcctttcttttttgtcatcctggtatccttgggcttctcttgccatctacctcttttttctttaggagagattccttactattaaacctcatgcatagttctgccagtcaaggccagacacagtggactccttattgaacatggattagtttcacactaaaactgcactatactgataaataataaccgaatagcatcttgtcatctctca

SEQ ID NO: 473189 - DNA, 577 bp, Homo sapiens
tgcctgtgtctgtgctgaggtgccatgtccagggtcagggacagagattcatgcagtacctgcttctcctcctgctgctgctgaaacaaactgctggtgtacatcccactgtactagtcattgtcctgcccagggcctgtcatccctttagttttccaaagcctgaataagtmaaaaataaattggattttttcagttcagtaggcaaaatccttctttattatttttttctattgtatgtaatattatagtctcaacatctcacagataacttgaaaaaaatgttttagtattgttttagcttttgacctaaaccctggagtggaagtggagcctgtggaatacaagaacagcatacaaaaaagtgcctttcttttttgtcatcctggtatccttgggcttctcttgccatctacctcttttttctttaggagagattccttactattaaacctcatgcatagttctgccagtcaaggccagacacagtggactccttattgaacatggattagtttcacactaaaactgcactatactgataaataataaccgaatagcatcttgtcatctctca

SEQ ID NO: 473190 - DNA, 577 bp, Homo sapiens
tgcctgtgtctgtgctgaggtgccatgtccagggtcagggacagagattcatgcagtacctgcttctcctcctgctgctgctgaaacaaactgctggtgtacatcccactgtactagtcattgtcctgcccagggcctgtcatccctttagttttccaaagcctgaataagtaaaaaataaattggattttttcagttcagtaggcaaaatccttctttattatttttttctattgtatgtaatattrtagtctcaacatctcacagataacttgaaaaaaatgttttagtattgttttagcttttgacctaaaccctggagtggaagtggagcctgtggaatacaagaacagcatacaaaaaagtgcctttcttttttgtcatcctggtatccttgggcttctcttgccatctacctcttttttctttaggagagattccttactattaaacctcatgcatagttctgccagtcaaggccagacacagtggactccttattgaacatggattagtttcacactaaaactgcactatactgataaataataaccgaatagcatcttgtcatctctca

SEQ ID NO: 473191 - DNA, 648 bp, Homo sapiens
tgcagtaagtcaccgctttctgtttwgtttatggagttggttctaatgggtcctttatttgtatttagaatattgaagggctattcccatttaaattacttttttcagttccttaagaagcaaattaaaatcttaagattcctaactgtgaaattaccatgtgaattccattaaaactttttccagatcattaccattcaatgggatgaatttaccctgaggtttaggctaccaattatttgtaatgtaagtaactaaatttagtattagttatattaccttttagttgtaggtcactctctgctcatttcagcctgtaaagactacagctacacacatacacacacagaggaatggaatgagcactttacatcaacacttcctgttctggctctagagcctcagcttttgaagctggtgagagcctggcctgtgctgggccttggccacgggcagcgtcagctttgagtcaagtgctggtctggcctccctagctttgagcctctgtcaattcccttaatctgtttaggctttggcttcctcatccatagaatggagatatgaatgattcctacgccgtagtgctttgagagaattcagtgaaattcctgtgtgtaaaacccttccatggtgcctagcacacagcac

SEQ ID NO: 473192 - DNA, 549 bp, Homo sapiens
ccctggagggaaatgaaaacagtgattccccawattgtgacaatagaaatttgctcttgggttacttacaatgtatctgagtattaaaaaattttctttttaaacgtttgaagtaaaactacccagaaacacttagtggctgaccagaaactaaactcctggcatcctcaaaatgggatttattggcttataaatgtcctgtgttgactcacaaaggcacaaactatctaggtaagttttcttctaaatgttgatgggagagctggccactgttatgcaagtttcattgtcctgactaaactgccaaagagattacataaaattatatcaactagacaaaaggaaaaaggaaaaaaaacagaggtgtcttgggaggaatccatatgagaccagtagaccatgagagagacatcccttgccatctacaaggaaaatggattttgttctccatatgcaaaaccatctcaggagcttgcggagacaccacttgcttactagccagaaagagcaggtgcctcctaaattccccacacaggagctcacagtggc

SEQ ID NO: 473193 - DNA, 549 bp, Homo sapiens
ccctggagggaaatgaaaacagtgattccccaaattgtgacratagaaatttgctcttgggttacttacaatgtatctgagtattaaaaaattttctttttaaacgtttgaagtaaaactacccagaaacacttagtggctgaccagaaactaaactcctggcatcctcaaaatgggatttattggcttataaatgtcctgtgttgactcacaaaggcacaaactatctaggtaagttttcttctaaatgttgatgggagagctggccactgttatgcaagtttcattgtcctgactaaactgccaaagagattacataaaattatatcaactagacaaaaggaaaaaggaaaaaaaacagaggtgtcttgggaggaatccatatgagaccagtagaccatgagagagacatcccttgccatctacaaggaaaatggattttgttctccatatgcaaaaccatctcaggagcttgcggagacaccacttgcttactagccagaaagagcaggtgcctcctaaattccccacacaggagctcacagtggc

SEQ ID NO: 473194 - DNA, 549 bp, Homo sapiens
ccctggagggaaatgaaaacagtgattccccaaattgtgacaatagaaatttgctcttgggttacttacaatgtatctgagtattaaaaaattttctttttaaacgtttgaagtaaaactacccagaaacacttagtggctgaccagaaactaaactcctggcatcctcaaaatgggatttattggcttataaatgtcctgtgttgaytcacaaaggcacaaactatctaggtaagttttcttctaaatgttgatgggagagctggccactgttatgcaagtttcattgtcctgactaaactgccaaagagattacataaaattatatcaactagacaaaaggaaaaaggaaaaaaaacagaggtgtcttgggaggaatccatatgagaccagtagaccatgagagagacatcccttgccatctacaaggaaaatggattttgttctccatatgcaaaaccatctcaggagcttgcggagacaccacttgcttactagccagaaagagcaggtgcctcctaaattccccacacaggagctcacagtggc

SEQ ID NO: 473195 - DNA, 549 bp, Homo sapiens
ccctggagggaaatgaaaacagtgattccccaaattgtgacaatagaaatttgctcttgggttacttacaatgtatctgagtattaaaaaattttctttttaaacgtttgaagtaaaactacccagaaacacttagtggctgaccagaaactaaactcctggcatcctcaaaatgggatttattggcttataaatgtcctgtgttgactcacaaaggcacaaactatctaggtaagttttcttctaaatgttgatgggagagctggccactgttatrcaagtttcattgtcctgactaaactgccaaagagattacataaaattatatcaactagacaaaaggaaaaaggaaaaaaaacagaggtgtcttgggaggaatccatatgagaccagtagaccatgagagagacatcccttgccatctacaaggaaaatggattttgttctccatatgcaaaaccatctcaggagcttgcggagacaccacttgcttactagccagaaagagcaggtgcctcctaaattccccacacaggagctcacagtggc

SEQ ID NO: 473196 - DNA, 550 bp, Homo sapiens
ggaatccccagcccagaatgttaatagttctaaggttgagaaacccaaggttaagccaagtcaacttatctatcttctttaaaattgcataagaatgcagtcctgttcttcattcctcttgctttgcagttaatgatcctttgcctggactttctaagtgcccagaagagcaacagccagcatgcaggatggcattcctgaccagttgcacttggcctagcattccaacctcacctgcctcagcttgttcaacctgaaaacctaccaagtgaaagcaagagccacgtgaagacgccttagttatatgcacccacccagacacttgctcagaaaggaatcagtggggccctggccttagaaactggctccttcactgctgtagaaacaacataaatttaacataaaacacktgcttttcttttttcttcttactttttcctgtcttggcaatgcaaggatgccattaggtaaagaaatccttcaccacactaatcctgcagagccagaagagaaaccagcttgttctaacccagctttgtcatggagagaa

SEQ ID NO: 473197 - DNA, 646 bp, Homo sapiens
aaaatgagtcgttgatgatcctccagcaagggatactttttagctcgtgtggtgattgctgcacacgggatatgtgcagcaagtatctgctgagctaataataaacagcctcagacagaaagacagtgggcacaaggtcatgcttaaaaagaccccttgttctactgcatcccagctccccaccatggggcctcacaggccctggtgaccaagcacatcagacctggttcttgctcagtcctgggagccacagaacccagcacgtactttacccccaagaccagactccagcttggcttttgtcctcctctccaggattggtgacctcctaggtcgtgaagctgtgatgagcaaagacacactcmtctccattctcccaacttcaggtccctttgacagtgtcagcaggcatttaaatagcagaccacccacagcagggctggtagatgcagtgaactcaggaagatgcctgcatagactctagtgttaaagacagaatccttacaaggaacccccatagttacctaactgctgtctccagtggtcatagaagtgtgataacccactaatcatcattctctgtctctctgtctttctcatacacacttacacacacatacacacaaccttgttgcttaattttcag

SEQ ID NO: 473198 - DNA, 627 bp, Homo sapiens
acagaatcacatggttctctccaaattatatttgagagagaaagaatagaacaaaatttattttacaaaaatactcagtacatttagggcatatacaaagatgttccagaatgtagcttatctctttaaagacaattaacacagtttctgggcaaggcaaggcaaaatattcagtaacttagcaacaccaacagaagacagccaatattgcagcacatttttctcttggattgggtcagagagtactgcagagaaaatggagtagagagacctgaaatactttcgcacacactgtggtcagtgcagcgtccastgtgtgccacagtaatactagaaactccctggttaggccttggaatccagctctcatttcgtatgtgacctgcagggaagtaagttaaatgcacacgttttatcaagttcaaatgcaaacttaattttaaatgtatgcaacatcagtttaagcgttgtagctattactagcaattgtacctattactagtctgtactctgcacaactttggagtatactgcctactcaaggtggattttagagctctatttgtggcattatatcacggacaaaagcacgttcatcagagtcagaggaatgtggtgcaaatccca

SEQ ID NO: 473199 - DNA, 442 bp, Homo sapiens
tggcctgtatccacagccaggcttttaagagtcacgcttgtcttgtaagtccccaagagtcctcaactctgacttgctctgtcttctgccttctgtttatttgctgtgtagagactctgcctaattctgggatcctggcaagatctctaacctacaacctaatagagctatgtccttttggaatcacaggtaggaaaacaaaaaacaggaaaaaaaaaaaaaaaaacacttaacccaacatccacccttacgtttggagcctaraaggaacgctgcgggccagcaccctgcactgtgggctgacctaacgctttcatacagacctgtgggaatcttaaatgtgcacataaatcagactgagaatatatataggacagggatagaaagcacattggatcacagagtggcaccccctgccaacacgcaactgttctccactttt

SEQ ID NO: 473200 - DNA, 630 bp, Homo sapiens
aataccaatagagaaatgtttcctaatggtatcctggcctctscagtccacataaaactcacaattactcctctaaattctcaggactcaccaggtgaggcaccttgaagcttcaattcataagctacgtggtaaatttacttctgtatagttaaaacaaacaaatgaatagaaccataatactctttagatggtttctgctgtcccagtcttggccttcttttactatgcttctgatcttttctgggtttccttgatatgattatcatctttgtccaacaagccaatatttagtatgcagagcatggtatccagggctattggatacatgtctctgtaaagctgccactgctctctcttcagcctcactgtacagaggaggttgatgtaacacccatagagcccacattttgtactctctcattttctgcctgtatcttccaagctagcatccaaatatatgaactctttgtttgacttctttatttccttgagattctctatgtccatcatcagcatcatattcagggctacatccccacaggactaagaaagctgaaggagctaagttcttggaaaggtcctcctgctccccggagctcctgtggagccagtcatgaccagctggac

SEQ ID NO: 473201 - DNA, 632 bp, Homo sapiens
tttagtagtcacagcagaagaccttgaaatatccctagaagagaagattttaggttgtttggcttatttggagaagaacagaaagccactgctctgttcctcctttgcatttttccctcttcagaaaagcaggctcttataaattttttaaaataattgagccattttgaaatggtatatttttgaccattttaattatttgatttgttttcgtttctgccttgtgcacagtcagaggtaaactaaaatggcttgtgctggtagtgggccatcgtaaaaagctcagatgacagtgggaaattgcttttgtgatgaagggaaacattaataaaagcttctctcatgtttacccttttaaattggccctagaggagttatttaaagtaccccattggcagtggttggctgataccttggttgtgaaatgttctctgtccataggtggtagttgagtttggaaatatctacctttttctgaccttgtttggtttatcaytgaagtttcatttaaactcttttgtcctcttgtgatatggtaaaggccttaagtctttgctcataaagaaaatattgttgtgtgtctaagaaaatgtcacattttgtgtcccacaagggtcttaagatactaaatc

SEQ ID NO: 473202 - DNA, 632 bp, Homo sapiens
gtattaaaaggtttacattaagatttgctaactttactccaactatgatcaacaaatcattataaatattttataactcatatttatgttagaaacatatatggtcataggggaaaaattagaatatatagatgaagaaaaaatgaaacttacctcttatatcatacctagacatgcagattaatattttgctgtagaatttgaatatgtatagttcatatattctaaagaattcatattagaaattttgagaaccataggcacagactatgaycaaataaaaaccaaaaaccaaaaacaccttctcatattcccacctccacctctgactccttagatggtcattacttccacctaaattatagatacacttagcctcgtacctagtttttgtcattagttttgttttttcctacctattctcattttgatcagaaggacttcaatcatactttatcattccatcacttaaatttcctcaatgaattctcaccaagattaaataaattctcaacttctcaatataacacacaacattttttggctctaatttcatctcttcttatttactacgaagcattacaaactctagccattttgaacacacatatgtggtaaatgcagaacccatc

SEQ ID NO: 473203 - DNA, 632 bp, Homo sapiens
gtattaaaaggtttacattaagatttgctaactttactccaactatgatcaacaaatcattataaatattttataactcatatttatgttagaaacatatatggtcataggggaaaaattagaatatatagatgaagaaaaaatgaaacttacctcttatatcatacctagacatgcagattaatattttgctgtagaatttgaatatgtatagttcatatattctaaagaattcatattagaaattttgagaaccataggcacagactatgaccaaataaaaaccaaaaaccaaaaacaccttctcatattcccacctccacctctgactccttagatggtcattacttccacctaaattatagatacacttagcctcgtacctagtttttgtcattagttttgttttttcctacctattctcattttgatcagaaggacttcaatcatactttatcattccatcacttaaatttcctcaaygaattctcaccaagattaaataaattctcaacttctcaatataacacacaacattttttggctctaatttcatctcttcttatttactacgaagcattacaaactctagccattttgaacacacatatgtggtaaatgcagaacccatc

SEQ ID NO: 473204 - DNA, 565 bp, Homo sapiens
aaattcatgtacatgtttgtattagtccgttcttacactgctgttaaaaaatacctgagactgggtaatttataaagaaaagaggtttaattggcttacggttctgtggactgtacaggaggcatgactggtgaggtctcatgaaacttacaatcatgagggaaggtgaagggggagcggcacatcttatatggccaaagcaggaagaagggttgggggaggtgctgcacacttaagaaaaaaaaacaacagatctcctgaaaactgtatcatgagagcagcactaggggaatggtgctaaaccattagaaatcaccccatgagccaatcacctcccaccaggcgccacttccagcattggggattacagttcaacatgagatttgggtggggacacagacccaaaccatatcagtgygatagatttttctccaacctgtaatattatcatcttttccgtttgcttcactagcaaaagattagctcaatcttttgtcttctgctaaagttttgtctgaacacatcagcccacaaagctgcttctttgttaatatctttttgacat

SEQ ID NO: 473205 - DNA, 422 bp, Homo sapiens
cagctagccaaggctgggtgttaccagaaggcaaaatcgtgccaaacactgtttttgttggtggaattgatgctagggtattgtattygtacctcatttttaccttaacatacatcatgaacaatgggatgtgggccctgttacaaacttaaatttttttttgtacttcctggaggtttagaattgcttttaggtttgacccataggtactaaaaatatctttgacaaagggctgctggtcattcggggataaatgggggagaaatttccacctcatggtagtaaaattgtagtaaagttgaaatttttgaatgctgaatttttactctgacgttcagttcttttccatagatggatgaaactgagattggaagctgctttggtagatacggttcagtgaaagaagtgaagataatcacgaa

SEQ ID NO: 473206 - DNA, 537 bp, Homo sapiens
tttctcacagcttcattggaaggcatttcaggacagtgagacacaggcactggctttgccttaggaaagtgcagtagctcttgaacctgctaacggtgtgacccagggtcaataagctttagtctcccatctataaaacggaagctgtgagaattccttgaccacagtgtttttgtgaatgcaggttcttactttttgtctgaaactcatgccgtatgctgtggatttcacagcacacgaaatccacagcatgtgaattctgtagkacctgctgtagtgaaatgcattagttattttccagtcaactgtatgaatattcatgccggggcaaataaagataatatatgggttcacgtcatttcaggtcatagtatttaaccaaatgagttcatgtctggctaggctatgcccctaagttatgaataaattttcaattttcagagctgtggggatgtggaaattgtgcataatggattctgaagttgtactgtgttacaaaagacacatgaagctgtagctggtacaataagccctcaa

SEQ ID NO: 473207 - DNA, 537 bp, Homo sapiens
tttctcacagcttcattggaaggcatttcaggacagtgagacacaggcactggctttgccttaggaaagtgcagtagctcttgaacctgctaacggtgtgacccagggtcaataagctttagtctcccatctataaaacggaagctgtgagaattccttgaccacagtgtttttgtgaatgcaggttcttactttttgtctgaaactcatgccgtatgctgtggatttcacagcacacgaaatccacagcatgtgaattctgtagtacctgctgtagtgaaatgcattagttattttccagtcaactgtatgaatattcatgccggggcaaataaagataatawatgggttcacgtcatttcaggtcatagtatttaaccaaatgagttcatgtctggctaggctatgcccctaagttatgaataaattttcaattttcagagctgtggggatgtggaaattgtgcataatggattctgaagttgtactgtgttacaaaagacacatgaagctgtagctggtacaataagccctcaa

SEQ ID NO: 473208 - DNA, 561 bp, Homo sapiens
actgagttaaaaggaaagtcccaaggacagaaaggaaacccagttttaaaaaactacaaaaggaaaaaaaaattctcctccatttttcatagcctacctccctttgctgaggcaaacagccccccaggagctaggttccattgccagtacaccccaggtttcaccccagagggaagaattggagccttgagaggccagtgatggaattcaggatagtgaaccaggctgcctcaaatctgatcatggtcaagctatgtaaatacctctcagggaaatgcaaggactcatctgttataatgaccagtgccacatcctggtgtggggggcagcaaaccttcctctatcagcccttttcaaccactaatctcctaaatgtaaatcaacacactaactcctacaaggaaaagccccaagctctcataaatctaacacagtccacctttctaacacacaatccaacctggctaaattgaagataacttatcttaacattgttyaacatggaggagtgccagaggataactcaggcatcccatcaagggctagaagccaatgcaccag

SEQ ID NO: 473209 - DNA, 692 bp, Homo sapiens
gctagtaaattcagtgtctggtgaaggcatgcttactgttgcacagacagcagccttcttgctgtgtcttttcatggcaaaaaggggagaaggaactctctggggtctcttttataagggcactaatcccatttatgagggcttcactctcaagacctaatcacctcccaaagcccaacttcttaatatcatcacattgaatgttaagattttaacatgcaaattttgggatgacacattttgtctatagcaataaacgaaacttgtggtcatcttgatctcaaatttctggcctccagaactgtgaggtgacaaacttctgttgtttaaggcacccagtttgtggcactttgtggcatcagtcctagaaaactaatataagcaccaaaaaggattttgatctcaacattcyatttggagagaaccaaacagcccagaggcttgggtaatatggacacctgtagtaagtctattaaatttctatacaacttattcttaaatggaaaacttaaaatgtgcttgcaaattcacaaacaacaatgaagacaaaacaacaatagcaactaaactctcagaaaagcctacaatttgaaggaaaagcagttaaaatataattttatgaactcgctaattacatgggcacacaattcccaacttacctaaaacatacaatattgatataatttagattt

SEQ ID NO: 473210 - DNA, 572 bp, Homo sapiens
tggtcatggattatttttggcccaggaagaaaaaggctgttagacaagccaattccatttagggtcagcgaaagagagcacaacggctagtatttggcctttctaatgttgasgtgggaactgctgactaattgtaacacaaagactgtgctaacggcttttcacttcacttattttccaccatgtatgtgcccatcttggccaggacataactatccagaaattctacaataagagaagggtactcacgcaatgaatggcaattctttccctgataatttcattttcgaattgctaatttcagatatggtgatttagctcattgagtcaggctgcaagagaccaggaattacccagcagtggccacttagctgagaccaagactcgtgtaattagaattctggcactgtaggtgggaatatttactattgctgtgaatagtaaatcataaatgttaaattacattcaatctcagaaataactgcgcaaaacttctcccagcatagataatcaggcaattattgaaatggtgatcgtactcacaggccattgcagcttcgttgtgagaccca

SEQ ID NO: 473211 - DNA, 528 bp, Homo sapiens
tttatctgttactgacacagacccagctattcactgcggggcagaacaaaagccagcaaagggatsgaagaaacccaaaatagatctttcttgaactgatttgtatcagagttataaacaattccaggtatgaaagaaaagtagacaggcaagcacttacagaagacaagagcaaagaatgattttttctgtttctttgttttttcccttctctctctctctctcctatttttccaatccagatccccaacgcaaacattgcaggaggtggttgtgctccccgcaggaggctgttgactgcctgcactcatgcacactggcttcccgcccccagccatccctctattgttacacagcacattttataatgcaaatcactgtctacaacatggctcattattttcctctctgaataaaatatgaacacatcaattatgtctcagtttctaaatgcatacccttgtcgcactgacctctttctgcttttatatttttcagtatgttcctgacatttgtcagttgggttag

SEQ ID NO: 473212 - DNA, 541 bp, Homo sapiens
atattttatttctcactataaaaactaatatactgatcttctatttcatagtaaatatcaatgtgtttggcttctaattctgtaattctcatttatttttgagaatttgaaaaagtttatttttaacttttaagttcaggggtacaagtgcaggtttgttacatagataaatctgtgtcatgcaggtttgttatacagattatttcatcacccaggttttaagcctagtgcccattagttatttttcctgatcctctccctcctcccaccctgcaccctttaaaaagccccagtgagtgttgtgcccctgtatgtatccatgtgtgacagacttctttcccccaaaatgctatatatacaaacaataattcacatcaatttggggacagtaatagatcccctgaaaactaaattaaaaattatgctttatctgaccatttcaactaaaatttagtcaattaaataaaattaaaatctcatttccttagtatcactggccaaatcttaagtgttwaatatccacataagtctagtgcctatt

SEQ ID NO: 473213 - DNA, 503 bp, Homo sapiens
gaaaaggtttagtcaaatatacagataggaactgttcactcagtcattaaggagagccgtgaacaaaggatcatttaaatgatttttttttttcaaatagaaaaactaaagaactgaactatcacaggaatttttcttcactgcagaagctgagatgttccagtaggagaagtaggagatatcttcacttgattggaaaataaacaccgtaactcaaggctctgctgmgtacataaaaaatctggtgagattcattcctgtcattttccctgtcatttcccagcattgctgtaaaatcctgatagtacattcccaagtacaccagccattccagacccacagtcactctgctctttaattcacagaactgctgaaaaagtagacatttctatctaaaagtagaaaaaaaggtttgtatagaaggtatttctgttatacaagtatattacacagcttggggtagtaacaggtccgaaaagctcttctcaaccactgatacttta

SEQ ID NO: 473214 - DNA, 523 bp, Homo sapiens
cagctggttgacaaagcgagactccatctcaaaaaaaaaaaaaaaaaaaaaagaaggaaggagargaggatgaaggaaggcatcgtgaagatgggagagcttagttctgatcctagtcctagttttgggagattttccccttcagggtggctgaatatccacgtgcatttacatgaaatgctgtgaagattcttctgtcatgaagcctgaactgacatatataaccatttttttttttttgagacagagtctcactctgttgcccaggctggagtgcagtggcatgatctcggctcactgcaacatccacctcccaggttcaagtgaccctcctgcctcagcctcccaagtggcccacgccaccatgcctggctaatttttgtattttcagtaaagacggggtttcaccatgtaggccgggctggtctcaaactcctgacctccggtgatccacccacccaccttggtctctcatagtgctgggattacaggcataagccaccgtgcccggctaggcacttat

SEQ ID NO: 473215 - DNA, 523 bp, Homo sapiens
cagctggttgacaaagcgagactccatctcaaaaaaaaaaaaaaaaaaaaaagaaggaaggagaagaggatgaaggaaggcatcgtgaagrtgggagagcttagttctgatcctagtcctagttttgggagattttccccttcagggtggctgaatatccacgtgcatttacatgaaatgctgtgaagattcttctgtcatgaagcctgaactgacatatataaccatttttttttttttgagacagagtctcactctgttgcccaggctggagtgcagtggcatgatctcggctcactgcaacatccacctcccaggttcaagtgaccctcctgcctcagcctcccaagtggcccacgccaccatgcctggctaatttttgtattttcagtaaagacggggtttcaccatgtaggccgggctggtctcaaactcctgacctccggtgatccacccacccaccttggtctctcatagtgctgggattacaggcataagccaccgtgcccggctaggcacttat

SEQ ID NO: 473216 - DNA, 523 bp, Homo sapiens
cagctggttgacaaagcgagactccatctcaaaaaaaaaaaaaaaaaaaaaagaaggaaggagaagaggatgaaggaaggcatcgtgaagaygggagagcttagttctgatcctagtcctagttttgggagattttccccttcagggtggctgaatatccacgtgcatttacatgaaatgctgtgaagattcttctgtcatgaagcctgaactgacatatataaccatttttttttttttgagacagagtctcactctgttgcccaggctggagtgcagtggcatgatctcggctcactgcaacatccacctcccaggttcaagtgaccctcctgcctcagcctcccaagtggcccacgccaccatgcctggctaatttttgtattttcagtaaagacggggtttcaccatgtaggccgggctggtctcaaactcctgacctccggtgatccacccacccaccttggtctctcatagtgctgggattacaggcataagccaccgtgcccggctaggcacttat

SEQ ID NO: 473217 - DNA, 561 bp, Homo sapiens
tggttgacaaagcgagactccatctcaaaaaaaaaaaaaaaaaaaaaagaaggaaggagaagaggatgaaggaaggcatcgtgaagatgggagagcttagttctgatyctagtcctagttttgggagattttccccttcagggtggctgaatatccacgtgcatttacatgaaatgctgtgaagattcttctgtcatgaagcctgaactgacatatataaccatttttttttttttgagacagagtctcactctgttgcccaggctggagtgcagtggcatgatctcggctcactgcaacatccacctcccaggttcaagtgaccctcctgcctcagcctcccaagtggcccacgccaccatgcctggctaatttttgtattttcagtaaagacggggtttcaccatgtaggccgggctggtctcaaactcctgacctccggtgatccacccacccaccttggtctctcatagtgctgggattacaggcataagccaccgtgcccggctaggcacttataatcttaacttactcactataatggaatggatttcaaaacct

SEQ ID NO: 473218 - DNA, 522 bp, Homo sapiens
aattgtgctgagctgaaatactgcgcccgtttctttccattcaacttgtcttggtttgacctagaaccacactgcacaggagaagcaccattttttgttcagactctcatctgaagctggagcttctgctaagcacttgtttgcatgggagtggaaggggacatgygcacccacagttgtggcgaaaagatccttgggtgtgacaaaggaggaggcgggccaaggagacccatccactgtgtccctggaccctcccaaggaatcccaggaactgcgaagcataaaccacatcttcactgtcttagagacgctgctgtccttccttcattttactcatgctaaaggctctatttttcttttctctagaactttctttctttccttttttctgagacggagtttcactctgtcacccaggctggagtgcaatggcgcagtctcggctcacagcaaactctgcctcctgggttcaagcgattctcctgtctcagcctcccaagtagctgggattacaggcgtgcg

SEQ ID NO: 473219 - DNA, 625 bp, Homo sapiens
ctggcaaatttattatgagtctgctgttattttaaagcacttcccctatggctatatgtagcacattcgtggcttctatccctttaagatattatcatttatttgatgtacctgaacttttcataatcactcatcattagtacacagaatataggatgactttagcaaaataattaactggaatcagaagaaaatctaaaaatagatctcacaaataattttgtcctcaagaaatataaaaataatccaggtwtgacgtaaactatgagcctaaataggctaacccaaggcctttaagaggaaaatataatttatttccacacaaattctgcaaaatttagcacatggtagatgttaaataacttttctctgaattagtgaataaatgaatgaatataattctataaaaatttgtacgaatctctagtaataactttgtcttattattattgaaggatttttaatctatgagtgataaaaatactttaacttttttagtaagtagtttactaattcatcctattaatataaatatttactaatcctaccgtatgttagagtatatagtaatttggagatatggaaattaatatctgaatgattgccatcaaaaattatttagcag

SEQ ID NO: 473220 - DNA, 537 bp, Homo sapiens
ctacaataatagataggattgctgataagttgtaaagagataggctagaaaacctaattgacgagtttggtcttagatgggaggagaggtgctcctgtatttagcaggatagaaggaaattagtatgggtgaaggtgtcaggaggcttgtagtatcctttcctttctagtgagccttttgagagtgttatgtgaagacctctattttttatatttttattttgaaataatggtacaatcacacagtagttaccaaaaaatctttttactgtgctttatattcttttaattattttctattgatgcatgataggtgtatgcagtttcagagtgcatgtaataagttaatacattcatataatttgtaaatatcaaatcaatgtatttacartatccatcatcttaaatatgtattttctttatgctgaaccatttaaacgattctcttctattttaaaatacgtaataggttattataaactgtagttatagtactgattaatccaacactaggtcttatttcttccatcagacctta

SEQ ID NO: 473221 - DNA, 613 bp, Homo sapiens
ataatggtaaatcttaaactggtcctatgcactgcctgtccaggtgttttttaatcccttttcttggaaaatggtagttttacacatctttttttcttctcatatataatgactctttcccacgctgcccccacattcactgcctttatgctgtggcttgcttcatggatttcattgagaaactagaggcagtgaaatgaaatttccrtattctcctataattcattcaaccatcttttctacatgcgtcaggctcctcttaaaataaacattcccattctctcaaaggctacaagcatttttcttatgccctatatctctatttctcttgttatcccaacaatatggttcttgtcaatattccttttttcttctacaacttcattatatcactttatagcagatgtttccacttaaatatgttccaatacccctcagcgaaccatagctaccaccttacttcctgtttcccttcatggcatgtgttgtctatagtcactgtgtcctttctcaccatcacaatttactctacttcccaatgcaatgaacctccattctggccaaccacaaaaatggtcttttgttgttgttgttgttgttgttgttgttgttt

SEQ ID NO: 473222 - DNA, 607 bp, Homo sapiens
tatttacaacttgatacactaaaacaaaatggtccctgccttttcttccaaaaatttatcatgtaattctgaaccaatgcagtagtgtaggttctgatactttcgtagcataagtatttgcayatatattcggtcagttacatacatttcgtgggttggtacatgaaataaagaagatttcttttattattgcatatactacatttacttccataaaattaaaatatcttgtcatataatgatagaaagaatatatatttacctagctaactatagttactgcagtggagcactgaaatctgctgttttctatcagcaaataagcaaaaaggggaatatgatgaattatatattctcattatgtgaactttaaaaagcaagatgaacatttaggaaatacccatatatgaggagagtttttttttttttaagtaatggctgactatgtattcagctgttaccttgtcatgcctgagagctatactttagaaaatgatttagaggacatttgaatttcagatgataaactttatataactgaataaaacattctaagaaatttgatagtcatagtaaaaaataagtttaaaaagtcttaaggcaaaaa

SEQ ID NO: 473223 - DNA, 607 bp, Homo sapiens
tatttacaacttgatacactaaaacaaaatggtccctgccttttcttccaaaaatttatcatgtaattctgaaccaatgcagtagtgtaggttctgatactttcgtagcataagtatttgcacatatattcggtcagttacatacatttcgtgggttggtacatgaaataaagaagatttcttttattattgcatatactacatttacttccataaaattaaaatatcttgtcatataatgatagaaagaatatatatttacctarctaactatagttactgcagtggagcactgaaatctgctgttttctatcagcaaataagcaaaaaggggaatatgatgaattatatattctcattatgtgaactttaaaaagcaagatgaacatttaggaaatacccatatatgaggagagtttttttttttttaagtaatggctgactatgtattcagctgttaccttgtcatgcctgagagctatactttagaaaatgatttagaggacatttgaatttcagatgataaactttatataactgaataaaacattctaagaaatttgatagtcatagtaaaaaataagtttaaaaagtcttaaggcaaaaa

SEQ ID NO: 473224 - DNA, 607 bp, Homo sapiens
tatttacaacttgatacactaaaacaaaatggtccctgccttttcttccaaaaatttatcatgtaattctgaaccaatgcagtagtgtaggttctgatactttcgtagcataagtatttgcacatatattcggtcagttacatacatttcgtgggttggtacatgaaataaagaagatttcttttattattgcatatactacatttacttccataaaattaaaatatcttgtcatataatgatagaaagaatatatatttacctagctaactatagttactgcagtggagcactgaaatctgctgttttctatcagcaaataagcaaaaaggggaatatgatgaattatayattctcattatgtgaactttaaaaagcaagatgaacatttaggaaatacccatatatgaggagagtttttttttttttaagtaatggctgactatgtattcagctgttaccttgtcatgcctgagagctatactttagaaaatgatttagaggacatttgaatttcagatgataaactttatataactgaataaaacattctaagaaatttgatagtcatagtaaaaaataagtttaaaaagtcttaaggcaaaaa

SEQ ID NO: 473225 - DNA, 607 bp, Homo sapiens
tatttacaacttgatacactaaaacaaaatggtccctgccttttcttccaaaaatttatcatgtaattctgaaccaatgcagtagtgtaggttctgatactttcgtagcataagtatttgcacatatattcggtcagttacatacatttcgtgggttggtacatgaaataaagaagatttcttttattattgcatatactacatttacttccataaaattaaaatatcttgtcatataatgatagaaagaatatatatttacctagctaactatagttactgcagtggagcactgaaatctgctgttttctatcagcaaataagcaaaaaggggaatatgatgaattatatattctcattatgtgaactttaaaaagcaagatgaacatttaggaaatacccatatatgaggagagtttttttttttttaagtaatggctgactatgtattcagctgttaccttgtcatgcctgagagctatactttagaaaatgatttagaggacwtttgaatttcagatgataaactttatataactgaataaaacattctaagaaatttgatagtcatagtaaaaaataagtttaaaaagtcttaaggcaaaaa

SEQ ID NO: 473226 - DNA, 387 bp, Homo sapiens
tcagaaatccacttccaagggtccagttgcttggcatagcattggaaaacacagaaactgcttatatcattcattgttattaatgctagttgcacagttgtcccagcactgccaagttgcaatgcatggktgtcatgctctcgtctcatattgcctgaagagtgtgttcagtatgacattcacaggcctctgcaatttatacccaaactacttttacaatctagtcattcacttagattctcaggagctactctttatgttgttccgctcagcagggactctcccatatttagaaggaataacgtcagatgtctaaggaaactggcataaattcaaaatacatgatgtaagatcatggctatccaccaatctgcctagtcgtattgc

SEQ ID NO: 473227 - DNA, 387 bp, Homo sapiens
tcagaaatccacttccaagggtccagttgcttggcatagcattggaaaacacagaaactgcttatatcattcattgttattaatgctagttgcacagttgtcccagcactgccaagttgcaatgcatgggtgtcatgctctcgtctcatattgcctgaagagtgtgttcagtatgacattcacaggcctctgcaatttatacccaaactacttttacaatctagtcattcacttagattctcargagctactctttatgttgttccgctcagcagggactctcccatatttagaaggaataacgtcagatgtctaaggaaactggcataaattcaaaatacatgatgtaagatcatggctatccaccaatctgcctagtcgtattgc

SEQ ID NO: 473228 - DNA, 501 bp, Homo sapiens
acgctactaaagcttcatttattttgtaggttggaccttctatagagttactaatgagcttcttgagataatccctaatgacatttcaatttttttcgaggaattaaatattttctatttttttataccttaagtaactggttataaaggggaaaagataagaaccccaccctcaaggagcttacgaagtagtttcaagtatgtaaacttacttttcagaaygattctgtaataggagttttgagatattgctatttccatcttaaagattctggaagattgagactcgccctgggttacacatcggggtggaatttggaacccaatcttccgtttcctgcttcagcgcgcatttcacttgacattgttcacttgacattcacacatttaaacactgctattttaggttttacaatttgacttttaaagtagactgtgtattaaaacaaagataaatatgtacactctgtttaaatatttctagtatgtttccccatcctc

SEQ ID NO: 473229 - DNA, 501 bp, Homo sapiens
acgctactaaagcttcatttattttgtaggttggaccttctatagagttactaatgagcttcttgagataatccctaatgacatttcaatttttttcgaggaattaaatattttctatttttttataccttaagtaactggttataaaggggaaaagataagaaccccaccctcaaggagcttacgaagtagtttcaagtatgtaaacttacttttcagaacgattctgtaataggagktttgagatattgctatttccatcttaaagattctggaagattgagactcgccctgggttacacatcggggtggaatttggaacccaatcttccgtttcctgcttcagcgcgcatttcacttgacattgttcacttgacattcacacatttaaacactgctattttaggttttacaatttgacttttaaagtagactgtgtattaaaacaaagataaatatgtacactctgtttaaatatttctagtatgtttccccatcctc

SEQ ID NO: 473230 - DNA, 501 bp, Homo sapiens
acgctactaaagcttcatttattttgtaggttggaccttctatagagttactaatgagcttcttgagataatccctaatgacatttcaatttttttcgaggaattaaatattttctatttttttataccttaagtaactggttataaaggggaaaagataagaaccccaccctcaaggagcttacgaagtagtttcaagtatgtaaacttacttttcagaacgattctgtaataggagttttgagatattgctatttccatcttaaagattctggaagattgagactcgccctgggttacacatcggggtggaatttggaacccaatcttccgtttcctgcttcagcgcgcatttcacttgacattgttcacttgacattcacacatttaaacactgctattttaggttttacaatttgacttttaaagtagactgtgtattaaaacaaagataamtatgtacactctgtttaaatatttctagtatgtttccccatcctc

SEQ ID NO: 473231 - DNA, 124 bp, Homo sapiens
acctgtccctccacccggtgtcactggcaattgctcacttcctgggcctgcacccactcagctcccctatccctgggcaycagcctcagccagctcccatgtcgactaatgacccttgtccctc

SEQ ID NO: 473232 - DNA, 124 bp, Homo sapiens
acctgtccctccacccggtgtcactggcaattgctcacttcctgggcctgcacccactcagctcccctatccctgggcaccagcctcagccagctcccatgtsgactaatgacccttgtccctc

SEQ ID NO: 473233 - DNA, 611 bp, Homo sapiens
gtgttctcctccaggctagttagctccgtcccaggagacaggatcattcagcacaaayaaggcagcggagaggtggggtggctagagagacggatcatgccttaagtgtccgctccaggtatcaatgatatttataaaactcaacccaaaaagtttcaacataaattgagtgcataaccaggaaggcaaagcagagaaattattcatgtgggatagagtaaatcaggtacggcttcctgtaggaagatgttccattttttttcacatggccctatatacgtggcctgtctaaaagaccaccagctctcacttcttcacaagccaccctaattcttgccacttttgagttccctgccaaggcctggcatctcatctggtggtctctaattctctggctgtagatatgttccttgtgtctggtgtgacctaaagcctgttccctctattaagcaaagaacttggtgtatccgcctcagttttcttatccaccacgcaggagaatcatttcagtgttgaagaacactggacggggttaaatgagacaatgtaattaagcagtgtctgctgcccagcaggcccttgctggacagtggcgaactcctgatgaaagt

SEQ ID NO: 473234 - DNA, 571 bp, Homo sapiens
ggtggaagggggacttctctctctggtcctcatgcaaccccacagaagaacgattggctgtgagtggggaggggtgactagattagctggtggggttttgtgcctgctctgttgggtgggggtgggggcatgtgactgtcagcctcaccatgaggacctggagagagggggscttcccagatggctgggagggttggggagcctccaccaggccagcctgggatgctaggcctgctgatctggggggcatttgcagctccggctgtggttctggccttcctaactgcacgcctgaggaagccccggctcctggtgagcctcattcccctgccagccatcctcccaggggttggaagttgagggtcatgacagacctgaggggacttaggtgggggactagcagaactggtgtctcagtaacaaagattcagtccaacccagggcagacaatgtcccacagggaaacgtgttttcccctcctgtcaagcaaacgaaaatgtgacccggctgcacacactcactgggctttcgggggcatttgattactgggaaattccagagacagggacag

SEQ ID NO: 473235 - DNA, 571 bp, Homo sapiens
ggtggaagggggacttctctctctggtcctcatgcaaccccacagaagaacgattggctgtgagtggggaggggtgactagattagctggtggggttttgtgcctgctctgttgggtgggggtgggggcatgtgactgtcagcctcaccatgaggacctggagagagggggccttcccagatggctgggagggttggggagcctccaccaggccagcctgggatgctaggcctgctgatctggggggcatttgcagctccggctgtggttctggccttcctaactgcacgcctgaggaagccccggctcctggtgagcctcattcccctgccagccatcctcccaggggttggaagttgagggtcatgacagacctgaggggacttaggtgggggactagcagaactggtgtctcagtaacraagattcagtccaacccagggcagacaatgtcccacagggaaacgtgttttcccctcctgtcaagcaaacgaaaatgtgacccggctgcacacactcactgggctttcgggggcatttgattactgggaaattccagagacagggacag

SEQ ID NO: 473236 - DNA, 555 bp, Homo sapiens
ctcgggaggtggaggcaggaggatggctttagcccaggaggccatggggctgcagtgagtggtgattgcggccactgcactctagcctgggtgacagagtgagactcggactctaaataaataaataaatgaataaataaataaatgtcaccttttattaagtagtgtatgtgtgaccttgagttattcaaccaaggtcacacatacaygactaagaggcagcacagagaacaaacccaggtcgggtctggctctaaggcccattttcttagctaggagggctcagtctgagctttaccttgggcttcacttacaggccctgcttaaagagggggaaaggaaaaggagagaacgaccctcgtctctcaagcactatacaccctcattgtgacaacacgcccatgaaggaccctggccagtagggcccccactgatacaatctggtgattcccgagcatacacatcatattttatccccattttgccaatgaggaaactgagacccaggtagttacagtgacgtcctcatagtcacgtggcttgtgataagatggg

SEQ ID NO: 473237 - DNA, 555 bp, Homo sapiens
ctcgggaggtggaggcaggaggatggctttagcccaggaggccatggggctgcagtgagtggtgattgcggccactgcactctagcctgggtgacagagtgagactcggactctaaataaataaataaatgaataaataaataaatgtcaccttttattaagtagtgtatgtgtgaccttgagttattcaaccaaggtcacacatacacgactaagaggcagcacagagaacaaacccaggtcgggtctggctctaaggcccattttcttagctaggagggctcagtctgagcttyaccttgggcttcacttacaggccctgcttaaagagggggaaaggaaaaggagagaacgaccctcgtctctcaagcactatacaccctcattgtgacaacacgcccatgaaggaccctggccagtagggcccccactgatacaatctggtgattcccgagcatacacatcatattttatccccattttgccaatgaggaaactgagacccaggtagttacagtgacgtcctcatagtcacgtggcttgtgataagatggg

SEQ ID NO: 473238 - DNA, 555 bp, Homo sapiens
ctcgggaggtggaggcaggaggatggctttagcccaggaggccatggggctgcagtgagtggtgattgcggccactgcactctagcctgggtgacagagtgagactcggactctaaataaataaataaatgaataaataaataaatgtcaccttttattaagtagtgtatgtgtgaccttgagttattcaaccaaggtcacacatacacgactaagaggcagcacagagaacaaacccaggtcgggtctggctctaaggcccattttcttagctaggagggctcagtctgagctttaccttgggcttcacttacaggccctgcttaaagagggggaaaggaaaaggagagaacgaccctcgtctctcaagcactatacaccctcattgtgacaacacgcccatgaaggaccctggccagtagggcccccactgatacaatctggtgattcccgagcatacacatcatattttatccccattttgccaatgaggaaactgagacccaggtagttacagtgacgtcctcatagtcrcgtggcttgtgataagatggg

SEQ ID NO: 473239 - DNA, 580 bp, Homo sapiens
ctgccaaactgtcccctccctggccctttttggtgtaaagggagttcagcaggtgcagytgtgcgccctcaggcttagaggcttagaattctctgcagcacctaaaggccgtgagcttggattcaaaccagagccccttctggtcctggagtctgggacgaccgcagccccaccatgaccttggggtggagcccctgtcaggagcgcctccacgggtggcactgggctccccgtccctctttcacccccgcacgggcttggctgctggcttctgtggttctgctactcccactacctagagaacgccccgggccgcgccgatcctcaccagctcaggagcttcttgtccgtaggagaggctttactggatgtggggttcggtgtttatggagatgcagcccttctccctccagcttcgtgcgtgtgtgcacagacagcgagtgaggccgtcagggtgggctcctgccacgtcttggcccctccccagagtcgctggacttaggagctagtctgcatgtgacagaccttcccagtcagtggcaggcgtttcccgggacagtgtctgtgtggcggtcggcgt

SEQ ID NO: 473240 - DNA, 580 bp, Homo sapiens
ctgccaaactgtcccctccctggccctttttggtgtaaagggagttcagcaggtgcagctgtgcgccctcaggcttagaggcttagaattctctgcagcacctaaaggccgtgagcttggattcaaaccagagccccttctggtcctggagtctgggacgaccgcagccccaccatgaccttggggtggagcccctgtcaggagcgcctccacgggtggcactgggctccccgtccctctttcacccccgcacgggcttggctgctggcttctgtggttctgctactcccactacctagagaacgccccgggccgcgccgatcctcaccagctcaggagcttcttgtccgtaggagaggctttactggatgtggggttcggtgtttatggagatgcagcccttctccctccagcttcgtgcrtgtgtgcacagacagcgagtgaggccgtcagggtgggctcctgccacgtcttggcccctccccagagtcgctggacttaggagctagtctgcatgtgacagaccttcccagtcagtggcaggcgtttcccgggacagtgtctgtgtggcggtcggcgt

SEQ ID NO: 473241 - DNA, 580 bp, Homo sapiens
ctgccaaactgtcccctccctggccctttttggtgtaaagggagttcagcaggtgcagctgtgcgccctcaggcttagaggcttagaattctctgcagcacctaaaggccgtgagcttggattcaaaccagagccccttctggtcctggagtctgggacgaccgcagccccaccatgaccttggggtggagcccctgtcaggagcgcctccacgggtggcactgggctccccgtccctctttcacccccgcacgggcttggctgctggcttctgtggttctgctactcccactacctagagaacgccccgggccgcgccgatcctcaccagctcaggagcttcttgtccgtaggagaggctttactggatgtggggttcggtgtttatggagatgcagcccttctccctccagcttcgtgcgygtgtgcacagacagcgagtgaggccgtcagggtgggctcctgccacgtcttggcccctccccagagtcgctggacttaggagctagtctgcatgtgacagaccttcccagtcagtggcaggcgtttcccgggacagtgtctgtgtggcggtcggcgt

SEQ ID NO: 473242 - DNA, 587 bp, Homo sapiens
ctctccctgcatcggccttcaggcgggatgggcagagtttagaggcttagagaaccgastcgtggcgcatcggagcctggctcggccttccctagtgtctgccgtcctgggcagccagggcccacgtccgcagatcagacgctgcaaggctgtctatccgactgcaaatgcgattcacccgtggagatttctgctcaggatccaagttttcccactcgccacctgtctcctgatagcatgtcccttaacgaaaatggcataagttgctggtgcaaaacaaagctttccagggaagctgttggaagccagtttccgggcaggaggctgccagcaactccctgggatggtggccagcccattcccggggccctttaccatctgatggtggaggtgacggtcttgggtgttctcagactgccagctcagtgggttgcgtctgcctctctcaggatggaagtctgcagtgtccctcctgcaaaaccatctatgagagaagacggggacccagccccagggaaagatggaggtattacggttccagatgtcgctccccggccacgaggactgcgggaccatcctgatagttt

SEQ ID NO: 473243 - DNA, 587 bp, Homo sapiens
ctctccctgcatcggccttcaggcgggatgggcagagtttagaggcttagagaaccgagtcgtggcgcatcggagcctggctcggccttccctagtgtctgccgtcctgggcagccarggcccacgtccgcagatcagacgctgcaaggctgtctatccgactgcaaatgcgattcacccgtggagatttctgctcaggatccaagttttcccactcgccacctgtctcctgatagcatgtcccttaacgaaaatggcataagttgctggtgcaaaacaaagctttccagggaagctgttggaagccagtttccgggcaggaggctgccagcaactccctgggatggtggccagcccattcccggggccctttaccatctgatggtggaggtgacggtcttgggtgttctcagactgccagctcagtgggttgcgtctgcctctctcaggatggaagtctgcagtgtccctcctgcaaaaccatctatgagagaagacggggacccagccccagggaaagatggaggtattacggttccagatgtcgctccccggccacgaggactgcgggaccatcctgatagttt

SEQ ID NO: 473244 - DNA, 587 bp, Homo sapiens
ctctccctgcatcggccttcaggcgggatgggcagagtttagaggcttagagaaccgagtcgtggcgcatcggagcctggctcggccttccctagtgtctgccgtcctgggcagccagggcccasgtccgcagatcagacgctgcaaggctgtctatccgactgcaaatgcgattcacccgtggagatttctgctcaggatccaagttttcccactcgccacctgtctcctgatagcatgtcccttaacgaaaatggcataagttgctggtgcaaaacaaagctttccagggaagctgttggaagccagtttccgggcaggaggctgccagcaactccctgggatggtggccagcccattcccggggccctttaccatctgatggtggaggtgacggtcttgggtgttctcagactgccagctcagtgggttgcgtctgcctctctcaggatggaagtctgcagtgtccctcctgcaaaaccatctatgagagaagacggggacccagccccagggaaagatggaggtattacggttccagatgtcgctccccggccacgaggactgcgggaccatcctgatagttt

SEQ ID NO: 473245 - DNA, 587 bp, Homo sapiens
ctctccctgcatcggccttcaggcgggatgggcagagtttagaggcttagagaaccgagtcgtggcgcatcggagcctggctcggccttccctagtgtctgccgtcctgggcagccagggcccacstccgcagatcagacgctgcaaggctgtctatccgactgcaaatgcgattcacccgtggagatttctgctcaggatccaagttttcccactcgccacctgtctcctgatagcatgtcccttaacgaaaatggcataagttgctggtgcaaaacaaagctttccagggaagctgttggaagccagtttccgggcaggaggctgccagcaactccctgggatggtggccagcccattcccggggccctttaccatctgatggtggaggtgacggtcttgggtgttctcagactgccagctcagtgggttgcgtctgcctctctcaggatggaagtctgcagtgtccctcctgcaaaaccatctatgagagaagacggggacccagccccagggaaagatggaggtattacggttccagatgtcgctccccggccacgaggactgcgggaccatcctgatagttt

SEQ ID NO: 473246 - DNA, 632 bp, Homo sapiens
agctcctgagagtcagagtgtgacaggcagggaccgggggctgtgttagaccaggtgaccacggaaggctggagcagtggtgtctgcactgtgacatgaatagggactttgtggctgcagccagacccaaggggctgggggccctgctggagtgattggaccctgggcgcccrcccccctccgattgggagaggcagccccagggacccccacgcctgtctccgtggctcaccttttgtcccccgtggccacagagctggtgccctacacaccacagataacagcttgggacctggaagggaaggtcacagccaccaccttctccctggagcagccgcgctgtgtcttcgatgggcttgccagcgccagcgataccgtctggctcgtggtggccttcagcaatggtgcagggactgctgtggggcctgggtgagggtgacggctgaggagagtggtgggccctaggagcccctcaccagcaagcgccttcaatgattgagcccctgtgggggcctttgggagagtaggtgtggatgaattgggctttatctaaaggggtaatatgtgtattgaaaaatacacacgtagtgaacaccaaatcccgggagtagtgcaagtggtgggtttgtcag

SEQ ID NO: 473247 - DNA, 616 bp, Homo sapiens
ctgtatacatttctgttgagagtaaaattgctgagtcaaaggtaatgcatctatcagtttttgaagatactcctcaatttattgctttcttttttctataatctggtaactattttaatatttcattatttcctttaattatatttaagttatacatctcattattactcttttagtgtttaccctagatattataatgtgaatccttggctgattacaatttwttacaagttactattttacccaattttctgccaatacaagaaataatttaactccacttattcttcaaccaacatatatgctattgtggcctctaattctctccatgttctaagaccctcaataataatttttaatattttattcattcagtattaacataggtttatccacatatctcttcatttattcttgaacttccaaacttctctctgaaatcattttgctttctttgtagaacagcttttaataattattttgtcacagctctgtttacaattatttctttcagtttttgtctgaaaatgtcctttatcatcgatatttttgaaataaatatttgctggatttagaattatagtttcacagtttttttttcagactgaattcaact

SEQ ID NO: 473248 - DNA, 589 bp, Homo sapiens
agatactgtttcttctccctccaaaacagatggttctcagcaacatgcttcctggtttgaaatttgagactctacagacaaacaaaccacaattaagcaaaggtcaggctaaatactagccatataaacaacaccttaaccataagcacaaagctgatttatgtatctcaattcattatttgtcttttatgatagggcataacatgaataacagagaagacaaagagtcaaggagctgcctgactccaaaagtagttttcctgtttgttcttgtatccctccgcagcctgaacctttctaacactaccacgtgttgagtcttctgtctttttctactttcccccgcccctattttcactactggggttgttggtgtgtatttatgtatgtgtgtgggtgtttttttgtgaatacgtatttatgagaagcacctttgttgcaatttgcaaaataaagatataatgaatggaaacatattttgctttttaatgcactgatttcaggttaataaattcatgttgttcmtcataaataggtcattaactggaactccatctctgcaaacttctcctttcttcacccgtgggca

SEQ ID NO: 473249 - DNA, 644 bp, Homo sapiens
gctttttgccacatttctaattatgtarggtatttcataccatatcaaaagagcttttatttctactagactgcaggcttctcaaggagagaggtcctgtgttatttacctttgattcccacaataaatgtgtacctgacaatgataggtgcacagaagatgttcagtgtgtttggggaatattagaatgacaaattttttgatatgttaatattataaggcatcatgaaattagttgttcccagacttttaagaatacttcataccttaaaaagatgttagaaggaatgtggacctctgcttctggcaatgtcagagtaactgacactagacccactcccttgacataaaaagttataaaactcaaccaagtaattgaagcaaatgttttcagacttcggacaataggcagcacagtactttgatccctgagaaaagggaaacaaatgaggtgaaccctataattattccagctttttgcctggaagcactttccaaataaaggtaagggagagagatcccaagcagggtacttagctatggaggcagatatcataattggaggcagcaggaaatttgctgggcagggctccagggaggagagagctgtgcagaaaaggagcaccagaaataagcacagaagt

SEQ ID NO: 473250 - DNA, 627 bp, Homo sapiens
attatgtattactaacatagtaacataatatattactaacatagtaatataatcaattatrttactaatcaataagtagtctgaaaaaccccaaatactagtgttaccaaaacaccaggggttcagtctaggtcctgctgcacactgcacaaaaagccaatcactaagacaatgggtattgccaggaaagaaggctttatttgggtggtgcagccaaggagcatggaagatcagtcttaaatccatctcctcagcctactaaaattagaggtttgtacagcagggaaagaatgtaaccatatgtgggaaaatagaaattagggacgttagaaagagaagttgatcaacaggaagcaggtggtcatttaagcaatcatgatggatgaggagtctggcatctcattgctggatgtggtcatctggtaagttttagcttcttgatactattttggaggcccaatggtctatctatctgagaaaggaactcagataagacaaatgtaactttctcaagctttaagacttggagggtcaatttctacgtttattcaaagaaagcataaaaatcagttgcatgggacaattgggctggtttcacttagaaattgaacaatataaattttaata

SEQ ID NO: 473251 - DNA, 627 bp, Homo sapiens
attatgtattactaacatagtaacataatatattactaacatagtaatataatcaattatgttactaatcaataagtagtctgaaaaaccccaaatactagtgttaccaaaacaccaggggttcagtctaggtcctgctgcacactgcacaaaaagccaatcactaagacaatgggtattgccaggaaagaaggctttatttgggtggtgcagccaaggagcatggaagatcagtcttaaatccatctcctcagcctactaaaattagaggtttgtacagcagggaaagaatgtaaccatatgtgggaaaatagaaattagggacsttagaaagagaagttgatcaacaggaagcaggtggtcatttaagcaatcatgatggatgaggagtctggcatctcattgctggatgtggtcatctggtaagttttagcttcttgatactattttggaggcccaatggtctatctatctgagaaaggaactcagataagacaaatgtaactttctcaagctttaagacttggagggtcaatttctacgtttattcaaagaaagcataaaaatcagttgcatgggacaattgggctggtttcacttagaaattgaacaatataaattttaata

SEQ ID NO: 473252 - DNA, 537 bp, Homo sapiens
tgaaggctgacatgatcagcatgrttttcttggtctctgatacttggcacagagcttcatactgtgaagaatggactgcttcctgctctgtcctcttcccaccccgatcacccatcctcttgctctctgcatgtcctcagtgagactctcctgacatccatccccagctctgggtcctctgttatagactctcctagtgagttgctggcatttgtcacattttgtaaccatacaatcatttgtgtgaatagttgtgtgatatggtttgactctgtatctccacttaaatcttgtctggaattgtaatccccatgtgttgagggagggacctgtaatccccacgtgttgagggaagcaggtgattgaatcatgggggcagtttgacccatgctgttcttgtgagactgggttctcatgatatctgattattttatgtgtttgaaagttcctcctttgctctgctctctcctgccgccttgtgaagaaggtgcctacttccctttcacctttgccatgattgtaagtttcgtgaggctt

SEQ ID NO: 473253 - DNA, 537 bp, Homo sapiens
tgaaggctgacatgatcagcatgattttcttggtctctgatacttggcacagagcttcatactgtgaagaatggactgcttcctgctctgtcctcttcccaccccgatcacccatcctcttgctctctgcatgtcctcagtgagactctcctgacatccatccccagctctgggtcctctgttatagactctcctagtgagttgctggcatttgtcacattttgtaaccatacaatcatttgtgtgaatagttgtgtgatatggtttgactctgtatctccacttaaatcttgtctggaattgtaatccccatgtgttgagggagggacctgtaatccccacgtgttgagggaagcagrtgattgaatcatgggggcagtttgacccatgctgttcttgtgagactgggttctcatgatatctgattattttatgtgtttgaaagttcctcctttgctctgctctctcctgccgccttgtgaagaaggtgcctacttccctttcacctttgccatgattgtaagtttcgtgaggctt

SEQ ID NO: 473254 - DNA, 537 bp, Homo sapiens
tgaaggctgacatgatcagcatgattttcttggtctctgatacttggcacagagcttcatactgtgaagaatggactgcttcctgctctgtcctcttcccaccccgatcacccatcctcttgctctctgcatgtcctcagtgagactctcctgacatccatccccagctctgggtcctctgttatagactctcctagtgagttgctggcatttgtcacattttgtaaccatacaatcatttgtgtgaatagttgtgtgatatggtttgactctgtatctccacttaaatcttgtctggaattgtaatccccatgtgttgagggagggacctgtaatccccacgtgttgagggaagcaggtgattgaatcatgggggcagtttgacccatgctgttcttgtgagactggrttctcatgatatctgattattttatgtgtttgaaagttcctcctttgctctgctctctcctgccgccttgtgaagaaggtgcctacttccctttcacctttgccatgattgtaagtttcgtgaggctt

SEQ ID NO: 473255 - DNA, 608 bp, Homo sapiens
ttttcatttcaaactggggctatagtgataatggttcctaataaatgtctccttgtgagactggggccctctgtaaaatcctactttaaagcaaggatttctcacttgagtcaataggctgtcagtcccaagattataaaaaagatggtacaattttgttacatggctgtagattgactaggyctgtgctatgtttgaattttcagagggtagttgccttttaggtttataatcttagaaaatctgtgggttatttgtatatgggagcttagcctgtgtcccatctgttctcaataaaaggttgtactctacccatttaagtccccccaaaagctgaaaccattttaatagttctgttccatgcaattactcctccatacactgggacctgctcacagaattggcatcttgattgggtaaggctgggccagagcttctgagagaggactctcacaggctgtggtgatatatgctaacttcccttactctttcctccacgcacaccatattcctcctcgaacgggagacttcagtatgaggcctggagtggtgcggcttctagcccttgttgccgtctgcattaagaaccttcactttcttcactagat

SEQ ID NO: 473256 - DNA, 554 bp, Homo sapiens
gcataatatgactcaatggaatgtactgctagtggtctgatttttatttagaaagagacttaaaacactaagctgcattaactatattctaaaactttatgaaaaataaagttgagtttgaggctcacttcctcaattctgrataatgtcctaaaaaaatagaaaacaaaataaaaaaattattaatttattctggcttttaattttatataattcttatgggtttttttgccttgggatatcagcagatttatttgtctatttcacaaataattagtggtaaaatctccctgtttaaaatgttgttaataacatcataaaataaaaaataaagttataaaattaatcacatttttaaaaattcatttgtgtattgcagccatgtaaatgtcaaccttatacttgactggtccaagaggtggtaatagtgatgaactgttctgataatattaccatgcatttattatggtacttcagctttttcaaagcactttcacacacaagtgaggaaactggtcaagggagtttaagtgacttgcccagatgcaaagcag

SEQ ID NO: 473257 - DNA, 505 bp, Homo sapiens
tccaatgcaaaaaacattcatgaagaaatgttgtcaacaaaatgtcatcaacaaatcaactgtatgtgccttctgtctcttatcttaaaaggaacaaaattggatatcagagagtgaagataatcacattaaaaaaaaacctgaaggtaaaaagcccaagatacaaactgagaaaactcttttataattgggaaaataaatggcatgtccatatccatgggagatccaaacagaattctcctaatatgatacttgctttgaaagataaataagctatgtatattattggtaaaattattagagactctcctcccaacgcctgaagacacagacaaacactcttagtttcctaagcataygaaatgatgtatcaagacaaaataccctgctatttcttactatttgatcaatattcatactgatgtcatacttacaacatatcctcttttgatagagtacaattgctttcgataagtccagacaggttctctgaattgaatgaaac

SEQ ID NO: 473258 - DNA, 566 bp, Homo sapiens
gagcccgtgcgcaccgcagcgcagcgcagcggccggggggtgcgggcgccctcgccgcccggctacctaccgccgcctgggcgccgccgctgcctcccttmcccgcttctaccctccagcagacgcccgccggagcgacccctcccagggtgaccgggggaaggtgggtggcgttgacctcaccttgcttggggagggtcggggactcggggagtgagtttctctctctctactccccggggtctctcctcgacccccatctcctggggtatcccccgctcggatccgccgcccagagtgaccccgcccctgctctccggcaggtgttccacgtggccatagcgtttgcgtcacaatgacctggcggacaggtgggagccacagcgtacaccccagggttccctctgtgctgtgcgtagtgcctactgcttgcttccaggttaaatttctgtagctttagaggacaggagacttcatgacttcactgccaagaaaagttacagaggcctgctgtacctggaaatcaagtttgagcttcgagaataaaggtcatgttttaaaaacag

SEQ ID NO: 473259 - DNA, 566 bp, Homo sapiens
gagcccgtgcgcaccgcagcgcagcgcagcggccggggggtgcgggcgccctcgccgcccggctacctaccgccgcctgggcgccgccgctgcctcccttccccgcttctaccctccagcagacgcccgccggagcgacccctcccagggtgaccgggggaaggtgggtggcgttgacctcaccttgcttggggagggtcggggactcggggagtgagtttctctctctctactccccggggtctctcctcgacccccatctcctggggtatcccccgctcggatccgccgcccagagtgaccccgcccctgctctccggcaggtgttccacgtggccatagcgtttgcgtcacaatgacctggcggacaggtgggagccacagcgtacaccccaggrttccctctgtgctgtgcgtagtgcctactgcttgcttccaggttaaatttctgtagctttagaggacaggagacttcatgacttcactgccaagaaaagttacagaggcctgctgtacctggaaatcaagtttgagcttcgagaataaaggtcatgttttaaaaacag

SEQ ID NO: 473260 - DNA, 531 bp, Homo sapiens
atctgtattatttgactgtattcccaccaagcccagagcctgcacaaagcatgtgccctgagtaaaatgcctctgaatgaataaaatgagggtagagctttgatcaattggggtcattatactagaaggaggcttataactcatttagtacaatcctattgtcttacagatgatgtgatacacagaggttaaagggcttactaaggtccyatgttgggtttagtgctagagctggacccagaacccagaacacacaggcggattctttcgcctcctcgctctgctaggggcatgaagacagaagacagcccccacagtcattctaacatttgttggctggctattgggaatgcagaatacattttcccatggaggcaggttttttcttcttcttttttttaaatggtggttcggttcccaggccaggccacaaaagcctatttaccccatagctgagctcaactataaaaccagcggtagctctgaggcctcactgaacccccagctccgagcctgcagtccgaggggcag

SEQ ID NO: 473261 - DNA, 624 bp, Homo sapiens
ctgcgttaaaataaagcagtgcagttgatgaaaaagggccgagtttagctcccaggtttctccataagcttttgtggtatggagaagaaattcagaagatcttctatgttttatggaaagaagagggaggtggctgagggtgctggccagtaaacttgccagggaatggcactgggttagcrgccaaatggaagtccaaggtaatcagagttgccattagggagattcatcagaggaaggaggctgaggattttagaacattcctagggctgaggaaggagaccaggcattcccctggccacaggtttcaggaactcaccatgcaagcccagatgctgcagcaagataagcaagaaaccgggggacagggagtggcctcaaggacaccatgtcccctgcctacccccaggacacagtcagcccaatgccctccctcctggggcagagaatgcttctgaaagggcatccaaaaagagatgatttaaaacagtacagaggaagccaaattttgattgactcaacatttaaactgaaacaacagaggcttcttaaccttattcaactgacaagtgtagaagaccccatcatgctgctcatgaagaaactgctttagttccagaaaat

SEQ ID NO: 473262 - DNA, 541 bp, Homo sapiens
ttattacttattttgagaaccaaagactgatggtgttatcaactgtggctttgtggtggtatctaactgccacttggaaactataaacatttttgttgttaattcacaaagagaagaaaaaaatcatgatttatgttttttttctgagacatgctgcaattctgatatggtcatattaaatgagatgaccaggttttcttcaaatgtataagataattagtaagtaaaggctttttttttwaaaaaaaaaaagttctctgtgttggctttactggatctattttcaatcacactttacataaagatctaaagatgaaggggatttctgatgtgctgagcagacaggctataaatcagggaggggaagaatctagtcactctcatgtccctgtggtttaaaaatagtggcaaaacatcactttagtcggacaactgtctaatgtaagcattcttattgtttgtgttatcacagaaattctcactaagagctagcctgtaggtgttgtgggtgagaagatggggcaaatggcattttaaacag

SEQ ID NO: 473263 - DNA, 628 bp, Homo sapiens
aacccatgctggattttttatttagatgatattgttagtttgtcatctgctgcagatctatgcgggaggcgccccaggggactgcatttgcttctgaacaatgctggactcaaattggaaaaatgtcactttggcgagaacaaattattgttcggatcacgctgcctagagccggtgtctctgggtgggttccgacctgaccttttctgaaccagactcgtcaagtaagtacttcagccccactcgaccacttcgcttggaaaacagctcaactacttaaaagtgttaagtatgaattttgagctgwggactcatcaccaagcaatcaatttcccgacagaaggcagcccttctactttttgtagccgggaaaccctgaacagcggaggctcacttgctggcgacagatgggattccacacagatagcagaatcacactgctagggtttatcctaccggactcaaccacaccagttttggaactctgcacaaggaggccgagtttgcttagcctcactttccctatttgtaagagaagcatattaacaatcatggttgcctcgtttgtggctaggcatatccaatacacgccagggtcttagcatatggcaagttatcagtaaatgtc

SEQ ID NO: 473264 - DNA, 628 bp, Homo sapiens
aacccatgctggattttttatttagatgatattgttagtttgtcatctgctgcagatctatgcgggaggcgccccaggggactgcatttgcttctgaacaatgctggactcaaattggaaaaatgtcactttggcgagaacaaattattgttcggatcacgctgcctagagccggtgtctctgggtgggttccgacctgaccttttctgaaccagactcgtcaagtaagtacttcagccccactcgaccacttcgcttggaaaacagctcaactacttaaaagtgttaagtatgaattttgagctgtggactcatcaccaagcaatcaatttcccgacagaaggcagcccttctactttttgtagccgggaaaccctgaacagcggaggctcacttgctggcgacagatgggattccacacagatagcagaatcacactgctagggtttatcctaccggactcaaccacaccagttttggaactctgcacaaggaggccgagtttgcttagcctcactttccctatttgtaagagaagcatattaacaatcatggttgcctcgtttgtggctaggcatatccaatacacgccagggtcttagcatayggcaagttatcagtaaatgtc

SEQ ID NO: 473265 - DNA, 459 bp, Homo sapiens
gtgataggaggggaggtggggagaagtgggtatgttttcagagatacttaggagacattttggctgccatgcctatcagagtgcctaygccatgataggacctaataaacattttctgaataaaggaatgattaaattatattatcttgccatggatgacattggactgaagcttgggtgttgagtttcagaagatgatgccctgtgtcactggaaagatgataataccatccactgagatggaaaaaactgggagaaaatagtcctcgggagatgagaggaaaggttaggatggtacacagtaaaactctgaaaatcctattactgtggcccagtcattaggcagattatctagttcacgcccaggacagacgtaacatttcaacaacgtggtctcgggcacacatgcgcaaatgggtatttggcagacccagatgacagaaggttgcaacaccttgt

SEQ ID NO: 473266 - DNA, 639 bp, Homo sapiens
tgataggaggggaggtggggagaagtgggtatgttttcagagatacttaggagacattttggctgccatgcctatcagagtgcctacgccatgataggacctaataaacattttctgaataaaggaatgattaaattatattatcttgccatggatgacattggactgaagcttgggtgttgagtttcagaagatgatgccctgtgtcactggaaagatgataataccatccactgagatggaaaaaactgggagaaaatagtcctcgggagatgagaggaaaggttaggatggtacacagtaaaactctgaaaatcctattactgtggcccagtcattaggcagattatctagttcacgcccaggacagacgtaacatttcaacaacgtggtctcgggcacacatgsgcaaatgggtatttggcagacccagatgacagaaggttgcaacaccttgtagactgatggcattgacacttaagggttcatagcagagttccattttgagttttaaccttgctgaccatagctgaaacagcctctgatagtaaataatgatgatggctactgttcattgagcacctctacattccatcattcattcattcaataaatatttgttaagcctctctaataagt

SEQ ID NO: 473267 - DNA, 613 bp, Homo sapiens
actgcagcagtaattcagtgggtttatacttgtgcaaccttttaaaaacaggccttaaaacattcatctgttgaaccaatttaccagctttcaataaagcatctttaagatactttctgttacatttatatgacataagctgtattattttaataatctgtgcttgagatatatggtgatgagggaattattgctcacctggggagatggtgtaattagcaaagaggcacagtcrgggaataaaaatgattaaaaaaaaaagaaaagcttgctgaaattaaccagccaccgctactaggccactatgatgttggcttaagctgttggggacgcaatggagtgggaagcagagaagaggaaaaccaagcaaacttctggtgcctgaaataattacaatttcttactcatcatttctcaagctcacagggagtaagaatgtgcacccagccagggcagacaaatgaacaccttccccacagccagtcgaagggacgcctgagttgagctaatgggctagggcaagaagggaacaggtgtaattatactaatgatttattgaatgtttgattaattggaaattaagtgaatgcatagtggcagatttgtcatagca

SEQ ID NO: 473268 - DNA, 494 bp, Homo sapiens
gtttcactctctttattttgtaagtgtaaaatgcacactagattttgaaggtttaggacccatacacgcacacagatacacacacctaaayatattatatatcataaataacttttggccaggtgcagcggctcatgcctgtaatcccagcactttaggaggctgagttgggtagatgacttgaggtcaggagttcaaaccagcctggccaacatgatgaaaccccatctctactaaaaacacaaaaattagccatgtgtggtggtacacgcctgcagtcccagctacctgagaggatgaagttggataaatgcttgaactcaaggaggcagaggctgcagtgaaccgagattgtgccactgcactccagcctgggcgacagagcgagactccgtctcaaacacaacacaacaaaacaaaacaaaacttttaatttaagtagatgatgagaatactttggctatataggatgaatagattatatgaggaaaatt

SEQ ID NO: 473269 - DNA, 494 bp, Homo sapiens
gtttcactctctttattttgtaagtgtaaaatgcacactagattttgaaggtttaggacccatacacgcacacagatacacacacctaaacatattatatatcataaataacttttggccaggtgcagcggctcatgcctgtaatcccagcactttaggaggctgagttgggtagatgacttgaggtcaggagttcaaaccagcctggccaacatgatgaaaccccatctctactaaaaacacaaaaattagccatgtgtggtggtacacgcctgcagtcccagctacctgagaggatgaagttggataawtgcttgaactcaaggaggcagaggctgcagtgaaccgagattgtgccactgcactccagcctgggcgacagagcgagactccgtctcaaacacaacacaacaaaacaaaacaaaacttttaatttaagtagatgatgagaatactttggctatataggatgaatagattatatgaggaaaatt

SEQ ID NO: 473270 - DNA, 651 bp, Homo sapiens
tgaaatttaaggtgatattttcagtgaaatggctagtctatgtcaatgtgagtgagtatctcaactttccaaccagactgtaagcagcatttgaatataagctgtctctcacccttcagtctgttttcactttcctgccacagtgccttgtgcataactggtgcctaaatagttataattactttgttgataaacacacccaactaaattgcccttaaatgcaacaatccttcttgcaaccctcttaggaaagagggtttgctgcatttaagggcaaattagaaaagtagcaagctctgaaatttgggaaggccacagaaaagtgagtagatttataaggagaccctttgtcattaataattcaygcagggagaaaactacaattggaaaaaacctgctctcactgctataggtacatttctatagtcatgcaatggaaatactgccagcttggtaatgagaaatgggatttatacatgggctgattgcatcagatcaaatgtagttgttccatttagagatacagtttgacttttggaatactcaaatcaaggaaataatgaactaggatgtaatagatatctgctatatccttacttcaaaaatcaagaacatacccagtattgtcttttaagcatggtatgtgtttcc

SEQ ID NO: 473271 - DNA, 537 bp, Homo sapiens
tccccaccccattaaatggactttacatttttttctattgcttgggtcaaaaacttggagtcatccataacacctgtctttctgtctgcccacatcctatctaccatcaaatcctgtgtgctctaccttcagaatagatctaatgattacttctcactctctctactcttaccaccctgatstaagccactttcacctctcatctagaatattgcagtagcctcctaactgatcttcttgcttccattctcacccctcattttcaacccaacagccagagtggtcctatgaaaatatagttacatcacttctctgtttaaaccttccaatggctctcactcaactcagagttaatgccaaattcttttttttgtttgtttgtttggtttttttttttgagcacaggggactttattgattgtacatgacaaagtggggctccctaggctcctccctcttcagggggtctgcatggaaattgtgaggaggggagattctcagtgaggtgggggactaagggcggcagggactcctcag

SEQ ID NO: 473272 - DNA, 603 bp, Homo sapiens
cagctgtgtccacagagaatgctatggtagcactctgtgcctatttaagtaataatgtagtaatcactaatgcatgtgtccagcactgtgctgagtatcttacatgcattattccattaaatgtagggattgatgcttctgagtttccttcagaaaattatataactttatgcacatgaccctacaaaactgagtccaagggcaacaaataatagatcaggtgggcctgcaatgctcactgtgcttacatgccttattttaatatttcaagatgtgtacttcgccttgaaaaccaaaattaatgatcacatgaatacctaccattttttaagctctttccagggactaggctgtatgacaaatgctttttaggcatttcaacagtctcatttcaacagccctgggagaaatttcctgggctccattctgtagatgaaaaaactgaggcacagagaggtcaggtggcttagtgacctgcctgattacacacttctggttgaaatggggctggggtttgtatccaggtccatctggctatgaagactgtgctcttaaatgaaattccaaaattcctgtttgatrtcatgttgcctctaactcaac

SEQ ID NO: 473273 - DNA, 526 bp, Homo sapiens
accttttggaaagcagtttggcagcatgtaccaaaaaagacataaaacatacagascttttgatccaataattccatttctgggaatctatcctaaggaaataatcctaaatagggataaaggcttatgcacaaaactttcaatgtaatctcatttatactaggaaaaaatagaaacagcttaattgtcccctaataggagagaagggggttaaataaattattgtacaactacttgatggatatcgtttggccattaatggctccaaaacataacaggggaaaaacacttatgatataatattaggttaaagaaaaagcacacagcaacagtgtataggtactattacaaatctttgaacagaagacctatgcatacacagagagaacaaaaataacagaaagaaagaaactaaagtggtaacagtggtatagttctgagaaatagaactaaataaataatgatttactcttgttttcctaccttttcctcctgatatttcgtgagcgtatatttaaaataaaat

SEQ ID NO: 473274 - DNA, 526 bp, Homo sapiens
accttttggaaagcagtttggcagcatgtaccaaaaaagacataaaacatacagaccttttgatccaataattccatttctgggaatctatcctaaggaaataatcctaaatagggataaaggcttatgcacaaaactttcaatgtaatctcatttatactaggaaaaaatagaaacagcttaattgtcccctaataggagagaagggggttaaataaattattgtacaactacttgatggatatygtttggccattaatggctccaaaacataacaggggaaaaacacttatgatataatattaggttaaagaaaaagcacacagcaacagtgtataggtactattacaaatctttgaacagaagacctatgcatacacagagagaacaaaaataacagaaagaaagaaactaaagtggtaacagtggtatagttctgagaaatagaactaaataaataatgatttactcttgttttcctaccttttcctcctgatatttcgtgagcgtatatttaaaataaaat

SEQ ID NO: 473275 - DNA, 615 bp, Homo sapiens
tggccagtcagtggtggaagtagacgttaaacctcagtctttttgactccaaagacactgttttaactttaaagtctaatttctctgaaatctgggcttgaacctgggcagatgctaatctccaaagaaatcagttttagtaagtggggggcaatgaagagggctctaagcagtgggagtttcaggtcagagcaaagctgcaaaattccaagtaaagcttccaaacaagtaagtggatgtggctgagaccttcacaaggacctcagggaggatgtcattccaacttgaccagggcaccagcaatggatgagggctgcagcctgacagcacccgaatgtgaagattcagccacttgtaccgcatcctgggcctcactgctccaaaytcccaccaaggtgggcctgagccaacctccatcaggttggagatgattgagattgagaggctctggctgtgccttcaaatgggaggggcagggggcagacagcactgacacagaggaccataaaatgtatctagcagagcaggagagctccatctggaggtcaggcgaagtagtacaattgtgcactatcttttctcagcgcttccagtgttaatcatgatctgggggca

SEQ ID NO: 473276 - DNA, 615 bp, Homo sapiens
tggccagtcagtggtggaagtagacgttaaacctcagtctttttgactccaaagacactgttttaactttaaagtctaatttctctgaaatctgggcttgaacctgggcagatgctaatctccaaagaaatcagttttagtaagtggggggcaatgaagagggctctaagcagtgggagtttcaggtcagagcaaagctgcaaaattccaagtaaagcttccaaacaagtaagtggatgtggctgagaccttcacaaggacctcagggaggatgtcattccaacttgaccagggcaccagcaatggatgagggctgcagcctgacagcacccgaatgtgaagattcagccacttgtaccgcatcctgggcctcactgctccaaattcccaccaaggtgggcctgagccaacctccatcargttggagatgattgagattgagaggctctggctgtgccttcaaatgggaggggcagggggcagacagcactgacacagaggaccataaaatgtatctagcagagcaggagagctccatctggaggtcaggcgaagtagtacaattgtgcactatcttttctcagcgcttccagtgttaatcatgatctgggggca

SEQ ID NO: 473277 - DNA, 573 bp, Homo sapiens
aaagtttaacttaagctgtggactgagggatattaattagaatgaatttgttagagaatgttttagccaggacaaaaagaactgaacattttaggaatgtgccatagacaccaagctgaatttaaatgctcttctgtctgaattcctaaaccctccattcatccagrtatcgagaaaagagactccatttcttgccagaagactgggcttgcacattcatcagatccatgattcacacctgtgtatatatctagggggcgcttacttaaatcacctcattcattttccaccacagccttctcagtggatacagcgtcctcgcagaaccaaggtacacacacaatggagtgttaactgccagtgtgtgaaccaaacctctcaccccaagcccggtgccccttcagccccatcacaggcacctgtgcagggaagcagccctcacccaaagacactagccctgccttccacattccaagaagccctgaggcacattcacatctgcctgggccccagctcagcctctccagggaggacctggtacagcccaacttcctcacttctctttgcgtggaa

SEQ ID NO: 473278 - DNA, 566 bp, Homo sapiens
agagtgtggggaaggaaccagaggctattcttggggggtgtccaaagggtggactaaatatttgcccctgaattacccagtracactttagctgctgtttgcaaactatttgaagttgggaacaaactgattttcctgtttctctttcctccaaattcctgcagagctctacatattttacctagaaaaagtgaaaataataacgttatttggggacgccttgataatttcacaaaagcatttctagagaaattctgggttggcacctcttccctggtgggtactcacagtgagtcaggtgacagagactgtggttatccagatgtgaatagtactaaggcctgtcccctcactggtgacccatcttcccaagagaggaacagactcaaataaagtcctgggagtctctgaacctctgaccttcttcctccagccaccaactgctgtccccaaggaaatggtgtccgaaaaatcccaccttggcaacccccaggagcctgtgcaggaggagcccaagacccgcctcctgagtatgacagtccggagaggcccacggagtaagtgcc

SEQ ID NO: 473279 - DNA, 566 bp, Homo sapiens
agagtgtggggaaggaaccagaggctattcttggggggtgtccaaagggtggactaaatatttgcccctgaattacccagtaacactttagctgctgtttgcaaactatttgaagttgggaacaaactgattttcctgtttctctttcctccaaattcctgcagagctctacatattttacctagaaaaagtgaaaataataacgttatttggggacgccttgataatttcacaaaagcatttctagagaaattctgggttggcacctcttccctggtgggtactcacagtgagtcaggtgacagagactgtggttatccagatgtgaatagtactaaggcctgtcccctcactggtgacccatcttcccaagagaggaacagactcaaataaagtcctgggagtctctgaacctctgaccttcttcytccagccaccaactgctgtccccaaggaaatggtgtccgaaaaatcccaccttggcaacccccaggagcctgtgcaggaggagcccaagacccgcctcctgagtatgacagtccggagaggcccacggagtaagtgcc

SEQ ID NO: 473280 - DNA, 566 bp, Homo sapiens
agagtgtggggaaggaaccagaggctattcttggggggtgtccaaagggtggactaaatatttgcccctgaattacccagtaacactttagctgctgtttgcaaactatttgaagttgggaacaaactgattttcctgtttctctttcctccaaattcctgcagagctctacatattttacctagaaaaagtgaaaataataacgttatttggggacgccttgataatttcacaaaagcatttctagagaaattctgggttggcacctcttccctggtgggtactcacagtgagtcaggtgacagagactgtggttatccagatgtgaatagtactaaggcctgtcccctcactggtgacccatcttcccaagagaggaacagactcaaataaagtcctgggagtctctgaacctctgaccttcttcctccagccaccaactgctgtccccaaggaaatggtgtcygaaaaatcccaccttggcaacccccaggagcctgtgcaggaggagcccaagacccgcctcctgagtatgacagtccggagaggcccacggagtaagtgcc

SEQ ID NO: 473281 - DNA, 647 bp, Homo sapiens
gagggtattctttccattgttgctgttattgaacaggaacagtggtgggtgtgtgcaggttcccacccctgtactgtgaccctggccatttgtctctgattgctatagactgaatgtttgtataccccacaaaattcctatgttgaaacctgaaacccaaagtggtgatatctgaaggcagagtctttgggagatgattaggtcrtgatggtggagctctcacaaatgagatttatgccattataaaagaagccccagggagctctttgccccttccaccatgtgaggacaccacaagaagatagctgttcatatgccaggaagcaagctcttgctagacactaaatctgcaggcttagactccccagcctctaaaactgtgagaaataaatttctgttgtttataagccacctagtctattgtattgtgttactacggcccaaacagaggaagatgctgatcttgaaatccctgcacagacctctacattataacataggcctctatcaatcccctcacaaggacacacagacactactaggtctctcatacacttcaggaagtcctgagtaaccaggagcactgcctcagactccacctgttttctgccactgcctcgatgtcatcactcttacacactcatgca

SEQ ID NO: 473282 - DNA, 647 bp, Homo sapiens
gagggtattctttccattgttgctgttattgaacaggaacagtggtgggtgtgtgcaggttcccacccctgtactgtgaccctggccatttgtctctgattgctatagactgaatgtttgtataccccacaaaattcctatgttgaaacctgaaacccaaagtggtgatatctgaaggcagagtctttgggagatgattaggtcgtgatggtggagctctcacaaatgagatttatgccattataaaagaagccccagggagctctttgccccttccaccatgtgaggacaccacaagaagatagctgttcatatgccaggaagcaagctcttgctagacactaaatctgcaggcttagactccccagcctctaaaactgtgagaaataaatttctgttgtttataagccacctagtctattgtattgtgttactacrgcccaaacagaggaagatgctgatcttgaaatccctgcacagacctctacattataacataggcctctatcaatcccctcacaaggacacacagacactactaggtctctcatacacttcaggaagtcctgagtaaccaggagcactgcctcagactccacctgttttctgccactgcctcgatgtcatcactcttacacactcatgca

SEQ ID NO: 473283 - DNA, 649 bp, Homo sapiens
caaatacaatcctcccagggaaactcagaaacaaaaataatatgcacagaagaaaaatatgtaaaatattttttaaacatacatttggacaaggattggaagatatatgtaaaattaaaatatcaagatggtggagttatggatgtacttctttttgaaaatgtggatattatatttttaaggttaaaaaaatgaaacatgttaagaaatgttaataacttttaacaagaatatcctgaaaggataaattttgattatgaagtagagatgcctcaactttgctcactacttccaacttgctagaattccctaccagatctctaatggcaagaaataaatgatatgacagtagagtttttcatattaataacaaatttaaatttccaactatgatatcacgaggctcattctcattcttttaaactccagggtaaggactagagtttcttttttccatccaattcaatccctcaccctctcttgtacatattcctgcagtctaatccagtcctaagcagggtataagagtaagcaatataagaagaaaaacaaggaagckgtcaagtgataggagctactgagagcaactcttcatgtcaccataatcccagatataaatatagaggcagaatatttatcctttaaataa

SEQ ID NO: 473284 - DNA, 636 bp, Homo sapiens
gtgagtggtgctgccttccatttgtgtgttttgtaagtcagaaacctatgaatccaccttcacacctccctctcctccacattcgatatacaatttgtttaacatctgcttattatctcttatctttggcttctttctaccctcccagccaccactggaaaccaagctaccattttctctcactttgactattggaatagccctttagttttcctccctacattcactcttgacctcttctaattgatgtgcaaccctatggcttttcaaattacaaattgtcatcctcaactcctcaagtaaaaacattttaatggcttcccattgactttaggttaaatccctacactcttaacatggtcccccaaggcctctcatrgcctggcccttcttacctttctcctaatttctccttcttgggatacatttctcatgaagcaaaataacaagaagaataaaatttctatttacttcatttcttaacctactctttgtcttaatacaaatgattatatatatatatgtatctcaggtacatattttaaggttattaataattttaggaaagtcatctaggcagagagattgggaggcagagaggttacaaaatcacatgtgtcactctaatgaaaagca

SEQ ID NO: 473285 - DNA, 636 bp, Homo sapiens
gtgagtggtgctgccttccatttgtgtgttttgtaagtcagaaacctatgaatccaccttcacacctccctctcctccacattcgatatacaatttgtttaacatctgcttattatctcttatctttggcttctttctaccctcccagccaccactggaaaccaagctaccattttctctcactttgactattggaatagccctttagttttcctccctacattcactcttgacctcttctaattgatgtgcaaccctatggcttttcaaattacaaattgtcatcctcaactcctcaagtaaaaacattttaatggcttcccattgactttaggttaaatccctacactcttaacatggtcccccaaggcctctcatagcctggcccttcttacctttctcctaatttctccttcttgggatacatttctcrtgaagcaaaataacaagaagaataaaatttctatttacttcatttcttaacctactctttgtcttaatacaaatgattatatatatatatgtatctcaggtacatattttaaggttattaataattttaggaaagtcatctaggcagagagattgggaggcagagaggttacaaaatcacatgtgtcactctaatgaaaagca

SEQ ID NO: 473286 - DNA, 511 bp, Homo sapiens
catggcagatgaggtatgttttgcagtcatcggcttcctgggaaatctccaaatcatattcttatcttctaagtttggccttgttcagaaggaacctggatgttaattaacactagccacttaactttctttttttttttttttgagatggagttttgctcttgttgcccaggctggagtgcagtggygtgatctcggctcaccgccacctccgcctcctgggttcaagcaattctcctgcctcagcctactgagtagctggtattacaggcatgcgccaccatatctggctaatgttgtgtttttagtagagatggggtttctccatgttggcccaggctggtctcgaactcccgacctcaggtgatccgcctgctttggcctcccaaagtgctgggattacaggaatgagccactgtgcctggccaacaccagccactttcttagcatccacctggagtaggaactatgcttgaccatacaaaacccagagtaagtgactaaggtcaca

SEQ ID NO: 473287 - DNA, 419 bp, Homo sapiens
gtagtggagccatgactagagtcctaagcatctggcctcaacatttagctgtaactcacaagatggtttacagttttctcgtgtcaggtttacacaaaatcctggtgcattatgaactacacaggtaaaaggataaaaggattcctttctctcctctaaagtactctttttcatcttggtgatgatttactcctaaatagtagttaaaaagtagaagagggtttaatgctcatgttccaatattattctcaaacaaggcagcatcacatgctgagattagctgtttatcaaggatttagtattactttaatgtatrcattcatttaataaactcttcagaataatgtgttagagaagttaagtcttctccattaacaaattagtttttataagaggaggatggtgtaaagtatactaat

SEQ ID NO: 473288 - DNA, 515 bp, Homo sapiens
tattgcttgacttcatatagtctgtttcctcatcagcaaaatgtaataataatggaaataattatgtactttacaaacagttgtgtgaagtaagtgagatactacttactaagtgctcatgtggtttctggcacttaataggcctccagcaaagttttggaggagctaagaatgagactccaggaatggaatatctcaaagayaggacttgtgtgtgagggccctggactggaaagacactaggagagggttttgcatggggattcctcttccgtaccctaaacatagtgctaaaattttcagaaaggacttgcttgggaacactatgaataaaacagaatgtccccccgccccccaccctttttttttttaaactgctgacaactgctaaaatgcttacagacttagcctggattttcaaagaggattagatatcactaacaagattgtccaggtgcctaaaaatttatgcgatgttttctctgatgagggagtgctttgttgtgagcttgcag

SEQ ID NO: 473289 - DNA, 515 bp, Homo sapiens
tattgcttgacttcatatagtctgtttcctcatcagcaaaatgtaataataatggaaataattatgtactttacaaacagttgtgtgaagtaagtgagatactacttactaagtgctcatgtggtttctggcacttaataggcctccagcaaagttttggaggagctaagaatgagactccaggaatggaatatctcaaagataggacttgtgtgtgagggccctggactggaaagacactaggagagggttttgcatggggattcctcttccrtaccctaaacatagtgctaaaattttcagaaaggacttgcttgggaacactatgaataaaacagaatgtccccccgccccccaccctttttttttttaaactgctgacaactgctaaaatgcttacagacttagcctggattttcaaagaggattagatatcactaacaagattgtccaggtgcctaaaaatttatgcgatgttttctctgatgagggagtgctttgttgtgagcttgcag

SEQ ID NO: 473290 - DNA, 558 bp, Homo sapiens
tgcaatattgataatgtattcacattctccccagagcactggattctttaaccttaatattgagtctggaatgagattctgtcctctagaggtcaccaatgcaccagatttgaaggccacggaggcttctaaaatgctcaggaagagctaggtgtcctgttcacatatgaatgaaagagaaaataaggcaagtaaattatcctaatggttattttccagctagtctctgaagaagtaggaaatctggttttcaataaggcattttaaaatggatttatcttggtttatcttggcttttctctgcactgatctagctgaaggaaactcctatagtrattaaatacttcttaacagatagtttacttttgatagtgagagaagaaacttttctaaatagaagaaaaactgatgtagaaataggctattatagcctccattaaatgagtgttactttcactggtgctctggccaaggcagaaggtctctctgtgcctcctcagcacactgtcttcaaagggcatggggacacagaagcagggaaacatggccctttaattc

SEQ ID NO: 473291 - DNA, 558 bp, Homo sapiens
tgcaatattgataatgtattcacattctccccagagcactggattctttaaccttaatattgagtctggaatgagattctgtcctctagaggtcaccaatgcaccagatttgaaggccacggaggcttctaaaatgctcaggaagagctaggtgtcctgttcacatatgaatgaaagagaaaataaggcaagtaaattatcctaatggttattttccagctagtctctgaagaagtaggaaatctggttttcaataaggcattttaaaatggatttatcttggtttatcttggcttttctctgcactgatctagctgaaggaaactcctatagtarttaaatacttcttaacagatagtttacttttgatagtgagagaagaaacttttctaaatagaagaaaaactgatgtagaaataggctattatagcctccattaaatgagtgttactttcactggtgctctggccaaggcagaaggtctctctgtgcctcctcagcacactgtcttcaaagggcatggggacacagaagcagggaaacatggccctttaattc

SEQ ID NO: 473292 - DNA, 598 bp, Homo sapiens
tgattccagtgtgaagggacaagaaatgcttaaatgttcttttctttaaagcccacttgggattaagtaagaaatggaaaacatcctacaaaacccatgtgaattgttttggaactcaaacatttggagaggcacttataagaattcttttatgtttgagaatgcccgcgttggtttcacttttactctggacattttctgtgtaccttattacagtatcatcacagttttattattctaggcataaaagcagcagattttttaaaaagatataaataatataaagcaaaagaaaaaatctatagagaataggaataattgtgccccccctctcaaaaaaatcccttatttatgattgactttcagggtaagagaggtggggcaatatgaactggtatccatgataaggcaagggtagtatgcctaaagcgttgcacagaaggcagatttatctgtatttagtcatttctcttactcttgccagacttgttttcctgaatgtcactttcgttgtgttgcattccttcttaagcaattagcytggcttctcactgtccactgagtcaagtttgtgcttcattccctggatttcacagct

SEQ ID NO: 473293 - DNA, 581 bp, Homo sapiens
tttatatccaggtcatatttatcagtcctacagctcaatgctgaccccacgggaagggctgatgaaggtgaataaatcaggatacaaacagccaagagaaaatctgtaaatacagaggtgcttctctcttgccccaaaaacttttccctgttctactcccatcagtcaaccttctctgtattctatgagatcctaaaccattagaatcctaggctttgttttctcctttctcatttgtcatattatttgacaaggcggcacactcaattttccaacctttttattgtcttttgttcaacagtgctacattctagcctgggtctcaaaatccttctccttgctttgctttctctaggctgctgcccttcttgctaattttttgatcttctcaactgtacaaaggtcatctgtctgttgcaytatccaagtcaatttgtgcagtgagtaaagacgcagagtctctgttagagctctcaggtttctgtgttcaagaatgctgggccagtaggctgtcttttagagtgagacagtgaagcaaataattccccaggatgttttctgagattccattgttaaactcc

SEQ ID NO: 473294 - DNA, 641 bp, Homo sapiens
ttgaatttttcttcttatgaatgcgaaaggcagctttcatgtgtttaataataatttctttaagtttttgactgtcaaaggaatatttctttatatttgaagtccttttaactgggatatgactcatgttgacccattggggtcaatattctcagggacatgatgtgtcatatcaatatttaacttcaagtcttctttaattttagaaatgttttcttgaattttattcttataaatttatgctatttaattatttgtagatttcttctttggcgacttcaattatgcatgtaatcccctttatctattctccctgtcagtttctcttgaattgaaaaaaaattattatttcctttttattttcttacatcattatttattcctattattgtgtttttaaaacttcccgttttacrtttcttccagttttgtcttcatttatgtgttttgtttcattttttttcccgagctcttttgttcacattttgtctcctctttcatcagcatttcatctgtgaacctttatatttctgttttgtctcctttttttttatagggataattaatcctttaattcagaggggctattcatgatggtatattttggtacaatttttatctgttatgtgctaattttttct

SEQ ID NO: 473295 - DNA, 599 bp, Homo sapiens
ataggtaagtgacagcaacttccagcagctctaccttcattaaatgttatgatatcatgaaccagagaacataaagttctaagtttattttgggggaatgttatgtaaatccaagatcattatttttgattcttcatattaataggcattaagtgtgcattagaaccaaaaatggataaccaaggatatggtaagaggcagatgccgatttggtggttttgatatttacggtagctcttctaaagagaaactcctgttaagtgcttagacatatgggactggccagcctaggcaacatgtcaaaaccccatctctgcaaaaaaaaaaaawaataataaaaaattagccaggcatggtggcacatgtctgtagtcccagctactcaggtggctgaggtgggaggattgcttgagcccaggaggttgaggctgcagtgggttgtgattgggccactgtactctagcctgggcaacagaaggagaccctgtcacaaaaaaaaaaaaaagaaaaagaaaaagaaagaaatatggaactggaactctcatctttgtctcatagttttgatgctttgtgctaattattatacctgtaacaaacat

SEQ ID NO: 473296 - DNA, 634 bp, Homo sapiens
ttcagctgtcagtcttttctctttactcttgggttgtaaattataggttgaaatttactagcagccactgtatttgatttgcagaaagaagcaaaggaggcatctttgatcgccacatcttttaccatttatatcttggtttatcaaaattgaaggtgacatcgcagattatattattcctagaaaaggctgcaggttggaaaagccataggtttggctttctaccatagaagggaaatctttgaatatagaaaactgtgcatgtttattattgaagggtaagaattgaaaggtagatagaagatagatagatgattgatagatagatagatagatagatagatagatagatagatagatcgayagatggatagatgaatagtagaataccctgactggctacattggataaataaaatgtttcttagttttgtttttttttttttttcttgcagttgagccttttgctttccagaagagcatataccaagccaccccaaagcacatcacaggattgcctggtttccccctagctatcatttagactatactgctatatcaaattgtattgtcagggtttttgcctctcggtgagtctgttcgtgcaagctagttggatattttgatttgactg

SEQ ID NO: 473297 - DNA, 634 bp, Homo sapiens
ttcagctgtcagtcttttctctttactcttgggttgtaaattataggttgaaatttactagcagccactgtatttgatttgcagaaagaagcaaaggaggcatctttgatcgccacatcttttaccatttatatcttggtttatcaaaattgaaggtgacatcgcagattatattattcctagaaaaggctgcaggttggaaaagccataggtttggctttctaccatagaagggaaatctttgaatatagaaaactgtgcatgtttattattgaagggtaagaattgaaaggtagatagaagatagatagatgattgatagatagatagatagatagatagatagatagatagatagatcgacagatggatagatgaatagtagaataccctgactggctacattggataaataaaatgtttcttagttttgttttkttttttttttcttgcagttgagccttttgctttccagaagagcatataccaagccaccccaaagcacatcacaggattgcctggtttccccctagctatcatttagactatactgctatatcaaattgtattgtcagggtttttgcctctcggtgagtctgttcgtgcaagctagttggatattttgatttgactg

SEQ ID NO: 473298 - DNA, 450 bp, Homo sapiens
aattggaggtcgctttattgctgcatgttctattattagctatataaaatttgcagtttgtttactcstttttgtcatctgcgttcagtttcataataagctatacacaacacacgttctactaagcactgacacaggaaagaaaacaattgtaaccagaagtgggtgttgatgcctaatacatgtaaatgtagcaagaaaccattagacaatgaaagttagctcccagatggtggtaccatctggaacataaatccataaaggtacttctgtagtatttttgtaataaaaaatcaggccttactgagaatttttaatagccacttacgaagttcactgttaacattagtgttgataaatgacaattatatgtatatatatacaaagttacattcatgaaggtaggctctggaagctttaggcctctgttaaaggaaaagtgtatcataa

SEQ ID NO: 473299 - DNA, 574 bp, Homo sapiens
tatgagactttaaatacacacacacacacacacacacagttttttgtttgtttgctaacatttggttggttggttgattggctgttttgtttttttaactttatggaggagacctggagtcttatgaaacactcaagctttgcaacagactaaactcagtgaactaggctcttgacacttaggaatcaccagaacacagaatggtatgaacaatggcagatcgaggattggcaataattgtaagtttgtgaagacaaagtggtggaactagggaagacatataggaacggctccagccatggacgtggaaataagcatggggctgaaatccacagcaggagaaaatgagggaccatgaagaattgtgagcagttaataaagactctgaaacagaaactaaaataaaattcacctgtcaaaatgtagacagtagtggataggagttcaccgatagcaaggatggctggaggctgaccctggaatgtagagctytctggtcacaactggccctgagagcttggaccataaggaccagcagatcagcccagctttcagggtggaaggagtgtccagc

SEQ ID NO: 473300 - DNA, 547 bp, Homo sapiens
tgtagttaaacataaaatagctccacaaagtcttgtgtacgtgaaagtgttcatatcctggaagattctaatttactactcagtactttctcctggagaggaaaataggtaagataggctgctaagcctatgataataactcatgatatgaggtgaaagcatagagacaaaatgagagatgatagatactcaaaccgatgtgagtgaagaacagctgtgaaagagtgtctatgggagagagaaggccatggggctgcttttgtgaagaaggaatttgtacacattagtcaagtgtctgatacatttaacattttaataaagcaaaaccttatcttcacatgtgtcagaatgggattgtacagatgtcacaatacagtagtggtgagaataatgaagaawtgaatgtggagggcaaagaatgaagtccaccaatatggatattagatttatgaatgaaaaggagtgtatgtcaaattgggcagaacaaagaaagtggctagctaggtaatttgggggtttctgatgaggagacttgtggggagtcact

SEQ ID NO: 473301 - DNA, 518 bp, Homo sapiens
tggacagtgtgtggacctggtccatactcctgcttcttgccctgaggtgcccctgatacttcatgtaggcacttgttgcatccactggacactcatatcttgtacaacttagaaatggataggagtcgtgcccatgtgggctcttctaatcagtggaggatgggccaatatataaatgtttccctctgttatctgaggcccatttcacatggctccttccaaggccagtggcccctctgtctatagcggtggccaactccacggcacatccttgcattgcctcctcccccttccctgttccacttcccatccctcactcctactccttgggatctcttcccaaataaactacttgcctacaagccttaacacctcaggctctacttccaggtaactcagattgaaatatctgccaaatatcccagagtttaagtggaacactggcattcattttaagatttttctgattccaaattccacaygcttttctctttatcctccttgcattgtgagaatta

SEQ ID NO: 473302 - DNA, 523 bp, Homo sapiens
tggagcagacagaacacacacagcagttattaagttcaccgttccatatgggcatggttcttggtgccccaagataatttcaatagtaaaaccaaaggtcactgatcgtaaattaccataacagatatactaataatgaacaagtttsgaatatggagaattagcaaaatgtaagagacatgcaatttgctcaatgcagggctgccacaaaacttcaatttgtaaaaaaggtactatctatgaagcacaataaagtgaaacgaaataaaacaaggaatgcctgtctattgtttgtacccaccatcaactggatagagcagtttcatgcacccacgcagattcaagagtgtgttggaaatgcatattaactatgtgtctagagggagaggaaagttggctgctggtgagtatttgaagtttctgccacagcaactgacaagaaagagattaaagatttattatcgattttctgcctcctttccaaaagatctcaggcagcgcatttaaggcacatgcccaaagt

SEQ ID NO: 473303 - DNA, 536 bp, Homo sapiens
agctgcaggaaagtctccatttattaaccccttctagggtcacatctcactggcgttgatggtgcacagagattgacagcaccacctagaccacacagagtggggaggcgctcttcagagaaaagatagagtcgtccgtggaacaggggttggcaaacttttctggaaagggccagacagtaaatattttaggctttatgagctacataccatctctgctgcaaattcttcttctcctacaaagcttgcttagtactacaccgaggaacaagtactgggagcagaatcaaaattmtgcagaaaaggacaatagggacaaaggaaaaaaggagagaagagcgaggggtaggggtgcagaagcatgtattttagaaagtctttagggcacatttctcatcacaaacaacaaaacaagaagttgtagagcgaggaagctggaaaatctatccttggccatccatcctctgccaaataaaaaaaaaaaaaaaaggaaaatttatttcacttaaacatagctacaggaaaaagaccattat

SEQ ID NO: 473304 - DNA, 198 bp, Homo sapiens
tacagagggattctaataataaagttacatatgaaaatttacctttaacacagtgtcaagagggtttccagaatcaggtctgattattagtggtgcctgtgtacttctygatactattaaatgtcttagatcttcaccccatattttctcacacgcattataaatgtcatagctatcgctgaccacagatacaggcac

SEQ ID NO: 473305 - DNA, 623 bp, Homo sapiens
tcttttcttctacctcactgtttgatttcttatgtcatacaccatcataacccacatattcacacagatattcaagacacagaacctttccatcaccacaaagatctcgtgtgttgtcttattatagtctctctccctccctctctttctctctcttacacacacacgcacacacacccacacacttccctctcatcctcagtgcttcatagtccctagcaaccactaacatgccttctatttctacaattttgtcattttttaatgttacgtaagtgaaatcatactacatgcaaccttttgggactgactttttttcccccttggtataattctctggatatttatccattgtttcatgtgtcaatagtttgctccttttttattaattaatagtatctcrtggtatggatgtaccacagtgtattttaccattcaactgttgaaaaacatgtagacatttggaaactagactgtttctcttttgggattatcacaaataaagtagctggaagtatttgtgcacatgtttttgtatgacaataagttttttatttctctgggataaatgccaaggagtgcaatcattatttcatctggtagttgtatgtttagttttttaa

SEQ ID NO: 473306 - DNA, 441 bp, Homo sapiens
tggtgttttaaagttgtgactaagccaaaacatctaatacactttcaaaatgctttttttttttaaatttcaattaggacatagaatgtctctaccggcaatcttcagagttttctcaacgatgtctacattttaaaccataaaatgattgcattgctgatcatctttgaggyaaacagagtgaagaaacaaatagaagaataaaactctcctttgaagtatgtttttcccttgagaacatcagcaggggagagatactctgaaagactcatgttaaatgaagcgttaatgggtgcagcacatcaacatggcacatgtatacatatgtaacaaaactgcacgttgtgcacatgtaccctaaaacttaaagtataatgataaaaaaaaaagacttagccttggctgccatgcagattccattatctctaacttcagaatttc

SEQ ID NO: 473307 - DNA, 441 bp, Homo sapiens
tggtgttttaaagttgtgactaagccaaaacatctaatacactttcaaaatgctttttttttttaaatttcaattaggacatagaatgtctctaccggcaatcttcagagttttctcaacgatgtctacattttaaaccataaaatgattgcattgctgatcatctttgaggtaaacagagtgaagaaacaaatagaagaataaaactctcctttraagtatgtttttcccttgagaacatcagcaggggagagatactctgaaagactcatgttaaatgaagcgttaatgggtgcagcacatcaacatggcacatgtatacatatgtaacaaaactgcacgttgtgcacatgtaccctaaaacttaaagtataatgataaaaaaaaaagacttagccttggctgccatgcagattccattatctctaacttcagaatttc

SEQ ID NO: 473308 - DNA, 554 bp, Homo sapiens
gctgaattagtcagtcatggtagtactttgatgactgtcttagatcaactgccgttgatccgttgtttctgtgaccattgtgttttagttctgggtgtgagtcacccagacccagttgtggtcattaagaaatgggaagatgaggcattcactttggcttctgaaataattctaatagcacagaggctttctaccaaccagtagcacatccacctttgccataccctgcaaattgtatctcttgaactacatcacgtcaccaagttctctttggaggagaggaacttttggcatttactaggaggttggtttacaaaataggatatatactttttatatttagyttccagactttcttatttttggcatgaacttcctttaagctgcagactcttaaaatcctgaagtagtaaggcattaaccaggtaatgacgcttaacatacactccaacactgaggacctaaaatacacccaaagtagtcctgatgaaaatctggccttaaagcttagagaatatcaggaagcatatctaagggaaaataataaactctgc

SEQ ID NO: 473309 - DNA, 626 bp, Homo sapiens
ccactggagtcagaagtgcagaattggacctagcaactgaaaggtcactctgacctttaaaaaattgtttcagggaggctgaggtgggaggatcactagagcccaggagtttgagtccaaagtgggcaacatagtgagaccctatttttaaaagaaaaattttctttcaataaaatgattttgttggctgccatactatagtaggaaattagaagctaaaataagaaactagacattatagtgtttctcaaggaatgcaatgtgtgacagatgatcacagacactttcaaacttgttgtgagaaaagatattaagtaatagctacaattggagttgctattaaaaaatcagttttgatagtagaaaaggcattttcatttctgcccatgaaggagaacagctataggactgatgtcaaacaactgttttcagaacttggacaataggcagcacatgagtgttatctctgggaaatgaacaacaaatgaggtgatcctctaaatctaccagtttgttgcatggtggtatatacccagactttggcacaaagraggtggctcaagtagggagtagcagtctagctgactggcagagacagatgtttgagttggggaaggacgaggcag

SEQ ID NO: 473310 - DNA, 554 bp, Homo sapiens
ctggctgatgaaagtccagcctccctgggctagcagctcctctcctgaggcagccccattagccaggacagcagaaagccattcacggtcactcctgtcattagcataacgcggatcactggaatctcggctgaagtgtctctctgtctttatccaagcagctccagggggtcctcccatgacaggaattcctgatgagaagaaaaggtgcagctctctctgacaagctggctcctctcctcagaaaaaagaargaaacaaagagaagaggatgacattgaatgtatcagagaactaagaaacttctgccagcctgagcaacttctccagccagggcgacagagcaagaccatgtctcaaaaaaacaaacaaatgaaaaaagaaatttctggatgaggaggatgctagctctacattccacttcacaaccaggccctacatcagcctatatttgaataccatggcaattcactaccccacgatctgtgaggaaatttttccttacactaaacagattggtccagtttccacacttgggactgccagaaaaagcc

SEQ ID NO: 473311 - DNA, 543 bp, Homo sapiens
gaagctactgtcctgcagcccagagcacacaaggccaactgaagaccctgtgggcctaggccagagaaggtaaacgccaggttggataggtggtrggtccagaggtggtgcagtggctggagtctttggcttctcaccctgaaccagtcagattcagcacagcaaacttgggttccctgttccccactaaggggtaacctctcacccatgctcatagagagtgcccctacagcccacgggtccttctcctgcataaaccccagagtgcaacactggcatccagcacagacatgccacgggtcattttgtgttgtctgaaataagcagtgactgagcctgcaggggccagtgatccaggaggggcctacacagtggaatttgaggagctctcccacctctctggacaccccaaggaactgcctgtggtctcactgttggagctacctccttcactttcagtgctgctacttttctcagaaataaatatatttttattattttatgaaaataacaatacttactgtaaaaataccaaaatccaat

SEQ ID NO: 473312 - DNA, 513 bp, Homo sapiens
aataattggtgtgtgtcccccccaacctcaccttctgccgggaacatctggcatcggaaacacacaaccattcacatgcacattggacacacactatgccactgaaacacgcacacactcatacacctgctttcccactcacagggataatggaggctgcaccagggacacactcagccatgctacagccactttcacgggcatatccacgccagctctcacagacacccttaaccagattattggacagaccaaagcaccctgctcacgccagcaggtcagaaaaacgaaggaaagtctgagattgtagtgctttaggggaagggtcacaggccttgttgctcgtgcacacatttgcacacacaccttcgttctcaatctttcgtccaggcccccttctgagtcaaagaaggccccttctggtgcgttgagagagacactaggctcgggagagcgctggcctctccagtaaatggtggggatccgcamgcctcaaagggctgcgccccggga

SEQ ID NO: 473313 - DNA, 452 bp, Homo sapiens
tttgtccaatgtctctgacttcagcaagggcaaaactggaccaagaagccctgtactattccaggcatgccacacttccataatgcccaggcctgacctgcataccacgggggtgattctgagcctgtgagaaggtgagtcagggagtcaaattatgcgaagaagtagctgggtgtggtggcatgcacctgtagccccagctactcaggaggcagaggtgggaggatctcttgagcccagaagtttggggccagcctgggcaacatagcaaaggcccatctctaaaaacttaaaataaaaatataggccycaagaaaaagaaaagtggatcttagagaccaggagatctatgactttgtccaatgtctctgacttcagcaagggcaaaactggaccaagtagccctgtactattccaggcatgccatacttccataatgcccaggcctgacc

SEQ ID NO: 473314 - DNA, 603 bp, Homo sapiens
ttgtcagcactgggacaaatgggaatgagtatcaggaccccaagaagagggtttagtttctcaatgtagtattctctacttgtcattttctaaaattgcagagataatgcctgtgccaacagagggcaaggatgaaggaagactaggaattcaactgtacaaagacaggaaagccattaccaatctccaacatgacagctttgatcctgaaaccatgggctgatactgagaacaaaagttcgatacgggccgaaatactctgaggttggtaaagtaggaaaaagtgagacagcggctttgtgtgggttttaaaaaaatgaaacaaacacaaggcrttgctgcagtgactgggacatgctgatgacccagagtgactatgagaaggaacggtgacaagtgtttggatttaatggtctcaccaaggaatgttgggttagaaaagtaaaataactcaacaccaaacatgaaaaagtatgcctggcatccccaaactttatgccattatttttaggttcataatatgaacaactaagtgataaaacctttagattccatattgtgctcagaagattgcgtttcttctgcagatctctagtaaaaaaa

SEQ ID NO: 473315 - DNA, 492 bp, Homo sapiens
ttctcgcctgtccatgtccttctgtttcccctttgccttgacgccctctctctctctctctctctgtctttctcctctttctcctctttctctctgtccagttcttctctctccctctgtccctctgggcccactagagggcggcagcccccagtccaggcctgggcgtccaccctcccagcctttgcctgggcctggtgctcccgtagggagcggtgccaagattgctcttgggccgtgaggcagctcctctcccaggactctgtcctgtccttatagggctctcgtgggtgggaaatactgggttcagtagatagggcasgaacggctgcttctttgcctggctttgctgaagcttggaggctgtggccagctgttcctgccttgacagatgggagaggcctggcacctactcgaggtctctgagttgacaatcactttctccttcttgctcctggggctgtagggccacggagctttcagaaatcagga

SEQ ID NO: 473316 - DNA, 684 bp, Homo sapiens
actttgagacagactttgggcttttccaaccctaggctcctgcgtgaggcaggtctttgggccacagcctcattcagagccaagaagaagactgtacggggctgccacgatcattatatttggtagagaatttccatatttttctggggctggagggacagttgaatcacaaggcattaactttgcttgccagggactcatttctcctcttgaggactcggagggaaaacagatgcagagagaatccgtgcacacacttgggttcacacagcacagagagcagaatgctggctcccaaggctctgctccctggagagcctccagtagcccagcaggtggctcycctggtccaggcgaagtttaatggcagggagtggaagagaggagctgcctgcaggtgtaaacaacaggaaggcaggcaggagggacagagcctgtggaccacacactacctcctgttcccccttcatcatctgggtctcaggggccaaatccccaccgtgcccactgcaggttcccaccttcattcccgccatcacactcctggcttatctctactggtgctggcgcccgtcatcaaccatccccagacagagttcctaaacatcttcctcttcctgctcagtggcttcctggtgtacttcccacttgtccacttccagtgccagcccaggtgtttgcagc

SEQ ID NO: 473317 - DNA, 394 bp, Homo sapiens
gagattagtcattatatcctttctttcagtcatgtatccgttcattacacagttgaaatattgattcattctcttgtatgctaagcaatgagctatacatgaggaatccgagaacaacacagtttgtcctcaagagtacaggtttaataaaaggcaattagaatagaaaaaagtgctttaacaaaaatataatccatgatactatgagatytgaaagatgggcattcaagtctaacagagcttaaaggaaaaagtaaaatttaaggaaaaaaaaaaaaagcaaaagtacgaaagatgggcatcaatccttccaagtcttcaaatcaatgccaccaaaggaagtgtgcttcttttttttttttttttttggtgggaaggtgcagggtctcactat

SEQ ID NO: 473318 - DNA, 379 bp, Homo sapiens
cagctaagtcagtgggtcagacccaggctccacaccagtcccgagggccacccccagcccccaacaccgcggcggtgggcgaagccagcggccccgccctattccctggcgctgccgttcactggcgtttcctagcaaggatctgcagggatcccgcctacagagtgcccctggggcaggggtaggggaggccctggcacctctcctcctcctggtcacccctaggtgcacactgggaactgtgtgccccctacattctgaatgcttcacgcctccctgcccgggttagaaagccgttcctggtgcactggccaggacagcrgacactcttcctccctgcagcctttgcccacccccttggccatgaggaattcaggca

SEQ ID NO: 473319 - DNA, 416 bp, Homo sapiens
taatagttaaagtgctaacctagcaccccctcagaacataagagtgtctccatttttcactaatgacaattatgattatcagaatgtttcatgtctgtttaagaacttacagatcatgaacactctgatgtacatcattctcatttgctcctccccctcctcctcctcatacccccttgggaagtagagaaaatagaacttgaatgaatttgtcttgtatgggaaaacccagagcccagagcccagcggttgagtaaccccaaggccctgtagtaataagggggcacagtcaagcttaaggagtctggcattgcttccatcacacgctcctaaaagacaaccactagagaattcttcaagtcartgggaagaacattcaagtcccacagctacagagctgtggccacactgacact

SEQ ID NO: 473320 - DNA, 553 bp, Homo sapiens
gttagaactacatgtagacatttcgaacagtgtgaatagagacaatttaggtaatatgcttcttggatgttagtagtactaagtgaggcagcaaagggtcacaaacggaaagaaaccaagctcacaaacaaaactaacttcaaaaggtggtttgtttgtttgtttgtttgtttgtttgtttgtttgtttttgggggacagagtttcaatcttgttgcccaggctggagagcaatrgcacagtcttggctcaccgcaacctccgcctactgggttcaagtgattctcctgcctcagcctcccaagtagctgggattacaggcatgtgccatcacgtccagctaattttgtatttttagtagagatggggtttctccatgttggtcaggctggtctcgaactcttgacttcaggcgatccgcccaccttggcctcccaaagtgctgggattaaaggagtgagccactgctcctggccactaacctcaaaagtttttataaatagatgtttgacaccacagtaaatatatccacccttccaaaggaagctctcttt

SEQ ID NO: 473321 - DNA, 553 bp, Homo sapiens
gttagaactacatgtagacatttcgaacagtgtgaatagagacaatttaggtaatatgcttcttggatgttagtagtactaagtgaggcagcaaagggtcacaaacggaaagaaaccaagctcacaaacaaaactaacttcaaaaggtggtttgtttgtttgtttgtttgtttgtttgtttgtttgtttttgggggacagagtttcaatcttgttgcccaggctggagagcaatggcacartcttggctcaccgcaacctccgcctactgggttcaagtgattctcctgcctcagcctcccaagtagctgggattacaggcatgtgccatcacgtccagctaattttgtatttttagtagagatggggtttctccatgttggtcaggctggtctcgaactcttgacttcaggcgatccgcccaccttggcctcccaaagtgctgggattaaaggagtgagccactgctcctggccactaacctcaaaagtttttataaatagatgtttgacaccacagtaaatatatccacccttccaaaggaagctctcttt

SEQ ID NO: 473322 - DNA, 478 bp, Homo sapiens
aatgaacatttagtctctagcattattagagttaactctttggaactgagaaactacacaaaacttacaatctgtgttttcatttaatcactagctataaaagagctctttttgcttgtggtattgtagatattgtctagctaggaaagacaaacaaggaaggaaatgataaaattcttttttttttttttttttttttttctgagacaggctcatgctgttgttcaggctggagtgcagcggcgtgatcttgactcactrcaaccactggctcctgggttcaagcgacaatcctacctcagcttctcaagtacttgggattataggtgcatgtcaccacacctggctaatttttgcatttttagtaggaatggggtttcaccatattggtcaggctggtctcaaactcctgacctcaagtgatccacccacctcggcctccaaaaatgctgggattacagagatgagccactatgtc

SEQ ID NO: 473323 - DNA, 565 bp, Homo sapiens
ggagcagaaacagctaagccctgataccacattttcccayttcacctacttcacgtcccttgtatttcttccaaatttaactttctatttattgcatatattcatgttttacatttcaatgctggtgacaaagttgttttcctttcccaattattattccaaatctgaccaatttttctagacttccatatgacctaatgtgattatccttccttaccccaacctagaaataattcatctcttttcttccttgctccttatttggcatttctcatcctgcactatactatagcttatctatcttgggggacatttgtcattctttttagctttccagcatccaacatactttccagtgtttagggaattccctacctcttgcatctcagtgggaagcagtgtgatggggtcagaagtgtaaacttgcgcaacatcctgctcccaagaaagacgtgcacttgctacttcatccttcgctccatcttggtcctcccaactggagagaggacagcctagacgagacttcccacaaccaagatggcggccgtgcactccttgcccacag

SEQ ID NO: 473324 - DNA, 499 bp, Homo sapiens
cctaagggaagaaattggaatgactggagatgcaaatgagattagaggtgggtggcaggagaaagtcgaagttggttcaaccaaatggaatttcctttaaaaagtaaggtcttggtgggcataatgggcttttagcttaatcagtaactcttgaaattgctgtaggttggtgatggatacagcataagcagaagagttcattcattataatatcacctgcagaaatttaaaacatgatttatatgcctcagcatctatgaatcacttttaaaatgtgatttattttygaccagatagttctgcagttcttcaaaatctgtctctcatgcactcagggctgtttagcaataagaaataagtgtagtctcctgttgccatctgctcattccacatgttcctttgaaaccgaacactggggcttcctttaaccaagcagtcctaaagtgtcaggctcattgagagtacagtatatttcttaaccacccaaataagaaagtat

SEQ ID NO: 473325 - DNA, 469 bp, Homo sapiens
gtaacatgtattttgtatttgcatcataacaaaaccactgggcccccaaatattctaatcttaagaaaatcgttgctgtcaaaagtagttgttttgcctgccttccttccctctcagcttcccactgatctttcagccccatctctcacagatacaatcttcttctttttttttttttttttttttttttgagttggagttttgctcttgttgcccaggctggagtgcaatggtgcaatttcggctcaccgcaaccaccacctcccgggttcaagcaattctcctgcctcagcctcccaagtagctgggattacaggcatgtgccaccatgcctagctaatttttcgtatttagtagagacggrgtttcaccatgttggtcaggctggtctcaaactcctgacctcaggtgatccactggcctcggcctcccaaagttctggcattacaggcatgagccactgcgccca

SEQ ID NO: 473326 - DNA, 566 bp, Homo sapiens
gaaaatatgattgcctagactcactaaaaactgttcaattagacttttggggtcagagacctgggaatctgcattttaataaatttcccaggtgatttttcatgaacaccttaactaataataaatcaattwaaaaatttaacggtaagagaagtagaaggagagaccaggttttcagatgtagaagataccctggagagtagggttattctgcaaacagacttaattttagaaagatctttctggtggctggtgttgaagatggacttgataaagaacgtcctgggggtagatgtggggtgtggtgatggggctcattagtacagtgacagagtggacagggagggagggacagattctttggatgttttatagtaaaattgacaggatatggtagattactagaaactgaggagaaggaaaattaattgagaatcaaaaataatcctcaggtttctatgacacctgagtgggtaatgatattattaaccaagatggacaaggaattttggagattcagataaacttgaggacttctttggacatccaggtggagagaatcatta

SEQ ID NO: 473327 - DNA, 566 bp, Homo sapiens
gaaaatatgattgcctagactcactaaaaactgttcaattagacttttggggtcagagacctgggaatctgcattttaataaatttcccaggtgatttttcatgaacaccttaactaataataaatcaattaaaaaatttaacggtaagagaagtagaaggagagaccaggttttcagatgtagaagataccctggagagtrgggttattctgcaaacagacttaattttagaaagatctttctggtggctggtgttgaagatggacttgataaagaacgtcctgggggtagatgtggggtgtggtgatggggctcattagtacagtgacagagtggacagggagggagggacagattctttggatgttttatagtaaaattgacaggatatggtagattactagaaactgaggagaaggaaaattaattgagaatcaaaaataatcctcaggtttctatgacacctgagtgggtaatgatattattaaccaagatggacaaggaattttggagattcagataaacttgaggacttctttggacatccaggtggagagaatcatta

SEQ ID NO: 473328 - DNA, 549 bp, Homo sapiens
caattctcattgcatctgagatgttcaagaggtaactttcaaaaccacacttggcacattcaacataattaggtaattgcacacagcacaggttgtrtaaaggttagaggagcatctttcaaattttagaggatattaaaattaccaggggtatttgttaaaagttagattcccaagtcagagctccagagagtcccagctctgggtggcatccaggaatctttatttaacaaaagtagattcttatacaatgggtccaggaatctcattttaagaaatagtggattggagaatatgaagtataaaaattgttttcacagttgacctgagttgctaataaacaatttgctatatatttactatttttttcacattttgtaagtcagtgtcctaatagctaggtataagtgtaggctaaaatggcaatgttcaggatacatcctttaagggtgtaatattattacatacatctgtctcctttctcatttacatattgtgcagctttttttgtccctttctatactattcccccttttattaaaaaatgga

SEQ ID NO: 473329 - DNA, 549 bp, Homo sapiens
caattctcattgcatctgagatgttcaagaggtaactttcaaaaccacacttggcacattcaacataattaggtaattgcacacagcacaggttgtataaaggttagaggagcatctttcaaattttagaggatattaaaattaccaggggtatttgttaaaagttagattcccaagtcagagctccagagagtcccagctctgggtggcatccaggaatctttatttaacaaaagtagattcttatacaatgggtccaggaatctcattttaagaaatagtggattggagaatatgaagtataaaaattgttttcacagttgacctgagttgctaataaacaatttgctatatatttactatttttttcacattttgtaagtcagtgtcctaatagctaggtataagtgtaggctaaaatggcaatgttcaggatacatcctttaagggtgtaatattattacatacatctgtctcctttctcatttacatattgtrcagctttttttgtccctttctatactattcccccttttattaaaaaatgga

SEQ ID NO: 473330 - DNA, 434 bp, Homo sapiens
aaactcccagctgcttctaagaaaataagagtgactacatcagagagatgcaaacaggaagagaaagtaaatggaggccctggagagggagagcttgggtattgaggtttggtgtggatagctgagaaccatccaacattaatgagcacaaatgtgtgcacaggctgaaaatgtctctccagggacgctgatgacttgagctttgtgtgtgccattggaaatcatgaatgagaaaataactgactcgctctctcagacaatctggtttatggacctgaagctcttatttgctgtcaggttgttcatctccacgcctctgtgagatattattgaaacagaacccagcactgtcctccttgccaaagtggttgacgttggccttaacttyccccagttctgagacagggacagactggctaatgtaagtgtgccct

SEQ ID NO: 473331 - DNA, 523 bp, Homo sapiens
ggttgcatggcggtagaggtgtcaggaaaagctcccttataattattttcattcctatgtttctactcaatactatttaaactgaaatggggcttcatctgctcctttgtttattcagcaaatacttttgagcattttttatgatccagctactgtgctaggtgatggggttacaataagatacagtcccagccttcaaaaacttatgtgctcaaacgttattctccaaatctttattctgtttctcatctatcattaatgggaatagacagctcattttttattgttcttggaggctagagagtacaggcaaatgcagatgatcaagcctttcttattgccccactcctagttgattccctctccctttcttttacttatgacatgcaacttccacaaaggcagtttatgttagttatctatggctgcataacaaattactsttgaacttagcagctaaagacaaaaacatttattatttcacagtttccatggaggaggaactcaggcatacccttgctgc

SEQ ID NO: 473332 - DNA, 639 bp, Homo sapiens
aagataaggttttgcaggccagatctggaagtagctatatcacttctgctcatattctattggctagaactcagtcatgagctcattctcaactgcagggaaagcygggacatgttgaccggctatgagtccagtaggtaaagaaaaactgtttggagaacaatttgccagtcttgatcagagtggaagatgaaaaaaatgtggagactaatttgctcatatgaggttgaaaactcaaggatagaatattgtcgttagaatttgatgtactgaagtttgttcataaatctaacaaatgtttactgagtatctattatatgccaggcactcttcttggctctggagatgtagcagtgaacaaaacagatacaaatttctaccaagaatcttatgtttgagagggtaccccgaatgaaagaggagcaaccaagagtggagaaaagcgtaaaatataatgttcgggaaagttgctttgatttgaaccaagtggcttaaaactatgaactcagacagatctggctttatatactggttttgatagtcacctaattgctgtgtgatcttttagccagttatctaacctctcaagcctcagtttcttcctctgtaaatggggataatgatagtgcttatcacata

SEQ ID NO: 473333 - DNA, 639 bp, Homo sapiens
aagataaggttttgcaggccagatctggaagtagctatatcacttctgctcatattctattggctagaactcagtcatgagctcattctcaactgcagggaaagctgggacatgttgaccggctatgagtccagtagrtaaagaaaaactgtttggagaacaatttgccagtcttgatcagagtggaagatgaaaaaaatgtggagactaatttgctcatatgaggttgaaaactcaaggatagaatattgtcgttagaatttgatgtactgaagtttgttcataaatctaacaaatgtttactgagtatctattatatgccaggcactcttcttggctctggagatgtagcagtgaacaaaacagatacaaatttctaccaagaatcttatgtttgagagggtaccccgaatgaaagaggagcaaccaagagtggagaaaagcgtaaaatataatgttcgggaaagttgctttgatttgaaccaagtggcttaaaactatgaactcagacagatctggctttatatactggttttgatagtcacctaattgctgtgtgatcttttagccagttatctaacctctcaagcctcagtttcttcctctgtaaatggggataatgatagtgcttatcacata

SEQ ID NO: 473334 - DNA, 639 bp, Homo sapiens
aagataaggttttgcaggccagatctggaagtagctatatcacttctgctcatattctattggctagaactcagtcatgagctcattctcaactgcagggaaagctgggacatgttgaccggctatgagtccagtaggtaaagaaaaactgtttggagaacaatttgccagtcttgatcagagtggaagatgaaaaaaatgtggagactaatttgctcatatgaggttgaaaactcaaggatagaatattgtcgttagaatttgatgtactgaagtttgttcataaatctaacaaatgtttactgagtatctattatatgccaggcactcttcttggctctggagatgtagcagtgaacaaaacagatacaaatttctaccaagaatcttatgtttgagagggtaccccgaatgaaagaggagcaaccaagagtggagaaaagcgtaaaatataatgttygggaaagttgctttgatttgaaccaagtggcttaaaactatgaactcagacagatctggctttatatactggttttgatagtcacctaattgctgtgtgatcttttagccagttatctaacctctcaagcctcagtttcttcctctgtaaatggggataatgatagtgcttatcacata

SEQ ID NO: 473335 - DNA, 178 bp, Homo sapiens
agtcagtttataagccggtgtagcttctggtagagaagagggtctcactttgctgcagrgcttaattaaatgttattaatgatgtaatgagactgggtcaaagaagaagaatgtgtaagcaaaagccaaagacactgtggaaaaagtgaaactcaataatcccaagtggcaaatttta

SEQ ID NO: 473336 - DNA, 610 bp, Homo sapiens
ccttgccagggaaagcggcggcactgtgggtgaatggatcctttgagcagagctgggcaatgtgacctccctgtaatatgtatccatcaatggggagcctgatgtcattgggaaagcacttctcaacaccccaagctgatgtgataatgggctggagaattcattcctgtggggtaagggtagtgaatgaaatcaccggcctcctggcagagtctgagatggcaccaatacaggctcctgctgtgaccagttgatctgactgtagctggaactggtccttatccccacctcccccaatctaaccaggtttcctccctggtccccctgttcctttggaaccaggggccatccaggactctggaagccggcttagagcctcagtccttgtgcctggtttctacctactgccaggaaggactccacctcccagatccatcttgatcccttacctattgttcagcccttctcagattctgtgccctgtcctgtgattctgttttgtctctaagtcccggctacttctaacctggccattgcactgcccctgagtgcagagcagctcttgcayagagggcccattggctgtacagtggctggccctgacttcttc

SEQ ID NO: 473337 - DNA, 342 bp, Homo sapiens
acgtcacattgtggataataggcttcaacatatggatttggggggatacaaatgttcagtccatagcaaagtgcttggcctgatggagtaagtgatgtttcctctttcctccygggacagcttgacatcccagatgggaaagaactttattctcaacaatcataggagggaggagcatcatagaagggaaaagatacaccttcctggcctgaaaattgacatcaacaggacttctcaggggatacccaggaaatctatttttcaagctggccgtgagaatacccaggtgtgcaaattcagcccttggactcaatcagtccatcagcagcagcaaacattccc

SEQ ID NO: 473338 - DNA, 342 bp, Homo sapiens
acgtcacattgtggataataggcttcaacatatggatttggggggatacaaatgttcagtccatagcaaagtgcttggcctgatggagtaagtgatgtttcctctttcctcccgggacagcttgacatcccagatgggaaagaactttattctcaacaatcataggagggaggagcatcatagaagggaaaagatacaccttcctgkcctgaaaattgacatcaacaggacttctcaggggatacccaggaaatctatttttcaagctggccgtgagaatacccaggtgtgcaaattcagcccttggactcaatcagtccatcagcagcagcaaacattccc

SEQ ID NO: 473339 - DNA, 342 bp, Homo sapiens
acgtcacattgtggataataggcttcaacatatggatttggggggatacaaatgttcagtccatagcaaagtgcttggcctgatggagtaagtgatgtttcctctttcctcccgggacagcttgacatcccagatgggaaagaactttattctcaacaatcataggagggaggagcatcatagaagggaaaagatacaccttcctggcctgaaaattgacatcaacaggacytctcaggggatacccaggaaatctatttttcaagctggccgtgagaatacccaggtgtgcaaattcagcccttggactcaatcagtccatcagcagcagcaaacattccc

SEQ ID NO: 473340 - DNA, 615 bp, Homo sapiens
cattacactggtgattagctttcaatatataaatttgggtggcggggtggggcacacacattcagatcatagcaatggcagctaggaggaagtaaattttgaatcctcatttccatgtaaagacttcatttgctttaaacaatttatttaacttttattgtgctttttctgaaaatgaaataacatttagctacacacagggagggtatgttgtttctaaagtaaaaattaactcttttgtaaatgtggcattgtttaataatagttcaccctgtccaatgatacttagcttttttatatatgtaaataaattattaggttactggtttttctttttcttttggtgggtggggggggtgttaagatcttattctcagtcctcaaaactctgttgaacagggaacatctgccctcattttcaaccttatttctttagtaccaattgcagccatgttataatctttgttttcatccaggtaaagctgagggaagggaaggagaatcyactgagaaaaagattttccccaaagagtgactcagcctttgaaaagaaaatcagctatatgaaaagggaagagtatttaatcattcggagcaataattgcattgtaaata

SEQ ID NO: 473341 - DNA, 627 bp, Homo sapiens
tctcctagtagtctcccaaatgtttaacttggaaataaaaatctctcatcttggcaagaaagaggaagccctgcacatcaatgaaataacatgataaatataaacacagaaatttcagtgctattgttacaggatccctgagatgttgatttttctggcaggaaacctctgtggccattgcgcctttgcctaagttcttgtcctgcatgcaggaagaatgaggtacacagacaagcagagggtgaagaagaagagttctatttagtgttaaaagagctcagaggagtgggtagctcstctctataggcagctcctcccatggagcattcagttctcagcagagaggaggccctggagagggtgtcttctccctgcaggcaagttctttaaatgtctctgcaggtctctgaagctctctgccacagctgctgctctcagcagagaaggtactgctctctgcggctggtcctcccattgtccccagctatcagcaggaaaagtactcttttctgtagcagattggctttttagtctcttcctaagttctttcacaaagcgaagtttttaatttagatttgatccagtttaccagttttccttttatgtcttatacctttggtataaaat

SEQ ID NO: 473342 - DNA, 627 bp, Homo sapiens
tctcctagtagtctcccaaatgtttaacttggaaataaaaatctctcatcttggcaagaaagaggaagccctgcacatcaatgaaataacatgataaatataaacacagaaatttcagtgctattgttacaggatccctgagatgttgatttttctggcaggaaacctctgtggccattgcgcctttgcctaagttcttgtcctgcatgcaggaagaatgaggtacacagacaagcagagggtgaagaagaagagttctatttagtgttaaaagagctcagaggagtgggtagctcgtctctataggcagctcctcccatggagcattcagttctcagcagagaggaggccctggagagggtgtcttctcyctgcaggcaagttctttaaatgtctctgcaggtctctgaagctctctgccacagctgctgctctcagcagagaaggtactgctctctgcggctggtcctcccattgtccccagctatcagcaggaaaagtactcttttctgtagcagattggctttttagtctcttcctaagttctttcacaaagcgaagtttttaatttagatttgatccagtttaccagttttccttttatgtcttatacctttggtataaaat

SEQ ID NO: 473343 - DNA, 490 bp, Homo sapiens
atatcaaagcaaagaaagaacaggaactgcaagatatccagtctcagtacaaataataacttaatttttacacacaaatatttgccacagtgtttcagccaatgcatttacagctctgacacatcatcagacaactgctctgcagtacagatgcctatcccaccaaactaacgtagacgttcaaacacctcgctttatgtytcaagctgctgggctttttctttagagcaaatactggcagtttcatgttagtcattttaaaaggcaacactttgacaaaataattgttcataccttggaaatttgtggaaggttcatatttattgctagaggatttctaccaagacactctatggaatatgttatactccttgaataggtacctgtgacatgccagcatcaaaagatgagaccataaattcacatatatgccatctatcctaaaataagtattatctacatagaaaataaaatgaaattggtgtgaagt

SEQ ID NO: 473344 - DNA, 490 bp, Homo sapiens
atatcaaagcaaagaaagaacaggaactgcaagatatccagtctcagtacaaataataacttaatttttacacacaaatatttgccacagtgtttcagccaatgcatttacagctctgacacatcatcagacaactgctctgcagtacagatgcctatcccaccaaactaacgtagacgttcaaacacctcgctttatgtctcaagctgctgggctttttctttagagcaaatactggcagtttcatgttagtcattttaaaaggcaacactttgacaaaataattgttcataccttggaaatttgtggaaggttcatatttattgctagaggatttctaccaagacactctatggaatatgttatactccttgaataggtamctgtgacatgccagcatcaaaagatgagaccataaattcacatatatgccatctatcctaaaataagtattatctacatagaaaataaaatgaaattggtgtgaagt

SEQ ID NO: 473345 - DNA, 543 bp, Homo sapiens
gcaggaaagctaatggcataaccctctaaatggcacgttcagaaagttatacttccaaatttaggtgaagggagaaatatttctactttctttacccttaaatctaggaagcagtatcaagagacgctatttatttattggcttatttattttcaaattcagtctctaaaatacaagggacaaaaaatagaaactagctttgtatatttccatttgacttagagttaagcctgatgtgtaagataacagactgtttacttaataccacagtcacactgaagattttactatataacacgtatgctttaggatgtatccataattagtacagkttttaaataaatttacatcgttgtctaggataaatatgccataaaaccccaacatgtcttagtaatattcttatgctaacccagtatggtagaaaatactgtataataccgactgaaaattagggaccatcgattctcatctctggtctgtcactacattattgagtgatcttaggaaactcactttccctctctaggccatggttttttc

SEQ ID NO: 473346 - DNA, 585 bp, Homo sapiens
catgttcagaaggaagcaaattaaattatgacttgtgtttctgtgtatgcttattcatatctgctactcctaagtatcatcaatcttgtgtcaacaggtgagaaatttgtctaaaataaatcaattccattgagcattataaatttatactaatgtactttggacatagccaaacatagtccaatttttcatatggccattattttaatgttttattgaataaacgcttggggaaaagttcyttacaaatatctgtagaacagagatgatatacagattatatatattccaagtaattcaggcttccagattaaactaaaccctagaaaagtcaatgcagtgtctatgtcactgaatcttagagaattatgttagtaattatgaatggcattatctattacaaataaataagcagagttgtagaactttagaactagaagggactccagaaatcagcaaagtctagtttagatgagcagtctgaagcccagagggataagtggtttaactactttaatgtaactagccaatggcataattagggctataaaatggggttgggggagcaataataattagcattaa

SEQ ID NO: 473347 - DNA, 464 bp, Homo sapiens
tgtgaaattctactgatagttgagtacggtgaaaactaagaagagatttttttttttttttaaataacttactctctgaaaccaggcaaaagcaaaattttcacagaagcttaataatatgaagtggaaaagctctaagtagctttaatgaagagcagttaactccacaatcagcttgtttgaccaaagcttttagattaartagccaatgcaattctgaaggtagaaacagaacaccaaccttctctggaacccagaataagtataagccagaaaattacccattgtttctcttaacagttctggcttgaatgtgaaatgggaaaagttcccttatccccttgcagggtgtgagatgggggtgtggctggcttcttcagtgcctccctgctcaaacctctaggggagcttacaggcgggcaggctgtggggttcagatcccacagcaatgtctaggggtgaat

SEQ ID NO: 473348 - DNA, 590 bp, Homo sapiens
gggctagagtgccagggacccagccacacggctggcaccaatcagccttgtgccactacagccctcccggtgtgtggggtgttgtgggggaagtgaaggatgtctgcggggctccagggatgtggagatgcggaagctgttgagacccgaggcaggatgaagtcttgtkggggctgggctccaaatagcctggtccaggaggtgtgtgggacctcgcctgagctccgtcctggaacagtgctgttgcgcggtgcaggctccaggcagctccccatcctagtctcggggcccccagggctctcccatggctacgactgcaggagtctgcggtgggaatgtggacacactttccctgcactaagaagtctctgggctcccagacagtttcagctgagctacctgcctcccctctgtctctttcctgcctcagagctttcctgtcgcttctctgcttaattcgaatgtgttcttttagatgctgtattccaagtctgattttctactgggtgttttggttcttctttgtggaggaaagtactgagggcctgtagacagccatcctgaagcctctctcgggggaaaaatgtttt

SEQ ID NO: 473349 - DNA, 593 bp, Homo sapiens
caaaagtgcaccagggtcactacaacccaagagccgtcacacaaatccttttttctcattaaacaaaaccttccagaggagacagtgatttttaccatctgcccaccagagtgcacagagtccaggagcctggtgggtaagaaacttttacccctttgccaacagatcaggttactgggttctcttctcagcagcttctagaagcgaagaacagctttgagtcctttttactgcactatcacgggggccatggccattggcccactaaagttttgcttaaaaatcagtggcatgaggcacattaattaataggagaaaaggcatacaaatttatttaatctgtatayaaagagacttcagaatgaagacggtcccaacaataagattaaaaagccacagtaaagaatgcagaatcagggcgtggccaaaaccaggttatgttgctaagtcagatttagtgacaacacaggttatgagggaaagaaaggcaggagcttggctagcaacagagactttgttacgtagatgaaattctcaggtagtcaaattttttatctttcttaaccaaccaggttttttagaggtggaaattt

SEQ ID NO: 473350 - DNA, 490 bp, Homo sapiens
ggctccagctgtccatgtgcaccaggggagagagagaaacccatggtcatgttcaccctgaggttcacttccccttgttctctctacgtctcatcttggctttctcaattttggtttattttgttcgccttttgatttctgcaggctaagtatgttccaacctataatccctcttcctacacacacacacacacacacacacacacacacacacacagtgatctgtctgctactgacaactccatggctaacctggacagagtgtgttacagagccgggaaaggaattccttctgtttcacgyggtcctttggctgtgacaggcagacctctaggacacttctagggggtggtagcctccatagccaggtgctcaagaaggggacgaggagcctgccctctcaattagtgctggcagggtggaaatcaatgccgcttttgaagagcagcttggcagttaaaacccaaaagcttaaaaatgtgcacagcat

SEQ ID NO: 473351 - DNA, 596 bp, Homo sapiens
tgcctcctgggttcaagtgattctcctgcctcagcctcccaaatagctgggactgcaggcacgtgccaccacgcccagctaatttttttatttttagtagagatggggtttcaccatgttgaccaggatggtctccatcttttgacctcatgatccatctgacttggcctcccaaagtgctgggattacaggtgtaagccaccacacctggccacttctgtcttatttaaggcaatatattttgggatctctttgtcattgtgtagtctatattcaacccaaaggatggcaaacaaagsctcttgagccaaatctgtctctccgtatgctttgtaaataaagttttattggaattcagtattgcacatccacttatctatcatctgtggctgcttttgtgcttcagtggcagagttgagcaggtacaatagagattctaggactccaaggcctaaaatatttattctctagcttttcatagaaaatatttgctggcttctcttctaaacgatataaatctgttattattatttttcatgtgaagaaaatgaagccctgaaaggctaagtaagcaagagtcaaacagcaagtgagta

SEQ ID NO: 473352 - DNA, 462 bp, Homo sapiens
gggtgtttttaaaagtgcaggggagttgggctgcctttcgttagcagagatgatgagggtcttgagagacctttggtaatcacacaaggcttaggacagtcccactgacaatgaagaattgttctgcctgaatgctgataatgcttctattgaaaaccgctgctttcatacatgcaaagagcttagaacagtgcctggctcacaataagccctgaatgcaagattattattattatcgttactatgcagtcaggtccagacttcatctcctagcatatgaacgctccatagtcttaccccagtgcttttaccaagaaaccacacacacacacacacacacacacacacacacacacacacatacccataataatacatatgggcatatgggtagtttctatatcttctatgcctattatgtttgtgcatgtgtgtgtrcagtgcctgagtgtatgtgtgtgt

SEQ ID NO: 473353 - DNA, 615 bp, Homo sapiens
aatgattttttcagatctaattataaaaatagtaacttttttgtgttttttttttaagttctaggtaaagatagtttttgagatagggataattgtttaggaaaaaatttatagcattacttttttaaaaatctatgttaacagttacatcctttgtaactctgaattcccaaggaaaatttgggcaaaggaaactttcaggtatgggaacaggatatgcacatttactctctttctactcttagcttaattttgacatacttgaattgtgtaatctttgtatattgtgtaagcattcagatagctatgtatcctattcttatttttctattgtgtttttaaaaactctttcccaaaactattcaggatttttttcctcaagtggcaagttgccccattttrtaacagtaagcataatcatgtcatcttgacaagtaacttaaattacatttgagataagtaatttttcttgagcttattaaaattgttaacatggtgcctgaatttgttgatgaaatcagtctaatgtcatgtcttgttggcctttgaaagtctagatgttatttcaaagtagtaaacattcataatttcaactgtcttattttatgaaacagc

SEQ ID NO: 473354 - DNA, 611 bp, Homo sapiens
tatttttaaactaagtggatgggccaacaaatttattgtgttattcaaaccagattgaaaataatttctcgctattcacagtatagaatcctaattgatgtacacattatctcaactaactcctcttccttaaaagttttgtttcaaatacttacattttatctgatcatatgtaagtgttgccccattttctcccctccaaaagagtgaattccmggtggagttctgtcaaacttaaaatacaaagatgactgtggtgcaacccagatgagaagaagctccaccagaagttgaatccttgaaggcaagcaaggacaagactccaaatttttttccctgctcaaggccaaataaaaccatggtgcgaaattcagtttcagttctcagagcagtttttccatcttcacgatcatcactaaaaagcccaatatgtgtgagccaccacacaggagaggtatagttgcacaaattaggaaaccagaggtagaaaacgagagagctttctgcttttcccaaggagtgttcatgtagaagggcttatgtcaagcattaatttgaagtcaggattcaaagacctgaccaaccgtgtggctctggacttgttacttcct

SEQ ID NO: 473355 - DNA, 611 bp, Homo sapiens
tatttttaaactaagtggatgggccaacaaatttattgtgttattcaaaccagattgaaaataatttctcgctattcacagtatagaatcctaattgatgtacacattatctcaactaactcctcttccttaaaagttttgtttcaaatacttacattttatctgatcatatgtaagtgttgccccattttctcccctccaaaagagtgaattccakgtggagttctgtcaaacttaaaatacaaagatgactgtggtgcaacccagatgagaagaagctccaccagaagttgaatccttgaaggcaagcaaggacaagactccaaatttttttccctgctcaaggccaaataaaaccatggtgcgaaattcagtttcagttctcagagcagtttttccatcttcacgatcatcactaaaaagcccaatatgtgtgagccaccacacaggagaggtatagttgcacaaattaggaaaccagaggtagaaaacgagagagctttctgcttttcccaaggagtgttcatgtagaagggcttatgtcaagcattaatttgaagtcaggattcaaagacctgaccaaccgtgtggctctggacttgttacttcct

SEQ ID NO: 473356 - DNA, 703 bp, Homo sapiens
tggcatctttggaagcaaatcttctaaaatatgaatccttcaggactttctttaaaacaaaaatgaccacactaataaaattagtcttgtcttctttgtatgagcttgcccatacattcttatttgttggactttcctacatccctcatatcacatatactttaatcgtaactctatgccattaacttcaaaaaaccatccttatcctattaaatatacattggggggacaatacttgttagtgcggtcactgcacgtctactcttcctcccacacacacatccttttcttaactacactaagaaaatataattatttgcattcttcaaatattctcaaaattcctttacatacacattctcaggaaaaaagttgggtttcagggaaggctgaacacagtcaagattcatttgagtcaagacctgattttcttcaggctgtgttattttctctgaagtactaggtttgcacaaatgattgtttccaacggcacaaccatcagataaagtgtggggtggtgtcttccagctcttctcattctctcrggcgttgtctggagctttgcacatacaatatattcatcctacatactggacaatcatgatgatggcccaacgtgtgctgtaaatctcacctatgcaggcaaaatcatgtctgtatttggaaacagaaaaatctaactaatttcaaaggtggagtattc

SEQ ID NO: 473357 - DNA, 703 bp, Homo sapiens
tggcatctttggaagcaaatcttctaaaatatgaatccttcaggactttctttaaaacaaaaatgaccacactaataaaattagtcttgtcttctttgtatgagcttgcccatacattcttatttgttggactttcctacatccctcatatcacatatactttaatcgtaactctatgccattaacttcaaaaaaccatccttatcctattaaatatacattggggggacaatacttgttagtgcggtcactgcacgtctactcttcctcccacacacacatccttttcttaactacactaagaaaatataattatttgcattcttcaaatattctcaaaattcctttacatacacattctcaggaaaaaagttgggtttcagggaaggctgaacacagtcaagattcatttgagtcaagacctgattttcttcaggctgtgttattttctctgaagtactaggtttgcacaaatgattgtttccaacggcacaaccatcagataaagtgtggggtggtgtcttccagctcttctcattctctcgggcgttgtctggagctttgcacatacaatatattcatcctacatactggacaatcatgatgatggcccaacgtgtgctgtaaatctcacctatgcaggcawaatcatgtctgtatttggaaacagaaaaatctaactaatttcaaaggtggagtattc

SEQ ID NO: 473358 - DNA, 549 bp, Homo sapiens
ctgtatatagcacaaatggccaaggcatttataatagatgaactatactttagaaataaattcttagggaggaccctatactactaaactctaatttaaatctccttcttttaaaatatycatggagttcagcttcagaaaatagaagtcaatcaaaatctttcatttgcccaagaaaatatgtttggatgcatgggagcaccacaacacagttgtaaacatgcattacctattaacatgtaagtgtcacaaaatacagcaattacagaagaggccaaagtggagctagaattatttaattggctcaaagataaacttgcctggtcagtgacactttggaaacatattatttaaacataagttcagttgtactttcactggcttctcgctttccttagtgtttaattacagaaggtgtatgtgtctagggtgagagaagatgaagtcttataaacaagagatacattcgcatccctctcttccttgtgctgttagatttccaaggtctgaatccactacctgcaacattgctattagttacaatggtca

SEQ ID NO: 473359 - DNA, 495 bp, Homo sapiens
ggtgatggaagtgggggtttgacgactcgtcagtgggcccagtgtacatgttaagttgttgttttctgctcagctaagcagcagagaattgatatgttagcaatgaagtgcaatgacaattaaattgtaactgacctacatgttaccgtcattacgcgttctcttttttactgctttccctcttatttaatcacacagtatgggrtttttattaggctgtaatgttaaaatcttcatccatttagccataaatgtgtgactggatatctatcagacttccttgcactatacaaacaaagccattttgctgaatcactgttgacttgtttgtggcctaatttaatgagtgtaataacttacattactatccagttaacatttaggagcccagaaaagacctgctagcacgcagtaagctactgtatacattctctattcatatcactcccctttgcagtaaattttatacaataatatgcactgcttacaacataa

SEQ ID NO: 473360 - DNA, 493 bp, Homo sapiens
acgttattttcctttggtaggacaaggaaggttcatgtaataaaaggttatagagttcaagcctatacaattatcaaagtactagaacaagagcgtatttcctgaattttggaagatgttcttcagaaacaataaagggacyactcagtttcacactagtcagtaaaccttggaactcactccaccaagcaagtgtagggtttcagataaaggctgaatatagcagcaagttcaaggacagtttggagactttcaggcatggcaggaactcagtggggagctggaaagtttgaagaatgcctccaatttttctcagcgatggatggtaactgtgctttctacaacaggtttcttgctgcccctatcacagacaacccagggccacataaaatagcaaacaggcccaatgtgacatatttttgaatatggaatgtgtcacagtgttctttttctggcttcgaggcagatttcactccctgttctggattgttct

SEQ ID NO: 473361 - DNA, 493 bp, Homo sapiens
acgttattttcctttggtaggacaaggaaggttcatgtaataaaaggttatagagttcaagcctatacaattatcaaagtactagaacaagagcgtatttcctgaattttggaagatgttcttcagaaacaataaagggactactcartttcacactagtcagtaaaccttggaactcactccaccaagcaagtgtagggtttcagataaaggctgaatatagcagcaagttcaaggacagtttggagactttcaggcatggcaggaactcagtggggagctggaaagtttgaagaatgcctccaatttttctcagcgatggatggtaactgtgctttctacaacaggtttcttgctgcccctatcacagacaacccagggccacataaaatagcaaacaggcccaatgtgacatatttttgaatatggaatgtgtcacagtgttctttttctggcttcgaggcagatttcactccctgttctggattgttct

SEQ ID NO: 473362 - DNA, 493 bp, Homo sapiens
acgttattttcctttggtaggacaaggaaggttcatgtaataaaaggttatagagttcaagcctatacaattatcaaagtactagaacaagagcgtatttcctgaattttggaagatgttcttcagaaacaataaagggactactcagtttcacactagtcagtaaaccttggaactcactccaccaagcaagtgtagggtttcagataaaggctgaatayagcagcaagttcaaggacagtttggagactttcaggcatggcaggaactcagtggggagctggaaagtttgaagaatgcctccaatttttctcagcgatggatggtaactgtgctttctacaacaggtttcttgctgcccctatcacagacaacccagggccacataaaatagcaaacaggcccaatgtgacatatttttgaatatggaatgtgtcacagtgttctttttctggcttcgaggcagatttcactccctgttctggattgttct

SEQ ID NO: 473363 - DNA, 484 bp, Homo sapiens
actaatttttaaaattttttttgtagagacaaagtgtctctatgttgcccaggttgatcttgaactcctgagctcaagtgatcctcctgcctccgtctctcaaagtgttagtatcacagacatgagccactacacctggttcaattccaaatcttactgatttatttttctcagttagtgataggcattgttaaaatgtttcaatatgataataaatttatttattcttgtttgtcttcatttttgccttatctgttttagaggaaaagattttgctttatgtgttttaggagacaaacattttaaaattttatattttccatgtgaattgaatcatttattattacacagttaccttttaaatctgaataatcctttttagcttaatgtctagtaatcaagctgtacttacatcttttgyttttcttttctgtttttggaaagtatttgatgagatacctttccctatcctttcatattcaac

SEQ ID NO: 473364 - DNA, 580 bp, Homo sapiens
aagcccgccacttaaacactactcccgggatttggcgctcactatgtgtgtatttttcaagacataactcacataccttcacaaccttcacagctcagtggcttaaatatatatatgtcacccagggaggtcagttcacagctaactggagcctcaaactcccaggttcagttaatcctcccacctcagccttcccagtagctggaaccacaggcacacaacaccatgctccggctaatttttaaaatttatttaattaatttttttttaagatggagtctcctttgttgtccaggctggagtgcagtggcgtgatctgggctcactgcaacctccgcctcctgggttcaagcgattctcctgcctcagcctcccaagtagctgggattacaggcatgtgccccacggccagctaatttttgtatttttagtagggacggggtttcaccatgttggcttggctggtctcaaattcctgatctcaagtgatccacccgccttggcctcccaaagtgctgggattacaggcrtgtgccaccgtgcctggcacccccgccaattttttttttgttttttttga

SEQ ID NO: 473365 - DNA, 580 bp, Homo sapiens
aagcccgccacttaaacactactcccgggatttggcgctcactatgtgtgtatttttcaagacataactcacataccttcacaaccttcacagctcagtggcttaaatatatatatgtcacccagggaggtcagttcacagctaactggagcctcaaactcccaggttcagttaatcctcccacctcagccttcccagtagctggaaccacaggcacacaacaccatgctccggctaatttttaaaatttatttaattaatttttttttaagatggagtctcctttgttgtccaggctggagtgcagtggcgtgatctgggctcactgcaacctccgcctcctgggttcaagcgattctcctgcctcagcctcccaagtagctgggattacaggcatgtgccccacggccagctaatttttgtatttttagtagggacggggtttcaccatgttggcttggctggtctcaaattcctgatctcaagtgatccacccgccttggcctcccaaagtgctgggattacaggcatgtgccaccrtgcctggcacccccgccaattttttttttgttttttttga

SEQ ID NO: 473366 - DNA, 415 bp, Homo sapiens
aagatcgaggtgccagcatggacagttgctggtaaggcccctctttccggcttgcagacaaccaccttcttgccgtgtcctcacatggctctcttctcataagggcactaaccccacagtgaggtccccatcctcataaactcatttaaacctaattaccccgcaaaggctccatctccaaataccattgcattgggggctagsgcttcaacatttgaatttggggtggtgggcacacaattcagtccacagccatgtggtagtgggaactatcatgcaatgctggtggaagtataaattggcataatcactttggaaagctatttggctcatgtgctgattattctctaccgtcagattcattctctgccctgctttttcctgctctaggctctggaaggctgatgctgaggac

SEQ ID NO: 473367 - DNA, 627 bp, Homo sapiens
aggcacagaagcaaaatggcgagtcccttagaggtaagggtgtaagaggatcagagaaaacttcccgcagaaaggtctatcagagacatgaaaagtgggtgtgactgtgcaggcaaatggggatggggtgttaataaaagtgttccaggcagagagaacagcacaggcgagggctcgaaagcattcaaggaactgaaagaagttcattcatgatgaggaagacattaggggtgagaagtgtgggagttttggtcaaggtggtggctgctgaagtcagagaaaaagatggagagatgagcaggagtcagcttttggagaggatagtaaagaagttgaatgacatcctgagggtacacgggagrcattaaatgtttaagcaatggtgtgacttaatcctaagaaactaaggtaatggacatgggctctggagcctgactgcatgggttgaaatttgagatccatcactttctggtggtggaaacttgagaagttacaaagatgcttggtgccttagtttccttattttataggattgttgtggagtttaaatggatgtaaagcgcttggaacaggcccagtaaagttatctactgttttcagatttgagtagttagacggaaaagtgag

SEQ ID NO: 473368 - DNA, 655 bp, Homo sapiens
ggcaaatacattgctaaaaggcctttactatagcatattatattcagaatgtctaaagtcaaggtgaaagaaataattttaaagttagcaagagggaaaatggcaaacaggaggtaggactaacttgcagctcccatttggacggacagaatagtgcgtggagactcataytgtgaacttttgctctaagagctaccacaggaacataccaggaaagccaagagaatccacagaccctttgaaggaggcagattgctactgaagcctccatgggacagccaaggaattgtgagtctgtgagtccgcttgctttctcagctgggaggcttgcagccaggggcaagttttcagccctgctcactggctgcctgagaaataaacccagtgcagttggtgggggcacagtgagagtgagatcagcctttctggctgttgactgcaagggagctgggtgagcctgtggctaccggctttcccccattccctggcaacctgtatgacacagcaaaggcagccataatcctccctggaaaccttcccttgcagcagacaaaccaagccccacccaaggagagtctgagttcagacaagcctaaccctgcccccacctgatggtctttctctattcatcccggtaggcaaagacaaaagacat

SEQ ID NO: 473369 - DNA, 655 bp, Homo sapiens
ggcaaatacattgctaaaaggcctttactatagcatattatattcagaatgtctaaagtcaaggtgaaagaaataattttaaagttagcaagagggaaaatggcaaacaggaggtaggactaacttgcagctcccatttggacggacagaatagtgcgtggagactcatattgtgaacttttgctctaagagctaccacaggaacataccaggaaagccaagagaatccacagaccctttgaaggaggcagattgctactgaagcctccatgggacagccaaggaattgtgagtctgtgagtccgcttgctttctcagctgggaggcttgcagccaggggcaagttttcagccctgctcactggctgcctgagaaataaacccagtgcagttggtgggggcacagtgagagtgagatcagcctttctggctgttgactgcaagggagctgggtgagcctgtgrctaccggctttcccccattccctggcaacctgtatgacacagcaaaggcagccataatcctccctggaaaccttcccttgcagcagacaaaccaagccccacccaaggagagtctgagttcagacaagcctaaccctgcccccacctgatggtctttctctattcatcccggtaggcaaagacaaaagacat

SEQ ID NO: 473370 - DNA, 561 bp, Homo sapiens
tcatacaaacatagatattgactgattctaactttagataatcttcatgtaaagatttatttagtgccacaattatattgatgactttcaggtattcttattctagattaatttttaccctctcagtatcctgctccccctactcttgtcttcttgtccatgaaaagcaacatcagaggctacctttattcctgtttctttccaatgtcttgaattttctgcaaatattcactcagagttttcaggcaaaatctacagccactagttggaacagctttagcttctcagtcattaaggtgatatctggaacaaacattcattagaggacatcaactagaaaatgtttgaaatacatgggattctggctttgtcacaccttagtcaacaaagatttataaaataagaagggatcttagasatgggctgatagcctccaatttatacatgaggaaatctcatgcaccaatatttaaggatacaatagtgaaaggtcacactcagatcagaacccagttctctggcttcccaaaacagtgggctttttattctaccccacctcta

SEQ ID NO: 473371 - DNA, 440 bp, Homo sapiens
aaaaaatcatttgtctaagctaagccacttttatttcttacatttttttgtcctaggaaataatttcctgtgttttgggacctttgcttcttttctttggactgtcttttaaggacattaaaatgtaattgagtttatcagacccaatgctaaaataaaaggamttcaaaagttctaacatttgatacatttaaaaaggtatgatttttaaaaggtataatttctgagctaaaggagtgtaggagagctaggccttgtgccttagcaaattgaacagtggctgttgtgacgtggttgttgataaaggaaatcatacagactcactcagcttagtgttttctgagatagcagatgaacctataacaaatacggcaccaaaaaatacagcaaaatggatattgccattagaaagatctaatgactctatcaacagtgggcaa

SEQ ID NO: 473372 - DNA, 440 bp, Homo sapiens
aaaaaatcatttgtctaagctaagccacttttatttcttacatttttttgtcctaggaaataatttcctgtgttttgggacctttgcttcttttctttggactgtcttttaaggacattaaaatgtaattgagtttatcagacccaatgctaaaataaaaggaattcaaaagttctaacatttgatacatttaaaaaggtatgattyttaaaaggtataatttctgagctaaaggagtgtaggagagctaggccttgtgccttagcaaattgaacagtggctgttgtgacgtggttgttgataaaggaaatcatacagactcactcagcttagtgttttctgagatagcagatgaacctataacaaatacggcaccaaaaaatacagcaaaatggatattgccattagaaagatctaatgactctatcaacagtgggcaa

SEQ ID NO: 473373 - DNA, 440 bp, Homo sapiens
aaaaaatcatttgtctaagctaagccacttttatttcttacatttttttgtcctaggaaataatttcctgtgttttgggacctttgcttcttttctttggactgtcttttaaggacattaaaatgtaattgagtttatcagacccaatgctaaaataaaaggaattcaaaagttctaacatttgatacatttaaaaaggtatgatttttaaaaggtataatttctgagctaaaggagtgtaggagagctaggccttgtgccttagcaaattgaacagtggctgttgtgacgtggttgttgataaaggaaatcayacagactcactcagcttagtgttttctgagatagcagatgaacctataacaaatacggcaccaaaaaatacagcaaaatggatattgccattagaaagatctaatgactctatcaacagtgggcaa

SEQ ID NO: 473374 - DNA, 624 bp, Homo sapiens
ctgggcattttctctttactaattacataatacacctacataaaaaaaattggtaaaggaattacacattttcaatttagatattagttgcacaattttatggaaaagtcttacaaagggcatacaggttatgtcttcattatagcaagaattttgctgagagcttaaaagttcaacaaaaatttaagtatttgggtaattaaaatccatataatgatttttcaggaaaacaactgattgtttcatttgtaatagcagaggctcaaattaatattaaaaatatcagtttatcagaaaaatgtatgtggtcatttttatatatagaccacacaaaatctgctcaatatttgtcttcatattgtactctcttggctttttaataatatttgcatgaagaataatccaaactttggaaaatgtagcttctttcctaagcagatattatcctttctctatgttatcttatatttttcaatgtgacctgtcacatagatatgtgcccttctctttcttgaccaaaaatttcttgacaatttttggatattatgtctactgactgctaagacagattcaaattaatatyagccttatgctgatactatgtgtcttgggaaaaatacatat

SEQ ID NO: 473375 - DNA, 644 bp, Homo sapiens
tgggtcagggacatgctagaactcactgacaccagaattggactcattagtctgataaacatcacagccacccaaagaagtggagagagatctsctcaccccagggttacagttagaaacccagaggcagagactctctaaagacatggtaagttgataacaaagccaataaccacaaatgaggcttctgccagcaccctcgctggttaacacagataccaacattatttcagaaatgttttgctttatctttaaaaatattctgggactttaaaaaatgaaaacaaacttcttccctctaggcaggtgtgcatgcagcaagcgtgtgcgtgcacgtgcacacacacacacacacacacacacacacagagtcatttaacaaggatgagagggcatgatcccaaaggctttccaacctcctgtccaaggagagttcccagctagcctaatcactctggcaacagcacacctgagcatttccctcttggcacaaaggaagaaaaaggaactgggaagctagttctgttggacaaatcacatctgaggctgtaaacagcccatagatgtcttcccatttaagaggccttaacaagcaagttggggaaatcatctattcaaaggtttaaatgtgactcggccactgc

SEQ ID NO: 473376 - DNA, 610 bp, Homo sapiens
ctgaaataattctgtgttastatagactaaaaagcccatctacttcttggtgagatcattgcaaagtacagaaaaatgaagtgaaaattatttaggttttttttcagaaaaataatagagcacttacaagaaaacaattactaaaatacagatgttaagagatggagaacaaatggcacatctctgtttttcaaaagcatttagtctcctgataatctaactttaagaactggagaactatctgcaagcatctagactgcatcaaaaagcagcggagcatattggttcccagtgaataggttctaaacctctgaggtcccttatcatagggtactcagaaatttataaacttgacaagaaatgtatgaatgactaaatgtgtaagcatgatctgagaaatttaaatgtaaagaaaagtacccattttcaaaaagaaatgagactcagtgcattcgttatagttaagaaatgaggtcttctaattaatatagttgaaaacatagatttttcaaagaattttaaagaataggatgtagcaaaaaattaggtttattatttattcatgatttgaaaaaacttattgcccatgtaacataaatgaactctctcc

SEQ ID NO: 473377 - DNA, 343 bp, Homo sapiens
cagacatgcaatacagtgtctttcgtcyagccaggcttatgatctggttctagaaggtctcatagttagggaaccaatttgcagccaccttcaacctgtagagagtgtgaatcctggggctggaaggggataaaatgtattcagactggtacttttgggtaaaatctatatctccaattaagagtaggatggaataggatggtgaagagaagggagagaaagggagacaggagaggaaaggagagagaaaaaaaggaggaggagaatatacaagcaattgaaaacaaacttttcataaagtgtattaaacccatgttaatgcatcaccccataaaggtgaatt

SEQ ID NO: 473378 - DNA, 512 bp, Homo sapiens
tgggcacggtggctcatgcctataatcacagcagtttgggaggcccaggcaggaggatcacttgaggtcaggagttcaagaccagcctggataacatagtgaaacctcgtctttactaaaaatacaaaaaaattagccgggcgtggtggcatgcacctatattcctcactacttgggaggctgaggcaggagaatcgcttgaacctgggaagcagaggttgtagtgagctgagatctcaccactccactccagcttgggtgacagagcaagactccttctcaaaataaataaataaaagttttatgtgatatccacttaaggttgatttatagtcactgagattatagggacccaacatggggtaaatcctgtgagcagttctcagccatgctgaggttctctgaaaccatcttgcactcaagtctctcaggccactgyggacaaggatccttcctaagtgctttgggtgcgtaggtcctgtaggtactaatcctagaacctgtgggcccaa

SEQ ID NO: 473379 - DNA, 630 bp, Homo sapiens
atggtaaataactcattttaggctatttttgagggcttcagtcattattggacaccacctggacatcaatgtccagtcattgtatgggtcactttggttagaatacagtgcccagttgttggacaagtctaggtgttgccgtgaagatttttttttagaagtaagtgatattaaaatctgtagactctgagtaaagcacaatgtgggtgggcctcatccaattagttgtaggtcttaagagcgaagactgaggtttcctgaagaagaaatttgacctcaggactgcagyatagaaactttggctgcgtttccagcatacctggcctaccctttggatttcagactagccagattctacaatcacataggccaattcctttaaatctttctctctctctctctctcctctctttctgtgtgtgtgtgtgtgtgtgtgtgtgtgtgtgtgtgtgtgactggtctgcttctctgaagaaccctaatacaccaagacacttagagctctttattgccacaatgtgtgtttggtctgctttacatttaaccgttaatgttaggaaaatcaataatggtaaactgtaacccaagggggacctcggggatttcttgacagttgtccttggatctaat

SEQ ID NO: 473380 - DNA, 512 bp, Homo sapiens
tgggcacggtggctcatgcctataatcacagcagtttgggaggcccaggcaggaggatcacttgaggtcaggagttcaagaccagcctggataacatagtgaaacctcgtctttactaaaaatacaaaaaaattagccgggygtggtggcatgcacctatattcctcactacttgggaggctgaggcaggagaatcgcttgaacctgggaagcagaggttgtagtgagctgagatctcaccactccactccagcttgggtgacagagcaagactccttctcaaaataaataaataaaagttttatgtgatatccacttaaggttgatttatagtcactgagattatagggacccaacatggggtaaatcctgtgagcagttctcagccatgctgaggttctctgaaaccatcttgcactcaagtctctcaggccactgcggacaaggatccttcctaagtgctttgggtgcgtaggtcctgtaggtactaatcctagaacctgtgggcccaa

SEQ ID NO: 473381 - DNA, 628 bp, Homo sapiens
ttagagataagtcaacatttccattttaaagataaaggaactgcaacactgaagagttcagaaaacagtcataccattagtaaatagagagagaagccaggactcctggctctaataactcttattctcttacctcaccaactccctgttaatgaacttgtcaaaaaaaatatgtgtactattaattttttgtatctgtgrttcctaattggctggaatgagatgaggttggagggagcatatataagcatctccaaataacacattcgatttaaagaagcataattaatatcaaaatatatttcaaattggggaaatgaaaaccccattgttttgataacaaaaaccacaagtagtaaattgcaacaaaacaccggcagataacaattccttcctatgcatatcagtaattctcaaagagggcagacattgtagactggagacatattcaaacctccacaggaagaaggctcttagcttcatctgaaatatataaaacatcttggccatttaactttttaaatttttggttgcaattataacatttcaaacaaatagaaaaatacagaaataatacagcccttacatatccaccatattcaaaacctactatgtcattgttttatca

SEQ ID NO: 473382 - DNA, 628 bp, Homo sapiens
ttagagataagtcaacatttccattttaaagataaaggaactgcaacactgaagagttcagaaaacagtcataccattagtaaatagagagagaagccaggactcctggctctaataactcttattctcttacctcaccaactccctgttaatgaacttgtcaaaaaaaatatgtgtactattaattttttgtatctgtggttcctaattggctggaatgagatgaggttggagggagcatatataagcatctccaaataacacattcgatttaaagaagcataattaatatcaaaatatatttcaaattggggaaatgaaaaccccattgttttgataacaaaaaccacaagtagtaaattgcaacaaaacaccggcagataacaattccttcctatgcatatcagtaattctcaaagagggcagacattgkagactggagacatattcaaacctccacaggaagaaggctcttagcttcatctgaaatatataaaacatcttggccatttaactttttaaatttttggttgcaattataacatttcaaacaaatagaaaaatacagaaataatacagcccttacatatccaccatattcaaaacctactatgtcattgttttatca

SEQ ID NO: 473383 - DNA, 632 bp, Homo sapiens
tatgtctaagttatgagcacattacaaacatgcatacacacatgtgaatgtgcacatacacggtttttcgtaatggcatttccctcagccattagtttgtcatatggaccaaagtattcaatttcacatgaagtgggatctacaggtaactattcagaaattttctcatcagtccctagtataatctccttaaacaacataaaagattacacctaaaatacatttatttttagaataactatttacctctagaccgttcagatgtagccagtaacaatgtttttctatctcccctatttaaacttacttgataatggagtgtcatactatagtgttgtttttaatttttttaattaaagtgagaactctattgtagagagttttctaaaaacacttaaagtcaataagctgatacatmttttcccaggatctgctctgaaaatgtataacaaacaggaaagtcagcctgagagacataaacaagtcaccagcctcacccagtgacccttgacagggccaagaatggacctccggctctggggtccagtcctgctcaccacttggtgctgctgccctctgctcttttgtttctaataaagtttaagacacttcctgtctaaatcacatgtggt

SEQ ID NO: 473384 - DNA, 467 bp, Homo sapiens
aaaatacatactgtattatctaactttgattctaaatatggaaatttgcagaacccaaatattgcccccaatccttagcccaggtacatcattttggataagtcagaacctgagtgaaaagataactgcataattttaactcttccagtcccaagttcatccttctttctatagtaccttcttaagcatgtctttactaattttttgatcgtactccaatccatatttaattaacaatggagctaaatgacattcacaggtgttttctatgtcatagccacactgatctaagttcagtaaccctggaattagagatagggatargatattacatcagcagtgagaagcaccatgaatgaaaatagatgcttactcactgcaaaggaataatgatgcctctgcacctctgcactctgaaataaaaatggttactagaataatgtttttattttgtacttaagcagaga

SEQ ID NO: 473385 - DNA, 471 bp, Homo sapiens
attgcttctgatactagttacactctgctcgcctctctcttgtgctctgtcattatctcattaattccctgggacccagcaaacacatttatgtggatggttctggcccagctcctgctctgccctccagatcagcacttcagcctcacacttgacacatccacctggatgttctgccaacaatgctggctccaaagtgtgtgcacctctgccctctccctgcctccctttcccttgccttaataaatctcccttctcacttttctatttcctrttggccaccattatctgtcacccatcactgaagtcatgtatgggttcttctttcattgcctcccacctagattctctatcagcctcccttccaagtgaagctcctgttttactgtgtactattgtcaaagtctccaggctgtccttgtagcaatcagttctatgttctgttttaagacgtgtctacccagagcacag

SEQ ID NO: 473386 - DNA, 521 bp, Homo sapiens
agttttctgcaccacccttgattagctattttccagttctaagagcccgaagcaaaaagaactacaacagctataaacaatagatgctttgaaataggttccctttacatgtcaggaaagaggagatggaccacatgtcagcagtcgacatccccatatggaggggcaactggaagctgtaactgtctttgggggaggggaaggaaagacagaaacggcttggcagtgatgctctgtcttagagggggcccgatgcatctcttcaatacagamcctctgccctcagggtgtttgctagttaaccactgagcttgtttggatttaaaccaaagagggatgggaggtgggggcggggagtaggtttctaatctgaagaaagagagcacacagtgccaagagagccctggccctggctctgaagaagcctgtgaggaggactgccgtccgttacgtctgtggagggaaggggaggaggtgctggggggaacaccccgtcagcatcttggcaaatatgtccctag

SEQ ID NO: 473387 - DNA, 521 bp, Homo sapiens
agttttctgcaccacccttgattagctattttccagttctaagagcccgaagcaaaaagaactacaacagctataaacaatagatgctttgaaataggttccctttacatgtcaggaaagaggagatggaccacatgtcagcagtcgacatccccatatggaggggcaactggaagctgtaactgtctttgggggaggggaaggaaagacagaaacggcttggcagtgatgctctgtcttagagggggcccgatgcatctcttcaatacagaacctctgccctcagggtgtttrctagttaaccactgagcttgtttggatttaaaccaaagagggatgggaggtgggggcggggagtaggtttctaatctgaagaaagagagcacacagtgccaagagagccctggccctggctctgaagaagcctgtgaggaggactgccgtccgttacgtctgtggagggaaggggaggaggtgctggggggaacaccccgtcagcatcttggcaaatatgtccctag

SEQ ID NO: 473388 - DNA, 417 bp, Homo sapiens
gttttctgaaaatcacaggattatctgcttgtgatgttgggctaatagtaggtgctgtatgaatacttaatgatttcttaatattatgctatcagtttaaacttgygggacttttgagagaaataggttatagtgcctgctctagtgtattagtttagtactgttacttggctctgtgactgcacttgaagtactccatggattccataacctctaaaaattctgaagatacagattcaaaatagtatcgtagctatttaaaaaaattcattggcatggtttcatgaactgtagacacagaaggagggagagagaaagaatgaatgtatataaatgcatcattctaagtgaaattagaggttggtgagtgggaaaattggagatttattagatcatttttagagtaacgcaggagtg

SEQ ID NO: 473389 - DNA, 545 bp, Homo sapiens
tgctgccttgagagaatttccacactgcagtacagagagggggaacccaggtggagctgagcagtgttctgggttgagaacccaggagttttgagagaccaagggggctagagtgtaccaggcagagtactggaaaggagaytgctgcacagagaatcattttgttttacactgatgggtagaattaatgggatatcattttctcagttcgaacgttttccgtagtaaaaccttactaaactggtgttctgtttttggcaaatgaaggccctctgtgtagagtcttacaggctgaaatcaagatgttcacagtgttgccttcctcattggaggccccggggaagaatttggtttcagactgttggctgaatttggttctttgtagttttaggactgaggccctcatttccttcctacctctcagccaggtgctagcctttgtttctagaggttgcttgcctcttttctcttccatgtgataccctctaacaaaggtgggtcaagtttttctctgacttcccttctgctgcatctttctgactgca

SEQ ID NO: 473390 - DNA, 520 bp, Homo sapiens
aaaccccttggctggtccctggcctgttaggaacagggtcatcgcctgagctccgcctcctgtcagatcagcggctgcattagattctcataggagcatgaaccctattgcaagccgcatgggtgaaggatctagtttgtgcactccttatgagaatctaatgtttggtgatctgaggtggaacagtttcatcctgaaaccatctccccctatccgtggaaaaattgtcttctaggaaactggtccctggaaccaaaaaggttgggaaccgctgccctatagcactgccttccctttcccacaccagactcgtactgtctcctggcattatcccctctcctaggtcactagctggctgacctgagagacaaattcctgtaggatwttaatgccttgaataaaagttagacccaagatctttgggcatcacttgtatttatactgaggcttttatagcttggcacagaagataaactagcccagggtagaaaggttagggggatgtcaggattggtgccag

SEQ ID NO: 473391 - DNA, 574 bp, Homo sapiens
tataatgcagttagtgttttaagtagcatttacagactcttgatcacatctacaatgcctgttgaaataggaaagtagacagtcttaatggaaccctgtatctgtgtaccggctaactgtcaacaacagggtaatgtytgataaaggagaccacatttatatgttggggaaagtgaaggtccaggcctgtttcccaaccccgttgcttatttattgaacaaataacgctggctggtccttattaggtggtgtggcctcatcaaatttacaacacgttttttctttttcccagcatggatttttgggcatcaatgtataaacagaagcacccaaatgaagtgcttgataattcatattttttttaacatggaaacgtgataccatcagttatctttcacataagaagtgagacctaaagtaaggagactgatttgtgtgtgaggcttaagaaatcaggtagtccgcttatatgcacacctcatgcatcttatatttacattcatacatataaatcatctaaactcatttaaatatagagtgacactgaaaggggagtgtatttgtaattcatcag

SEQ ID NO: 473392 - DNA, 574 bp, Homo sapiens
tataatgcagttagtgttttaagtagcatttacagactcttgatcacatctacaatgcctgttgaaataggaaagtagacagtcttaatggaaccctgtatctgtgtaccggctaactgtcaacaacagggtaatgtttgataaaggagaccacatttatatgttggggaaagtgaaggtccaggcctgtttcccaaccccgttgcttatttattgaacaaataacgctggctggtccttattaggtggtgtggcctcatcaaatttacaacacgttttttctttttcccagcatggatttttgggcatcaatgtataaacagaagcacccaaatgaagtgcttgataattcatattttttttaacatggaaacgtgataccatcagttatctttcacataagaagtgagacctaaagtaaggagactgatttgtgtgtgaggcttaagaaatcaggtagtccgcttatatgcacacctcatgcatcttatatttrcattcatacatataaatcatctaaactcatttaaatatagagtgacactgaaaggggagtgtatttgtaattcatcag

SEQ ID NO: 473393 - DNA, 685 bp, Homo sapiens
ctgtgtccaaccctctgaatgtgatgacttttttgctyctctttggtggcggatattatgaaaattatgaatggacctttttttaaatttttttttttagctcatcagctattgttagtgttagtgtattttatatgtggcccgagaccattcttcttccagcgtggcccagggaagccaaacagttggaccccatggcctacagtattccatacagcagcatcctgtaaggcttgcagcttaggatcaataggttgtaccatatagcctaggcatgtagtaggctgtaccatctaggtttgtgtaggtctactctatgatgttcacacaatgacaaaattgcctaaggacacatttctcagaacatatacccattggtaagtgacacatgactgtactaacagggaaaggttgatttagctcagaaagaaaatctgcagtaagaatgatgccaccttcacagagcaggccaaagaatatcctcagaaatatttccaggagaggaatttggggtgggggagaattcctgtctgtgattgcactgagagagaaatgggagcaaagggacatccagtgacttctcagacacacatagatggcagaatgagggtaggatccatgactgctttctggaaaccgcggctgaccacacacagcttagcttgcatgtgtccctgtgccaata

SEQ ID NO: 473394 - DNA, 465 bp, Homo sapiens
ttgtgccctcaggaaagtgggcaaagcctgctgcttccaatccccttcacaacaccccaaatgttagacatttagcctctcagtttttggcaactctgcattttattttggatttagcatcccagtttcagacattttasctgggtgacttcagataagtcacttaatctctctgcacctaaattttctcatttaagagtttgggcaattctacctcctcccgcacttgttgtatggaccaaatcagattagtgtatctaaaacacttggcacatacaggctctcacagtgtagatagtaagtaggatataggaaaataataggatagctattattattatgtttaatatgtggttcccaagaccctttattaacaggtgataacttctgagaagggtgattttgtttaagccaacattggctagcatagccagatcagtttctgtcatgttgcactggaattac

SEQ ID NO: 473395 - DNA, 582 bp, Homo sapiens
ctggtgtccctcagtgagagtaacatgaagcagaacccccagtgacgcatgacaaacatggaacatgagcaacacatgtcatcrgtattttgaagatgattagtactgtagcacaatctagcctattccaactaatcctccctcctcttatcttcatcatcacctggctggaactcagacttgatggtgagctgtcttgggacctgtgaacaacagtgacatcctggtggctacaaggcaacaaaatagaaggagcttggttccctgaagaattttcagagccacaatgccagctcaaatatctctgtaaatgagaaataaacttctcctttgcttaaactaaaatccattttattgccgggcacagtggctacaccagtaatcccagcactatgggagacaaagcaggtggatctcttgaagccaggagtttgagaccagcctgggcaacatggagaaacctcatctctacaaataataataataataataataataataataataataataaaatctgttttgttaaaacatatatatcctacttaataaaataagctatgcctcctctggatagttgtt

SEQ ID NO: 473396 - DNA, 605 bp, Homo sapiens
gacagagccttgggatacagatgactctttaacaacaataggctgagccctatggttgatagctggtcctcaccaggaagcagccagagaacaacttttgcccggctcaggttccacgcagcaccctaactctggtggcttcacagcttttctcttgtagctctcaagcctttaggataccttccagtcatctctttcccagcctgtgacacagttaatctagctctcaaagrggaaaacctggctcctgaaacatacattgaaattttcttataacagtaggtcacctaaccaagccacccaattgtagacttatctcaacttttgttcctcatgactcatataaggatgaagcctttagggtatgaaaaaaaaaaaaaacaactccgatgggtttaggatatgagaaagaaagacacagtttgataccttaatagactatgcaaccatattatttttgcataattcaggttgttcccagcctatacctcttgtctctctagtaacaatggaaaatgcatccttacatcctcttgatatttgttaccatagtgagcatataatgggtttgaagcaaatactaattttatttgattcaagtgcag

SEQ ID NO: 473397 - DNA, 543 bp, Homo sapiens
gaagtgtctgctctaaagaatgaaaatttctccsttagttactaacctgtccctgactggatccagtccacccacacatgcccaggaagatccggtggtgcatgggacagagccacaagttccctccaactggtttccaaatgcctgctgccatcccacccgggtgacacacaatctgatttcacactcaataaacacaatactgaatttactgtcttcctgtaaatctgaattgtttcctgagttttccctctcatttgataacaaaaccatcagccccattgtccaaactggaaactagaatccaataataactcttccctcttccagggacactgatcttccattcaagataccttttgattttctttaaaaaaaaaaattaatcccaactaccacagccacagttcagattctcagcatctctcacaaaagttactacagcagtaattctcctaatatagctttcaacaatcccaacaacatacccaacccccatccacttaaaacccttcatgactcaaacctataatcccagcagtt

SEQ ID NO: 473398 - DNA, 543 bp, Homo sapiens
gaagtgtctgctctaaagaatgaaaatttctccgttagttactaacctgtccctgactggatccagtccacccacacatgcccaggaagatccggtggtgcatgggacagagccacaagttccctccaactggtttccaaatgcctgctgccatcccacccgggtgayacacaatctgatttcacactcaataaacacaatactgaatttactgtcttcctgtaaatctgaattgtttcctgagttttccctctcatttgataacaaaaccatcagccccattgtccaaactggaaactagaatccaataataactcttccctcttccagggacactgatcttccattcaagataccttttgattttctttaaaaaaaaaaattaatcccaactaccacagccacagttcagattctcagcatctctcacaaaagttactacagcagtaattctcctaatatagctttcaacaatcccaacaacatacccaacccccatccacttaaaacccttcatgactcaaacctataatcccagcagtt

SEQ ID NO: 473399 - DNA, 349 bp, Homo sapiens
atgaatattatcaaaatatgaggcatcctctttttcaaaacaattaactaattaaaaaaagctgctaagataagaaggatttgttgacctgttggaatgtgttaatgtatatggacacacataactgcctatgtattacgtacatatgtacatatgtacaaacacacatatgtatatatatgcacaaatttagaaacataagtgtgtttatgtgtgtgtttatactcacatacaaacattccctaaagtgaaaatagctaaygcaaatattgaaatttaaactgtggtgatcgttgcacaactcagtgtgctaaaagctaaaatacattgatttggtttggtaaataaa

SEQ ID NO: 473400 - DNA, 537 bp, Homo sapiens
aaaaataccatcaccaattttgacttttttctcttgcttttccctcatccttcatgtgtttttatctctttaaaatcaaaagataattgcttagtctccatatttcacattctcattctaggcaagaaaaaagtcataaattccatatccttttctgtaagaaatttaccttttatttgggaaggaatcccttcctacaaaacatccatacatatctcacttacaagagacacaataagctcataccacactgaaatgtagctaggaaaaatgaatattcattttttagttcttctgaaagaggaaagcaagggagaaggtggtgaaccatcatttttattcattcattttcacatatttattaagtgtgtatggtgtttctggaagctttctaggcatagatagtatagtatattataccagaaaatacaaaaattctcattttagaacttacattttagtatcagaatgctgctggcctagtaaaatgtgttagagagaagtcmctcattttttttggggggggaataatttcag

SEQ ID NO: 473401 - DNA, 672 bp, Homo sapiens
ctgttgttttgacattgcagttttcctttcacattctttaccgcccatttgccataaaacactgtttggagtaaactcatccccttattttttttccactctctcataacattctgatctattttccttatgcacttttaagctttccaaaggaattttccattgtatttttaaaatcataatagaatggcctttagaagaattatacttgcccttccctttgtgaatgaccatatcatgtttttctcatttcatcaggaaaaatgttatttttggcaatcaratttagagattatatccttaaaagaaaaaaacccactaaacatgccatcttttgattatgtgtacaatattcagaatgctgttgctgtaatctaatacattagaattggtattttcaaattgaattatgtcaaggatgtcttttcaaatacttttgtttcttaaaaacatctatctgcccatttaccttcttaaccatccgtgttgaaaaagagaatatttaattgctctgaggtgaaccctggggaccctgaactggttttcaagtttatagtcagagactacattcatgtgcttttatctttctgactgttttctttgccctctacaaagtgcttagaacatgattttctacattttctggttttttcttttgtttgttttattttg

SEQ ID NO: 473402 - DNA, 672 bp, Homo sapiens
ctgttgttttgacattgcagttttcctttcacattctttaccgcccatttgccataaaacactgtttggagtaaactcatccccttattttttttccactctctcataacattctgatctattttccttatgcacttttaagctttccaaaggaattttccattgtatttttaaaatcataatagaatggcctttagaagaattatacttgcccttccctttgtgaatgaccatatcatgtttttctcatttcatcaggaaaaatgttatttttggcaatcaaatttagagattatatccttaaaagaaaaaaacccactaaacatgccatcttttgattatgtgtacaatattcagaatgctgttgctgtaatctaatacattagaattggtattttcaaattgaattatgtcaaggawgtcttttcaaatacttttgtttcttaaaaacatctatctgcccatttaccttcttaaccatccgtgttgaaaaagagaatatttaattgctctgaggtgaaccctggggaccctgaactggttttcaagtttatagtcagagactacattcatgtgcttttatctttctgactgttttctttgccctctacaaagtgcttagaacatgattttctacattttctggttttttcttttgtttgttttattttg

SEQ ID NO: 473403 - DNA, 602 bp, Homo sapiens
aattgccttatttgttttcttgtctaatgtctttttaacccactagaaagacacatgtgaatatgcatctcgtctgctgttttaacaasttttacctccagagtttacaacagtgccttgcttgtaaattttcaaggcatgtttgatgaatgcatgattgaataattttatgaataaattttaaatgaatctccaaaataatcatgcactatttttttttctatcaggaaaaggatttgccagtctattttccttctccacagagctagccattatttaaaaaggaagaaaccttcaattatttgctccctctggggtaccgtgcatcatccctctgagggtatttttagcccacaacaaagttgtctttattctgcagttccttaatccctttttcttctgatactctgggaaacaaaacagtagctgttctcagaggaatggctagagaattacattaattcagaaaacaagagatttaccatgtagttctgtgatctaattggaatgagaaggtcacactgtacctattcttaaattgcatcgtttgcttctcccattgttacttgcattttatgcagactcttacttgtgccagttag

SEQ ID NO: 473404 - DNA, 600 bp, Homo sapiens
caattacttctatcattgaatattttttcctggaagctttaaacaatactcaagaaaaaacctaataagacaaacagmtatttgaaataaagagggaaactatcactattattttcagaagttattatgttaaaaaaatctctcttccaagaaattcaattaaaacactgtttgaataaaaaaaaacctcacttgaaaataaagtgggaatacttccacttatagtagcaacagaaaatataaaatacctattaataaattgttttaaatgaagatttcaaaaaacattataattttttcttagaaaataaagtagacagataactggatatgtgtacctaataatagatcgtatgtctctgttagtcactaagcatatatttactgagtaatcagtacatggcaggtactctattgataaaatgtgtgagccaaaacattgtctgcacacaacttacagttgagctgtagaaagagattagtaatgtgccattctaaaagttattatataatagaagagtgtaactaagtgaggaagatcataaaaattatcccaagagagaaacaagatacctcaggtctaaagttgaagaggttccc

SEQ ID NO: 473405 - DNA, 516 bp, Homo sapiens
aaacaaaaaaacacctgggtagatgggtagactgtggagaaaggaagacaaagttactatctttattatagtgagacatttagatcttaggaaagtacacaaatacattaatgatgaattagctgatacaaaaaatgatgttaattaagaagtacgacaacttgacaaagtgatttkggaggtgagtgtaagatggtagtggatacttttatgggcatgcataggaaaatttcatctcacctaaggtgaaatgaaaattgaataatgacaatgaattatattaacaaagaaagacatgggtgcagcaagagtagacaactttcaatgcatcaggcaaagatgtattagaaaaagtgcagttgagcaggtaacagatgaggttggtaaggaaggcagatgacatattaggcagaaatgtatgggtcactgctagatgttggcaattaatttaagtgtatggaaaggtattggagaactgttgggagtttcagaggacgtctcatgacccagtctaat

SEQ ID NO: 473406 - DNA, 511 bp, Homo sapiens
gataattttggaaagtttcataaaattttattcaaamcattttggaattattatttgaattaatataaacacaagaaaactgcttgaaaggaataaaagataatattcagcatgaaaagaaactaagcttgtttacttttagttaataatacagcaaaggttataaaaatacccatgatatatcattcaagtgggtgtgttacagtacacagtccatagtcactcttaacttagcatttcatgacctcattcccacctactagtatgttttttcagtccacctgctaaactaatgtgcaaatttgttcttgttaatcagtttaatcaatctatagagaagatgaaaaatgtttaatgatgattaactttactcctcagtagatattatcaaggacattatgctcagtatcattatttgtaaaattcttatttttaatgtattattagtcctctttcctccagatgacaaaaacaaaactgggtgattatttaacaaccaagtaccaccagc

SEQ ID NO: 473407 - DNA, 584 bp, Homo sapiens
ctggatttctccctctgcccaaacataatttcttcctttcccgtccacagggcttgaacacaaagaagcacctcaataaatatcctgtacatcaacttggtgtccgagcctccatctagattctgcaacaataattcttcctaatctctaaagaaaagtgttgacttattcttagcattccataaagcagagggtgtctctacaaaggggaacactakggaacgtgaagagcagatatttcatacttaatacaagtcaaataattgaacatttgcacaccaaagcagagatacaagccttctaattcctacaattgtctatagggtattcaggaaaattgctttctgaagtatctgaaaagcctaaaaagaaaattagaatgcattcatattaagataaaatggccccaccagaaaaccttacagagaagcccaaaggtagtaaactttataccagcaaagagcttacagtgatttcttttgaagccttagaagaaaatctgagataaataagtatacatagaaaccttttaacatgaaagacaaacaccaaaataggcaaacaaacaaacaaatagcaacttg

SEQ ID NO: 473408 - DNA, 584 bp, Homo sapiens
ctggatttctccctctgcccaaacataatttcttcctttcccgtccacagggcttgaacacaaagaagcacctcaataaatatcctgtacatcaacttggtgtccgagcctccatctagattctgcaacaataattcttcctaatctctaaagaaaagtgttgacttattcttagcattccataaagcagagggtgtctctacaaaggggaacactagggaacgtgaagagcagatatttcatacttaatacaagtcaaataattgaacatttgcacaccaaagcagagatacaagccttctaattcctacaattgtctatagggtattcaggaaaattgctttctgaagtatctgaaaagcctaaaaagaaaattagaatrcattcatattaagataaaatggccccaccagaaaaccttacagagaagcccaaaggtagtaaactttataccagcaaagagcttacagtgatttcttttgaagccttagaagaaaatctgagataaataagtatacatagaaaccttttaacatgaaagacaaacaccaaaataggcaaacaaacaaacaaatagcaacttg

SEQ ID NO: 473409 - DNA, 559 bp, Homo sapiens
cccgtccacagggcttgaacacaaagaagcacctcaataaatatcctgtacatcaacttggtgtccgagcctccatctagattctgcaacaataattcttcctaatctctaaagaaaagtgttgacttattcttagcattccataaagcagagggtgtctctacaaaggggaacactagggaacgtgaagagcagatatttcatacttaatacaagtcaaataattgaacatttgcacaccaaagcagagatacaagccttctaattcctacaattgtctatagggtattcaggaaaattgctttctgaagtatctgaaaagcctaaaaagaaaattagaatgcattcatattaagataaaatggccccaccagaaaaccttacagagaagcccaaaggtagtaaactttataccagcaaagagcttacagtratttcttttgaagccttagaagaaaatctgagataaataagtatacatagaaaccttttaacatgaaagacaaacaccaaaataggcaaacaaacaaacaaatagcaacttggaggtactaaagac

SEQ ID NO: 473410 - DNA, 584 bp, Homo sapiens
ctggatttctccctctgcccaaacataatttcttcctttcccgtccacagggcttgaacacaaagaagcacctcaataaatatcctgtacatcaacttggtgtccgagcctccatctagattctgcaacaataattcttcctaatctctaaagaaaagtgttgacttattcttagcattccataaagcagagggtgtctctacaaaggggaacactagggaacgtgaagagcagatatttcatacttaatacaagtcaaataattgaacatttgcacaccaaagcagagatacaagccttctaattcctacaattgtctatagggtattcaggaaaattgctttctgaagtatctgaaaagcctaaaaagaaaattagaatgcattcatattaagataaaatggccccaccagaaaaccttacagagaagcccaaaggtagtaaactttataccagcaaagagcttacagtgatttcttttgaagccttagaagaaaatmtgagataaataagtatacatagaaaccttttaacatgaaagacaaacaccaaaataggcaaacaaacaaacaaatagcaacttg

SEQ ID NO: 473411 - DNA, 500 bp, Homo sapiens
tgaaattaagttgatgttgagccaaataagaagacttataaagcttaattcttgaatgctgctctattttgtgacattactggtaacaagtcacatcttgttggagattttagattaaaaatgatctattttgtaattcagagtattactgcaagtccataaatttggttttgtctcctttttatacataatgaactgagttgcagaaagttaattgacatttgtacccatttatgccattagttagtgtggtggattcaaactcaagtttttcagctcccaaattgttattttaactttaattaattagagattatcttacaaaagccattaaagtctatagcactttatttgygtaacagcggtccccaacctttttggcaccagggaccggtttcttaaaaaacaatttttccatggacctgggggtggggcagggtggtgatcttgggatgaaactgttctacctcagatcatcaggcattattagttgaattctc

SEQ ID NO: 473412 - DNA, 649 bp, Homo sapiens
ctgaatgcactacctgacaagttttctttttgtctttttttttttttttaaacggagtctcgctttgtcacccaggctgcagtgtagctgtgcgatcttggcttacagcaacctccgcctcccgggttcaagcgattcttctgcctcagcctcctgagtagctggcactacaggcgcatgccactatgcctggctaatttttgtgtttttagtagagatgggggtttcaccatattggccaggctggtttcgaactcctgacctcgtgatcctcctgcctcagcctcccaaagtgctgggattacaggcatgagtcaccgtgccaggccagagcaggtgcacggccaccagcaggcggctcaagcaggagcagggcctgctaactgggtcaccagtagaccagaacccacacgcatccagaggcccaacttctccggtgacctgayggtgttttctttgaataggtcaccctatccagggagaatgacggaaactggttggcttttgtttgttctgctgcttatcattgtggtaatttgcttatatagatacgttttaaaattaggccaatcatgacccacataacaaagacaatacaaatgctagaaaatgggagaaatccagattctattagaaaacaggaacgaca

SEQ ID NO: 473413 - DNA, 638 bp, Homo sapiens
gaagacattggcttttaattatttgtattcaatttttaagaaatgatcatctagggaaaatgttttaaaatcttttaaaatatctttttgttatactttaaaactgccttcagctgcctattggtaaataaggtctggatatcagtacatgacaacatatactaatgaattgaactgtgaattaggaatgaaaattgcctagaaatttttttatgagttmttaggattaaagtaagaatttcctttgctgggctgtgtaggcactaagattccgtggttgttggaggggttaaatttggatctactagtgcatatattttaccgaggattcataaaaacacgacagtggagcctgggtcaatccattaccatgtacaagcagtgaccaatagaaaaggaagaagaagatccaagaaggctgaggtaagcagtcttctgaagccctgtcaaagtggaaacaatagatcaaaggtgttcatggtgactgggacgagtaggtttcactgtttctcatagacgacttgacagcttaaagtaaaaacaaattattttcgtcaaagtttttttttttctcttaactgatttttagcaaacctcagactgagacacaggactcaacggtgtattcctggaaggca

SEQ ID NO: 473414 - DNA, 638 bp, Homo sapiens
gaagacattggcttttaattatttgtattcaatttttaagaaatgatcatctagggaaaatgttttaaaatcttttaaaatatctttttgttatactttaaaactgccttcagctgcctattggtaaataaggtctggatatcagtacatgacaacatatactaatgaattgaactgtgaattaggaatgaaaattgcctagaaatttttttatgagttattaggattaaagtaagaatttcctttgctgggctgtgtaggcactaagattccgtggttgttggaggggttaaatttggatctactagtgcatatattttaccgaggattcataaaaacacgacagtggagcctgggtcaatccattaccatgtacaagcagtgaccaatagaaaaggaagaagaagatccaagaaggctgaggtaagcagtcttctgaagccctgtcaaagtggaaacaatagatcaaaggtgttcatggtgactgggacgagtaggtttcactgtttctcatagrcgacttgacagcttaaagtaaaaacaaattattttcgtcaaagtttttttttttctcttaactgatttttagcaaacctcagactgagacacaggactcaacggtgtattcctggaaggca

SEQ ID NO: 473415 - DNA, 638 bp, Homo sapiens
gaagacattggcttttaattatttgtattcaatttttaagaaatgatcatctagggaaaatgttttaaaatcttttaaaatatctttttgttatactttaaaactgccttcagctgcctattggtaaataaggtctggatatcagtacatgacaacatatactaatgaattgaactgtgaattaggaatgaaaattgcctagaaatttttttatgagttattaggattaaagtaagaatttcctttgctgggctgtgtaggcactaagattccgtggttgttggaggggttaaatttggatctactagtgcatatattttaccgaggattcataaaaacacgacagtggagcctgggtcaatccattaccatgtacaagcagtgaccaatagaaaaggaagaagaagatccaagaaggctgaggtaagcagtcttctgaagccctgtcaaagtggaaacaatagatcaaaggtgttcatggtgactgggacgagtaggtttcactgtttctcatagamgacttgacagcttaaagtaaaaacaaattattttcgtcaaagtttttttttttctcttaactgatttttagcaaacctcagactgagacacaggactcaacggtgtattcctggaaggca

SEQ ID NO: 473416 - DNA, 564 bp, Homo sapiens
gtagaaaaagattcattgtcttgagttcttaacgctttcttaagacaagttaaagttgtcctggaaaaagatcagaaccgtaaaatgactagcagaactgtgttttgcaaaagtcatctgaaaagctatccattgtttatattatggtgccaggatttgtttccaatagggcaagagttctgccatatattcaattttctggcctctcacttacattaaaaatgacataaaaaaagctgttggttaatgggagtataaaccaagtacatgattcaggttcaaaggtagagactctgccttcagagaaatggaaacagacatggaacaaacaagatttctacacaagataagctacttctgcatagtaagatcatgtacaaggtctttatatagytaagaggaaagagacaaaatgttttgagttacttagtacaccagcgtatcaaaaagcaaggatggcgaggtatatttcgaagagcatagagactgttgactctgatacaaatgagtttgaattctctatctgctaaaggaactgagcaagttaattaaacacttgcaaca

SEQ ID NO: 473417 - DNA, 692 bp, Homo sapiens
agctgggactacaggcccccgccaccacacctagctaatctttttgtatttttagtagagatggtgtttcaccgtgtttgccaggatggtctcgatctcctgacctcgtgatctgcccgcctcggcctcccaaagtgctgggattacaggcgtaagtcaccgtgcctggcccaaagtactcaatatttaaaaaaaaaamaacaacactgtacagcaatagatattattattttaggaagatatttattaagttgttccataaaatagtttttttttggaaaatatttctcgtaagaccaagattaaagcttttatttgactatgacaagttagttaaactgtatagtcacaagatatatcctttcctttttttcataaaactgctgtgacaagacaggtatgttactgaagccttattgtgaatactgattagagaacttaaaatacggcctgttaatagggagtcagtgtcatcccaccacataccttagctggtctccaaattatgtccacagtgcatattttgtaaacaaacatttggtgacattagagcttctttgatgaattatttttacagaacagttgtacattttaattgctatgtttctgtgtggtacagattttaataaaaaaatgttaagcctctccaaattgcacctttaaagaaccatagcaaattcccagtgcttact

SEQ ID NO: 473418 - DNA, 632 bp, Homo sapiens
ctctggtgtctatgaaaacgcctttcttcctggaatcccctcatgcccctttcacttggaaacacataaacatcttttaagactcgtcttaagctactctaacccttcagcagaatacctcctctgaactttctcaagtagaattaatatcctttattataaaacaaacatctgttaaaaaataaaaatcatttatcaaagtttttttaacaactcccttcattcattgttcatccatctgtaccttttccattaattcayttaactttttaaaaaataaagcttctactatactccagaaatggcttaggtgctggagacactgtagtgaacaagaccggcaaatctttatcctaacaaagttgacatttataggggattcaatcagcagataaacacacagtctatgacatgatgacagtagtgataagcgctatgaagaaataaatgacctgaaggactatgaagaaatggagggagtggtgatttttttgggtgataaggaaagacttgtggggagcagacctaactgtcattataacatatatttggacattaatttaaatgttacaatacattagataattcaaggaatgttctttaaggattattttagctcaaataatagttat

SEQ ID NO: 473419 - DNA, 632 bp, Homo sapiens
ctctggtgtctatgaaaacgcctttcttcctggaatcccctcatgcccctttcacttggaaacacataaacatcttttaagactcgtcttaagctactctaacccttcagcagaatacctcctctgaactttctcaagtagaattaatatcctttattataaaacaaacatctgttaaaaaataaaaatcatttatcaaagtttttttaacaactcccttcattcattgttcatccatctgtaccttttccattaattcatttaactttttaaaaaataaagcttctactatactccagaaatggcttaggtgctggagacactgtagtgaacaagacyggcaaatctttatcctaacaaagttgacatttataggggattcaatcagcagataaacacacagtctatgacatgatgacagtagtgataagcgctatgaagaaataaatgacctgaaggactatgaagaaatggagggagtggtgatttttttgggtgataaggaaagacttgtggggagcagacctaactgtcattataacatatatttggacattaatttaaatgttacaatacattagataattcaaggaatgttctttaaggattattttagctcaaataatagttat

SEQ ID NO: 473420 - DNA, 598 bp, Homo sapiens
tgattcaactcctccctaataggctacttaattaaaaaaccttaagccttttgcataattgatcctaggacacttgcttctcctgctggtcttcacttccttctcttttgctgctgtcttaggctttttgaagtcctgtttaactttagatacctgtgcttgtgttcttttaagttgcttttcttcaatttctttttcttttcttgctcctttacctgatctgctacttctcctggaatctttttctttatgttatattttatttctgcttttatcttttgctgcccctctaaatgtctttaatttataatttctctccccttatgtgcctgatgctgctcattctgggctcttctttttgtttctgcctctacccaattcttgtgggatgatgtcccagctacatcctgctgttctttcacctgctctattcctccagaagcagaaaggcagacttaacaaatgatctgaaatcctccccttgaaaattccaatttgctttctggctccaatggcccacccacccccaggtgctctgrgatggagcttattaattacactcccttcagactaccctgacttgaacagagggaaggaa

SEQ ID NO: 473421 - DNA, 617 bp, Homo sapiens
ctggtctaagtggaatgttcaggtcttggtttgtaggtatatgataccttggttatttccatttayttttaagatcttattgtctgtgtgcatgcctgccttctgcagacacaaatcaaaagcttgcaagatagcacagctttttttttttttttttttttttttgtctcttgatagaattaggacaaagatctgtacatggaatagacctgaggctgggcaaggtcttcctccgcctatctcaccatctttgtctttgctctgtgccctacccaaacccaccttcttttagttcttcaaatactccatacctgcatcaaccagaagttttttgttgcttcccatgtcgtcttgaccacctagaatgcttgtcacctggttgcctcctgcttctcctgcagttattatctggtaatgtctggagatgtttttgtttttcacattagggggtaaggcactactcaaatcttgtgggtagaggccaggtgtcttagtccattttgtgttgctacaaagaatacctgaggctgggtaatttataaagaaaagaggtttgtatgcctcacagtttggcaggctctacaagaggcagggcaccagcaaatgctcagcctcag

SEQ ID NO: 473422 - DNA, 484 bp, Homo sapiens
ccagttggtggtggtaggtggtcctcttctgtgctactgttaaagccttatgcattatttctatcattgtaacctgtatcctaattgtccatttacttgacatctcccaagagagtatggtcatcttgaaaatgaaggtcatgctttttaattcgttatatttccagggcttaatgcaggtccctgcacagtgtagctggtaaaaaatacatatatatatatawaaatatataatatataaaaatatatatattatatatttatatattaatatatatattatgtatataaatatataatatgtatataaatatatattatatgtatgtaaatatatataatatatataaatatatattatatgtatatatatatattatatatgtaaatatatatatatagtttgttgattgaataacccacacagcctctcctgcaattcacttcagtgaccatctggttagtatctacggcattgttaact

SEQ ID NO: 473423 - DNA, 638 bp, Homo sapiens
tctgcaattttcatgtgcaaatggataatcagcactggatcttgggagacgtgtttagcagggctcttggagacagatgaggaagaaaaggtgatcttgatagaagttcctgcttaaggcctcttacggtctcatgctgaagctggatacatcacttaaaaggctgaatagtgtcaccttctgcagtcaccwttgccttccagaaaagactaaaatacacattcagcacaatagcccaagtcttgtccccaaggatctacatgttgtactacccgcttttctcctgtcagggaagatggcctgtttgcttaatcaggaaatctgtaccattcgctcatttgcctatagacactaagcttcaggtaagatgttgctatctctctgatgtttctgttacttctaaatatacccagctattgaaatgtgtgcctatggggaaaacatgtgggttaagaagcacatattatagaagacaagcgtaaagtccaaaatgacttaagacaaagtcgggcaattgatttacgatttgtctgaattgtgtgttaagagacttaataagaacgtcaaacagcttaaaggtgaaagggctttagaaaagggcgagggctgccttgcctcccccagcaatgctggtctca

SEQ ID NO: 473424 - DNA, 638 bp, Homo sapiens
tctgcaattttcatgtgcaaatggataatcagcactggatcttgggagacgtgtttagcagggctcttggagacagatgaggaagaaaaggtgatcttgatagaagttcctgcttaaggcctcttacggtctcatgctgaagctggatacatcacttaaaaggctgaatagtgtcaccttctgcagtcacctttgccttccagaaaagactaaaatacacattcagcacaatagcccaagtcttgtccccaaggatctacatgttgtactacccgcttttctcctgtcagggaagatggcctgtttgcttaatcaggaaatctgtaccattcgctcatttgcctatagacactaagcttcaggtaagatgttgctatctctctgatgtttctgttacttctaaatatacccagctattgaaatgtgtgcctatggggaaaacatgtgggttaagaagcacatattatagaagacaagcgtaaagtccaaaatgacttaagacaaagtcgggcaattgatttacgatttgtctgaattgtgtgttaagagacttaataagaacgtcaaacagcttaaaggtgaaagggctttagaaaarggcgagggctgccttgcctcccccagcaatgctggtctca

SEQ ID NO: 473425 - DNA, 637 bp, Homo sapiens
ccctcattttcatattaattgcatcacttaactgagataatgctccctctgaaatgagcaaagggatgaatcactgaaacrggccattattctttttgcttaaccaatttcacaggccccgcacaaagcactgccttcatttggcttcctataattgcttatcattaggcccagccgccccacgaagtaccttttaatttatttaagtctcatctctgatggatggaaaatgagtcacttgcatatctgagaagcccaggctgttctgtgaccaggcaaggcggtggtggaatacccaggagaactatgatggcagaatatcaaggagaagccacaccggtgggtggcttcacctgttcccctttcccatggagattccactgccatcaggtggtccaggggcatccagcagcagctgcatcagctccccaaggctgagaggagagagggcttaattcaggggatgacggcagcttggtgcccatagcggggtgtgcaaggctaccccaggtgtcctcatcaccaggggccacagcatcctacctgtggacaggtgactggggcaggtgggagagtgtaccttggccttggcttaatattctgggtgcatcagcatgatgagatggctaaaggaacc

SEQ ID NO: 473426 - DNA, 637 bp, Homo sapiens
ccctcattttcatattaattgcatcacttaactgagataatgctccctctgaaatgagcaaagggatgaatcactgaaacaggccattattctttttgcttaaccaatttcacaggccccgcacaaagcactgccttcatttggcttcctataattgcttatcattaggcccagccgccccacgaagtaccttttwatttatttaagtctcatctctgatggatggaaaatgagtcacttgcatatctgagaagcccaggctgttctgtgaccaggcaaggcggtggtggaatacccaggagaactatgatggcagaatatcaaggagaagccacaccggtgggtggcttcacctgttcccctttcccatggagattccactgccatcaggtggtccaggggcatccagcagcagctgcatcagctccccaaggctgagaggagagagggcttaattcaggggatgacggcagcttggtgcccatagcggggtgtgcaaggctaccccaggtgtcctcatcaccaggggccacagcatcctacctgtggacaggtgactggggcaggtgggagagtgtaccttggccttggcttaatattctgggtgcatcagcatgatgagatggctaaaggaacc

SEQ ID NO: 473427 - DNA, 649 bp, Homo sapiens
tgactgttggaaatgcatttttcttttcctcctattaagattaaatccacaaccctgttattatttctgtctgttgtttttagccctggttttaaaactagtgaggaaacatctaatttctcctgacagtcctcagatatttgaagatagagcctatgttccctgagcttctccaagggtagtatcttcctggttatgtggcctccagacatcttatcatcctgttcttcccttgatatgagcacctcccaagtgccagggttaagggattggcagaggtatgctgtttttaggattgagtgtggggaagcaattcagcctcagatgccaagaaattggatgtttcgctcatctctgtggaaattcccattttccatttgaaattcagttttttgttcctttcgtatccaggtatgattttcttaaggcttcactgattccaargaaatgttcaaaattctccataaagtttctatatattttctggaatttacttcttatgaagctcctctgtctcatatttctgcagttatatgtcttgtcttttaatggctatgtcaacttagtgcgtagaacaggatgtggtaggtgcccaataaatattttttgaatgaataaatagactcaaatttattcattgaaatgaata

SEQ ID NO: 473428 - DNA, 649 bp, Homo sapiens
tgactgttggaaatgcatttttcttttcctcctattaagattaaatccacaaccctgttattatttctgtctgttgtttttagccctggttttaaaactagtgaggaaacatctaatttctcctgacagtcctcagatatttgaagatagagcctatgttccctgagcttctccaagggtagtatcttcctggttatgtggcctccagacatcttatcatcctgttcttcccttgatatgagcacctcccaagtgccagggttaagggattggcagaggtatgctgtttttaggattgagtgtggggaagcaattcagcctcagatgccaagaaattggatgtttcgctcatctctgtggaaattcccattttccatttgaaattcagttttttgttcctttcgtatccaggtatgattttcttaaggcttcactgattccaaagaaatgttcaaaattctccataaagtttctatatattttctggaatttacttcttatgaagctcctctgtctcatatttctgcagttatatgtcttgtcttttaatggctatgtcaacttagtgcgtagaacaggatgtggtagrtgcccaataaatattttttgaatgaataaatagactcaaatttattcattgaaatgaata

SEQ ID NO: 473429 - DNA, 517 bp, Homo sapiens
agttaaaatgtcagattcttaaagaggccttttccggtcaccccacttaagtaggtttccctctattctcctccctggcaccttttttgttgctttggcagtattttccccaattttcaattatttaaatgtagcatattttaaaaaatgtctctttgcctgtgttccccagacagctagcccaaagtctgcccatagcagatcctgctaggcaatataagggcagtgaagtaagcagtcatgaagcgaggttgcctctttcaaatgattggagataatatggggtaaaamaatctttttctcctcttcaccataaacctcagaaggtttttttctgatagggctaagaacatttctttttggtctgtgggtcacataattttggtttcatattttgtagacaatatctctgctaccatgagcttcattttatgaatgcaaaagcatgggcattatattacattaattgtttcttctttaattgtttatcaagcacgtactaggtgctaaacactgt

SEQ ID NO: 473430 - DNA, 517 bp, Homo sapiens
agttaaaatgtcagattcttaaagaggccttttccggtcaccccacttaagtaggtttccctctattctcctccctggcaccttttttgttgctttggcagtattttccccaattttcaattatttaaatgtagcatattttaaaaaatgtctctttgcctgtgttccccagacagctagcccaaagtctgcccatagcagatcctgctaggcaatataagggcagtgaagtaagcagtcatgaagcgaggttgcctctttcaaatgattggagataatatggggtaaaacaatctttttctcctcttcaccataaacctcagaaggtttttttctgatagggctaagaacatttctttttggtctgtgggtcacataattttggtttcatattttgtagacaatatctctgctaccatgagcttcattttatgaatgcaaaagcatgggcattatattacattaattgtttcttctttaattgtttatcaagcacstactaggtgctaaacactgt

SEQ ID NO: 473431 - DNA, 664 bp, Homo sapiens
catcgtgggttacagcttcaacatgtgaattttggggaggacacaaagcttcagtctatagcatatccctttctaggcaaggcaagcaaataagagggagtgaccatgcagtcgggatatgggtgagggcccaggatgctgtggattccctaagaaggaccctactggcttgggtgtccatgagagttttcctggagaaatgttttttaagttgctaaaagcacatgtgtgctcgccaagatgaaccaggctggttgagaaaaagccagaaagacgccatttttctgactgctctttccygtgcttcgtgaaaggagatgtgaaactattagtacagggtacttgtgagttttccaacaggctggtgtctaagaaatagtgctggctatacttgactttcaaagtctagattactcattgcaagcaggactccccatgtaatagatacatatttaagttttagtcatgtaagacaaacaaaagatccagaagaattccaggtattctacagggtcagggacattagctttcattgtggcaggaaaattgttcatgctctgagcagcccaatacctctttaccactgagaggatagtcctggaaagaaagctgtaataagaagtgaggacccactttgccccagaggctctcaggattacaccgt

SEQ ID NO: 473432 - DNA, 670 bp, Homo sapiens
aacctggagaggtacacatggctggtataacaattatcttcatttaatgatgtggaaacacctaccacaagtcctggcacattgagggtcttgaataaattctgtcagatgaacggacaagcgcacaaaaggttgaaagagtgaatgaggcaggttaaatgaccagttctagattkgttactaagtgacacagcctaactgagttttctaatgttccactaaccctgcttccaagcagcttcagaatgcagcttacatttctgctataaatattttctttagacttttgctgatgaattgaagtttcataacaagaagaaagcagatggcttttgggaggggtttatacttgctcttttaactgtgtttctgttttgcttgtttatgcagagtgtgcacaaaggttgccagagccttaatttcaaactgcatcatttaataaaatacaataaggagaattaagaaagaaggctgcaggggaacatcctgcttattatctctgtaatgagaggactattttttctcccatcagttgccaatgatgaggttttttgtttccttttgtgcaggcacaattgtgatattcaacgagagtagtgcgaagtgccactttacagccaaacattcaattcctcctaattcacaagggagagagggatcaagttgtgca

SEQ ID NO: 473433 - DNA, 617 bp, Homo sapiens
gccaatagctaacttacgggggagttgggagaattgctgtgctttggcatggatgcccctgacttctgatccgagctcctccacctgctagctgagggatattggacagttctggactgattctgtatctatgaaatggggatgattcctgtcacgctgttgctgtaaaaaacaaaatatagaaacacggaatgctgttcttggcatggagatttcaaactattgttcagtgaacacctactatgtgctgacatcccaatgctacttgaatcttcttattttcagcatttggtcagagctcatgtyccatttttaagatgatttgttctacaaaatcatagaatgtttgacttttaaagcttcttatagcccctcttgcccagtgatttttggacttttgttttagtaacgtaaaccccttttccaaagggcacgtcttttccaagattggcatgtgaaggtggtgaacgtgctggcttagtgcccctgagacgtgtcagcagagccccagggcatgggggagcccagctcacaaaccacacatctaattcagcagtctaatcttgcacaggagtaaaaccaagctcagagaggttgagtaaattaccaaaatcatg

SEQ ID NO: 473434 - DNA, 617 bp, Homo sapiens
gccaatagctaacttacgggggagttgggagaattgctgtgctttggcatggatgcccctgacttctgatccgagctcctccacctgctagctgagggatattggacagttctggactgattctgtatctatgaaatggggatgattcctgtcacgctgttgctgtaaaaaacaaaatatagaaacacggaatgctgttcttggcatggagatttcaaactattgttcagtgaacacctactatgtgctgacatcccaatgctacttgaatcttcttattttcagcatttggtcagagctcatgtcccatttttaagatgatttgttctacaaaatcatagaatgtytgacttttaaagcttcttatagcccctcttgcccagtgatttttggacttttgttttagtaacgtaaaccccttttccaaagggcacgtcttttccaagattggcatgtgaaggtggtgaacgtgctggcttagtgcccctgagacgtgtcagcagagccccagggcatgggggagcccagctcacaaaccacacatctaattcagcagtctaatcttgcacaggagtaaaaccaagctcagagaggttgagtaaattaccaaaatcatg

SEQ ID NO: 473435 - DNA, 617 bp, Homo sapiens
gccaatagctaacttacgggggagttgggagaattgctgtgctttggcatggatgcccctgacttctgatccgagctcctccacctgctagctgagggatattggacagttctggactgattctgtatctatgaaatggggatgattcctgtcacgctgttgctgtaaaaaacaaaatatagaaacacggaatgctgttcttggcatggagatttcaaactattgttcagtgaacacctactatgtgctgacatcccaatgctacttgaatcttcttattttcagcatttggtcagagctcatgtcccatttttaagatgatttgttctacaaaatcatagaatgtttgacttttaaagcttcttatagcccctcttgcccagtgatttttggacttttgttttagtaacgtaaaccccttttccaaagggcacgtcttttccaagattggcatgtgaaggtggtgaacgtgctggcttagtgcccctgagacgtgtcagcagagccccagggcatgggggagcccagctcacaaaccacacatctaattcagcagtctaatcttgcacwggagtaaaaccaagctcagagaggttgagtaaattaccaaaatcatg

SEQ ID NO: 473436 - DNA, 603 bp, Homo sapiens
attcaaggccacctgggctggaggcctggctgctccgagtgcagccctgctccactacatcagcatcaactggagcttgtttggagtggagactcttcgtccctgcaccaaccatcactgcagttttgcagggtctcagatggttcccgtgcacatgaaggttggattcccacatgaaaggctgtcatcataacccacctggaggagctttcagaagactatggtctaggtccttcctcctcccctccacccattgttcttggtgagccctaggcattgccagtgagggtttccaaagctctcccagtggctayagtggcagccagcattgagatgccctggtataaggccacagaagccagccacagtgaccagccctcctgagggttggccatgaactgatctctagggctctgttgagccttttgaacattgtttagagtaagaggaaatgtagttgttataagaaatgctcaatgttccagaagtgctatgagttactagaacaggaattttcaatggcagttttattccagtttgtccccagtgcttcaagagagggttgggtagggctttatgtgtttggggaagttgctgaagaaa

SEQ ID NO: 473437 - DNA, 603 bp, Homo sapiens
attcaaggccacctgggctggaggcctggctgctccgagtgcagccctgctccactacatcagcatcaactggagcttgtttggagtggagactcttcgtccctgcaccaaccatcactgcagttttgcagggtctcagatggttcccgtgcacatgaaggttggattcccacatgaaaggctgtcatcataacccacctggaggagctttcagaagactatggtctaggtccttcctcctcccctccacccattgttcttggtgagccctaggcattgccagtgagggtttccaaagctctcccagtggctacagtggcagccagcattgagatgccctggtataaggccacagaagccagccacagtgaccagccctcctgagggttggccatgaactgatctctagggctctgttgagccttttgaacattgtttagagtaagaggaaatgtagttgttataagaaatgctcaatgttccagaagtgctatgagttactagaacaggaattttcaatggcagttttattccagtttgtccccartgcttcaagagagggttgggtagggctttatgtgtttggggaagttgctgaagaaa

SEQ ID NO: 473438 - DNA, 507 bp, Homo sapiens
ttggtagctctttgtacgccataccttccccgactttctcttctgcttattttttctgtttcttgtttcacaatctgacatctcatgtgtctggaaggtcagctccatgaggtcaggaattgcctacttttttttttcaactgttgtacactcagcacctagaagagtacatggcatgcagtgggtgctcaaaacacagtgattgtgctgagtgcaaaggctcagcctgtaatcccatcactttggragaccaaggggggagtttcacttgagcccagaagttcaagaccagcctgggcaacatgacggaaccccatctctattaaaaatacaaaaaactagctggatgtggtggtgcacacctgtagtcccagctacttgggagctcgaagtaggaggattgcttgagcctgaaaggtcgagctgtaatcacaccactccagcctgggcaacagagtgagagaccctgtcaaaaaatatatagtgattgaatgaatgagttatact

SEQ ID NO: 473439 - DNA, 557 bp, Homo sapiens
ggaggattgcttgagcctgaaaggtcgagctgtaatcacaccactccagcctgggcaacagagtgagagaccctgtcaaaaaatatatagtgattgaatgaatgagttatactgctaaatggtttaaacaattatctaaacattgtttatgttcttttgagactttgaagacattgactttcaaatccagtagtttccaaatttaatcatcagaattacttggagcactttttaaaaatgcccaagtcttccccccaaaactcttggagtagttacttcaggatatgcgactctgagattttggttttgattcagatataatccaggcattgggaccattttgcaaaggagagagtagaccagagataatgagtgcattatctctgccagggtctgctggggagaacctgccctgatgcccaggccagcgtgctytggctgcctggcttatgtctaacaggagctggagggcatgagggtgggacgctactgttcacatcacagggaagatgtgaatgggggtggtttggggtggagcgttgaccaggcttttaaga

SEQ ID NO: 473440 - DNA, 602 bp, Homo sapiens
ctgaaacaaagaaggcaataaagcacaggactccaacagaacacacaggcarggaaagtcctatagtatcaagatgagagtggctatacgtagaagtaagatggagaaagagcaggacataagtgcagagaagcaggatagagacatatcataataaaccttacatgtagtgctcagcaacctcagttgtgcaggcagagggaggtgctgaggatgtagattgtgggctggggataaccttgtacttgtaggaaaatgtcttccattggggtgggggccctggggccagcagaatgatgggaagtagggaaggctgcaatggttctctccacacttgaactaagggagaggcagccaggaagcaatgctatagggattgagtgaggttctactatgatagaattgaccaacagtaaccatttgggttgcaggcctgcagaggggtgaggaaggtagaagttaaagaaagcaaaataggaaacacaagacaagaagcagattgaggacattagaaagcccaagtgccttaattttttttttttttgctacatttttccttttttcactccatctggttcttcctccaattttagaagtcccgg

SEQ ID NO: 473441 - DNA, 648 bp, Homo sapiens
tgtattgtatggctgactctaagtaggaagaaatcacaaatttatatttctagagtttactgagatgtgctgtcttttataagtaaaattgtattgtgtaaaattcaggttagaaagtgaagcttctatttcagtgtgacccatactccattactagatgctcagaaggctcagcataaaaaattacgtgttcactatttctagaagaggtcattgcttaaattccatattaattttcaagcaaggctgctrgaaaagaatcaataaactttgtatgaccaagcaaaactctgccaatgcctccaagataaatgatacccagattcacttttgagaagaatgaaggatttcaactgtatgtgcagcctttcagtgcatgccagttctcatagttccttctggaattattttcacataagaaacaactatgagactgtaaactacctgagaaacccaaaggtcaagcccattggcctcaaaggcattatttattgttaggatgctttctcttaacaccttagatgagaacatttaagtgaattaacctaccattatggtgagaaaataaaatatattgtgctttctacttctgaaactataacataacattgtagagtatgttgagggtcatgttaagccatactttcg

SEQ ID NO: 473442 - DNA, 590 bp, Homo sapiens
gcactgttgttttataaatcaatattacatctgaaggtggtgtttgaatgtttgtgtcattggggtttgtctccaacatagtcctgtgacaagaaatgttcaaacaaaacaaacacaatcccttccctgtcctttaggataaagtccaaacgtaattccacaacagggatataacattcaaatcaactacagaacttctgtaattatataaaaccccacgaccacagaaatgcaattgaattgaagacactttgcaatattccccaagaaaggactgtgtggctgtcagattaacaaaagtcaagaggtggtgagacaatgctcaccattgcaaaaaagagctttgtgcataatgaacagaatttkcatgcctgtttaggaaattaaggtgaagccaaggtgacttagggtcacatgaggagtcacaacggtcactaactagaaaagtgagcattaaacattagtcatttggtttaaataagttcatctcaattattattagatattattacatagatttaataaaaaataatagcttaagtgaaattttcaacattatctggttattacctgccctgagcttctgtgat

SEQ ID NO: 473443 - DNA, 484 bp, Homo sapiens
ggttttctttcagttaagtcatgggtggactactgagggttcctctcaatcccccagctatgcctttgcatttgactcagtagtccaatatgaggttcttaatgtttctatttctttaaattgtttgaattagctctcctctaaattatgggctgttttagctcccgttggtgactcaccataacaaaaagggatggttctgcccaaaattctgcgccccgttacatacaagaatgtgacattctcttatcaggaataggggctcaccagggaagggtggggtagaagtcatccctctaaggtgtatttattattttagaagtttgttttatctttaaactttgtacaacattatcattttcgagcatttaaactatgtatgagctataaatccatctcccaggccccacctctagrttgccaatggccttagattgcccaatctgacaagctttgggttctcagtgcacatctgacttcctca

SEQ ID NO: 473444 - DNA, 474 bp, Homo sapiens
agggctcgcaacttagcttgggatttgttttactggtaaatttagattttcttccattatccaaaacattctagcaggagagacagttgctatcagtgatctccaggcctcatcttataagaaatgtgccatactttgccaggcatgagtctctttttaggacagctaagcagaatagaaaagaaactatactgttctctcttcaactgaactaaaaccttcttgaggacaagagccatattttattctaattgtgtagcttccgyagaacataaaatggtgtaagtcttgggttttctagttgagctaagaaacaggacaaaggttattcaaggagccactggagaccaaagtgactctgtgtcctacagtcttgagattaaaccttctgcatccaaacaatctatgattctttagatccacacagatgagatgacttgtttacttcatggatcccttgatttttaaacagct

SEQ ID NO: 473445 - DNA, 599 bp, Homo sapiens
cttctgatgttttcagaggacaaatttgtctctagttctacactgtctggaaggcatatacacccacactcacacacacacacacacacacacacacacacacacacttttcactctccaaccatatgtgtgtatgcatgtaatgtatatatacacacatatatacatatatatgagttataagcatatgtatataagtatatatgcattatatatccataatacatacatattttatatacataatacacacacacatatatattgtgtatacatgcattatctacatagtgctcrtgtgtattttatatatatatataagttgaaattttggtcattgagttaagcattcagtaaggagcttataataagaaaaaaaaggtctctatcaaattcatgattagtgatttagataataaaaacaatgctctgaaattttatcccactttgaagatatttaagccatctcacatttaatgattttatctctaccaactgactcttttagtgttgatgtgtttctttagacattttctttaacctcataaaatatatctgagaaatgagaaaagtagtagagggggcatgagagaggcagg

SEQ ID NO: 473446 - DNA, 707 bp, Homo sapiens
tcagctgggaactttctgggatgatggaaaagttttgtatattgattgtagtgatggtcatatatctgtatatatttgtcaaaactcctcaagctgtacattttaaagggtacattttactgtacrtaaatgctatcttaaataaatctgacaaaaatgtagttcctatataatcatgcttttaatctttttactttatctggatatttctagtgtcttagaaaatagcctgacacatagtaggcatcaaataaagttatgttaagcagtttctaaggaattaggaagaaagatgacagtttgacaatgacaataacatattttgcccattaatcagttttatttttaaatttttatttcattgtgataagaacagttaacatgatatctaccctcttaaaaatttttacgtgtaaaatatagtatcattaactacaggcattccagttttctttagattagtccagccatgatcactcatgcctggcaccatttctctgaagctcacacttatgcaagtgatatttctgtgaagccgacccatgagtaatttctgagtaggtattaaaacaccctcacgtctacaagtctaatatattaataaatgtgctgttttcaataagacatctaaatttgcatgcaccatcctacttgttatgttcagtactcaattttttaatgtttcttggacactagccagtaagtct

SEQ ID NO: 473447 - DNA, 707 bp, Homo sapiens
tcagctgggaactttctgggatgatggaaaagttttgtatattgattgtagtgatggtcatatatctgtatatatttgtcaaaactcctcaagctgtacattttaaagggtacattttactgtacataaatgctrtcttaaataaatctgacaaaaatgtagttcctatataatcatgcttttaatctttttactttatctggatatttctagtgtcttagaaaatagcctgacacatagtaggcatcaaataaagttatgttaagcagtttctaaggaattaggaagaaagatgacagtttgacaatgacaataacatattttgcccattaatcagttttatttttaaatttttatttcattgtgataagaacagttaacatgatatctaccctcttaaaaatttttacgtgtaaaatatagtatcattaactacaggcattccagttttctttagattagtccagccatgatcactcatgcctggcaccatttctctgaagctcacacttatgcaagtgatatttctgtgaagccgacccatgagtaatttctgagtaggtattaaaacaccctcacgtctacaagtctaatatattaataaatgtgctgttttcaataagacatctaaatttgcatgcaccatcctacttgttatgttcagtactcaattttttaatgtttcttggacactagccagtaagtct

SEQ ID NO: 473448 - DNA, 631 bp, Homo sapiens
gggaactttctgggatgatggaaaagttttgtatattgattgtagtgatggtcatatatctgtatatatttgtcaaaactcctcaagctgtacattttaaagggtacattttactgtacataaatgctatcttaaataaatctgacaaaaatgtagttcctatataatcatgcttttaatctttttactttatctggatatttctagtgtcttagaaaatagcctgacacatagtaggcatcaaataaagttatgttaagcagtttctaaggaattaggaagaaagatgacagtttgacaatgacaataacatattttgcccattaatcagttttatttttaaatttttatttcattgtgataagaacagttaacatgatatctaccctcttaaaaatttttacgtgtaaaatayagtatcattaactacaggcattccagttttctttagattagtccagccatgatcactcatgcctggcaccatttctctgaagctcacacttatgcaagtgatatttctgtgaagccgacccatgagtaatttctgagtaggtattaaaacaccctcacgtctacaagtctaatatattaataaatgtgctgttttcaataagacatctaaatttgc

SEQ ID NO: 473449 - DNA, 631 bp, Homo sapiens
gggaactttctgggatgatggaaaagttttgtatattgattgtagtgatggtcatatatctgtatatatttgtcaaaactcctcaagctgtacattttaaagggtacattttactgtacataaatgctatcttaaataaatctgacaaaaatgtagttcctatataatcatgcttttaatctttttactttatctggatatttctagtgtcttagaaaatagcctgacacatagtaggcatcaaataaagttatgttaagcagtttctaaggaattaggaagaaagatgacagtttgacaatgacaataacatattttgcccattaatcagttttatttttaaatttttatttcattgtgataagaacagttaacatgatatctaccctcttaaaaatttttacgtgtaaaatatagtatcattaactacaggcattccagttttctttagattagtccagccatgatcactcatrcctggcaccatttctctgaagctcacacttatgcaagtgatatttctgtgaagccgacccatgagtaatttctgagtaggtattaaaacaccctcacgtctacaagtctaatatattaataaatgtgctgttttcaataagacatctaaatttgc

SEQ ID NO: 473450 - DNA, 599 bp, Homo sapiens
ggggcaggggaaatgcacagggcattaaaatggatattggattcaacatgrgatgaggagccctttcgccttgatgctcccataacttctgatggactcggttcattaggagacagtttcagatggattcttttgggctcaatgtttatgtggaatggctccctgctcacagaggccaacagaagagaagaagaagggagggcaagcagcattattttctatttttccatgggtgcacctgaaagagcagagaagcttgacagggaacccatccccagacttgctcagttttcccctggcccagggctcccaggacctaccttttctgggatgcctgatttcctcactgcatcatgaacattcccccaccaaggccccctttcaggtccttgctcatgctattatttcatatgacaagccctccctctacctttccatggatataagtctgagaatctctgtccaccatcatcaccttgctcaagaccctaatcttccatgaagcctctatcaaagggacaacaggggtggagagggcaggtggcttgtcttctggattttcttgatagcatctgagaaggcaggatagtagtgcttat

SEQ ID NO: 473451 - DNA, 599 bp, Homo sapiens
ggggcaggggaaatgcacagggcattaaaatggatattggattcaacatgagatgaggagccctttcgccttgatgctcccataacttctgatggactcggttcattaggagacagtttcagatggattcttttgggctcaatgtttatgtggaatggctccctgctcacagaggccaacagaagagaagaagaagggagggcaagcagcattattttctatttttccatgggtgcacctgaaagagcagagaagcttgacagggaacccatccccagacttgctcagttttcccctggcccagggctcccaggacctaccttttctgggatgcctgatttcctcactgcatcatgaacattcccccaccaaggccccctttcaggtccttgctcatgctattatttcatatgacaagccctccctctacctttccatggatataagtctgagaatctctgtccaccatcatcaccttgctcaagaccctaatcttccatgaagcctctatcaaagggacaacaggggtggagaggrcaggtggcttgtcttctggattttcttgatagcatctgagaaggcaggatagtagtgcttat

SEQ ID NO: 473452 - DNA, 617 bp, Homo sapiens
gggccgcctggggcgctgggtggggtgtctggccaagggatgccatgcccatcccatcaccaggaccccaccggagaccaggagtgcacctgggtgccccgggagccaagcgcccaccccgaggtccctatggtgaggctccatgtccccctgcccagggaacccgaggctgggccaggctgaggcctggtgttacaggacccagtgagggtgggggcagagccccaagccccatctctcccggctgttcccagcccaaacccacctccgcccccctcttaacccatgggtctctggatgcttctgcaaggagattggaggcccccagcccctcgcctggggacacagagtgaccccagcttctatttttagtaaatcctcactccctggggtggcagctcagctcagatgacctctggcaggagaaacaccygactcctcctcgactggaggccacacagggaagggtggaggcacagcctgggcttgagactgacggcaggctaggctggggtctatgtgagctgggctcgctgcccgcttcgctccagcctgctgcaggctgtgggtccccaccaccctccaggaaggttctctgagtagctgctcctgggagc

SEQ ID NO: 473453 - DNA, 510 bp, Homo sapiens
tgcagcgtcctgtctaccgtgggctctaaatgatgatgaaatcatgtttggtccacaagactcatgacccttagaatcccttaaactgcagcatgcatgattttgtgcatccatgcacagatgcgtggactgtctaacagttctctttttgggataattttttttttttttttgagacagagtctcgttctgtcacccaggctggagtgcagtggcgcaatctcagctcactgcaacctctacctttcaggctcasgcgattcttgggcctcagcctcctgagtagctgggactacagacatgcaccaccatgcccagataatttttgtgcttttttttttttttaagtagagatgtggttttgccatgttggtcaggctggtcttgaacatctggcctcaagtgattcacctgcctcagcctctcccaaagtgcttggattacaggcgtgagccactgtgcctggcctgcaataatatttaaaaaaaaaaaaaaaagtaagactagtca

SEQ ID NO: 473454 - DNA, 617 bp, Homo sapiens
tgcctgggagaccaaggcaataggatcactggagctcaggaggttgaggctgcagtgagctatgatcaaaccactgcactccagtctgggcaacagtgagatactgtctaaaaaaaaaraaaagaaaagaaaagaaagagaaagaaatggaattggaattgttggctggatgcggcggctcacgcctgtaatcctagcactttgggaggctaaggtgagtggatcacttgaggtcaggagttcgagaccagcctggccaataaggtgaaaccctatctctactaaaagtacaaataaatggctgggcatggtgggggggcacctgtaatcccagctacttgggaggctgaggcagaattgcttgaacccgggaggcggaggttgcagtgagccaagatcgcactccagcctgggcaacaagaatgaaacttcgtctcacaaaaaaaaaaaaaaaaaaaaaaagaaatggaattgttgcaatttgatattgattgtccctttctaggcttaaatagattaaaagatagcatcaggtttggactttgccttcaagcgatgcagaacagcattggggagaaaaacacaaacaggacacacattgaaaagataagcagaga

SEQ ID NO: 473455 - DNA, 477 bp, Homo sapiens
tggagctgataccctcactgagtgggttcatcccttgctattccgagctggcaaagcgcagacaccccgtccacatccttataggtccagagctgccttggagatctgaacccaacaggaccatctcagagtccacagccagcctgagtcaacgctggactctgtactgtgaaaggtatgagctctatcagggtcttggtcagacaaggattcttggagagaacccagactcctcagagaggcaggactcattcagaaatctacatggcaataaaccttgctctctggaacttccaaggcattgtccccttccacacaccctccccatgctggaagttctgaatgcctggtcctaggaactcattaatttatatttgcatcaagcttacatgatggctatgggctgttttaagaatcatcttgacagggaaactagaagagaagwgatcatttcagctaccaaagtggaggagaata

SEQ ID NO: 473456 - DNA, 622 bp, Homo sapiens
catagctagacgtaacctactyttgaaacaatagctaagtctcagccaaactcagcaaccagacttcagccactcacaggcagccagctgttcaaacaagttccactaaggcaaaactgagctgcaaccagtctggctttttctgtgcctcacgtctgtttgttttctgtgcctcactttcctttttctgtccgtaaatcctttccaaccactcagcagcactggagttgctccgaacgtatcctgactcagagggcatcccaatttgcaaatcattctttacccaagtaaactctgctaaatttaatttgtctaaagtccttattttaatgctgcctatcttgtgcctgtcacttcatggcagcatcctccctcatctgcaaaatgagcacaacgttacctgtcctatctgtcttgctgtgctgtagcaagggtgcaataagttaatgtagattgaaatacattgcagcaaccacaagatgttgcacatgtaaagtgacattgctgtcagcagcagcagcagctcaagttgatcataataaagcaaggctattatctttatgcaaggagatttggtaagctctcctggttttacagctcaaggtcccacatcctggaaagc

SEQ ID NO: 473457 - DNA, 622 bp, Homo sapiens
catagctagacgtaacctactcttgaaacaatagctaagtctcagccaaacwcagcaaccagacttcagccactcacaggcagccagctgttcaaacaagttccactaaggcaaaactgagctgcaaccagtctggctttttctgtgcctcacgtctgtttgttttctgtgcctcactttcctttttctgtccgtaaatcctttccaaccactcagcagcactggagttgctccgaacgtatcctgactcagagggcatcccaatttgcaaatcattctttacccaagtaaactctgctaaatttaatttgtctaaagtccttattttaatgctgcctatcttgtgcctgtcacttcatggcagcatcctccctcatctgcaaaatgagcacaacgttacctgtcctatctgtcttgctgtgctgtagcaagggtgcaataagttaatgtagattgaaatacattgcagcaaccacaagatgttgcacatgtaaagtgacattgctgtcagcagcagcagcagctcaagttgatcataataaagcaaggctattatctttatgcaaggagatttggtaagctctcctggttttacagctcaaggtcccacatcctggaaagc

SEQ ID NO: 473458 - DNA, 622 bp, Homo sapiens
catagctagacgtaacctactcttgaaacaatagctaagtctcagccaaactcagcaaccagacttcagccactcacaggcagccagctgttcaaacaagttccactaaggcaaaactgagctgcaaccagtctggctttttctgtgcctcacgtctgtttgttttctgtgcctcactttcctttttctgtccgtaaatcctttccaaccactcagcagcactggagttgctccgaacgtatcctgactcagagggcmtcccaatttgcaaatcattctttacccaagtaaactctgctaaatttaatttgtctaaagtccttattttaatgctgcctatcttgtgcctgtcacttcatggcagcatcctccctcatctgcaaaatgagcacaacgttacctgtcctatctgtcttgctgtgctgtagcaagggtgcaataagttaatgtagattgaaatacattgcagcaaccacaagatgttgcacatgtaaagtgacattgctgtcagcagcagcagcagctcaagttgatcataataaagcaaggctattatctttatgcaaggagatttggtaagctctcctggttttacagctcaaggtcccacatcctggaaagc

SEQ ID NO: 473459 - DNA, 622 bp, Homo sapiens
catagctagacgtaacctactcttgaaacaatagctaagtctcagccaaactcagcaaccagacttcagccactcacaggcagccagctgttcaaacaagttccactaaggcaaaactgagctgcaaccagtctggctttttctgtgcctcacgtctgtttgttttctgtgcctcactttcctttttctgtccgtaaatcctttccaaccactcagcagcactggagttgctccgaacgtatcctgactcagagggcatcccaatttgcaaatcattctttacccaagtaaactctgctaaatttaatttgtctaaagtccttattttaatgctgcctatcttgtgcctgtcacttcatggcagcatcctccctcatctgcaaaatgagcacaacgttacctgtcctatctgtcttgctgtgctgtagcaagggtgcaataagttaatgtagattgaaatacattgcagcaaccacaagatgttgcacatgtaaagtgacattgctgtyagcagcagcagcagctcaagttgatcataataaagcaaggctattatctttatgcaaggagatttggtaagctctcctggttttacagctcaaggtcccacatcctggaaagc

SEQ ID NO: 473460 - DNA, 498 bp, Homo sapiens
gttccctgtaaatcccaaaataaacggtttggattcaaaccctcctctcagggtccgccctgmgaaaaactccagccaagacaccatgatacccgaatcaaggacacttatgaaataactgctgctttaacttttttttttttttgcctgaaatcaatacaccttataaaaaataacattgatatttttgtttgtctttaagaaaaataaaatctttatttcattagaaaatggtccacatatagtatagctgcttgcagtctttgtttccatcagaccagtgtctccaagctgcgtgctgagcggatgtagtcggactgagaaagggcccatctgcatgggatggaaataaggaatcctgggccattcccgctggggcttgcggatatcccttacagagctactgaaggacctccttcctgagcccctgccctagcgaaaaacagtgtctagcgccaaatcagatactctccagtggacttgcttttctttttccct

SEQ ID NO: 473461 - DNA, 577 bp, Homo sapiens
gtggacagtccggcggcgtgtgaaggaaagctgctttctggggcctccagagggtgaagcgttgacatcatctacgctggtgacgttaaccaacttaattgatcacagggcatccatgtcccatgtctccagccttagtgtcctcagcagcttgtgcaaagtcttctcagaggctttgaggaaaaatatatcaatagataatttaataagtaaaagtgtaacaaaatatagtgtttaaaaatcacaagtgttgtgtgatttataggattcaaaattgaattaaggccctgtgagttttccagtagccctctcctcccttgctgcaccgaccattccagacctttgtaggaagcttctaggcatttcccccaggggactcccccctccccaaggacctcagaaccgcaccaggatgagggtcaccgcaagctccrgactagcaacgatgggtggccactggggttgttgctggggtagacccactggggggtgagctacccactactctgggcactgggaagaaaagagaacagaaccaagtgatttgaaaatctctatcagttcacatgggaaagca

SEQ ID NO: 473462 - DNA, 482 bp, Homo sapiens
gacaggttaggataaagcagacatctgaccataaccactaaaccactcagtgtagggagctcagattacaggcactgtgaaatctgagtaatccttgaaggacccaggacactttcaccagccaatctcccttctttactgcacagttaatagcaatgtgaaagaaaacgtgcgttggcacagaaacagttatgtgacccaaataccacgggctcagctctgcagaccacagccggggtcacacgagaagcacatgggacagagggtgctgaggctaccaagatattgaaagagatttcactgccatggaacagtacataaacacagtttactgaagaatgcatagatgtctacaattatttaggagatagcaaagttgcaaagcactctggaagtatttttggcactcagtgtctgctccacatgtgtgaacacatcatctctctgaaagaggtytgggtaaacctaataaagccctgcag

SEQ ID NO: 473463 - DNA, 557 bp, Homo sapiens
gtcaacaccatgtcctgccatccccactggtgtctgccccaacacccagagaacccacggcctagtcaacacttgcacagacttgtttcacttgatagacaaacaatttacttttttttagcaatgtgatctttccattatggtcaaccgtagtttctttcttgrtgacttgatattggattatatgaaacactgtctgaatttcttcctagcaatctttcagtggcaatggtttctgtgcaatgcccaccattctcttctgctgcctcctcgtaacctgggtctgagtttctgagaaagctggacacgggtcacctgtggaccatggttacgagaaacaacactgcccccaaatccaaaagtaactcagaaccatggacaacagggctcatataagaatggcaaggcatacctgtgtgaatatttaacttgcatttatatatctaatgtaagttaaaatatattttttcaacttgtattattcctgtgtcaatgtttgagtattcagtaactcaaaacaatggttatttagcttttgtttgctgaaatgaccgaat

SEQ ID NO: 473464 - DNA, 557 bp, Homo sapiens
gtcaacaccatgtcctgccatccccactggtgtctgccccaacacccagagaacccacggcctagtcaacacttgcacagacttgtttcacttgatagacaaacaatttacttttttttagcaatgtgatctttccattatggtcaaccgtagtttctttcttgatgacttgatattggattatatgaaacactgtctgaatttcttcctagcaatctttcagtggcaatggtttctgtgcaatgcccaccattctcttctgctgcctcctcgtaacctgggtctgagtttctgagaaagctggacacrggtcacctgtggaccatggttacgagaaacaacactgcccccaaatccaaaagtaactcagaaccatggacaacagggctcatataagaatggcaaggcatacctgtgtgaatatttaacttgcatttatatatctaatgtaagttaaaatatattttttcaacttgtattattcctgtgtcaatgtttgagtattcagtaactcaaaacaatggttatttagcttttgtttgctgaaatgaccgaat

SEQ ID NO: 473465 - DNA, 557 bp, Homo sapiens
gtcaacaccatgtcctgccatccccactggtgtctgccccaacacccagagaacccacggcctagtcaacacttgcacagacttgtttcacttgatagacaaacaatttacttttttttagcaatgtgatctttccattatggtcaaccgtagtttctttcttgatgacttgatattggattatatgaaacactgtctgaatttcttcctagcaatctttcagtggcaatggtttctgtgcaatgcccaccattctcttctgctgcctcctcgtaacctgggtctgagtttctgagaaagctggacacgggtcacctgtggaccatggttacgagaaacaacactgcccccaaatccaaaagtaactcagaaccatggacaacagggctcatataagaatggcaaggcatacctgtgtgaatatttaacttgcatttatatayctaatgtaagttaaaatatattttttcaacttgtattattcctgtgtcaatgtttgagtattcagtaactcaaaacaatggttatttagcttttgtttgctgaaatgaccgaat

SEQ ID NO: 473466 - DNA, 564 bp, Homo sapiens
tgcaaagaatgtagttagctaatagcccatggtatttagcgccttcagggtcctgtgtagctttggaagtgggttcatattcctctcggggcatcctttcagccaatgaatgagcaaagaggtgatagctgagattatgctcttctcatggtgtaccatgcccaatgactgagcaagggcctaataagtagcttctctaatgggccacctttttcccaagatccacgtcgggatagcaaagactttgtagggtctgcatcatgatctgttggcatcccctgccctatcctgcttctcaaccttttcctttcacagatgttactccccagtgaaccgtytgcactcctaaatctcccccatctacttcctgagaactcaccctacaacaagtcttttccatagctactattctatttatctttaaataatttttatgtaataatctttttgttgagatttcaaattgcctgaactgaaattgttaatggtatttgcttactgtattttacccatttgtttaccctagtactgtagatactttttaaaaaaataatttgcaaaatc

SEQ ID NO: 473467 - DNA, 609 bp, Homo sapiens
gggcaccaacctattgtgaagcccccctgctgattctaatctaaggtttgagaacaagggctcggtgctttgttactcaaagtgtggtctgaggacctgggagcttgttagaaatacagattctcaggcagcatccggacccacagaatcatgatctccattttaataagatccccaggtgactcacatgcacattaagtttgagaagcattactctatttttccatagcctccttctgctctgcagaagagaatgtagctcttaacagtggttgtacattaaaatcacctagaaaggctttcagaaatattgatgcctggatcctctctccagagattctaattatgattggtcttgagygtggattctctctccagaaattctaatataattggtcttgagtatggcctgggcagtttttcaaacaattttttaaatctttccagggggttttaatataaactccaggctgagaatcactgctataaaaagatgttttttcttcttttactttaatagtctttggtataaagtgaccatatctgctaaatcattaagttccctgggagagaaccctctattctaattttctgcattggttatcaaaa

SEQ ID NO: 473468 - DNA, 609 bp, Homo sapiens
gggcaccaacctattgtgaagcccccctgctgattctaatctaaggtttgagaacaagggctcggtgctttgttactcaaagtgtggtctgaggacctgggagcttgttagaaatacagattctcaggcagcatccggacccacagaatcatgatctccattttaataagatccccaggtgactcacatgcacattaagtttgagaagcattactctatttttccatagcctccttctgctctgcagaagagaatgtagctcttaacagtggttgtacattaaaatcacctagaaaggctttcagaaatattgatgcctggatcctctctccagagattctaattatgattggtcttgagcgtggattctctctccagaaattctaatataattggtcttgagtatggcctgggcagtttttcaaacaattttttaaatctttccagggggtttyaatataaactccaggctgagaatcactgctataaaaagatgttttttcttcttttactttaatagtctttggtataaagtgaccatatctgctaaatcattaagttccctgggagagaaccctctattctaattttctgcattggttatcaaaa

SEQ ID NO: 473469 - DNA, 615 bp, Homo sapiens
catgtttaaattagcattaaccagcaagcccttccctaaacaaaaaagagaggggaaaaaaaatgttttcttggacagctctgtgcctgcagaatgacttcaaccccacatgttcaaaaggctccacaaggtccagctataacacaatagcatcattaatttttactaaattaaatttctcaaaagtataaagcactatcaatttgcggagagtagggaggaagaaactacttattagtttattctacaacctttatataatttgagtaaacaggcaatagtgtcttaaaacgtagcagccataagttacacggattgtaatggaataaaagcccagtcctccrtccatcatcgcacccctcactctgccccaatatgtgttactcagtgtctttccacatcttgaggttatgtaatacttcctccttgcctccctatccccatgtagcataactccttaaaataacatcagaggtcccccacaatttgtcccttcgtaactttccagccttcatcaccccacactctcactttgtcttcattcccccaccattcatcttttaaaagatatgttattcttcaagccacatttataaattcgtcccctgaatcaaa

SEQ ID NO: 473470 - DNA, 352 bp, Homo sapiens
ggaccattttacaattacaccatcagcatattagggttctgatttctccatttctctgttyttaataacaattgttatttttgactttttgattttagccacctagtaggtatggagtagattttttttttttttgtaaatagagagagagtctcactatgttgctcaggctggttttgaactcctggcctcaagccatcctccctgtcttggtctcccaaaccgttgggattataggtgtgagccacctggctgggcctagcttttttttttttttttttttttttttaatggggagggatttatatcactagatttagtaatttgtgcttttacttattcttgcaactac

SEQ ID NO: 473471 - DNA, 352 bp, Homo sapiens
ggaccattttacaattacaccatcagcatattagggttctgatttctccatttctctgttcttaataacaattgttatttttgactttttgattttagccacctagtaggtatggagtagattttttttttttttgtaaatagagagagagtctcactatgttgctcaggctggttttgaactcctggcctcaagccatcctccctgtcttggtctcccaaaccgttgggattataggtgtgagccacctggctgggcctagcttttttttttttttttttttttttttaatggggagggatttatatcactagatttagtaatttgkgcttttacttattcttgcaactac

SEQ ID NO: 473472 - DNA, 536 bp, Homo sapiens
gtgagcagcagtaaacattgattctatttgactctgccctgaattatgaggtttcaaaggactaccccaggagyatctcgcatcctgagaaattgattgtgtgtgtgtgtttgtacacactgagatactgtgaagggcctaaaaactcctctcccaacattcccccaggaacagagaaaattagatcgcagttttgatgctcccttttcttccaaaggattcctcttcctcttcagctcagtgcctggaggaacatatcagagctggttctggatctcagggaaccagcacagccaaccagtcgctgaggccatggctggttgctctgtggatggacggagggattgagggtgagcttgttcttgtttttaatccccatgggacttaaaaccccttcagctcttgaagtccattaggaactgcatttgttttggatggcttttgtggcacacttcctctttcaaatgaactctttggctgtttggaaggcctgtgtctccttctcttacttctctctcatgtttacatgtgccttt

SEQ ID NO: 473473 - DNA, 635 bp, Homo sapiens
tggtttatttttattttgccacctgtgcctagcgcaatgcctcccttagagaaagcctccagtgactgaatgaatgaatgaatgaatgaactaagttagtgagcagcagtaaacattgattctatttgactctgccctgaattatgaggtttcaaaggactaccccaggagcatctcgcatcctgagaaattgattgtgtgtgtgtgtttgtacacactgagatactgtgaagggcctaaaaactcctctcccaacattcccccaggaacagagaaaattagatcgcagttttgatgctcccttttcttccaaaggattcctcttcctcttcagctcagtgcctggaggaacatatcagagctggttctggatctcagggaaccagcacagccaaccagtcgctgaggccatggctggttgctctgtggatggacggagggattgagggtgagcttgttcttgtttttaatccccatgggacttaaaaccccttcagctcttgaagtccattaggaactgcatttgttttggatggcttttgtggcacacytcctctttcaaatgaactctttggctgtttggaaggcctgtgtctccttctcttacttctctctcatgtttacatgtgccttta

SEQ ID NO: 473474 - DNA, 564 bp, Homo sapiens
tgtgttgtctgctgaaacagccctcaaactttttaggagtaaagagggatgggggctgggtgtggtggctcatgcctgtaatcccagcactttgggaggccgaggtgggtggatcacctgaggtcagcagttcgacaccagcctggccaacatggtgaaaccctgtctctactaaaaatacaaaaattagctgggcrtggtggcaggtgcctgtaatcccagctacttgggaggctgagacaggagaatcgcttgaacccgggaggcaaaggttgtggtaagccgagatcggatcactgtactccagcctcaaaaaataaaataaataattaagaaaaagagagatggatgtccttttggcttaggttcttgggtccttggttgtgcccagtgttccttcaaacggatggcattcaacaaatacttgagctgggccagggagtttcactcactgacatcaagggtgagttaatatggttgagaatggtccccacacttctttccctggtgacacacacttcttatatgtttttattgtacagtgcaaaaaggcagatctcttca

SEQ ID NO: 473475 - DNA, 564 bp, Homo sapiens
tgtgttgtctgctgaaacagccctcaaactttttaggagtaaagagggatgggggctgggtgtggtggctcatgcctgtaatcccagcactttgggaggccgaggtgggtggatcacctgaggtcagcagttcgacaccagcctggccaacatggtgaaaccctgtctctactaaaaatacaaaaattagctgggcgtggtggcaggtgcctgtaatcccagctacttgggaggctgagacaggagaatcgcttgaacccgggaggcaaaggttgtggtaagccgagatcggatcactgtactccagcctcaaaaaataaaataaataattaagaaaaagagagatggatgtccttttggcttaggttcttgggtccttggttgtgcccagtgttccttcaaacggatggcattcaacaaatacttgagctgggccagggagtttcactcactgacatcaagggtgagttaayatggttgagaatggtccccacacttctttccctggtgacacacacttcttatatgtttttattgtacagtgcaaaaaggcagatctcttca

SEQ ID NO: 473476 - DNA, 564 bp, Homo sapiens
tgtgttgtctgctgaaacagccctcaaactttttaggagtaaagagggatgggggctgggtgtggtggctcatgcctgtaatcccagcactttgggaggccgaggtgggtggatcacctgaggtcagcagttcgacaccagcctggccaacatggtgaaaccctgtctctactaaaaatacaaaaattagctgggcgtggtggcaggtgcctgtaatcccagctacttgggaggctgagacaggagaatcgcttgaacccgggaggcaaaggttgtggtaagccgagatcggatcactgtactccagcctcaaaaaataaaataaataattaagaaaaagagagatggatgtccttttggcttaggttcttgggtccttggttgtgcccagtgttccttcaaacggatggcattcaacaaatacttgagctgggccagggagtttcactcactgacatcaagggtgagttaatmtggttgagaatggtccccacacttctttccctggtgacacacacttcttatatgtttttattgtacagtgcaaaaaggcagatctcttca

SEQ ID NO: 473477 - DNA, 340 bp, Homo sapiens
gcccctagtgcttaattcctgccagcagaacatttgcacagtggcatagtgacttctggtgggctgtgtctatgctagccactctcacctgctggagttccttgagtaaaggaattgagccttagctatctctggtctgctgggcacacagtaggtggctcaatgcacattcaaaacaaatgcactggaaaacagcttgttttcttaccagaccactctatataggcatgtgggcagacacaygtgcccttttctacacatcggttgctttttttttttttttttttagaatcctacatttcccaatgaaagcaagagggtcatgaaattaatttgtcac

SEQ ID NO: 473478 - DNA, 560 bp, Homo sapiens
tctcttctgcttttctttttccttctcaatattcttcctcattctttttattttctcttcattctttgttagtgccctttttttgaaactgatgtctaaagattggggcccaattctgattgatatttcaccttattactttcagagtaccctatactttttgcatataatgtatcagcttttgccattcatttttaggattaaaatcctcccttaccctcaagatagaaactccttgatgactgagaccatgtttgtttgtttgtttttcagaatctgtagsatttcctggcataccacaggcatccaataaattagtgaattatctaatgaatgaacttgatctgacgtgaagcaccctactcctagctcaattccctactgaccggctcctaatttcagaatttctccaatttttgctatttttcttatagtgacaatttcttctgcccaaggagagaaggaacgagtccagaaaagaatgtgtaatcgtgaaaaatgaaatctcacctactttttagttttgtccaggtctttatctgttcatacatgtttaagag

SEQ ID NO: 473479 - DNA, 637 bp, Homo sapiens
attttatagtcacatattttatttttagatagaacttccagtatcattttattgcaataaaaagcctttcatatcaaccaaaggaaatttaacatttaagttgcatgttaaaaataatatatattgttttttcccaaattcaaatttagtatatttagccaacaagaatgctaactattttgtatgaacatgttggcagggagtgggtgggtttcatgtattggaatgcatttacattgaaatgtttctttcccacaccacctttgtgctctaaattcaaagttcatgaaaatataatttttcaacataaamatttttcagcgatagaaggaagccaggaatccagcaaattcaatagtttttcctaaaatggctctgacagatgaacacccagcctctgcttttacaaatttttatcacactgctaatacggacagtttcctgaatacctctctaggcaccttgtcttattattcaacaaatcttaatttagtcatttgacaaatgtgacgaaagaaaaaaaatgtgtgtattctgttcgcttgcttgcttatttgtttctcttatcaaatagaaacaaaactgctaaatcaaggcagttccatttgttcaccctttttttttttttcatctcctc

SEQ ID NO: 473480 - DNA, 348 bp, Homo sapiens
gaatttatatatttatctcagtgttattcacaacagcaaagacatggaatcaacctaggtgcccatcaacaatggactggataaataagatgttatatatccagttcgctgttgattggatatcaacaaaggatatgtaggatatcaacaaaggagatatatatctatagatatctacagatatagataaatatrgatagatatatagatagatagatatagatatctatagatagagatcttgccactccactcaagtctgtgtgacagagcaaggttccttctcccaaaaaaaaaaaaaagaaaaaaaaaaagaataaaatcatatccttcgtagcatcatggatg

SEQ ID NO: 473481 - DNA, 590 bp, Homo sapiens
ctgtaagctaccacacccggccatattccttttatttctaaggagttaaacataaatgtaactgatgtagagagcctgccaatgcaacacatgtaacactattcgtggccaaactgatcaagtcaaccaaatacatcctcttaaggaggctgtagttagtawaatggcttaacagacaagtttttataaatgtacttacggcaacagtgcacagatggtgactttaaaagaacatggaatgaatggcaaaagtattgtcagttgttacgttctgaaaattactgctgttataagagaggtgggttgttttgttttgttttgttttgtttgatcaactggttttgtgttttggctaattcatttatcccaagaaaaacacccttaatttccagaagaaaacaaaaatgcaataggattatgcactattgccatcttgcaaacttcttctataaagggtcaggtaaaaatttttggctttgcaagccattcagtgctgcagttattcaactcttcccttgtagagcagccatagacaatatgtaaataaacaagcactgctgtgtcctaacaaaactttatttataaaagca

SEQ ID NO: 473482 - DNA, 590 bp, Homo sapiens
ctgtaagctaccacacccggccatattccttttatttctaaggagttaaacataaatgtaactgatgtagagagcctgccaatgcaacacatgtaacactattcgtggccaaactgatcaagtcaaccaaatacatcctcttaaggaggctgtagttagtaaaatggcttaacagacaagtttttataaatgtacttacggcaacagtgcacagatggtgactttaaaagaacayggaatgaatggcaaaagtattgtcagttgttacgttctgaaaattactgctgttataagagaggtgggttgttttgttttgttttgttttgtttgatcaactggttttgtgttttggctaattcatttatcccaagaaaaacacccttaatttccagaagaaaacaaaaatgcaataggattatgcactattgccatcttgcaaacttcttctataaagggtcaggtaaaaatttttggctttgcaagccattcagtgctgcagttattcaactcttcccttgtagagcagccatagacaatatgtaaataaacaagcactgctgtgtcctaacaaaactttatttataaaagca

SEQ ID NO: 473483 - DNA, 576 bp, Homo sapiens
cactttgttattaaactattcttttacaagctactctgctgttctgattttgttatataaagcttcctgagtgctttatatattttaatgtttttttctcattataaaagttatattacttattatgatgctttggtaaaagtatatggaagtatagaaaataacaaataatattgctttaaataatattactttcctgtccttacccccattcatcctcacaatgccttatggaattatgttgaaattgtctcaggtcctaaattctcagaagaaaggaattctaaatcttatattagtggaaacatggagatcttgcatcartgaaatatagcaatttaagaaacaaattttaggcaaaatgacatccaaacatgtcctttactttatttccttttcccaaagacatggtgtttctagtgttatatgcttaccatgtgaataaataaaatcacaaaattttaccagcccaagaaaagcatttctcatgttcatcatgcactgtgtcacgaagaacaattaaaattaactctgtgatctttaatactcatccagccccaggcagagagttattgc

SEQ ID NO: 473484 - DNA, 590 bp, Homo sapiens
tgttttataatcagtatgatttagctatgaatgcgataaaattcttactccagaggaagttgatattaaaaagcatagatctctcacctagctctgctaccacttcygaactcatcctcagcattattacagttatatatttttgaaatacataaataaaaatctatctttttctcgtgcatatctttttaaagtacatctgtcatcttccttctgtcatcctgccatagagctattcctttactgaaggaaagaaatggtttatgttaagcttttcagttcattaaatgtttaaatctcaaggtaggttgttttcaaactatggagtctttaaaaataatttccatagctgaaatggagtttaaatggctaattgtgtaataaataaagagaaaagaaaacttaggcacttttaccttctgtctctaaacatctgaacttcctgtggcttgagaatgatgctttgtcatgtagactggttttatgtgcacatgatctctcagaagaagacgagtttgtggtatgtctatgtgtatgttttaaatcatctgtctccttgtatgttagaggtggtcccatggggggagcca

SEQ ID NO: 473485 - DNA, 210 bp, Homo sapiens
attgagttggtgaagcaagtcataattcatgccagcccagattcaagaggagaggagaattagattccacttctcmatggaagaatggcatgtatgtactggaaaggaaggaactgatggcagtcatcttagagatacgctaccatagtgagctctttcttctatcctctttttgctgatcaatgtctcaaagtatgcaaacattgccaa

SEQ ID NO: 473486 - DNA, 481 bp, Homo sapiens
cctatgattacaacctggcagatgtgtctcccctcagcctagtctaactgagaattcagtgtcggccaagcatagtcctaaatacacaaagcacattactgtccttaaaaaggttatgtgtctcattagatacacagcaatacaagcagcaatgggtttaayggaatgttcaaatgacccactgtcaactaaatactataacttctgtgagatataaagtctttaggatctgggacagtgataaaagacttcagagaagttggtggggggcagacttaagtgaaccctgaaggatgaattggtattgaagagccatggcagatgattttctgaaatggattcttattcttgtagatttggggaaggtgaaaattggaaaccttgcaggatagtggtgtttattaaagtggggggtccccagaccagagtgcttctaggtgaaaaggtatggaataaggggtgagaagatgctctttaagga

SEQ ID NO: 473487 - DNA, 633 bp, Homo sapiens
gtttcaccatattggttaggctggtcttgaaaaatcttgttttttaaccacctgatatgtgatttaatttaatcacttayaggaagataaaataaaaacctgatcctggtttgaacaatctactggtaggtagagatgaagagcccccttttagaggacttcaataggaaaatttgcacaaatacctttgctacccaggaggtttctttggcttcctctggaagattcctgtagacagattgctgagtttgtcattacacctagaaaccaaggctaggaggggtagctgagactgataattgccctcccaaagctattcttccatttttccttactacggaactcttgttttgtctaagatggcaatatgcctagagaaaagattacatatcccagattcctttgatgtttgggatggccatatggcacagttctggccaaagagatatgcaagaatttgctaggtaagacttttatgggaaagctcttcaaaaggtggggctgtctcagttggcacatgcctttctcctcctttctgtctggaaggcagatatggtgttagaggtgaagcaaccgtgtacacaaaggaggaagagattctgcgtccctggtaatactgcagaagtgtgaaga

SEQ ID NO: 473488 - DNA, 525 bp, Homo sapiens
gatggaatacaaatgacaaaataaatattcagttaacatataaaaagtaagaatcaatcagatattttaagagcaggaatcaagggaaggcatgtattcttgtgaagatggtagagattagggatagagtcccargtggggctggaagaggcgagggcagggaactgtgtctcctcagtcacagtgttatctagcttttagtctgtgtctagctgtcacctattagacagagggaaagaccaggatcaaagtaaaagcaagttggaatcctgcacaaggccctgtagaaatagattagccccagtccaccctcatcgcctattttctattactccaaatcctgcttccatggtaatggaagctggttggcctgccttgctggtggttcatgcctctacaccctacaaacacgaacacaacctacgtactgctgtaattgaataccacagactcagtaatttacaaagaaatgaaatttatttctcacaactctggaggctggccagtccaagagcatggcaccag

SEQ ID NO: 473489 - DNA, 441 bp, Homo sapiens
accccacagcaaagctgctctcctgtggggctgtcactttctaaagaatatgatacatggttcacaccacggtgataataatctcctatatttcaatgggttttttttacaaattccagaagactttggcttgcattggctcattagatcctcaaaacattcctgtgaggtagaaaggaggacagggtttccttgttataaaagaagaaattagcattcaaaggttaagtgacctmtctaggttgtgcacctatacaatgacagaataagcgcagaattcaaatcccttggttccagtctggactgtctctttaatgactgtcacaactgaatgtgtccacttcccagggtcacataaaagtagaggtattggaaacaccagccttaacatgaataagggcagcaacctagttcagacacttctggcagcaagaccaggcc

SEQ ID NO: 473490 - DNA, 472 bp, Homo sapiens
attctctcctgccatcatctctccaaccaccccacagcaaagctgctctcctgtggggctgtcactttctaaagaatatgatacatggttcacaccacggtgataataatctcctatatttcaatgggttttttttacaaattccagaagactttggcttgcattggctcattagatcctcaaaacattcctgtgaggtagaaaggaggacagggtttccttgttataaaagaagaaattagcattcaaaggttaagtgacctctctaggttgtgcacctatacaatgacagaataagcgcagaattcaaatcccttggttccagtctggamtgtctctttaatgactgtcacaactgaatgtgtccacttcccagggtcacataaaagtagaggtattggaaacaccagccttaacatgaataagggcagcaacctagttcagacacttctggcagcaagaccaggccagc

SEQ ID NO: 473491 - DNA, 628 bp, Homo sapiens
tctgatcagtaacttaagatcctttgagactccaaaagctggtgtgactctaagtgctacataagtgttgaaaattaagaccctagattttcacattaaagagcaaattcaattttgcctcttttggagaagggattcagccaaataatcaaagttcattttaaaggacaatttttaagggtaaaactgtaactcttgcacaaatataaaacataaaaggaacatgtgtcaaatattttatataacctattaattgatgatagaacagtaaaatgttacactcaatgaaaataattcaaagaacatatagacaatcrggaatgctaaaataaatttaaaaatagatgtggtctatatccatacggcaataatgcattgcatttaatgggacaagaatcattggctttatgcttaggttctattatacaacttaaagagttttaaaaacagctcataaacaatgagaggaatagacgactatagcatcagataatccagatgggtatgctagacaatacctagaatcccaaagaatacccaataatctcttttattctgtttcttttggtgggcagggggtgcgtattgcaaagtcttttatacaattaacacatatcctatctgtctc

SEQ ID NO: 473492 - DNA, 576 bp, Homo sapiens
ctcccaataaacaaaccataataatagaaagtgwtatctacccactcaacagacaatttcatatgatagtacctactgcaattgcttctgaaattacccaaatgtcttcctgtaaaccttagtaattgagtttggcatataacacactttgaaaaagaaataatacttttcccaaatcgaaaactttaatttatttataataatttataattaattaatttagttaattccaagtgttttgctacccctaaatcatgcatctattttgtagtttttttaacctattagcgttgtgatggattagatgtctcaattaagccaaatgatgccctataatgtccctaaagagtggtatgaatggaaaactttaaaataaacatgtctggacaaaaatcaaatatatgaacaaagaaaatcatatgttttagacactcaaaagagcaaactacagaaccttaggaatcttttaagagaaggtttcttaggaaaaggattcttaggaaagattcttaggaatcttttaagagaagcatttctcggcatttgtctttcagtgaaaatctcagccagtcctag

SEQ ID NO: 473493 - DNA, 624 bp, Homo sapiens
acaagaggtagctatgaataggtcaggagcaattctccccagccttgagcagtagggaggatgagtcaacagaagtgaactcacycttcctacttgttatagaattatacatccatgactgtaccatgtgactttacatgtcttcttgagtatgtcaaatacattccctgacccactgaggtcagggttggtcatgtgacttcctgtggccaataggatgtgagtcatacccaataaagataaccagacctgatggtaagtagaatatccatgaagatgtgcaggagaccatggccagcaacactggcttatcagaactgggttcatgcacaggtctgagtttttgttgctgaaccctctttccctgtcaataagacaagcatttattccccagtatcccaaggcctatgactccacctccaggctgccactcataggtggagctcacctggcacctgcggctggaacatctacttatcacctttccatgtggctccttgggcttcctcacatcatggcagctaggtcccaggggctatgggacctagctagatattgtgcttcatagctagatacggtgctatgaagagtgtggcagttgacatttcctggaaatggtcacag

SEQ ID NO: 473494 - DNA, 624 bp, Homo sapiens
acaagaggtagctatgaataggtcaggagcaattctccccagccttgagcagtagggaggatgagtcaacagaagtgaactcacccttcctacttgttatagaattatacatccatgactgtaccatgtgactttacatgtcttcttgagtatgtcaaatacattccctgacccactgaggtcagggttggtcatgtgacttcctgtggccaataggatgtgagtcatacccaataaagataaccagacctgatggtaagtagaatatccatgaagatgtgcaggagacyatggccagcaacactggcttatcagaactgggttcatgcacaggtctgagtttttgttgctgaaccctctttccctgtcaataagacaagcatttattccccagtatcccaaggcctatgactccacctccaggctgccactcataggtggagctcacctggcacctgcggctggaacatctacttatcacctttccatgtggctccttgggcttcctcacatcatggcagctaggtcccaggggctatgggacctagctagatattgtgcttcatagctagatacggtgctatgaagagtgtggcagttgacatttcctggaaatggtcacag

SEQ ID NO: 473495 - DNA, 624 bp, Homo sapiens
acaagaggtagctatgaataggtcaggagcaattctccccagccttgagcagtagggaggatgagtcaacagaagtgaactcacccttcctacttgttatagaattatacatccatgactgtaccatgtgactttacatgtcttcttgagtatgtcaaatacattccctgacccactgaggtcagggttggtcatgtgacttcctgtggccaataggatgtgagtcatacccaataaagataaccagacctgatggtaagtagaatatccatgaagatgtgcaggagaccatggccagcaacactggcttatcagaactgggttcatgcacagktctgagtttttgttgctgaaccctctttccctgtcaataagacaagcatttattccccagtatcccaaggcctatgactccacctccaggctgccactcataggtggagctcacctggcacctgcggctggaacatctacttatcacctttccatgtggctccttgggcttcctcacatcatggcagctaggtcccaggggctatgggacctagctagatattgtgcttcatagctagatacggtgctatgaagagtgtggcagttgacatttcctggaaatggtcacag

SEQ ID NO: 473496 - DNA, 624 bp, Homo sapiens
acaagaggtagctatgaataggtcaggagcaattctccccagccttgagcagtagggaggatgagtcaacagaagtgaactcacccttcctacttgttatagaattatacatccatgactgtaccatgtgactttacatgtcttcttgagtatgtcaaatacattccctgacccactgaggtcagggttggtcatgtgacttcctgtggccaataggatgtgagtcatacccaataaagataaccagacctgatggtaagtagaatatccatgaagatgtgcaggagaccatggccagcaacactggcttatcagaactgggttcatgcacaggtctgagtttttgttgctgaaccctctttccctgtcaataagacaagcatttattccccagtatcccaaggcctatgactccacctccaggctgccactcataggtggagctcacctggcacctgcrgctggaacatctacttatcacctttccatgtggctccttgggcttcctcacatcatggcagctaggtcccaggggctatgggacctagctagatattgtgcttcatagctagatacggtgctatgaagagtgtggcagttgacatttcctggaaatggtcacag

SEQ ID NO: 473497 - DNA, 613 bp, Homo sapiens
gcccgtagcaataagcaacaactagggtattgagtgccyataacctgccagactcccactaagcaatttacatactgtgatggttcattttaggtatcaacttaactgggttaagggatacccagatagctggcaaagcattatttccggctgtgtctgtgggggtgtttctggaggagattggcatttgaatcagtgggctgagtgaggaagatctgccctcacccagtgtggccaggcaccagccaatccattgagggcctggacagaacaaaaaggcagaggaaggcaaattcttgctttctctcttctggagctgggactcctttcttctcctgcccttggacatcaggctccacgaattgcaccaacagccctacacgttctcaggcctttggcctgagactgagagttagactgttgcctccccaggttctcagctctttgggcttctctggggctccagcttgcagacagcatattgtggggacttctcagcctccatacttatgtgaggcagttccccaataaattctctctcatctgtataactatctatctctccgtttatcctattgtttctgtttctctggagaaccctgactaatacaca

SEQ ID NO: 473498 - DNA, 613 bp, Homo sapiens
gcccgtagcaataagcaacaactagggtattgagtgcccataacctgccagactcccactaagcaatttacatactgtgatggttcattttaggtatcaacttaactgggttaagggatacccagatagctggcaaagcattatttcyggctgtgtctgtgggggtgtttctggaggagattggcatttgaatcagtgggctgagtgaggaagatctgccctcacccagtgtggccaggcaccagccaatccattgagggcctggacagaacaaaaaggcagaggaaggcaaattcttgctttctctcttctggagctgggactcctttcttctcctgcccttggacatcaggctccacgaattgcaccaacagccctacacgttctcaggcctttggcctgagactgagagttagactgttgcctccccaggttctcagctctttgggcttctctggggctccagcttgcagacagcatattgtggggacttctcagcctccatacttatgtgaggcagttccccaataaattctctctcatctgtataactatctatctctccgtttatcctattgtttctgtttctctggagaaccctgactaatacaca

SEQ ID NO: 473499 - DNA, 613 bp, Homo sapiens
gcccgtagcaataagcaacaactagggtattgagtgcccataacctgccagactcccactaagcaatttacatactgtgatggttcattttaggtatcaacttaactgggttaagggatacccagatagctggcaaagcattatttccggctgtgtctgtgggggtgtttctggaggagattggcatttgaatcagtgggctgagtgaggaagatctgccctcacccagtgtggccaggcaccagccaatccattgagggcctggacagaacaaaaaggcagaggaaggcaaattcttgctttctctcttctggagctgggactcctttcttctcctgcccttggacatcaggctccacgaattgcaccaacagccctmcacgttctcaggcctttggcctgagactgagagttagactgttgcctccccaggttctcagctctttgggcttctctggggctccagcttgcagacagcatattgtggggacttctcagcctccatacttatgtgaggcagttccccaataaattctctctcatctgtataactatctatctctccgtttatcctattgtttctgtttctctggagaaccctgactaatacaca

SEQ ID NO: 473500 - DNA, 613 bp, Homo sapiens
gcccgtagcaataagcaacaactagggtattgagtgcccataacctgccagactcccactaagcaatttacatactgtgatggttcattttaggtatcaacttaactgggttaagggatacccagatagctggcaaagcattatttccggctgtgtctgtgggggtgtttctggaggagattggcatttgaatcagtgggctgagtgaggaagatctgccctcacccagtgtggccaggcaccagccaatccattgagggcctggacagaacaaaaaggcagaggaaggcaaattcttgctttctctcttctggagctgggactcctttcttctcctgcccttggacatcaggctccacgaattgcaccaacagccctacacgttctcaggcctttggcctgagactgagagttagactgttgcctccccaggttctcagctctttgggcttctctggggctccagcttgcagacagcatattgtggggacttctcagcctccatamttatgtgaggcagttccccaataaattctctctcatctgtataactatctatctctccgtttatcctattgtttctgtttctctggagaaccctgactaatacaca

SEQ ID NO: 473501 - DNA, 661 bp, Homo sapiens
atacccagagccagggatgtaaagaaatctctggaaagagctctgctttcttggagctcacagcctggcaggggcagtgaacaggatcgaatttagattcaaggtgaaaagtatagccaatgacatgaatgaggtgctacggcagcacagggtggaagtcgagattgatttgagccaaatgtgccaggtaacaaagtcaaggaggctttattaaatccaggcaggaggtcaactgggtagggaaagtatgtcataatcctattttaaagacttcacatgatctctatcacctactctgcccttaggtcattgatgacctgctatatttattttcttctattgcataacaaaatacaagaaatttattgacataaaacattagccttttattatctcacagttacaaggagtcaggaatccaggcatagtgtggctggggtctctgctcagagtcttacagactgaaatcmgggtgtttgctgggctgaattccttctggagcttggggttgtgggcagaaaccagttccttgtagctgtagaaatgacatcctattttgtctttgctggttggtgagagtcactcttagcctttgaagggggccatgcggctaggacctgaggtaagtagttcataacaaggccatttgcttctttggggc

SEQ ID NO: 473502 - DNA, 635 bp, Homo sapiens
gatccggtgtaacagccttgcaaatttgccagaatgaagaaggaatgttctgcttcagggaggattggccctggtctatgattgctgtcatgatgatactcagcaagtttccttagataacttcagagttaacaaggatktaaaaatgcttccatttcaaactcaccgttatacatatgcagaaactgaggacaatgaaagttagagttgtctaggatacccagactgtggctgaaggaggactagaaccgatatttatcctctcccagcccagcatttttgccatggtctcatgtatctcgaaagtaaccaccactagcaagttggagccaaatcaactagctgactccctgccctgactcagaatggagcatagccaccctgggcagcctgcccaggcagattccacatgcagtaaacctccttcgggtcccaggacactgggcacagggtggggacctgtgcttccagcaggggtgcgctccccagcctcacctgtccctgcttacagtccctcaggcaacaccagtgaaatcatcttcctctcagggcatcctcatcctggcctgagtgccccccacctttccttctcaacctcttcagggcttaccttgcatcagggggtgtctccagca

SEQ ID NO: 473503 - DNA, 625 bp, Homo sapiens
ggttttttttttctttttgctactatgaaaacaacataaatctctcaattttcgtatcaacaccatgttctgtctcactaacctccaaatggaaaataatagatctagaaaattgcaactgcccttagaggtttccagtctccattgattttctttcagatccaataataccgttctgtcctgctgtgttgattatggaatgtatcctaatcatgggaagggcaccttgggagaagttgcagatggctgacgtgctttctctagcattcagctaaaaaatgggatggtccatgattctgtgttctctgtgttctgcaaaacaacattaagtagaaaacaaacagaagcagaggcacatttccttcttttgccacagaaacaatgccactgttgagtgcaagtcacactttgtctcatagataagaggtggccccaaagaagctgggatgaatgagtcactacctgtcttgtgrctgtactgcacttcatgttcttaccttcggcttctccaggtctcgccctagtgagccaagaactttctctcacatgctgcctttatttaagcctggccttcaagaccttccatgatttatcaccaacctaccttttcagctttgtttcctag

SEQ ID NO: 473504 - DNA, 503 bp, Homo sapiens
ttatgtattcaacttctttagatttcacatataagtgaaatcatgcagtatcttgtctttctgtgcctggtttatttcacttagcagaacgtcctccaygtttctccattgtgtcctaaatggcaggatttccttcctttttaaggctgaataatattctgtggtgtatattgcctatattttctttatccattcatctgtcaatggacacttgccatacccttgaccacagaaaggggctcctgtcccagagaagatgccggcctcctgagcgtacaacagcgctggggaatgctccagcagtgcagggaagggggcccccaggcagtcccggggccactggagaccccttccttgtgggaagaaccaggaattgagtagaggagaagcagcacggaggagggcctccaaggagagaagagcccttacggccacatccctggatctcccaggaccagttcaacaacgtggccagtgcctttttctctctccctgttcctcat

SEQ ID NO: 473505 - DNA, 587 bp, Homo sapiens
ctttacacttttacaataaaacarggtatttctctgactttgtggtctaaagtcatgcatattttggagcacctaaaagaaaacagcaaacagcttacttctatttgtaccaggttagtgcacgaatgtaaaaaagacctctaaatgttaccctcctattatgaaaatccaaagctgggcatgagcagaagaaagggagagaatcatgctattttttaatttcctttgtattaatacaatcgaaagggggctatcaaagcataacactggcctgccctccagctgctgcggtaggtggcgtttcactcggttgccttgagatttacaaattctaaaggtattttcatgcctccaaattgaacacaaaaggcaggcccatggaacagtggctctgaacttcttaaactgaataatagggcaacgtgaaactttttatggaaagatgttgtttttcctgaagttcttgcagtacaggttgtaggagcttccttttctctctatgccctcggaggtctcacaaagcagcaggctcagtgagaccgaaaacatcagtgtgtctcccatctaggaagtctccagtaataact

SEQ ID NO: 473506 - DNA, 472 bp, Homo sapiens
aggaaaaaagcttattcaataactaagtaaggttatgtgattatctctttaatcatatctttaataagttttctgggaatggtagaggttttaaatgagaacgtattcaaccaaataacgttgagctccttaagggaagaaacaaattccatgttttattcaaggtgtgattccaattmtgggtacagagacccccacaaaaacggctctgctctaatgtttgtgggatgggtgggaagatggacaacgcatggatgaaaattcccaaacaggaaaatatatcttgaatgaaagaatgaacgaaaatactggttttagaaaggagggacggatggagagattatcagggcagggaagatcccgaaggaaatgagcaggctttgctgaaagagtttcttgggcatgggaaagacccagatggggttggcctgccatttacccctctgcaggaaattcctccaggccacacccc

SEQ ID NO: 473507 - DNA, 588 bp, Homo sapiens
tgtcagaccctgcgcagtttacttaggctatctgaacctccatctcctcatctgtatggggagaatgatgtttacctttctgaatcttagggaggtttcaatgacttgtatttagcaccctgcctggcaagttaataccaacacttgtctgttgaccccaactccctctgcatatgcgtatgcagagacacaaacgaatccacagaaaagattctgttgctmtttgccgaagctaaaaaccttgagaacctctattgctacttgtcctagagagaagctctgggttcaagtgtcagccttgtactaagcagtgctgacccttgatggtatcactctcattctccagccctccatgttcctctctgtaatattggacatggagtaacattgaaggggaagttccatatttttgcagcctagcatcccaggattcaaagaatctgattaatccaacacgcctcttttaaagttgagaaaactggttatgtaacacccagagtggaaataggaagtgagaggggcagcatgtaggaaatgcaaatgatgatagtggaccgggagtaagggagagtgcccctgaatggggtt

SEQ ID NO: 473508 - DNA, 574 bp, Homo sapiens
tgtcagaccctgcgcagtttacttaggctatctgaacctccatctcctcatctgtatggggagaatgatgtttacctttctgaatcttagggaggtttcaatgacttgtatttagcaccctgcctggcaagttaataccaacacttgtctgttgaccccaactccctctgcatatgcgtatgcagagacacaaacgaatccacagaaaagattctgttgctatttgccgaagctaaaaaccttgagaacctctattgctacttgtcctagagagaagctctgggtycaagtgtcagccttgtactaagcagtgctgacccttgatggtatcactctcattctccagccctccatgttcctctctgtaatattggacatggagtaacattgaaggggaagttccatatttttgcagcctagcatcccaggattcaaagaatctgattaatccaacacgcctcttttaaagttgagaaaactggttatgtaacacccagagtggaaataggaagtgagaggggcagcatgtaggaaatgcaaatgatgatagtggaccgggagtaagggagagtgc

SEQ ID NO: 473509 - DNA, 588 bp, Homo sapiens
tgtcagaccctgcgcagtttacttaggctatctgaacctccatctcctcatctgtatggggagaatgatgtttacctttctgaatcttagggaggtttcaatgacttgtatttagcaccctgcctggcaagttaataccaacacttgtctgttgaccccaactccctctgcatatgcgtatgcagagacacaaacgaatccacagaaaagattctgttgctatttgccgaagctaaaaaccttgagaacctctattgctacttgtcctagagagaagctctgggttcaagtgtcagccttgtactaagcagtgctgacccttgatggtatcactctcattctccagccctccatgttcctctctgtaatattggacatggagtaacattgaaggggaagttccatatttttgcagcctagcatcccaggattcaaagaatctgattaatccaacacrcctcttttaaagttgagaaaactggttatgtaacacccagagtggaaataggaagtgagaggggcagcatgtaggaaatgcaaatgatgatagtggaccgggagtaagggagagtgcccctgaatggggtt

SEQ ID NO: 473510 - DNA, 223 bp, Homo sapiens
atccttcaacaaacgttttccacccacatgcatagtctttattttttctcagaccagcaaatatgtcattgagagccttcagcgatctaccatggcctctcatttaggagtgactgaacttgaagatgtcaagtaggcactcttaaccaattgtctattttcttaaattattcttactcttggctgggygcaatggctcacacctgtaatcccagcattttgg

SEQ ID NO: 473511 - DNA, 568 bp, Homo sapiens
ggactttagttgataataatgcatggatattggttcatcatttgtaacaaatgcatcacaccaatgccagatgttaataataggggaaactgaggcaagtgactggtagtatatgggaactctttgtattctgtgctcaatttttctgcaagtgtaacattgctctaaaaaataaaatctattaatttaaaaaaagaccttcttacacagatataagtctttcctctctatctcccctcccccttcccaggagagaagctaacattttaagatcttttgattgagaaattacaggatgagcaagaccctgtaaatgcctaaaagctttttaaaataaaaaagtaaataaatcaatagtttattcatccccacggcatcagcacccatcgaagacaacgttgctccatctatattcaagtcctctttcttcttcaaaccacacgcagtgcctgccrtgcttacagcttctccaggtcctccacggccatctaagggttaaggaccatgtgcatccctaccgctaccattctccgtcacttcacatttccgggcccaagactccttttgc

SEQ ID NO: 473512 - DNA, 568 bp, Homo sapiens
ggactttagttgataataatgcatggatattggttcatcatttgtaacaaatgcatcacaccaatgccagatgttaataataggggaaactgaggcaagtgactggtagtatatgggaactctttgtattctgtgctcaatttttctgcaagtgtaacattgctctaaaaaataaaatctattaatttaaaaaaagaccttcttacacagatataagtctttcctctctatctcccctcccccttcccaggagagaagctaacattttaagatcttttgattgagaaattacaggatgagcaagaccctgtaaatgcctaaaagctttttaaaataaaaaagtaaataaatcaatagtttattcatccccacggcatcagcacccatcgaagacaacgttgctccatctatattcaagtcctctttcttcttcaaaccacacgcagtgcctgccatgcttacagcttctccaggtcctccacggccatctaagggttaaggaccrtgtgcatccctaccgctaccattctccgtcacttcacatttccgggcccaagactccttttgc

SEQ ID NO: 473513 - DNA, 568 bp, Homo sapiens
ggactttagttgataataatgcatggatattggttcatcatttgtaacaaatgcatcacaccaatgccagatgttaataataggggaaactgaggcaagtgactggtagtatatgggaactctttgtattctgtgctcaatttttctgcaagtgtaacattgctctaaaaaataaaatctattaatttaaaaaaagaccttcttacacagatataagtctttcctctctatctcccctcccccttcccaggagagaagctaacattttaagatcttttgattgagaaattacaggatgagcaagaccctgtaaatgcctaaaagctttttaaaataaaaaagtaaataaatcaatagtttattcatccccacggcatcagcacccatcgaagacaacgttgctccatctatattcaagtcctctttcttcttcaaaccacacgcagtgcctgccatgcttacagcttctccaggtcctccacggccatctaagggttaaggaccatgtgcatccctaccgctaccattctccstcacttcacatttccgggcccaagactccttttgc

SEQ ID NO: 473514 - DNA, 605 bp, Homo sapiens
acatgctaaagttttcatgttgattgggagatatggctaagttgagtctcaaaacaaactacccacagaagagacaccccttgaagtgcatagactatgcaggagacaaaacaaattggcttaagctaattgaaaatgttacgagcctatcaccgatatttccacttatcatactggggatagcatagtgacaatgtagtatcaacagacttggggccgggcatggtggctcacacctgtaatcctagcactttgggaggctgaggcgggagaatcacttgagctcatagattcgagaccaacctgggcaacccagtgagacctcgtcttgataaaaacaaaaacaataacaaaccagggccgggcatggtggctcacacttggcccagcactttgggaggctgaggtgggcggatcacgaggtcaggagatcaagaccagtctggccaacacagtgaaaccccgtctctactaaagatacaaaaattagctgggcgtggtggcaggtgcctgtaatcccagctacttgggaggctgaggcaggagaattgcttgaacccgggagaccgaggttgcagtgagcygagatcacgccactgcactcc

SEQ ID NO: 473515 - DNA, 561 bp, Homo sapiens
aaaatttgaacactggctaaagataattgctatttatttttacaagaagtttattctcatttgggagatctggtgatctcccaagctatctaaagtttgttagatagctgcatgtggcttttttaaaaaagcaacagaaacctatcctcactgccctccccagtctctcttaaagttggaatttaccagttaattactcagcagaatggtgatcactccaggtagtttggggcaaaaatccgaggtgcttgggagttttgaatgttaagaattgaccatctgcttttattaaatttgttgacaaaattttctcattttcttttcacttcgggctgtgtaaacacagtcaaaataattctaaatccctcgatatttttaaagatctgtaagtaacttcacattaaaaaatgaaatattttttaatttaaagcttactctgtccatttatccacaggaaagtgttatttttmaaggaaggttcatgtagagaaaagcacacttgtaggataagtgaaatggatactacatctttaaacagtatttcattgcctgtgtatggaa

SEQ ID NO: 473516 - DNA, 447 bp, Homo sapiens
ggctggtcttgaactcctgacctcaagcagtactcctgcctcagcctcccaaagtgctgaattacaggcatgagccattgtgcccggccccaacccagtttttattgyaacgtggattgtctacagtttatagtgtgaaaaagtataaaaaatgattcccaattttaggttttgagttatagctccctgaagttcctgggttgcattttgctacagtctgcacacaagaaaaacaaaacaaaacaagacacacagtctgatacgcagagagatgttctctctgtacagttatataataacaatagctaacatttgtggagcactcagtgtgtgctaagccactcatctacattgtttcctttaatcctgagattaaataaattctgagaagtagctgtaatgataaggaaactgagccttggagctgtagctcaacatcacacaagg

SEQ ID NO: 473517 - DNA, 539 bp, Homo sapiens
agtcttgctatgttgccctgtctggtctcaaacttyagagagcaaatgatcctcctgcttcagactcctgaagtgctgggattataggcatgagccaacacgtccagccctgtgaagttttttgagattaggcttcaaaatacctcttcagagtgttaggttctctggctttaaggtaaatattaatatagttaaactgggggaagggacatatgggatttcttcctggttcttcaacaggttttagaatttactacaggaggtagaggaaagttagtagctttacttaatgtagtaagctcaaagtcaaaaccctggctaaacatgcaaaattggtttcctaatccttttttagtcttctgtgtctgaggactgtgttaggagattcaataccttctccccactccaacattccttttctgcaggtccagaatggctacaacagtccctgatggttgccgcaatggcctgaaatccaagtactacagactttgtgataaggctgaagcttggggcatcgtcctagaaacggtggccac

SEQ ID NO: 473518 - DNA, 539 bp, Homo sapiens
agtcttgctatgttgccctgtctggtctcaaacttcrgagagcaaatgatcctcctgcttcagactcctgaagtgctgggattataggcatgagccaacacgtccagccctgtgaagttttttgagattaggcttcaaaatacctcttcagagtgttaggttctctggctttaaggtaaatattaatatagttaaactgggggaagggacatatgggatttcttcctggttcttcaacaggttttagaatttactacaggaggtagaggaaagttagtagctttacttaatgtagtaagctcaaagtcaaaaccctggctaaacatgcaaaattggtttcctaatccttttttagtcttctgtgtctgaggactgtgttaggagattcaataccttctccccactccaacattccttttctgcaggtccagaatggctacaacagtccctgatggttgccgcaatggcctgaaatccaagtactacagactttgtgataaggctgaagcttggggcatcgtcctagaaacggtggccac

SEQ ID NO: 473519 - DNA, 596 bp, Homo sapiens
tacatatagaaaaatatagataaatacatttatatattcatatagaaacagacagatgacagatgaagacagaaagataaatagtagatgatggatgatacacacacacggacacctatttactgaatacttatgttacatttgtgctaagagcttttcatgtattatcacaatcgatacgagaattagtttattctcttttttgtttgtttgtttttttgasatgcagttttgctcttgttgcccaatctggagcacgatagcataatctcggctcactgcaacctccgccttctgggttcaagtgattctcctgcctcagcctcctgagtagctgggattactggcacccaacaccacagctggctaattttttctatttttagtagagacaggttttcaccatgttggtcaggctggtcttgaactcctgacctcaagtgatctgcccacctcggcctcccaaaatgctgggattacaagcatgagccaccacgctcagcctattctcattttacagataaagcaattgagaggttaagtgaattgcccgagttcactccatacaataatttccttggaaaagaccacgactg

SEQ ID NO: 473520 - DNA, 498 bp, Homo sapiens
acagcagttcggattaagagggggagctaatggtgttggcaaaaggcaaaactattaactagaatctgttctttcagccatcgtgatggtctcatgcctgtttctctgtgaggacccagagggaatacagcctaataaaagaaatcacctctgtctastagatggttaaaatctgtatggggtttttatacttttattttacgttcaggggtatatgtgcaggtttgttccataggtaaacttgtgtcatggggggttgttgttcagattatttcagcacccaggtattaagcccagtacccattagttatttttcatgatgctctccctcttccaactccccaccctccaaaaggccccggtgtgcgttattcccctccatgtgcccatgtgttcttatcatttaactctctcttacaagcgagaacatgcagtatttggttttcagttcctgtgttagtttgctaaggacaatggactccagctccatccatgtcc

SEQ ID NO: 473521 - DNA, 629 bp, Homo sapiens
gaagtggagttgtaaatataacccagacattagctgaggtctccaggcaccagaatcctcaaggccacctcctgatgaagacaatcgcctttgtcactatttctttgatgagacttacagtcccactggaacttttgtctcagagttctgcatatagaaagagtttagtatagtggtcaagagcgtagactccacagttgagatgggtggaattcaaactcagctccagcttttgcatgctgtctaactttaagaaatctatgtatcctcttccagttccagttttctcatctgtagaagagtaataattagcagaacctatctcactcagtcattataaggatgaaatgaggtgatgcttgtaaacttcttagtacacagcctggcccataagcaaaacttccaccatgttagctgttatcttaagaatgactaggaacaacaactgctttccacttcatggagtcaggtaggaattcagcacttgaaataacttccatccatgatcactctcaaaccattatgagtatgagttttgaaaggaaagattaacwtcagggggaagggtagaaaagggcacacagagtcggggggattggtttaccacacagcaaaccacttcaaattga

SEQ ID NO: 473522 - DNA, 564 bp, Homo sapiens
cataattcttagtttatttttcctttttcagacagggctttgctgcctccaggttggtgtgcagtgccacaatcaactcactgcagccttggattcctgggctcatgtgatcctcctgcctcagcttctgaagtagctaggaccataggtgcacaccaccatgcctggataattttttaaacattttatgtagagatgggttatcactatgttgcccaggctggtcttaaactcctagtctcaagtgatcctcccacctcagcctcccaaagttctgggcttataagcatgagccaccatgcctgggtacctttcctgtaattckttactacaacccatgaatgtagatcaaattatattaatattagtttctcattatagcaaagagaaagcaaaatgtctgtactgatttagttgcaaacctaatttagctacatagtacactctcctgtcaagagaaaatgggctaatttctgtacacaggtgggccagggagggactgactgcttctggtcgtaacttatccatctctgtcttgctgagataatgatacttcccttcaac

SEQ ID NO: 473523 - DNA, 649 bp, Homo sapiens
ctccattctagttcaattcctcattatcagtattgtaatcaggaaactgaagccagattggtcaaatgtgttgttaagagttatgtagttcttgtaaatgggagctaaatgaagtgtacctgtgaacacagagcatgaactatggagactcagaagggtgggagggcgggaggaaggtgagggatgagaaattacttaatgaatactattaaggtgatggtkacgctaaaagctcagagttggctgagtatggtggctcatccctataatctcagcactttgggaggctgaggcgggcagaccacttgaggtcaggagtttgagaccaggctggccaacatggcaaaaccctttctctactaaaaatacaaacactagctgagcatgatggcacacacctataataccagctacttgagaggctgaggcacaagaatagcttgaatcttggagatgtaggttgcagtgagcagatatcacaccactgtactcccacctgggtgaaagagtgagactctatctcaaaaaaaaaaaagcacagacttcactactatgcaacatacccatgatgtatggaaactgtacttgcaacctctaaatttatgcaaattgaaaaattaataaacatataaataatgttttcaaaaga

SEQ ID NO: 473524 - DNA, 550 bp, Homo sapiens
tgggctggcatgagcctcctgtcaggcgcactctgccaccagctccgcttccctgtcagcaataattgtgtctgcagtgcctaactgtaaatgaaaacccaaggggcaagtttgggtccctggttcctgggccgcgccggatcttttaatttgcactgtctgtcagaaggatgcaactgtgtgtactccaaagaaatccttagacgctcarattcaaggccagagagagcagaggtaccacagccttctcagagaaattgcatttgaacccgccagagataacagggtgtgtgtaaggcaatgaggctctttttagttggctccaaactttagctagacccagtatgaaaagggaagctgaactccagggaaatttcaaggtttgtttatattatttctccaccgagtacataagacaggccattgaattcaaaacaggcgaacgcagtggtttgaaaggaaatatacacatgagacctgattatttcaatctccataaaattaaaacttcctgggtatagggtgagaggagagaggtaagtcttttcag

SEQ ID NO: 473525 - DNA, 550 bp, Homo sapiens
tgggctggcatgagcctcctgtcaggcgcactctgccaccagctccgcttccctgtcagcaataattgtgtctgcagtgcctaactgtaaatgaaaacccaaggggcaagtttgggtccctggttcctgggccgcgccggatcttttaatttgcactgtctgtcagaaggatgcaactgtgtgtactccaaagaaatccttagacgctcagattcaaggccagagagagcagaggtaccacagccttctcagagaaattgcatttgaacccgccagagataacagggtgtgtgtaaggcaatgaggctctttttagttggctccaaactttagctagacccagtatgaaaagggaagctgaactccagggaaatttcaaggtttgtttatattatttctccaccgagtacataagacaggccattgaattcaaaacaggcgaacgcagtggtttgaaaggaaatatacacrtgagacctgattatttcaatctccataaaattaaaacttcctgggtatagggtgagaggagagaggtaagtcttttcag

SEQ ID NO: 473526 - DNA, 607 bp, Homo sapiens
gctgccaaccaattcttttagtttttcttcatctgaaaatgtcttgatttctccttcatctccgaaggagattttcactcaatacagaattctgagttgacaagtattttctttcagcacttggaaaacaccatttcttatttgactctgtggcttctgatgagaaatctgttctctttcaaatgggtttcctcctataaggatggygtgcattttactctcgttacttccaagatgttttcgttgccttgacttttcagaagtttgactatcatgtgacttggtgtggatttccttcagttaatctgacttgggatttactcagtgatttgaaactatatccagtcagccctctatatccatgggttctatatccacagatgctaccaaccacacatcaaaaatattccaaaaatttaaaaataaataacaatacaataaaaataatacaaattaaatgacagtataacaactatttactacttacatattcaccaatcacatcagacagtataatttttgcttaagcatacagcataattttgaaaacagcagagaagagaaatctgtcatactaatgcttattgttgttgtccctcttgctgac

SEQ ID NO: 473527 - DNA, 502 bp, Homo sapiens
tggatccaaacccattttcggtaacaccagtaactaatttaggtcatgagtgagctaggcctaactctcccccaacccctatacttcctgtccccttgctgcagatagtcggacggcctgtttcgtgaccccttagcacccatactattcatcactcttgttagcactgaagccatcctcacatggttaacaagaattttgggcagaaatatggtcataattaagtattaatcaggctgcactttgttccacttccttctaactgaaagtcactagataccaaccttttgcatccccattgttcctgtacataggatttctgatactagaatcataaagcttttgtttaagaattgcttaagatgggctgggcacggtggctcatgcctgtaatcccagcactttaggaggacgaggtgggtggatcatgaggtctggagttcaagaycagcctggccaagatggtaaaaccctctctctactaaaaatagaaataaaaaaa

SEQ ID NO: 473528 - DNA, 673 bp, Homo sapiens
tagataatcttgagatgatgtcagtggatgttttggggaagctgtaggagagagaatgagaacaaatgtgtttctgaagagtagagtattatgcaagtgtctctcatgtgggccattctcaacatcagcatctttcaaccagtacttccaacgtgtgacctgcagcaggcacatcttaaatactgtgcgtgaggcagagtggaagatgagctgagagctcaggttctaggtctgaggtaggttggacaggacagtcacagcctcccttaaaggagaatgcacttgctaaataaagggagagaacaaaccaccccacagtgtacaaaccacatcccaggctcatggttaggacaccgtgcagcaaggaggtagaggagcagaagagagaatctccaaatttgtgcaagtgcagaaacccatcattagtgtscttgggctgatttatggacatgataatatttaaaaacacacccctgggtagggatctaagatgctaatgagacatgtgatgtatatactaggatgtacaaccacagagcattcaccgacagaaaaccgcccataacatgctacctgacaacaacccttcccatccctttaggagtaatcatgaaagcctcccataaagacagttaccttagcacgagtcagtgctgtcttgcctttgagcagc

SEQ ID NO: 473529 - DNA, 673 bp, Homo sapiens
tagataatcttgagatgatgtcagtggatgttttggggaagctgtaggagagagaatgagaacaaatgtgtttctgaagagtagagtattatgcaagtgtctctcatgtgggccattctcaacatcagcatctttcaaccagtacttccaacgtgtgacctgcagcaggcacatcttaaatactgtgcgtgaggcagagtggaagatgagctgagagctcaggttctaggtctgaggtaggttggacaggacagtcacagcctcccttaaaggagaatgcacttgctaaataaagggagagaacaaaccaccccacagtgtacaaaccacatcccaggctcatggttaggacaccgtgcagcaaggaggtagaggagcagaagagagaatctccaaatttgtgcaagtgcagaaacccatcattagtgtgcttgggctgatttatggacatgataatatttaaaaacacacccctgggtagggatctaagatgctaatgagacatgtgatgtatatactaggatgtacaaccacagagcatkcaccgacagaaaaccgcccataacatgctacctgacaacaacccttcccatccctttaggagtaatcatgaaagcctcccataaagacagttaccttagcacgagtcagtgctgtcttgcctttgagcagc

SEQ ID NO: 473530 - DNA, 444 bp, Homo sapiens
ctggaaatgaaccatttgtgtctgattctgtttgactgataaaatacagcaaataaaacctgctcaaatggcatctttgaaaaaatttgctctgcagagcaactgaacctcagtgacaacccttatactctcctggtttacctttgccttgggaatgccaatatccctgaaccagtttcttttgagcatagaaatgataatgctgtgattttatcagttctcagatcatcaattaatatgatatgtactctataatatatgcacatatgtaatatctaactttagttttmaattctcccctgaaccataaccccgtatttccaactgcctaggtggcatttccaagtggggaagtaagcctaacttctatacttactaattctgcaatgtagttacttagctgaatagcctattgggtaattaggttaacattgttgagcttca

SEQ ID NO: 473531 - DNA, 444 bp, Homo sapiens
ctggaaatgaaccatttgtgtctgattctgtttgactgataaaatacagcaaataaaacctgctcaaatggcatctttgaaaaaatttgctctgcagagcaactgaacctcagtgacaacccttatactctcctggtttacctttgccttgggaatgccaatatccctgaaccagtttcttttgagcatagaaatgataatgctgtgattttatcagttctcagatcatcaattaatatgatatgtactctataatatatgcacatatgtaatatctaactttagttttaaattctcccctgaaccataaccccrtatttccaactgcctaggtggcatttccaagtggggaagtaagcctaacttctatacttactaattctgcaatgtagttacttagctgaatagcctattgggtaattaggttaacattgttgagcttca

SEQ ID NO: 473532 - DNA, 518 bp, Homo sapiens
ggagctacgattcaagatgagatttgggtggggacacagccaaaccataacagcttcttaatcctctctgtgctccataagctgaaacctcttccactgcatcatccctggattccctgtccctccggtttccagttgggtttggtccatgggctgcacggtagagagtrggaagtgggtattgctcacctgctggctttctgcaccaccctgagctgctgtcaggcagccctctcctaaagccctggttcctctcgagttcccttcactccaggatgagtggtttcctactcttgctagccctggtagtattttatcacatctgacccacacctttgtaaatagaacccttattcaactcccttccattacatctttgggtgtgcccaccacataccatgaattcaatgcatgttatttctggtgagctattattaactttaatgaaactgaaatacaaagggaccatattgacttgcttaaggtcgtacaaatgtctttcgcttagcgagaaccct

SEQ ID NO: 473533 - DNA, 595 bp, Homo sapiens
gagtgactcaattgtccccttctgccacctgcctccccagygcagacagtatctctggaactaaataatctgccctgacccttttgccatgcttctcaagtctatataatccttcctaatgtcattttcaccagtagacaagagggggaaacattttcttagaaagacaagttttagtcttgacatttaacctctgtagtttgtaacctgtcagtcaggagaacactgaaggtcatctacctgatcttcatgcagttcaggcttccctgactgctcttaagaaggtcatcaggtccagctctgactctatgcagcagagaagcaaaaccattgtgatgggtcattaacaagaatcaggcagacagtgtgggtgggaaatcatggtccagaatgtcaaatgtctcttaggcctaccaggagagatgctcaattaattctgtcctttagcacccccctgaaaagttctgcacataagagcaactcactttatcggctcttggagctcacctctttgttactggctttagcctcagcaccctaaaatctgaggccactccatccaaacaaaccaagaacatcccgctctgggtcaaag

SEQ ID NO: 473534 - DNA, 552 bp, Homo sapiens
gctgctctggagaagcactgctttttctcatactaaaatccaaaaatttctccaagggctcctcagaaggagggccctgtgtaagataatgagctttgcaagagccttagagcaaacacaaaagcaaattaaagggtgatttctcagccacccttacggttctctgaggggtgggaccacgggcatcttggtgggctgtcagcccaytgaaatggagatatccgcctgcttctccccttggcgtgctttggttgctggaacaggcccagagggcagtgaatgtgtgctgaacgagtagataacggagggcacaaacgtgtcaggcagcacaggcacggtggctcacgcctgtaatcccagcactttgggaggccgaggcaggtggatcacaaggtcaggagttcaataccagcctggccaagatggtgaaagcccgtctctactaaaaatacaaaaaaaaaaaaaaaaattagccaggtgtggtggtgggtgcctggaatcccagctacttgggaggctgaggcagagaattgcttgaacctgggaggcaga

SEQ ID NO: 473535 - DNA, 552 bp, Homo sapiens
gctgctctggagaagcactgctttttctcatactaaaatccaaaaatttctccaagggctcctcagaaggagggccctgtgtaagataatgagctttgcaagagccttagagcaaacacaaaagcaaattaaagggtgatttctcagccacccttacggttctctgaggggtgggaccacgggcatcttggtgggctgtcagcccattgaaatggagatatscgcctgcttctccccttggcgtgctttggttgctggaacaggcccagagggcagtgaatgtgtgctgaacgagtagataacggagggcacaaacgtgtcaggcagcacaggcacggtggctcacgcctgtaatcccagcactttgggaggccgaggcaggtggatcacaaggtcaggagttcaataccagcctggccaagatggtgaaagcccgtctctactaaaaatacaaaaaaaaaaaaaaaaattagccaggtgtggtggtgggtgcctggaatcccagctacttgggaggctgaggcagagaattgcttgaacctgggaggcaga

SEQ ID NO: 473536 - DNA, 552 bp, Homo sapiens
gctgctctggagaagcactgctttttctcatactaaaatccaaaaatttctccaagggctcctcagaaggagggccctgtgtaagataatgagctttgcaagagccttagagcaaacacaaaagcaaattaaagggtgatttctcagccacccttacggttctctgaggggtgggaccacgggcatcttggtgggctgtcagcccattgaaatggagatatccgcctgcttctccccttggcgtgctttggttgctggaacaggcccagagggcagtgaatgtgtgctgaacgagtagataacggagggcacaaacgtgtcaggcagcacaggcacggtggctcacgcctgtaatcccagcactttgggaggccgaggcaggtggatcacaaggtcaggagttcaakaccagcctggccaagatggtgaaagcccgtctctactaaaaatacaaaaaaaaaaaaaaaaattagccaggtgtggtggtgggtgcctggaatcccagctacttgggaggctgaggcagagaattgcttgaacctgggaggcaga

SEQ ID NO: 473537 - DNA, 494 bp, Homo sapiens
tttcactcccacatccattcatgcactcatacttcctttgtctttttattctttccttttttttttatcctccagacagagtttcgctctatcgcccaggctggggtgcatgatctcrgctcactgtagcctccacttcccgagtttaagtgattctcctgcctcagaagtcagggagtggtttctccagctggttctggctcagcctctcccatgaggctgcagttaggatacgggcaggggctattctcctgaatagctgggattacaagtgtgcaccaccatgcctagctaatttctgtatttttcagtagagatagggtttcaccatgtttcccaggctgatctcgaactcctgacctcaagtgatccactcgcctcagcctcccaaagtgttcggattacaggcgtgagccaccatgcccagtccactcatactttcaataagcattcattatgtacttactgtgctcaggccccttggaaggagcaag

SEQ ID NO: 473538 - DNA, 639 bp, Homo sapiens
tggctgctttcctgggatgtgacctttcacgttggtggccaaacctgtccatccttgacactagctcagacatcccctcctccaggaagcctcctcagatgtcactggccaggcatttgccttccttagtcttctggatccctagtctaggactgagtgcttcctgcctcctcactgcctctgacttctctggggggttgatttaacacggccacgggggcttatttccataaccccagcctctgccacaggagccgctatagggttgagctttacatcctctcagtgggctcgtgaccccgtcatccacaccttcccttttatcgggtccctttcatgtggtgtctcatcgactcctyaccatagccctaacggatggacatcgctattcattcccattctacagatgcagaaactgagcttcagggaagctgaggagctcaccctgggtcatacggccagcaagtggcacagtcaagatccgaacccaggtcaggctgtgtccacagggtatcttggacagggctaaacttccaccacattgtctcttcatataatgttgaaatctggcttctctttcaatagctgccccaacgcggccggagcactgggactaaggcagacgtgagcgctagtatc

SEQ ID NO: 473539 - DNA, 542 bp, Homo sapiens
acagcactcctgatgcacgggacgagggagcggcacgagcaaaggccctgaaacaggagggagcgcggtgagtgccttgcccagatccctgggccgtcgtgggacttgggccttctgtgcgctgcggggagccgtgcagggctgcggcgtgggatgccggactcgccctgggtgtcgggggaaggagatgggggaggttgtactggggccatacagtcattgtagaacctgttccccccgagggccgtctgtcgggtcccagagccaggaccacggttgggacaatttgagcgcccacctgagcaccgttgtccctgtgcgaatgtgctttggtgaaaactgtgcctccttctctagaggaaactagatacccsctacccgcaaatcaggccaagcccaccatgttattcctggtaagctcctagccctggggaggctccgagtgatggcagtgggaggccaggtgagaggtacaaagctggcatccaggtggaactggccacacccaccatggcccagcatccaccaggcaggtcctgtgg

SEQ ID NO: 473540 - DNA, 542 bp, Homo sapiens
acagcactcctgatgcacgggacgagggagcggcacgagcaaaggccctgaaacaggagggagcgcggtgagtgccttgcccagatccctgggccgtcgtgggacttgggccttctgtgcgctgcggggagccgtgcagggctgcggcgtgggatgccggactcgccctgggtgtcgggggaaggagatgggggaggttgtactggggccatacagtcattgtagaacctgttccccccgagggccgtctgtcgggtcccagagccaggaccacggttgggacaatttgagcgcccacctgagcaccgttgtccctgtgcgaatgtgctttggtgaaaactgtgcctccttctctagaggaaactagatacccgctacccgcaaatcaggccaagcccaccatgttattcctggtaagctcctrgccctggggaggctccgagtgatggcagtgggaggccaggtgagaggtacaaagctggcatccaggtggaactggccacacccaccatggcccagcatccaccaggcaggtcctgtgg

SEQ ID NO: 473541 - DNA, 440 bp, Homo sapiens
aaatggggccagcacagccactgagtggtcactaagggtctgtgagtatactagtattacaaccagatccccaagcattgccatcttggatttctgtttctccagacactgcccacagcaggcaacagacaggaaagaacaaggacaggacttaattaatccacagcagagaagaaagggcaggggtgtggcaaaaaaaaaaaaagaaaagaaaagaaaagaaaagaaaaagcaagatttttggagatagagacaagacatcacctccttccctcccacttcaccttaytaagggatgaaattgccaaagctctctgagatcctaaatctcttctggccatccttaaagtcctggagcctacttaatccccaagacaggcctgggctgctctgactctctgaccatcaagttaattttatgttgtactttcaagtctgaa

SEQ ID NO: 473542 - DNA, 186 bp, Homo sapiens
cttcactcctcatgggtaaccactgtccacagttyggttaaacaatttttaaatgggtatataattttgcatctggtgggaaaaaattgcactcaaatagttctcctgtttggggacatttaggttgtttccggactgagctctcttgtttaaaacataagtggcagaggattgcatacagcggta

SEQ ID NO: 473543 - DNA, 597 bp, Homo sapiens
ctgccaaataccactctaaaatgattgttgccactggcatttttgtgaattcccttccgctcaacgtcaccccagcagagctaggctctaacttgccaagtaccaagctggggcttgggttttggggattttttgggtttttttttgtttttaatgtttgccaacgtgggccagacgtggtggctcgtgtctgtaatcccagcactttgaggggccaagtcaggtggatcacttgaggtcaggagttcgagaccagcctggccaacatggtgaaaccccgtctctactaaaaatacaaaaattagccgggcatgatagcaggcacctgtaatcccagctacccaggaggctgaggcacgagaatcgcttgaaccyaggaggcagaggatgcagtgagctgagatcgtgccactgcactccagcctgggcggcagagtgagaccctgtctcaaaaaaaaaaaaaaaaaaaaaaaaaaaagtttgtcaacgtgatagataactagtaccagctctttgagtgaataaagcaaagaatcagaagggttgaaagcagcctcccaggtcgcccctctgccataccccttgtccctggatgtc

SEQ ID NO: 473544 - DNA, 562 bp, Homo sapiens
ccagtgctccatcccctgtatggccaggaaagcacagccatcttgtaggaccaggagcagttcaaataatgagccaacggctggcaccctttctccgagcacagcgatgcaccagaatgctctccctcctgtgacaggtgatgtgcgcttcagctcaggcccagaagagccacaaaagagaagctccagcagttctgtgtaggaggcaggatgtacttctatccatagaagggctctcatgattatttattaattrtgaaagggaagaaaaaactaatagagtttcccggaaagggatacaagttcaatatgataaactcccaaaaagcaatcaaaggccaaagagggcagaaaaataaaggacagggagaaagagagatggtgaatcaaagtggccagtatgttagcagaggccaggggaggggccaggcttcacagccagggaggtgtggggctgtcggagcacaagtcaccagtggtggtgagtcaggcaggcagcgggacttgaccccatggggtcactgaggccctggggatgagctgataacaggaatggatggaa

SEQ ID NO: 473545 - DNA, 562 bp, Homo sapiens
ccagtgctccatcccctgtatggccaggaaagcacagccatcttgtaggaccaggagcagttcaaataatgagccaacggctggcaccctttctccgagcacagcgatgcaccagaatgctctccctcctgtgacaggtgatgtgcgcttcagctcaggcccagaagagccacaaaagagaagctccagcagttctgtgtaggaggcaggatgtacttctatccatagaagggctctcatgattatttattaattgtgaaagggaagaaaaaactaatagagtttcccrgaaagggatacaagttcaatatgataaactcccaaaaagcaatcaaaggccaaagagggcagaaaaataaaggacagggagaaagagagatggtgaatcaaagtggccagtatgttagcagaggccaggggaggggccaggcttcacagccagggaggtgtggggctgtcggagcacaagtcaccagtggtggtgagtcaggcaggcagcgggacttgaccccatggggtcactgaggccctggggatgagctgataacaggaatggatggaa

SEQ ID NO: 473546 - DNA, 562 bp, Homo sapiens
ccagtgctccatcccctgtatggccaggaaagcacagccatcttgtaggaccaggagcagttcaaataatgagccaacggctggcaccctttctccgagcacagcgatgcaccagaatgctctccctcctgtgacaggtgatgtgcgcttcagctcaggcccagaagagccacaaaagagaagctccagcagttctgtgtaggaggcaggatgtacttctatccatagaagggctctcatgattatttattaattgtgaaagggaagaaaaaactaatagagtttcccggaaagggatamaagttcaatatgataaactcccaaaaagcaatcaaaggccaaagagggcagaaaaataaaggacagggagaaagagagatggtgaatcaaagtggccagtatgttagcagaggccaggggaggggccaggcttcacagccagggaggtgtggggctgtcggagcacaagtcaccagtggtggtgagtcaggcaggcagcgggacttgaccccatggggtcactgaggccctggggatgagctgataacaggaatggatggaa

SEQ ID NO: 473547 - DNA, 552 bp, Homo sapiens
tgccacggcacctcacgcacagtcaattcaggcaggtctcccctgtgagccgctcgggccgcgacgtccactcgccacgctgcatttccacagtcggcagggtccgcgctggcaaggtgggccaagctgggcctgagcacagagccatttgccaaggcggcacttccccattttcccccaaagttggttctccctgctccctgtctggcctcacctcatgtgaagaccagatccccggcccttgaccttcgcgacagtccttcaccttcgcgacagtccttctgagccagacctgtacagcctggaaacgctgtccttctctgtgacrtgtgcaccagtgtcaggctcggcccgggccagaagcagatgctcctgccaagtcccccaggggtccccccagtttaggccatgggggttgggcggcagttggctggcaaagtgagaatttgtagaaagcaaccaagaagtctcctcatttcttttttcctttcttcccctagtcttgatctaagataagtggcaaattcagtcctgttttgaccggaagccaag

SEQ ID NO: 473548 - DNA, 608 bp, Homo sapiens
gatgtaaaaatttgaatagctaatatttattgccacttctcaggcatcaggcacttggaatgcattttgtatctcctacctaggacatccttggtggcaggtgatctcagtatccacattgcgtaggtgagggggctgagcttagagcaggcaggtaattttcccaggtcacccagctagcaagaggcaaagtcaggaatctggatctagccctgtctgagtcagagctgccctcctaactgccatgttgacacagtgtaggtgcactataaacacattttcctttctcttacccttacaatagggggcctttgataagggaaagcctcatgtcctcatgtctgattttttctatcccgagcatttatttattcacgcattcatttaataaatatttcttgccctccttctctgcaccagacattgtcctaggtmctgtgcatacagcagcagaccaaacaaagccacttccctctcttgcttcatggcgcttactttgcagtgtggaaggtaggttatttgaaaacacaaacaaacaaacaaaaaacagagataaatatgtgctatgtcaggggtcacaggggaaaagtaaagcagagtatggaagg

SEQ ID NO: 473549 - DNA, 553 bp, Homo sapiens
tttcttcaatgccacaggaagttttggggacacagctctccctgttgccctcatgataaagggtaatgaataattgaatcccagcatccaaacccatggtgaatttcttctctgtcattgacagcaaaactataatagcacttactttttttagtgcttttgttgcccatattactctggccttactctgacacttacatatattgttgataaactttatgacagtcctcaaaggtagatgccctcatctccatttcatagttaaaaaaactgaggctcagaaaagaagatacacatgaccaaggtcacacagctattatgtgccacagtcagaattcaaactctgtctgacttttattcacttattcaaaaatatttaattgagtgcctactgcatgcattcactatattgggctctggggatacagcagtgaacaaaatagaaaaattcctgttctcctgaagcgtcacagtctagaaggggtgaaccacaayatgcaaataaatatatacatatatagtatgtcagatggtggtaggtgctttaaaaaat

SEQ ID NO: 473550 - DNA, 587 bp, Homo sapiens
taatggaatctcttgaatccaactacaagatatgcagaccccaggtttcgaaccctttgagatttcacgtgtctattttagcttaccaccatattcacaggatgcatcagagagcttaacatataatattaggacttcacacatttctgttgaattgagttgaatttttgttgaactagtttcaattgaaattgcccaacttgagaaataggggcatggacccgctgactttctcaaaatctcatgtatcttgggaatgttcaactatacacaaggtggctccagatattgattctatamggataaaatgatttttccagcactttccatcttcagccctcaccaggacgtgtgagtctttccttccataaaggatcatggtggaaaatatgagagtgtgaagtatggttcacatctggataagcaaacagagctctgtgttgaaacagcttaattaatggtgatgccaagcccttggccttgtttcctcagtgccatatgcggtgcaaataacgcccaggtctccgctctgagtgggacacgtgaaactccggtctagaaagggcagcctagattggtgaaaaaaa

SEQ ID NO: 473551 - DNA, 669 bp, Homo sapiens
tagctccctttgtccaaggctggcccaaaggttattgacttgatagggcaccctttctgatggagggtcacttttaggcttggaatctgttatatttttttgaatcagatccaatggtctgatttgctgtcatgaccctcctaataaatgagctggtttactcaatttcccatgaggttgccaggattgggatargggaggaattacaaaatgagtctctgtctcctatgaagttaaagttgagttccttgatatgactttcctaaacataggcaagatagcaagagggaaacagacaggtggaaacaaggaaagatgagagagggacagggagaagagacattgtgacattgcttatgatcatttgagtttttgtgtttttttttttttttcaaatttgcaactgaaaaattccagatgaagttgtcaataaggtaaagagtatggaaagtttttgtagctggaggtctaggtaggagtagcatttcataattaatgagctcaaagcagcccctcatttgcctgtctctatttcagcaaaagttaaggctgaaaattaagcagatgaatgaataaataattaggtcagcagatgccatgcaaagagtgcagctttggagttaggccgtttggaggtgggggttcaaatcccagctatgtcacttacca

SEQ ID NO: 473552 - DNA, 669 bp, Homo sapiens
tagctccctttgtccaaggctggcccaaaggttattgacttgatagggcaccctttctgatggagggtcacttttaggcttggaatctgttatatttttttgaatcagatccaatggtctgatttgctgtcatgaccctcctaataaatgagctggtttactcaatttcccatgaggttgccaggattgggataggggaggaattacaaaatgagtctctgtctcctatgaagttaaagttgagttccttgatatgactttcctaaacataggcaagatagcaagagggaaacagacaggtggaaacaaggaaagatgagagagggacagggagaagagacattgtgacattgcttatgatcatttgagtttttgtgtttttktttttttttcaaatttgcaactgaaaaattccagatgaagttgtcaataaggtaaagagtatggaaagtttttgtagctggaggtctaggtaggagtagcatttcataattaatgagctcaaagcagcccctcatttgcctgtctctatttcagcaaaagttaaggctgaaaattaagcagatgaatgaataaataattaggtcagcagatgccatgcaaagagtgcagctttggagttaggccgtttggaggtgggggttcaaatcccagctatgtcacttacca

SEQ ID NO: 473553 - DNA, 669 bp, Homo sapiens
tagctccctttgtccaaggctggcccaaaggttattgacttgatagggcaccctttctgatggagggtcacttttaggcttggaatctgttatatttttttgaatcagatccaatggtctgatttgctgtcatgaccctcctaataaatgagctggtttactcaatttcccatgaggttgccaggattgggataggggaggaattacaaaatgagtctctgtctcctatgaagttaaagttgagttccttgatatgactttcctaaacataggcaagatagcaagagggaaacagacaggtggaaacaaggaaagatgagagagggacagggagaagagacattgtgacattgcttatgatcatttgagtttttgtgtttttttttttttttcaaatttrcaactgaaaaattccagatgaagttgtcaataaggtaaagagtatggaaagtttttgtagctggaggtctaggtaggagtagcatttcataattaatgagctcaaagcagcccctcatttgcctgtctctatttcagcaaaagttaaggctgaaaattaagcagatgaatgaataaataattaggtcagcagatgccatgcaaagagtgcagctttggagttaggccgtttggaggtgggggttcaaatcccagctatgtcacttacca

SEQ ID NO: 473554 - DNA, 669 bp, Homo sapiens
tagctccctttgtccaaggctggcccaaaggttattgacttgatagggcaccctttctgatggagggtcacttttaggcttggaatctgttatatttttttgaatcagatccaatggtctgatttgctgtcatgaccctcctaataaatgagctggtttactcaatttcccatgaggttgccaggattgggataggggaggaattacaaaatgagtctctgtctcctatgaagttaaagttgagttccttgatatgactttcctaaacataggcaagatagcaagagggaaacagacaggtggaaacaaggaaagatgagagagggacagggagaagagacattgtgacattgcttatgatcatttgagtttttgtgtttttttttttttttcaaatttgcaactgaaaaattccagatgaagttgtcaataaggtaaagagtatggaaagtttttgtagctggaggtctaggtaggagtagcatttcataattaatgagctcaaagcagcccctcatttgcctgtctctatttcagcaaaagttaaggctgaaaattaagcagatgaatgaataaataattaggtcagcagatgccatgcaaagagtgcagctttggagttaggcmgtttggaggtgggggttcaaatcccagctatgtcacttacca

SEQ ID NO: 473555 - DNA, 591 bp, Homo sapiens
gtagaggaaataaaaaacaagctggaacccaaagctgtgagtggagccacactccagacggaggacagatggagacttgcattagggtttttgttttttgtttgtttgttttggtccctgatattaatgatatgagtgtcctgcaaaagccaggggcccttaggcaaacataggcacctgacccaagagccaaaggcaatgaaagaggattcaggggaaggaactgttgcaagtccagctgctgccacttgccaggacaagtcaacagatcaacaacatgtgtgrgccgcatgacggcccatgctccagctcttccttcaggtctctcctgaggcccaactgggagcagccagggaaggggattctaggaaattcagttccacttagcttaattatgaagccaccagagtgtgaatgccggtcagttttagaaaaaaaaacttgaggtttttctcacctgcttctaatttctctttaggggataaggtaatgtgctgggagtgaggaggctatgggtggtgatggtgatgtcactagtggttgaaatagcaatagtgaataatggagctagctccattcactcctattcaa

SEQ ID NO: 473556 - DNA, 524 bp, Homo sapiens
gacaatagggatgatgatggtgttgatgwtgatggtgattttgatgatgataatgataatgagagcaaacattgacaccagacactgttataaatgctttatatatatatatatatatatcacattatatttatttaattctcataacaagtctacaaagtagctgttatttttgtcccgttttcactgacaagtagaataaggctcagtgagtttaaataatgttttcaaggttagatgatcttagaagtagatttctacctcttcatcaaagtggccacctttccaagagcctgcactacaagactgctgaaggatctctcccaagatacctggctcccaacatttgccattggccccactataagaacaaatgttgctctgagtcctgttgatttgggagctaaagaaccaagccccttgattttcagcataagttgccaagccttggaaagagcccatatggctcctgaggatgggagcacatcccccatcccttctcaattcccagtcacttctcactc

SEQ ID NO: 473557 - DNA, 524 bp, Homo sapiens
gacaatagggatgatgatggtgttgatgatgatggtgattttgatgatgataatgataatgagagcaaacattgacaccagacactgttataaatgctttatatatatatatatatatatcacattatatttatttaattctcataacaagtctacaaagtagctgttatttttgtcccgttttcactgacaagtagaataaggctcagtgagtttaaataatgttttcaaggttagatgatcttagaagtagatttctacctcttcatcaaagtggccacctttccaagagcctgcactacaagactgctgaaggatctctcccaagatacctggctcccaacatttgccattggccccactataagaacaaatgttgctctgagtcctgttgatttgggagctaaagaaccaagccccttgattttcagcataagttgccaagccttggaaagagcccatatggctcctgaggatgggagcacatcccccatcccttcycaattcccagtcacttctcactc

SEQ ID NO: 473558 - DNA, 606 bp, Homo sapiens
gagcatttctctctcacagacgagaaacccaaagctcagagagttttaggggtttatctgggatctcatggcagggaagtgggctgcgtccacatgcaattcctgttctgtctgatactagaacttccttctttttactatacagtttcttttgaagctgtattttaaaattactatttcttttaagagtcaaattgagctgggggtggtggctcatgcctgtaatcccagcactttcagaggccaaggtggatggatcacctgaggttgggagtttgagaccagcctgatcaacatggagaaaccccatctctactaaaaatgcaaaattagccaggcatggtggtggtgcatgcctgtaatcccagctactsgggaggctgaggcaggagaattacttgaacttgggaggcggaggttgcggtgagccaagatcgcgccattgcactccagcctgggcaacaagagtgaaactccatttcaaaaaaaaaagagagtcaaactgatgaaggtcttgatcctcttggaaacaaatatctggaaaacatctctacagtgatctctgaaaggtggcctggaacagtatcagaattcccacttaaaccc

SEQ ID NO: 473559 - DNA, 627 bp, Homo sapiens
catctggcaatgagagtggttaccatctaaccaactggcatatacattcactgtaagcctactatgtagcatggactaagaaatttactgtattgtataagttaacagaggaatttctcattgtataaactcagaagttcattgtgttctgagctctgaatataacctctcctcctttttcttacttatcacgcatcattccacagactyatcctaaaaactgcaaatcactctctttgcaaaagttggggcaaaccccatcactataaaatactgtattttctatttttttcctaattgagtatatctcatctccttatggtaagcctattcattatgccttttaataaagaccaagaaagagaataataactttttaaattgactttttcaattaccatttggcatgcatgttttcatgctgttgttttgaggataaaaatgttgatagtggaaatatattattgattcctgcctgttcttcaggctcatgcactattgattaaagcccttcacagcctcaacctttgctcctgcatcccaagagagcaaatttgtagagctcccaagaactaaaactctggcttggagattttgatatttggtgagccaggaagactggagaag

SEQ ID NO: 473560 - DNA, 324 bp, Homo sapiens
caattctcctacagactcagataggatagtattttaatttctcsttgatctgctccctcagaccctagaccatgggcactgcagatttttgcaccttttgtagaggcagggtttcaccactaccagagactttaccatcatttctatgtgaagggaaacagtgccctttcagtagacaacgttaaatcagccatcagacgtgggtcatggtgggtttgccgtgactgccacaaacacgcctcaccgaagtctgccaggggacgccataccctcccctagaaagtaagaaacagagaaaggctttctcctgccccggactgtctt

SEQ ID NO: 473561 - DNA, 324 bp, Homo sapiens
caattctcctacagactcagataggatagtattttaatttctcgttgatctgctccctyagaccctagaccatgggcactgcagatttttgcaccttttgtagaggcagggtttcaccactaccagagactttaccatcatttctatgtgaagggaaacagtgccctttcagtagacaacgttaaatcagccatcagacgtgggtcatggtgggtttgccgtgactgccacaaacacgcctcaccgaagtctgccaggggacgccataccctcccctagaaagtaagaaacagagaaaggctttctcctgccccggactgtctt

SEQ ID NO: 473562 - DNA, 324 bp, Homo sapiens
caattctcctacagactcagataggatagtattttaatttctcgttgatctgctccctcagaccctagaccatgggcactgcagatttttgcaccttttgtagaggcagggtttcaccactaccagagactttaccatcatttctatgtgaagggaaacagtgccctttcagtagacaacgttaaatcagccatcagacgtgggtcatggtgggtttgccgtgactgccacaaacacgcctcaccgaagtctgccagkggacgccataccctcccctagaaagtaagaaacagagaaaggctttctcctgccccggactgtctt

SEQ ID NO: 473563 - DNA, 324 bp, Homo sapiens
caattctcctacagactcagataggatagtattttaatttctcgttgatctgctccctcagaccctagaccatgggcactgcagatttttgcaccttttgtagaggcagggtttcaccactaccagagactttaccatcatttctatgtgaagggaaacagtgccctttcagtagacaacgttaaatcagccatcagacgtgggtcatggtgggtttgccgtgactgccacaaacacgcctcaccgaagtctgccaggkgacgccataccctcccctagaaagtaagaaacagagaaaggctttctcctgccccggactgtctt

SEQ ID NO: 473564 - DNA, 299 bp, Homo sapiens
tgtgtttatggaggtcacctggaactagaggcaggttttactgggaactctcaaactttgtgaaaattggatgtgtgtcccagattcttagctttggtgttatatccctcaaaggatgccactgagattacatgtccaacacaatcagaggcatttcaacatgtcaaggttttcttttgccctaggcattcatataaaccaatcgttatgaaaccggggcatttttgctycccaaaggatattgataatctttggttgttgcagttgaagggatgctaccagcatctagtgggaaaagc

SEQ ID NO: 473565 - DNA, 653 bp, Homo sapiens
tattgaagtgaattaactcttaatagctcattgaatttatgattagctattatttctcagtaatcatygcataaacttgaaaattctgatgagaaaaataatgtacaacttattttccaacatgataaaatatttatgaacactaaatttaacaattaatgatgctgacataatgttgcattttggagaaatataattaagcagttattaattttgtctttgttccttgaaatgttagcgccaatttttttttttttcaatttttagatgcccttggacctcaaaggccctgacactgcatgtggagtcaggtgcataaaacatccttgaatctattaattctgggcctcctcaatgaaaggttaaattcatttaaaatacttaaatgatgacatcgtagatccaagaggtcaaataaaataaggatttagtctttttttctctcctttctttttccctccaccatttctctcttctcacttcttcatttctcatcttcttcctctcctgaccgctccttcctccctttctcttctttcctcccctttctttccttcctctttcccttccctcccctttcctagcttcccctcccctcctcacccctttttgaaatgttggagttcatttcaacagaaacaactgagctacag

SEQ ID NO: 473566 - DNA, 653 bp, Homo sapiens
tattgaagtgaattaactcttaatagctcattgaatttatgattagctattatttctcagtaatcatcgcataaacttgaaaattctgatgagaaaaataatgtacaacttattttccaacatgataaaatatttatgaacactaaatttaacaattaatgatgctgacataatgttgcattttggagaaatataattaagcagttattaattttgtctttgttccttgaaatgttagcgccaatttttttttttttcaatttttagatgcccttggacctcaaaggccctgacactgcatgtggagtcaggtgcataaaacatccttgaatctattaattctggrcctcctcaatgaaaggttaaattcatttaaaatacttaaatgatgacatcgtagatccaagaggtcaaataaaataaggatttagtctttttttctctcctttctttttccctccaccatttctctcttctcacttcttcatttctcatcttcttcctctcctgaccgctccttcctccctttctcttctttcctcccctttctttccttcctctttcccttccctcccctttcctagcttcccctcccctcctcacccctttttgaaatgttggagttcatttcaacagaaacaactgagctacag

SEQ ID NO: 473567 - DNA, 653 bp, Homo sapiens
tattgaagtgaattaactcttaatagctcattgaatttatgattagctattatttctcagtaatcatcgcataaacttgaaaattctgatgagaaaaataatgtacaacttattttccaacatgataaaatatttatgaacactaaatttaacaattaatgatgctgacataatgttgcattttggagaaatataattaagcagttattaattttgtctttgttccttgaaatgttagcgccaatttttttttttttcaatttttagatgcccttggacctcaaaggccctgacactgcatgtggagtcaggtgcataaaacatccttgaatctattaattctgggcctcctcaatgaaaggttaaattcatttaaaatacttaaatgatgacatcrtagatccaagaggtcaaataaaataaggatttagtctttttttctctcctttctttttccctccaccatttctctcttctcacttcttcatttctcatcttcttcctctcctgaccgctccttcctccctttctcttctttcctcccctttctttccttcctctttcccttccctcccctttcctagcttcccctcccctcctcacccctttttgaaatgttggagttcatttcaacagaaacaactgagctacag

SEQ ID NO: 473568 - DNA, 610 bp, Homo sapiens
tgaattgccacccaccaaggcaggaccagcctggcaccgatcactgaaggattgtgattaagtcagatggttttgccagcagcctccagccgatgtctcatgctgagctattgtttcaacaaaaaatgagatgtctggtcatgttctctcttcctggggcagagattggggacctgsgttgaaaaccagtgacaacttccctttgccttactgaagataaaggggaatcaggcaaaaggatgctcaaccaaagctgcaggcaagcggattcccaggcagaacctggtcaaggctttgtaggcatcacttcttctctgagacacagagagcttggcatctctgtgcactttcataatacacaatggttagcattttaatctctggcagcctcatgcaaagaaaaaaattattccaaggcagtgccaggaatcctaatgtcctccatggtatttttccaaaacaattccttaatagataactatcatctttcctatcttacagaagaggaaacctttatcgtcatgtaggtgtgaaacaagaggtacatttgcagggctgccatgaagcattgtcattacacacatttatggtgtgaggaagtgctgttata

SEQ ID NO: 473569 - DNA, 610 bp, Homo sapiens
tgaattgccacccaccaaggcaggaccagcctggcaccgatcactgaaggattgtgattaagtcagatggttttgccagcagcctccagccgatgtctcatgctgagctattgtttcaacaaaaaatgagatgtctggtcatgttctctcttcctggggcagagattggggacctgcgttgaaaaccagtgacaacttccctttgccttactgaagataaaggggaatcaggcaaaaggatgctcaaccaaagctgcaggcaagcggattcccaggcagaacctggtcaaggctttgtaggcatcacttcttctctgagacacagagagcttggcatctctgtgcactttcataatacamaatggttagcattttaatctctggcagcctcatgcaaagaaaaaaattattccaaggcagtgccaggaatcctaatgtcctccatggtatttttccaaaacaattccttaatagataactatcatctttcctatcttacagaagaggaaacctttatcgtcatgtaggtgtgaaacaagaggtacatttgcagggctgccatgaagcattgtcattacacacatttatggtgtgaggaagtgctgttata

SEQ ID NO: 473570 - DNA, 610 bp, Homo sapiens
tgaattgccacccaccaaggcaggaccagcctggcaccgatcactgaaggattgtgattaagtcagatggttttgccagcagcctccagccgatgtctcatgctgagctattgtttcaacaaaaaatgagatgtctggtcatgttctctcttcctggggcagagattggggacctgcgttgaaaaccagtgacaacttccctttgccttactgaagataaaggggaatcaggcaaaaggatgctcaaccaaagctgcaggcaagcggattcccaggcagaacctggtcaaggctttgtaggcatcacttcttctctgagacacagagagcttggcatctctgtgcactttcataatacacaatggttagcattttaatctctggcagcctcatgcaaagaaaaaaattattccaaggcagtgccaggaatcctaatgtcctccatggtatttttccaaaacaattccttaatagataactatcayctttcctatcttacagaagaggaaacctttatcgtcatgtaggtgtgaaacaagaggtacatttgcagggctgccatgaagcattgtcattacacacatttatggtgtgaggaagtgctgttata

SEQ ID NO: 473571 - DNA, 404 bp, Homo sapiens
ggttgtgcatttgcgaagttggcatgctcacgttgcaagggagcatgtgtgtgcaaatgtgagcatatgcgctgcatatctgtgtaaacatgtccaccatgctcgttgcgctggtgtactcttcatcttctctgcctgtttcccatggaagagagattaaattgacaatactgaacacgcttcgacttgagaaataagctctgtaccattttatgacatggaataagagttgccttcttctgagatcaaatgggagaaatgtgccttgccttctcaagtgatggaatgaactgttatgcatttatagaatatattatatacagagtgtcgaatgtgacatccatcagtctacaakgatcacctagcctctcaagcacagctcatccctctagcccttattttca

SEQ ID NO: 473572 - DNA, 627 bp, Homo sapiens
tagagatagtaatctgacttccttgaatcgtgacttgtggatagcaggctggcttcctgtagacaataagctggtttcctgggctggttactgcaaactgtgggtcagatttctctttttctatatggtcttgccagtgtccatttgtgtatgcagtctatccttgatgggagggaaaattaaaaaggaaggaaagaagggagggaaaaggatggggacatcatagtactattatccagtttttattatccagattctatttcgaacactttaatcccatttcgatgtgagggaatagtaattcatcccagagcggacrtgacatctgttttcaggaccctttaatcatatcccgtggtccaaagctataacacagtgaagaggaaaaagactcttttcctgtcagtcgcccaaacgggagccaaaggcttttgaggaggcacttaaagaattttcactttgcaattgtgcagaagctgttgttcaggtaatttaacattgattttagtttaaaaggcaattaagacaaaatgggcagccaccagccacttatgttaaataagcttagatttaaattgctcctcatcaccacctttgttttctatgtctgggctgttctatgctact

SEQ ID NO: 473573 - DNA, 627 bp, Homo sapiens
tagagatagtaatctgacttccttgaatcgtgacttgtggatagcaggctggcttcctgtagacaataagctggtttcctgggctggttactgcaaactgtgggtcagatttctctttttctatatggtcttgccagtgtccatttgtgtatgcagtctatccttgatgggagggaaaattaaaaaggaaggaaagaagggagggaaaaggatggggacatcatagtactattatccagtttttattatccagattctatttcgaacactttaatcccatttcgatgtgagggaatagtaattcatcccagagcggacgtgrcatctgttttcaggaccctttaatcatatcccgtggtccaaagctataacacagtgaagaggaaaaagactcttttcctgtcagtcgcccaaacgggagccaaaggcttttgaggaggcacttaaagaattttcactttgcaattgtgcagaagctgttgttcaggtaatttaacattgattttagtttaaaaggcaattaagacaaaatgggcagccaccagccacttatgttaaataagcttagatttaaattgctcctcatcaccacctttgttttctatgtctgggctgttctatgctact

SEQ ID NO: 473574 - DNA, 499 bp, Homo sapiens
ggtgtgtgccaccaggcccagctaatttttatattttcattacagacaagccttcaccatgttgaccaggctggtctccagttcatggcctccaattcgtggcctcaagtgatctgttcacctaggcctcccaaagtgctgggattataggcgtctgccaccatgcccacctaattttcgtgttttcagtagagacggggtttcatgatgttgaccaagctggtgttggactcctgacctcaagtgatscacctgcctcagcctcccaaagtgctgggattacaggcatgtgccactgtgcccagccttcatggcacacttctaattctttccttcttcatgagctttttccagcatgagccaaaatcaatttcttcttctgcatccccactgaaattgttatacttcataaaatactttgtacctacttcagttttagtttctaagaatttatgtctttcttgagaaacagagtactgttttgtgattcttgcttcgg

SEQ ID NO: 473575 - DNA, 575 bp, Homo sapiens
ggtccttttccaaccgggacgtcagagctactgtgattatcatgccaattacatctcacattctgccaaggtggttcttctctctcagtgcgttggtcatttcagagtgggaaaagccttcagctcagtgtccttcaggatccagtctactctttaaatttytgagagttatttggatttcagaaggatttgcctctcatcttctagtcatatcccattaccagtcaattcagaacatctattagttcagcaggagaggaaaggatgaatttccatgcctcccacctttgcttggtaacaggttatgcttttagaaatcacttcatgacctactgcttcctgctgggacaataatgttcttgtgtgtggctaagctatgcccacatttttaaaagttggaacacatctagtaaatatacatacctttgaaagtcctcatttaagctgaattagaccagtgaatagagtaataatgaaagtatttgaaggagggcaaccccttttctttaaaaggaaagagaataactaatatcaggaaaccaatcataccagtgaatcagagcccagttttgggg

SEQ ID NO: 473576 - DNA, 515 bp, Homo sapiens
gatttttagaagggcgaggggttgtcatgtagaacaaaccaattttaggaggaaaattcaattcagttgcagaatctgttcctgctattcttttcctttcttttattttatctttttgttttttcttttatgctagttgctggaagattgctaatgacaccaggatgaatttttaaatactgtaatttaattattggtaacataatatggctttataagtgattagtggacagatttctgaacatgtgtaggggccagttttttagttgctaacctcatggccttggaggaatccacaagttggattctggtgaatgatttaatgacrgtattggcagcactttgcctaatgagtatgtatcactctggcctaggtaagtcaagctaaagctaaccacattcacatcatccacctagatctgttatacaggaacaaactgtgtagagatcattatgaggccatgttggtgctttaaggcatggagttttcagcgggatattactcatttccatca

SEQ ID NO: 473577 - DNA, 535 bp, Homo sapiens
gcactcttaccctcatttcacagatgaaggaaactgasgctcccattgctaataacttgtccgaagtcatgtagctcattagggaaaggggcagaacttgaaaccaagactccagagtccaggttttgtgcccacatcacgctgcctcccctggatatcccgttacaggtccttcagcccccgagtgcccccaggcatcctggcctcccacatccaactcccccaagctccctccctcccagcccacgccagctctctcgccttcttctccacagagctcagcagcgttgctctgtctgcacacattttcccagatgagaaagaaaaagtcgaaaattttgttttcgtacaagctgccctttttgcctgtggctaaaattcccctcaaagaacaggaataacaaccaaagtcatacaaaagggaagctggcaacttggccctccttcaggaatagtccttaagcttgcaccatggccagccgctgcctgggggctggagagatgaggaggaagaaaaccaagcctcctcggagag

SEQ ID NO: 473578 - DNA, 664 bp, Homo sapiens
actcaggaggctgaggtggaaagatcacttgagtccaggaggttaaggctgcactgagagagagacagagagagagagagagagagagagagagagagagaggaaataggctcaggagcaagcaccttcacatctgagcaggaactagaactaggccttcttgtaccaaccctctggattctctcaactttccaagcytccaaagtttgtttctgtgtttacttcactctctggttaggtggtttctacaggagtctttagaacaagagagaagaccgacatttattacaaccagcaaccaacattaatcactttcccatatcagtacataaagcgccatcgcattctttttgttgaatgcaggttattctgcatgatggatatacccaagtttattttaaccagttcccactcatggacaattaggttattttcaatttatatcaatgagacaaattccttcaagtagaattatgctagggatcaatggtttgcgcatttacaattttacagattttgacaaattgctctccaagccatttgtatgaatttcctctcctgccagcaatgaatgaagtgccagttcccctgcatcgtgaatatggccaaatatttcatgataaaaattcagtgtggagaaagcagaggaaaggtgagatagcag

SEQ ID NO: 473579 - DNA, 664 bp, Homo sapiens
actcaggaggctgaggtggaaagatcacttgagtccaggaggttaaggctgcactgagagagagacagagagagagagagagagagagagagagagagagaggaaataggctcaggagcaagcaccttcacatctgagcaggaactagaactaggccttcttgtaccaaccctctggattctctcaactttccaagcctccaaagtttgtttctgtgtttacttcactctctggttaggtggtttctacaggagtctttagaacaagagagaagaccgacatttattacaaccagcaaccaacrttaatcactttcccatatcagtacataaagcgccatcgcattctttttgttgaatgcaggttattctgcatgatggatatacccaagtttattttaaccagttcccactcatggacaattaggttattttcaatttatatcaatgagacaaattccttcaagtagaattatgctagggatcaatggtttgcgcatttacaattttacagattttgacaaattgctctccaagccatttgtatgaatttcctctcctgccagcaatgaatgaagtgccagttcccctgcatcgtgaatatggccaaatatttcatgataaaaattcagtgtggagaaagcagaggaaaggtgagatagcag

SEQ ID NO: 473580 - DNA, 664 bp, Homo sapiens
actcaggaggctgaggtggaaagatcacttgagtccaggaggttaaggctgcactgagagagagacagagagagagagagagagagagagagagagagagaggaaataggctcaggagcaagcaccttcacatctgagcaggaactagaactaggccttcttgtaccaaccctctggattctctcaactttccaagcctccaaagtttgtttctgtgtttacttcactctctggttaggtggtttctacaggagtctttagaacaagagagaagaccgacatttattacaaccagcaaccaacattaatcactttcccatatcagtacataaagcgccatcgcattctttttgttgaatgcaggttattctgcatgatggatrtacccaagtttattttaaccagttcccactcatggacaattaggttattttcaatttatatcaatgagacaaattccttcaagtagaattatgctagggatcaatggtttgcgcatttacaattttacagattttgacaaattgctctccaagccatttgtatgaatttcctctcctgccagcaatgaatgaagtgccagttcccctgcatcgtgaatatggccaaatatttcatgataaaaattcagtgtggagaaagcagaggaaaggtgagatagcag

SEQ ID NO: 473581 - DNA, 477 bp, Homo sapiens
gggaggggaaggaatgggagcttgacttgttaggggaggccaacatgcgatagaatggttaagaatgtctttcaaaaagccctagaagattacaacaatcttgcttgagtttaacataactacagagtaattcttattaattaacrtcaaacatttttattttaatttttttctttttttatttcttctttttaaaaaaaagggatacatgtgtagaacctgccggtttgttacataggtaaacgtgtgccatggtggtttactgcacctattgtctcgttattttaattttaatagagtggggaccagtgcctttcctaagcctaatccccatctcaattcctctctcagaagcaacctgcttcttctagagagatactcagtgcgtgcgtaagcatacacatatcctgtgtctctccttcttcacttagcagatctcagagattattctaactcagcacaaataaatctctctca

SEQ ID NO: 473582 - DNA, 592 bp, Homo sapiens
ctccagccatcacatctcaattctaggcagtaggaaagaaaaagaagggaaggacaaagtggcccccttcttgtctttagcagcctttctagaaatctcacataatatgtctatttccaatacttgactaagacccagtcacatggccacttctagccataagggaggctgggaagggtgtttcagttagccgcatggccaccctaaatcattcatggaggggtaaagtggatgatctttgagggtcactgccagcaatccagtcccaactccatctgtaagtcacgtttgccttagacaaatcacttagcctcccagaacctcagcttcctcctgtataaaatgagggttataggagttaaggaactgactgtcttggtttcctgggactgagggatttcccagtgcatgggacgatttggtcctccccatagcagttcctacatgcagggctgctgttggaagaattcagcaagattgggtrtgttctcctgctagcctctggtagagaagaattcagcgagattgggtgtgttcccctgccagcctctggtagatgcccactagattagtttctctcctcttcaagaga

SEQ ID NO: 473583 - DNA, 629 bp, Homo sapiens
ggaatttgtttcaaagattataaatgtgaattccatcaatgatttataatatactttaataattcgtagtctgtgtccttccatttttcttttttcacaggatttttttcagtgttcaccattgcctaactttccagataatccattatgtcttgtacattcaccaaacttccttgatattttaatagcaattgcactaaattcatcattaatttggaaaattgtcatcgttaaacattttgtcttctcatctcttatcatggtatgttttttcatttatgaactcattcaacaaatatttacagagttcataccctgttccaggcactgggaatacagtagcaaacaaagcaaaggtttgccctcttggtgcttacagtgtcattggaggaagagacaataaacatacatagcatgtcaggtggtgataggagcatggagaaaaagacaaggggcawgcatagtgcagggttaagggtatctggaggaagggcattccaggaagaagaactcgtaactacaaaggcttggaagtgactgtggctggaacagagtgagaaaggcaaggaatgacgtcagcgttagaaggagcactctgactggcccatgggcaagaaattgggtgggat

SEQ ID NO: 473584 - DNA, 487 bp, Homo sapiens
tcagggacaggctcacagccagtcacacacctgcacggcctggcaccgccaagtgagcaggtacagacacagtgacgggctggcaccgccgagtaagcaggtgcagatgcagtgacaggctcacaggcagtcacacacctgcacctgctggtaccgtcgagtgaccaggtgcagacgctgtgttactcagggacgggctcacaggcagtcacacacctatacgggctgacaccgctaagtgaacaggtgcagacacaatggcactcggggacgggctcacacgcggtcacacacytgcaggaacacgcgcacactacacaccgttgctctcgcctcccggtatcaccttcgaacgcgctggccggccccctcctagcctggtgcagtcggctccgcttctactcagtctcgggtcctcctgggccaacgcagaccctggtgcctccttccttagacgagctaaggtcaagacttctgctgctgcgga

SEQ ID NO: 473585 - DNA, 535 bp, Homo sapiens
tggtgtggaaaatctactgcaagagagagcggagcttttaccaaaaaggctgcatyctcactaatatacagtaggaaacttcacccagggtctctgggtctggaaagaaaattgaactctgggagttccaaataattctttcctcctcctttgcccccttctctccagtaactgccatttccctgaagttccttcttttcttggccactgggacgtgtatcatccacttgcttccttaaatgatcttttctggaccctgatgcacttttgagctgacttccaaaggttttctcttctgtggttaaatggcctattgttttcatcatgcatccattcctgtgagaaccacaaattgaaagttatgggattgagccactctgctgagtattggcaggcgattggaaaaagggagaattacacataaatgtaagccatcagtgaattactctaatggaaaggataagacatgtttatggatagcttgcatgaagtagagtttgcagaatttcaaatagggcattatagagacaaagga

SEQ ID NO: 473586 - DNA, 652 bp, Homo sapiens
agttgaacctcatggtaaccccatgaagtctgggggaagtgcccaaagaggccacaggtggttctggggcatctcagggggcctcagtccagcactcacactcaaggagggatccgggcagggccattgggagaaggcagggtgtccggtggccctcagcagcctgcgggaatgtgtgtgagtgtatgtgtgttaaccatatctataggagtgtacatgggagtgcatctgtgaggcattgtagcctggaggctaagctgtggacccagacatactctgcctgactccagtcccagctctgtaatcttgagcaagtggtttaatctcctcgggcctcagyctcctcatctgtgaaatgggtaggtagaagtagtacctaccttccaggatggttggaagatcaagtgatatacattcaagttccctacatgcagtaagccctctaaatactcactgttgatgtatgtgtatgtgtgtctatctgtctgtctctgcttgtctctcagtgggtgtgtgtctgtcctgtctacatttgtgaggccagcctaggcctggtctctcagcatgcctccctctttcttctccctacagcactgttggtcaccgcaggcctgtcttcctattcaccgtgggcagcagagggatggctgct

SEQ ID NO: 473587 - DNA, 652 bp, Homo sapiens
agttgaacctcatggtaaccccatgaagtctgggggaagtgcccaaagaggccacaggtggttctggggcatctcagggggcctcagtccagcactcacactcaaggagggatccgggcagggccattgggagaaggcagggtgtccggtggccctcagcagcctgcgggaatgtgtgtgagtgtatgtgtgttaaccatatctataggagtgtacatgggagtgcatctgtgaggcattgtagcctggaggctaagctgtggacccagacatactctgcctgactccagtcccagctctgtaatcttgagcaagtggtttaatctcctcgggcctcagcctcctcatctgtgaaatgggtaggtagaagtagtacctaccttccaggatggttggaagatcaagtgatatacattcaagttccctacatgcagtaagccctctaaatactcactgttgaygtatgtgtatgtgtgtctatctgtctgtctctgcttgtctctcagtgggtgtgtgtctgtcctgtctacatttgtgaggccagcctaggcctggtctctcagcatgcctccctctttcttctccctacagcactgttggtcaccgcaggcctgtcttcctattcaccgtgggcagcagagggatggctgct

SEQ ID NO: 473588 - DNA, 457 bp, Homo sapiens
tccctctgtaggacacaataggtctctcattactcacatgccatgctgtgaggaagcccaagcagccacaaggaaaagtgatgtggagaaaaagagatgcccaccaaggcctcagctgtgccatccataccagctcaagagacagacttgtaaacaaagaagctagcagactactctagcccagctgccatccaactgccaccacacaagagatgccaggcacgaactgcccagctgagcccatcaaccccaaaatagtaataaattgttgtttttgagccattaagttctgagatggctgctacccagcaaaatataactggatcagaaatttaatctgtggccrtggctcaagatcttcatgtggcagagtcatgcatggatgatgtgatcagccagcaataatgtgagacgtgcaggccttcatcacactagggaggaggtcgactgtcaagca

SEQ ID NO: 473589 - DNA, 644 bp, Homo sapiens
tccatatgtcacagaactgcaaaattgttaaattcactttaattaggatatattaaggttttacaactgtggcataagtaaatcataactcccagttagaacaggtcatgttaattttcagactatcacattttgtaacacgtttcattggtgtcaatgaaatataaccaaatcatgctttaaagttctgatcatacaataattttatgggattcaactgcatacagttgtactattatacagaaaggtacagatatggctatgaatacaaaattaaatatagactaaaactggatatttgtacatttatatatgttcatataaattacaatctctaatttttaatttaactcagtccctagcctgtgaacagttaccttataacataggaatgtggacagtatctgagaaagtcagaattatgcttgaaaagaaaggccttttagaatgagacacttttttaaaagttaactttttaaaaactttgtttaacgttcaaatattctctgctgttttcttcacctttaagagctcctcagtgacagaaacctctgaacagagctctaataatttaatcacataaagtatgtgawtgtggtcaaataataaatcatcagagagtatgctattgatcatcttagcta

SEQ ID NO: 473590 - DNA, 636 bp, Homo sapiens
ggcaactggttattttatttaaatgcttgattcaaggaaagcatgtctttatatttctgagtccttaataactgctagaatgctaagcctttcaaaacaaaatcaaatattatagtgccacaaactgtttctcttatgcatcatatctgactccaattaaaagatcagagtcctcagagcgacgtattgcaaacaaaaagtccttagtaggtggtggaaagtcaggccaggagtcaaacagaaccaacagagatgacagagatgtgatattcagcacagtctcctcagagagaaaaagcaaaaccacatggccctgctgaaatgccgagttaattctctctcttatctgagcattaaacattacatcgttaaaattgtttcagctagattattgcctcttcaggtgagactctcatttaagaaacacaaacattctcaaagcacattgctgaaacaccataaaaacttaataacctaccattttctttgcactcttctggaggtttagcctttttcgcaagtcgtggatccagccatgatgttgtctttgtgttatggctgaaaagaaaagagatcactctgaacagacacatactaaamggaatcaagtttattccttaagaaaaaaaaagcagg

SEQ ID NO: 473591 - DNA, 336 bp, Homo sapiens
gtttgcatgtcaatataagctagcttttcttctgaactaaagacttgaagcttgaggatgcaggttctgactattcctaatgtgaggataggggcaccgggttcagtgtttgctgctctcattttaaaaaagaaatcacttaaaaatgccctttatagacatgcctccgttcaaattgtgtgtgtgtgtgtgtgtgtgtgtgtgtgtgtgtgtgtrtgtgtgtgttgatgtctatgtttctatgaggtggggagaaatcttgggaagtaagcaaggaaaatacatttctcttccttttgtcctcacctgcttcttccaaatcctttcctcttttcg

SEQ ID NO: 473592 - DNA, 557 bp, Homo sapiens
atgatgtataatacacagacacacctgacatacatacacacatatttcttcccttatgcagttatacaaggatgcagtggtttccttctggagatctaaacacaacacctcttcagccttcctcattccaaataaactcactcatagaaagctctaagtcagacacagaccaaatgaaaaagcccaaaagtgggagggaataagctagggaaaaaggagagtgaggacaaatcttaaacgacttctctggtcagatacctataaaaagtgaactagccatgaaacagctacaacctcccctaactcaatgctttgggttttcgttaccatctgtgcccctgtcatcaccagagaacagtctctgacatatatcaggttacataccctgcagccccacaataacracattaaccggtgtgttttaggctttacagtttacaaaggctttctcagacactatcccatatgctgatatgactataagattaaaccaatgggaacactatcttatttgagaaaaaaattatcacgtatatctctatttatatgcaagttgg

SEQ ID NO: 473593 - DNA, 647 bp, Homo sapiens
gttcagatttaaggaagcaatgattcaacaacattccttgcctaaacaatccttctgtttcaaataagtcaatgttaaataaacaataaaccagtgaccaaattaacatttattctcaatcgtctggggaacttcatattctcagaaaacaagtttaaatacagtttatgatatatatccatttgacaccttacacaaatatgtatactctctgtaaactaagcacatcattattaatttccatatgaaaataaattaagacttgcataggctaacgtaactgactactattcatgaaatagcctagaactagaatcattagccatatggagcaaatgggaagtaaagcactgcatcattttatttttatttacttattctgtgtggacaccttcctaaactctagagagcagagagagtctcaaagatgagacaaggtccttgatgctgtgccatatgaaataacctccacttaacatcatgtttctttagtcaagaagaattgaagaacatgtgctacacaactgtacacaaagtcgcctaagtgaaaagctatcctwagtccatactaatgagacagtattgcttttctctctttgggattagcccaggtaaaaaaaaagactggttatgccacatgcaaattt

SEQ ID NO: 473594 - DNA, 586 bp, Homo sapiens
agcaatggtattttctgtggagctcatttaaagcagttagtgattttgtaaatttgatattaatgagtmtaaagaattatcaaagggcatgtactatttggtcttatattaaatatttcccatgccgatgctcgtgagtattaagcttaaaattgtcctgctgaaagggaacccacagagtagaaaaaatacccgagaatcagagtgctggcttaaagtcctatattctcctctacactgagcttttgttgtgattcattttttctgtgcctccatttcttcatctacaaaatatatgtgactttatactcatagtcacatccctgccttgagaagtgtttaatttttgataaaactgatatggataattcattcaagttttatatacatacaaacatgtatgtgtgtgtgtacacatatatttgccacccactgtcacacctgggcaacttcaatattggaaaacagtcctacaaggaagaaaatgagaaaagaataagaaaaaatagggactaaagtagagaaagaataaataaaggtatctacatggggacttacagacaaaaggaaatattcaccaaaggca

SEQ ID NO: 473595 - DNA, 619 bp, Homo sapiens
ttacaatttttagtaatggaactacctctgccaataaagttcaatagtgtgctgatcactactgagcaaagtgtggtctctggacccacagcattggcatcatctgggaaattgctagaaatgcagaagtgtaggccccatccaagatctactgaatcaaaatcttcattttatacgattcccctgaattattttgcacattaaagtttgaaaagcagaataatgtagctacctcatataaaatatatactgcgtaaaaaacatttcaatattgttaaggaaaatatatttttgttaagaatattaaggattatagtttaccacagtataaactatttaatttctgctcttttaaaaattaagtgcatccaaaatgttcagaattttcactggcagttgaaaaatgtarcacctaggtatttaatatgtatctttcatcacatccattgctttaagaatattttaagcatatatactaggtttttttttaattaacaataccccaacattttgctccatctttttcttaacaattctaatctactcctggcaatcaaaaatgaaagcaaggtttattacttgttttctcgccttgtttacctattgatagctttaaatg

SEQ ID NO: 473596 - DNA, 497 bp, Homo sapiens
ggactttgagggcaaacacttgctaagattgagtgattaaaaggaaaaaaaaaagrtatgaaaaagtggcatgtaattagggcatcagatatttgtattgctaggtcaaattgtgcaaatcatgactgaaatgtgccaaactttcctcaaaatctttttaaacagagtcaatttagctttggagttactcaagcccatgcgtgtcatttctattgatggtaaaaaattattaatcttctctcttcattattattgtgttcctaattacaaaaatatatgttctcctagtcaagatcaaggttcaaacttggtccattcaaggttctcccactgtcccttcttctgtcctcctccagggaagaggtacagtctttaggatatgatatgtttgcagaacaaaatgttgaaaaaattgtaaatgtctattccatttcagacctaggccccactcaggctctgggacaaacgagtccctggacagaggacatgtgaaggtt

SEQ ID NO: 473597 - DNA, 466 bp, Homo sapiens
attttacagcaacctataaaatctcttagacccattatttctctgtgaaaataaaagtttcaatttcattataagtgacagattccatgataagcaataacatatatgtgtagcacttagtcattgccaagaccaaagtgattcacaattttagtcaccattattgatggtttacataatgaataatagtaatagtcaatccctgtttatttttatatgttttaaaatattctaactaaaattgatactacagaaagataagtcatgtttgtcctacagcttcaaatactttccaacaccttacaaaacattaagcaaacatgmaacgttattattaccagtctttcaagacccagctaaagaattcctttataaaaaattatttcaccaccccaacctagaactctccctctgaattccagcagtggctgtttgtctttagttttcttggccattaggtatacac

SEQ ID NO: 473598 - DNA, 571 bp, Homo sapiens
gcaggataacgttaactttttctaatacattgaatgttgcatgtttacaccattcccctgtccattgtcaggtttatttcatgtgtcacttgccatgaactgaaatttgtttggaaattagagggtgaggggcaagtagaacttctctggagcctattccagattcttatatgtctctttaacaggcaagatcacattatattaatagatttgcacatgtgtaatcacatacatacaaaatgtaatcacattccgacactccttgaaaatacattaaaaaatggaaattcrtacatagctacatttcatttgtaggctgacacattgatggctcccaatcaatcacactgttttgcatgaatactgtcttttagtccccttccacatggaccatgggtttgccatgtaaattgctgtggctaccagaagttccataagcacttgcacactggggttagtccttttggaatgctcccttttggaatctagctgctgtgctttaaagaaccctgctagagagacagagaccatctagaggaaaagaatcaatgtaccctagcccagccaccag

SEQ ID NO: 473599 - DNA, 581 bp, Homo sapiens
tacatatgtgcaccacaacaccaggctacctaattaattaattaattgattgattaatttttgagacagagtcttgctttgttgcccaggctggagtgcagtggcaatctcggttcaatgcaacctccgcctcctgggttcaagcaattccctccctcagcctcccgagtagctgggattacaggcgcccaccaccacgcccggctaatttttttgtatttttagtagagacgaggtttcaccatgttgatcagtgatcctcgtgatccaccttgcctcagcctcccaaagtgctgggattacaggcgtgartcacctcgcccggccaattttttatttttgtactgtttggtcttgctatgttgcccatgatgatcttgaactcctggcctcaagggatcctcacgtctgggcctcccagtgtgctgggattacaggctgggccattgtcctgggcccagagttaattatttttaaatatgcatctcacctcactggcctcagccaccccgaagcaaaagcttcctggagagtgacagcctcaacccaatagagggaggagaaagggcgttcctattgca

SEQ ID NO: 473600 - DNA, 624 bp, Homo sapiens
tactgaatgttatcagacactactgccaggcattggggataagaaagtgtataaaggaggcagtctaggcatcaatgaaaaggagtataaaacaaggatagagttaaacatgctaaaacaataaatacggatcagattgttggcaaaagtatctaaatatcctatttagatttggcatgctgatatgcacaaatagaatttagcagcatttatgtaaagtatcaarcatgaactatttttctcccctaaatctgattaacttgcatcatttgaatctattctatatttctagatattttgcaggcatttcttcaaacaaacaaatagacaagaacatcctcatgaatcttttcctttgagaaataaactaatatgtgttatcattcatctttcatcattgcaactacctgcagcaggtagtagtcaaaccctatccattatcttcccctagagcagtgagtgtttctcaacctagcttaggaggtcttttacaaatccccatgcctaggctttatgccaggccgattacatcagagtcctgaaggaagtgggggtacaggtagccatcaatatcttctaaagctcccacaagagtccaatatgcagctaagatacagcgccatt

SEQ ID NO: 473601 - DNA, 624 bp, Homo sapiens
tactgaatgttatcagacactactgccaggcattggggataagaaagtgtataaaggaggcagtctaggcatcaatgaaaaggagtataaaacaaggatagagttaaacatgctaaaacaataaatacggatcagattgttggcaaaagtatctaaatatcctatttagatttggcatgctgatatgcacaaatagaatttagcagcatttatgtaaagtatcaagcatgaactatttttctcccctaaatctgattaacttgcatcatttgaatctattctatatttctagatattttgcaggcatttcttcaaacaaacaaatagacaagaacatcctcatgaatcttttcctttgagaaataaactaatatgtgttatcattcatctttcatcattgcaactacctgcagcaggtagtagtcaaaccctatccattatcttcccctagagcagtgagtgtttctcaacctagcttaggaggtcttttacaaatccccatgcctaggctttatgccaggccgattacatcagagtcctgaaggaagtgggggtacaggyagccatcaatatcttctaaagctcccacaagagtccaatatgcagctaagatacagcgccatt

SEQ ID NO: 473602 - DNA, 466 bp, Homo sapiens
tttataaataacaaggagggtgaggtccatttttaaagtctaagctataaaactatttctttaaaacaaacagcaatcaattcatttctttaaaattagtcaacgtgtatttctttgtatccaagcccacagcagcagaactcccaggggaccccaaggcttcagccatggtgtccaggaggatagtaggaccctgaaragggatggagagaagcagaaggagagaagatgcccagcatgggacctgctgagcccagtgtcaagatgcagcctccagttacagcacaaaaccagaaggcatcctgttagccaaaggtaagtaaatattttgctacataaattattcttactcgctgacggatttgatagagatttcttgataagagttctcgaatttcatcagtttcactggacgtgaccttccttattttttcttcacgacaatcactgtgaaagtttagaaaaa

SEQ ID NO: 473603 - DNA, 591 bp, Homo sapiens
tgtttaaacatttttcccaaatgtggggctaggaagcaagataaagaattatgcaggccaggcgcggtggctyacgcctgtaatcccagcactttgggaggccgaggcgggcggatcatgaagtcaggagatcgagaccatcctggccaacacggtgaaaccccgtctctactaaaaatacaaaaaaaattagccgggcgtggtggcgggtgcctgtagtcccagctacacgggaggctgaggcaggagaatagggtgaacccaggaggtggagcttgcagtgagccgagatcgcgccactgcactccagcctgggcaacagagcgagactccgtctcaaaaaaaaaaaaaagaattatgcagacagtttcatttcatttatgtttggacggggaagaaagtcagaaaatagatgggaaggaaacatatctaaatgttaacggtggttgtattccatgggatcatgggtctttcttgatttttcatgttttgccacattctaaattttcaccagtgggcatttattatttttgcaattagacaggaaagagcctccaggaggaactccaaatacccatcctttatttaccc

SEQ ID NO: 473604 - DNA, 591 bp, Homo sapiens
tgtttaaacatttttcccaaatgtggggctaggaagcaagataaagaattatgcaggccaggcgcggtggctcaygcctgtaatcccagcactttgggaggccgaggcgggcggatcatgaagtcaggagatcgagaccatcctggccaacacggtgaaaccccgtctctactaaaaatacaaaaaaaattagccgggcgtggtggcgggtgcctgtagtcccagctacacgggaggctgaggcaggagaatagggtgaacccaggaggtggagcttgcagtgagccgagatcgcgccactgcactccagcctgggcaacagagcgagactccgtctcaaaaaaaaaaaaaagaattatgcagacagtttcatttcatttatgtttggacggggaagaaagtcagaaaatagatgggaaggaaacatatctaaatgttaacggtggttgtattccatgggatcatgggtctttcttgatttttcatgttttgccacattctaaattttcaccagtgggcatttattatttttgcaattagacaggaaagagcctccaggaggaactccaaatacccatcctttatttaccc

SEQ ID NO: 473605 - DNA, 591 bp, Homo sapiens
tgtttaaacatttttcccaaatgtggggctaggaagcaagataaagaattatgcaggccaggcgcggtggctcacgcctgtaatcccagcactttgggaggccgaggcgggcggatcatgaagtcaggagatcgagaccatcctggccaacacggtgaaaccccgtctctactaaaaatacaaaaaaaattagccgggcgtggtggygggtgcctgtagtcccagctacacgggaggctgaggcaggagaatagggtgaacccaggaggtggagcttgcagtgagccgagatcgcgccactgcactccagcctgggcaacagagcgagactccgtctcaaaaaaaaaaaaaagaattatgcagacagtttcatttcatttatgtttggacggggaagaaagtcagaaaatagatgggaaggaaacatatctaaatgttaacggtggttgtattccatgggatcatgggtctttcttgatttttcatgttttgccacattctaaattttcaccagtgggcatttattatttttgcaattagacaggaaagagcctccaggaggaactccaaatacccatcctttatttaccc

SEQ ID NO: 473606 - DNA, 591 bp, Homo sapiens
tgtttaaacatttttcccaaatgtggggctaggaagcaagataaagaattatgcaggccaggcgcggtggctcacgcctgtaatcccagcactttgggaggccgaggcgggcggatcatgaagtcaggagatcgagaccatcctggccaacacggtgaaaccccgtctctactaaaaatacaaaaaaaattagccgggcgtggtggcgggtgcctgtagtcccagctacacgggaggctgaggcaggagaatagggtgaacccaggaggtggagcttgcagtgagccgagatcgcgccactgcactccagcctgggcaacagagcgagactccgtctcaaaaaaaaaaaaaagaattatgcagacagtttcatttcatttatgtttggacggggaagaaagtcagaaaatagatgggaaggaaacatatctaaatgttaacggtggttgtattccatgggatcatgggtctttcttgatttttcatgttttgccacattctaaattttcaccagtgggcatttattatttttgcaattagacagraaagagcctccaggaggaactccaaatacccatcctttatttaccc

SEQ ID NO: 473607 - DNA, 670 bp, Homo sapiens
ccctccctgaagcttgaatagcacccacccgtgccttctccatgccrgcccttgggtctgccgggaccactgccatgcttttgatggacacggccttgtagcgtctatatcctcatctgtgaaatgggaattccacagcctccctttcgcaggctgcttgtaatagttgccattaaacctcttctgaactctaaagtgctgtatcaatgtaaggaccatcatcaacatcattgtcgtcctcatcgtgagtctttccaaattcacctcctgctgccccagcacgggagtgtctgagactgcaggtttccttgatgggttcctggggcttcccttgtggaaatttgagttctgagccttctgcacttttccatcccccagtctggagtcaacctgtatttttcattttccctctgcaagatgtcagcccataggagaggcctggaggcttgcaggggaaatgggacgatgtttgaaggaagcccccgtgcctgtgggagcatgcagcctcctccgtctttttgtctgccaggcaggggagtaatttgccgttatgtactgggcagtctgggagctggactctcagatgaaaaatgcttgttcaagcacagacagccaggcatggctcaaatcagagcatcgatttagcaagcagctctgctcaaacagccag

SEQ ID NO: 473608 - DNA, 584 bp, Homo sapiens
ctttctctgccccttttgttygacatgtggggggttgctggggaagctaattagaatacaggttcctgctgacaccccacccccactcccttccttcatcaagatcactagtggtgagcctttaaatgcctgtaagctgtccgaggggttcttcctaaattaaattaaatttttaattttaattacttaatttttttgagatgggatcttgccgtgttgcccaggctagtctccaactcctgggttcaagtgtcctcctgcctcggcctcccaaagtgctaggattacagatgtgagccgccactgttggtctctaggggttcttatgcacctagaatttagagactcattgctccaagcttcattgaatctttcctgaacagtcttgtgataggcgggataactcccacccctcagatgctcacatccgaatccctgggacctgcggatatgttgccttatacggtaaagggctttgctatgtgatgaagattgaggaccttgaggtggggacagtatcctggattaccagggtgtagtcactgtattcatgtaagtccataaaagtaaggaacctgtcccag

SEQ ID NO: 473609 - DNA, 567 bp, Homo sapiens
tcacctctgccgtgggccccccagaggggaggtggttaatcagggtgatgatgatgaagatggcaatgacccctttggggtgcacagccctttactactgacacctcctattcctgcttgatatctcatttgaagtgcacagccctttatagttgacatcccctattcctggttgatctcatttcatcttcacagccatcccaggggttcaggggttatccttattttccagggaaggctcggagagagtcaagaaatgcatcrcccaaatggccaccagtacagacgctctaacaccggcatgactgattccatcacagagctcaccccatgtagtgggagttagggattttgtggcttctcatcaagaagccttttgtcctccataaaacaggtgtgacatgccttcccagttggcctcccgggcatggtgagaacaatcaaagagacatggtggatggggcgggagggcatgaactgggaggagccatctgatgggagaaagggtcaagggtggcacgactgcaactgacctccagctaattcactccacctgcctcaggacaa

SEQ ID NO: 473610 - DNA, 375 bp, Homo sapiens
tgtttttgagacaggctccctctgttgcccaggctggagtgcaatggcaagcagcctctacctccccggttcaagcaattctcctgcctcagcttcccgagtagctgggactacaggtgcccaccaccacgcccggctaatttttgtacttttagtagagacaggtttcatcatgttggccaggcttgcctcaaactcctgacctcaagtgatctgcccgcctcggcctcccaaagtgctgrgataacaggcgtgagccaccgcgcccggccacatctctgttgtttgaagccaccccatctgtggaactctgttaaggcagagtcatagggaactcacacaccctgtaagctcagcgtgacccggccaccggga

SEQ ID NO: 473611 - DNA, 402 bp, Homo sapiens
acttccacactgtgtaaaaaaccaaatggaggcagtggctcacacctgtaatcccagcactttgggaggctgaggcaggtagatcacttgaggtcaggagttcgagaccagcctagccaacatggtgaaaccctgtctctactaaaaatacaaaaattagctgggttcagtggcgtgcgcctgtattcccacctactygggaggctgaagcaggagaaccgcttgtacccaggaggcggaggctgcggtgagccgagatcatgccactgcactccagcctgggtgacaagtgagacttcatctaaaaaaaaaaaaaaagaaaaaaaaaaaaacaaaccaacaaaaaaaactgaatgggaacttttattgagtacctactaaaagttaggcactatagcagat

SEQ ID NO: 473612 - DNA, 627 bp, Homo sapiens
ttaaattccaggtaaaagacaagaagatatgatagtatgtgcttaaaaatacgtttttcagactggcgcagtggcccacgcctataatcccagcactttggaagrccaaagcgagcggatcacctgaggtcaggagttcgagaccagcctggccaatgtggtgaaactccatctctactaaaaatacaaaaattagccagatgtggtggtatatgcttataatcccagctactcgggaggctgaggcaggagaattgcttgaacctggaaggcagaggttgcagtgagccaggatcgtgcctctgcactccagcctgggtggcagagcaagactccatctcaaaaaaaaaaaaaaatgtttttcaatatgcaggactagggaaagaggaagaggaagacaggtggatagaagacaggaagctggtgaccagtgagggatacaacctttgggatagcatgcttatcctcagtttacagagaaaaccagggctcaatgtaacttttaaaacatgtctaggaatagtcagagccaagactcaaattcagacttgtctgactccactataccatcctgagaaactagagaaaagacagaaaatgaaaacatgacagggaaggagagagcca

SEQ ID NO: 473613 - DNA, 627 bp, Homo sapiens
ttaaattccaggtaaaagacaagaagatatgatagtatgtgcttaaaaatacgtttttcagactggcgcagtggcccacgcctataatcccagcactttggaagaccaaagcgagcsgatcacctgaggtcaggagttcgagaccagcctggccaatgtggtgaaactccatctctactaaaaatacaaaaattagccagatgtggtggtatatgcttataatcccagctactcgggaggctgaggcaggagaattgcttgaacctggaaggcagaggttgcagtgagccaggatcgtgcctctgcactccagcctgggtggcagagcaagactccatctcaaaaaaaaaaaaaaatgtttttcaatatgcaggactagggaaagaggaagaggaagacaggtggatagaagacaggaagctggtgaccagtgagggatacaacctttgggatagcatgcttatcctcagtttacagagaaaaccagggctcaatgtaacttttaaaacatgtctaggaatagtcagagccaagactcaaattcagacttgtctgactccactataccatcctgagaaactagagaaaagacagaaaatgaaaacatgacagggaaggagagagcca

SEQ ID NO: 473614 - DNA, 575 bp, Homo sapiens
taacttcatcacagttttaggttgaatcatctgggctttttggcagctacttgaaaggcaaatccatggcttgctgtgtgatattttattagaatccagaagtaatgagagatatcacagactcaagatgccattgatctcagatgggtgaaaccacttcggctagtaaggagtcggttatccacagtgattgctggaggaggagtatttcacctgaggctccaggagacagttaggccaagactacttacatattaaaaattacataatatgtacatattacactcaaatttatgagtgataaattcaacaagcagcaaacagccaatattgaggaatccttccataactaatatttagacctttcataatcttaaggtaaayaatgtttgatgatgatgatcaagtgctacagaaaggatttgggaaagttcagaagcagagggctgtattgttaagcctcctgaccacattgcagattgatggaaaagagatgtttgctcataattcaaggctaaagaccatataatagaccagcgaagaagacagcaaagtgtttggaaatacagatcaag

SEQ ID NO: 473615 - DNA, 575 bp, Homo sapiens
taacttcatcacagttttaggttgaatcatctgggctttttggcagctacttgaaaggcaaatccatggcttgctgtgtgatattttattagaatccagaagtaatgagagatatcacagactcaagatgccattgatctcagatgggtgaaaccacttcggctagtaaggagtcggttatccacagtgattgctggaggaggagtatttcacctgaggctccaggagacagttaggccaagactacttacatattaaaaattacataatatgtacatattacactcaaatttatgagtgataaattcaacaagcagcaaacagccaatattgaggaatccttccataactaatatttagacctttcataatcttaaggtaaataatgtttgatgatgatgatcaagtgctmcagaaaggatttgggaaagttcagaagcagagggctgtattgttaagcctcctgaccacattgcagattgatggaaaagagatgtttgctcataattcaaggctaaagaccatataatagaccagcgaagaagacagcaaagtgtttggaaatacagatcaag

SEQ ID NO: 473616 - DNA, 533 bp, Homo sapiens
caatgtgttatagagcatgctatatggaaggtggtgcagagaagagagaaggtaattttttaactgaatcctaaagaatcagaaaatgtttgctaaaggagggggtaagaaagacattacaatacataaaggtggaaagccttgaaatggaattccagcttaccatgtgaacttgtcagactgctttacyactgtgtacctcacaggttgttttgagtattaaggaaagttaatgtagatgaagtgttgaacagagtgcctggtatccaggaggcctctcatgaagggcatttgttattgtgaactgctcagaaactgatgtgtagttctggctcatggtatgtttatggaagaaggcgaggaggggaaaggagacttgaaagttgatcaggatggacaggtgagttacagccaaattgtgaggatcttttatgctgtactaagaaataaagtattttttgtagaggcaatagaaaccattaaaagacttaagcagttgagaaacatatctcgatgtagaaagaccattcagg

SEQ ID NO: 473617 - DNA, 605 bp, Homo sapiens
tgatttctaattataaacaatagagaccagaaaacaatgaaacatgtttaaagagttgaaagaaaaaaaaatcaactcagatttctaccttagtgaaagtattgttaaaaattaagaakaataaagacattttcagatatacagaagccaagaagatttgctgccagcagactagcacttcagaaatagctaaaggaagttctttaagcagaaaggaaattaagaccagatagaaactcggacttaaggaaagaatgaagacctggaaatggtaaacatggtggtaaacataaaagactaactttttttccttttatttctttacaaaataacttctggttaatgcagacaaaaatcccattataaatgggatttttaatatctttgagatgtgtgatgctgacaccttttctttgtattggtaatttatgctttgtgacttttctttcttgagtatttctaaggttttaataattttgttaatcctctcaaaaacctactttcggctttatcaattttatctgttatagtcctttattgcattcatttgtgaatttatttttattattttcttccttctatgcatttttctatttaatttctat

SEQ ID NO: 473618 - DNA, 620 bp, Homo sapiens
aaaggtcatgtcaactcaacgctgactgacgacaaccacagccagccaattaattaatgctagggacacaatgtggatttttgtttttacaactaaataccacgtatctagcaacctaatagacctttctccagagaaatataaccctaatattatgttagattattatgaccggaaggaagaagctataaatctactttaggaaacaaaaatacattttatctgattctattttcctaaggagaagggagaacgaggggaaaaattgatttcatccaagtatgtccatgttaaaaacatggaaggcagccactactgatgaccattaggcaaactraattgctgtaaactgtctcctcttagttaacattgttactattatttttcagtccatatggagaaatgaacttgaattttttctctgtggaaagcgtggatcacactgtgagctctgcacctatgattcttgcatcacctatggatctcaggaagtgcctgaatccttcattagactgtaaattgccttatattttacaaggaatcaaaatttttgattctctacagttcacctgtgagcttcaggagaaaaggtattttcagaatgaagcattcttccaaac

SEQ ID NO: 473619 - DNA, 620 bp, Homo sapiens
aaaggtcatgtcaactcaacgctgactgacgacaaccacagccagccaattaattaatgctagggacacaatgtggatttttgtttttacaactaaataccacgtatctagcaacctaatagacctttctccagagaaatataaccctaatattatgttagattattatgaccggaaggaagaagctataaatctactttaggaaacaaaaatacattttatctgattctattttcctaaggagaagggagaacgaggggaaaaattgatttcatccaagtatgtccatgttaaaaacatggaaggcagccactactgatgaccattaggcaaactaaattgctgtaaactgtctcctcttagttaacattgttactattatttttcagtccatatggagaaatgaacttgaattttttctctgtggaaagcgtggatcacactgtgagctctgcacctatgattcttgcatcacctrtggatctcaggaagtgcctgaatccttcattagactgtaaattgccttatattttacaaggaatcaaaatttttgattctctacagttcacctgtgagcttcaggagaaaaggtattttcagaatgaagcattcttccaaac

SEQ ID NO: 473620 - DNA, 653 bp, Homo sapiens
caattttaccacttgctagctgtctctccctggccaattaattgagcttctttgagcctcggtttcttcatgaataaaatgggattaataagacctaataggattaccatgagtagtaaagatgataaatgcacatgtacrtaatgtctaggaaatactcaaaatggaaatggaagctaatgttattaattaccattagcaacaatgcatacatgtgattatagtttggctctgtgtccccactcaaatatcattcagattgtaatccccatgtttggtcaagggaggaacctggtgagaggtgactggatcatgggggtagtttccccaatgctgttctcacaatagtgaatgagttctcatgagagttgatggttttaaagtgtggcacttcccccctgctgtctctctcctgccaccatttaagatgtgccttgcttccccataaccttctgccatgattgaaagtttccagaggcctccctagtcatgtggaactgtgagtcaatgaaacctttttttctttataaatgactcagtctcaggcaattctttatagcagtgtgaaaatggactaatacaacatgtgaatatgtaaaattactgtcatcaaatatccataatgccaattggactgccttcaaaatatgtgg

SEQ ID NO: 473621 - DNA, 653 bp, Homo sapiens
caattttaccacttgctagctgtctctccctggccaattaattgagcttctttgagcctcggtttcttcatgaataaaatgggattaataagacctaataggattaccatgagtagtaaagatgataaatgcacatgtacgtaatrtctaggaaatactcaaaatggaaatggaagctaatgttattaattaccattagcaacaatgcatacatgtgattatagtttggctctgtgtccccactcaaatatcattcagattgtaatccccatgtttggtcaagggaggaacctggtgagaggtgactggatcatgggggtagtttccccaatgctgttctcacaatagtgaatgagttctcatgagagttgatggttttaaagtgtggcacttcccccctgctgtctctctcctgccaccatttaagatgtgccttgcttccccataaccttctgccatgattgaaagtttccagaggcctccctagtcatgtggaactgtgagtcaatgaaacctttttttctttataaatgactcagtctcaggcaattctttatagcagtgtgaaaatggactaatacaacatgtgaatatgtaaaattactgtcatcaaatatccataatgccaattggactgccttcaaaatatgtgg

SEQ ID NO: 473622 - DNA, 557 bp, Homo sapiens
tggattaaggatctcaaactattcacmagggctcattctcactttctctttctctctccctccatctatttatctgtctatctgtctatctctctatctgtctatctatcatctctatctgtttacacctctttttctctgcctctctcagatctacttctttctgtcttttgtttgttttattttgtttaagttaacctcattctctcttgccatagatggaccctgttcacatcacaggaaaaatcgtcacggacagcccaaccctacatccatacagttcacaatccatccaggtaatttattcaaggaccatgattggccctatttagagtgtatgcccacagttttgataagtatttgtggacaggttatcacaattaaccagatctgcgtatgtgtacacgctgaaatgatatttacactaaaaatacagaggtctggaaagaaaatcatcctcaaccaaaaacccaagatactgggtagaaaagtacaatgttccatcactctgacagacttgtcttctctgcttgagggcattcccagatattcatggg

SEQ ID NO: 473623 - DNA, 557 bp, Homo sapiens
tggattaaggatctcaaactattcacaagggctcattctcactttctctttctctctccctccatctatttatctgtctatctgtctatctctctatctgtctatctatcatctctatctgtttacacctctttttctctgcctctctcagatctacttctttctgtcttttgtttgttttattttgtttaagttaacctcattctctcttgccatagatggaccctgttcacatcacaggaaaaatsgtcacggacagcccaaccctacatccatacagttcacaatccatccaggtaatttattcaaggaccatgattggccctatttagagtgtatgcccacagttttgataagtatttgtggacaggttatcacaattaaccagatctgcgtatgtgtacacgctgaaatgatatttacactaaaaatacagaggtctggaaagaaaatcatcctcaaccaaaaacccaagatactgggtagaaaagtacaatgttccatcactctgacagacttgtcttctctgcttgagggcattcccagatattcatggg

SEQ ID NO: 473624 - DNA, 633 bp, Homo sapiens
tgctcattgtccatttaatccactctgagcacccagggtcattcgtggaaaccctcctcctttcaaaatcattcccaagagaggatttcttctgtcagcaaacacaacaagaaaccattgaattaagaggtaagactgccacccaattattttgggtccttgattccactggacagaaacacataaacaggttgaattatgtgggctggagtgtttgttcctagtaatcagagagaggtatgtctagaacccagtgttaacctaggttcttaccaagacccgagatgagacgaaggtttttttggagataatttattttgggagctggggactggaaggagtaaaagagaaatagggaaaaaggtaatccaaggatgcactgttgagctgatcaccactgtgagaagctgggatctgatcctgtagggcccctctgaagacctgtataggatgcaacccagaattgtctgcttaaggagcaaaagaggagaatatccaccagctcctgtctcccattggtcaagagtaggatgactttcaactccctcccaatttaagacttccatcgcatagtttaaaccctaacttacagaatrtcagatggaactagaggaggaatggaagccacccaga

SEQ ID NO: 473625 - DNA, 610 bp, Homo sapiens
gggtacatttccagtgaagatcgtgtgcctattctgagcggttcagttcatagatagatcacttaagcaaatctttcagttatatcagacccgcrttcccatttctgctgacctgacagtgtgaattattgcttggattttctcacagtttcagcaaggtctatggtgagctctagtctaattaaggaagacaaagaattataattttagtgttcctctcacctataagcttttccttcacagcaaacactgagctcatcaaaggagtcttagctggatttacacaaaaatgataagacttagaagctttctttaatttatactctacaatatgtataaaatcctagatcttaatagatgcacagagagaatacctttaactgtgagtccacagttgacatctgaaattcactcaagtcatcatgtgttcttttatttttagaaatgcatcttgagataaagttatcaaaaccttggaagccccaagggttgtcaagcctttagcaagtcctcatccccttttcaagtcttcacctcatgtattacaagaaataaatattcagccacattccagagtcacctaatcatcttcacacaataaccctgtctt

SEQ ID NO: 473626 - DNA, 440 bp, Homo sapiens
aggactggagatataaatataggagttattagtatttaaatggtgatattaaccccagatgcaaatggtgtcaaagagagaatataaggtgagaagaaggatgcacctaaagctttggacagatttaacacagaactgccacggagaggcyaaagatgcatggaagagcagccaagcagttaatagaaaaacaaagagattttgcagctcagaggccaagaaagaaagagcttaaaaagagtgtcaacagtgtcaaatgctgataaaaggctagatgagaagaggcctaaggatctagtgcagggaggtgattattgcctaccctgagatggtttctatggagttaacaggtacatcaggaaaaatgagaacatggaggcagcttgtctgaaaagaagatggagagcaacccaagtctttcattctatgaccgccaacga

SEQ ID NO: 473627 - DNA, 576 bp, Homo sapiens
ccccacgtggagaggcaggtacatgaccaccctctgacctcctgccagtgcctcccattggccaaacccagcctggagcagaggacaagggtgcaatggattccatgatgatcagccacccagggccactggatggaatggtggtgcagagaggattttgatggggcaaatgcaaggtaagttgcatgagactatagacagtaccttagtcagtcatgaactttcctaagtgaagagtgaagtttggtgttgttgggtttcatttattttggttgaggaaaggtcagaggacatgcattgacagarggaagtagaaaaccattccagattagtatgttgtcacacattgaaggcagcacaagcttgagtgtgagagagctagcatctgggtttggctgaggagaagtgtaactagaacttaggtggatagactgaaaaagaagaggtgaagagcttgtggccagatgtggcacattgttgagctcacaaacaacaggagtccctgcaggttcttgagtacatttgtaatatgaaaagagtgtttgagagcattactcattacttctacctgcatgg

SEQ ID NO: 473628 - DNA, 586 bp, Homo sapiens
gctccagaagccccacgtggagaggcaggtacatgaccaccctctgacctcctgccagtgcctcccattggccaaacccagcctggagcagaggacaagggtgcaatggattccatgatgatcagccacccagggccactggatggaatggtggtgcagagaggattttgatggggcaaatgcaaggtaagttgcatgagactatagacagtaccttagtcagtcatgaactttcctaagtgaagagtgaagtttggtgttgttgggtttcatttattttggttgaggaaaggtcagaggacatgcattgacagagggaagtagaaaaccattccagattagtatgttgtcacacattgaaggcagcacaagcttgagtgtgagagagctagcatctgggtttggctgaggagaagtgtaactagaacttaggtggatrgactgaaaaagaagaggtgaagagcttgtggccagatgtggcacattgttgagctcacaaacaacaggagtccctgcaggttcttgagtacatttgtaatatgaaaagagtgtttgagagcattactcattacttctacctgcatgg

SEQ ID NO: 473629 - DNA, 329 bp, Homo sapiens
ccaaagtttgcagcatccctgagaatatgtcttttgcctattataaccttatgactcattctcctgtattggctgccagaaaatcaatcagggatcctctaaccttctgtgcttcccttgtagaattgctgggcttctgacttcagaagtcgcacgctgagastgatagcaccaccttggcaattcatcaggtggataacaaacacgtatttctgcactcttctcacagaggactagtttcacagtgtggctagcaactagagctacattgcatttgagttttgtggtatttcaatttttacctaaaaagtcatgttggtcatatgtaa

SEQ ID NO: 473630 - DNA, 664 bp, Homo sapiens
gttttatgttaagtttgggggaaaacacagatagttgtagaaaacataattggttaaaagtgtatagtctaatggtaatagactaaggcagggaaacccagcaaggcctgtctgctcagattcttcctggctcctctgtggtagtactccttccctccaggtacagggcaggataactgtcgcatgagggtctgatgatcaattttcagaggaggtaggtcagagagtgatctttctaggttttatggtttgctctaggggagtaagaggagtgggagacagaagagcaggagaaggtcagagagaccttcttgcttcrgaggctttcctgtctccttcagctcaaaaatactcagcatgtcaaggtatcatattttggggtatcatgttctgagccctgatcccaccctggaagttattttcctcatctgtaggatgagtgtgtttaaatagaagtggtagatttcaaagacattctagcagtagatttctttccttaagtcaacctttaattcatgttcaatatataaaaacacataagaatggaagcactgctctgcttggtgcagagggtagggactgggtaaaaggctctttgtagaacaagtgtggaaaacattaaccaagctaagctattcacagagctccatgaacctttgttatt

SEQ ID NO: 473631 - DNA, 534 bp, Homo sapiens
tgctcaagatatttacttctgcaaaaattaaaagtataatttatttatttattttgaggcagagtcttgctctattgcccaggctggagtgcagtgacacaatcttggctcactgcaacctctgcttcttgggttcaagcgattctcctgcctcagccgcaccagtagctgggattacagacatgtgccactacccccaactagtttttgtatttttagtagaaatgggattttgccatgttggccgggctggtctcgaactcccgacttcaattgatccacacacctcatcctcccaaagtkctgggattacaggtatgagccactgtgctcagccaaaagcaaaaatttttgatgtctaggaggcacctctaaaaagtttattgtaaactaaatcaaatattttcactgaacttcttcttgaacatttttagagagaaaatcaaaatcctactgataatgaaagactgttttttgtgatcactaaagcaactgctgtctctgatctgatcccaccttctctctaatgcccat

SEQ ID NO: 473632 - DNA, 604 bp, Homo sapiens
ctggggagaggaaatgaatcacacaataaaactgaacgtgctcacctccctggctgccacrtatctgtgtgcaggctggttcctgcatccccagcatgtctgcctggagccattaactagtttgcgtgggctggagagaatgtgggtttctcattcttccagataatcacttgatgcgctatgttcctattttctccagtttatggcagatgctataatatatagagggaagcaatgtggtcttggagagaagatggtggagaagctgcttagaggtgaaaatcactaaggtcttggctccatttcttccttctccactgattccttggcatctttacctgtaaactggggaggctggcaactgttcacatctctctctcttgcatatgcaggctgttaggctggaccagcaattcctatcatttatgaactgcctctgtacttcactacccgccttcagtctttaggggtaaatcctgagtaaccgggagttaattatgtcagaattcagaaatctatgtgagccttattttgctcacttgaagtaatctcttcccaccactcctccttctccacttatttgaatgctatttacccttcagtc

SEQ ID NO: 473633 - DNA, 462 bp, Homo sapiens
acattctagttattcttgagaactacaagcaagaaggcagagagaactgggttggttcaaggccacccagacaattgtcctgtagtaagaacttcaatccttcaatattgatatagcctacccctgagagaatgcttccaggaccaccagactggaatctatgcctgaaaacttaatgacaatcaaacaaaaaatataaacaaatgtaaccgtgaaggtggagaagggatttggcttcaaagtgtaacagttattcctggaatttctttttaatttcttaaaattctagcaaacttctgatgagtaaaaatagccctcactggtgtagcaatcatccacagaaaatgctaccaactagcaaagacattggggaagaaaggagtgttcagcagcaatcatgttcaccccctcagggcaaaaaatgccaacttgagckatccaccaaatgtaaggaagccacag

SEQ ID NO: 473634 - DNA, 507 bp, Homo sapiens
gttcagtgagccatgttctgtaattatctttgttttgttgacatagagtctgagacttgagcaatgtgctcgagatcacactttccataagtggcagggcatggacgtgaactaaggttagtctggcactgaagtctctgctcttagtcattgttgtatcttgcatcctgactgacggacggtagatgggaggaatgtaggacatatgagcacgggcagatggaagaaagaatcaaagagactcaattaaaccctcaaacaaacagtttaccttgtgatccagatcataaattcagagcgagagatttataaaccrtattctatttaaagggaaccctggaataaacctcattgtattctctgtatttcttccagatcataatatttttaaactaaaacaaacttattaaaattaaaacctgttaaacaaaggtttgctgaactacaattgagtgagccaaggataggccttgcataatgaaaaggtgagagggttgcagaaggtaa

SEQ ID NO: 473635 - DNA, 603 bp, Homo sapiens
cctgggactgtttgacgtatgaggattgattcaacagtgtctggtatagaataagtgctatataaacatcagctcaattattattatattcttgccatgtatctggcagaataaaagattaaattttacactttctctgtcagttcagtgagccatgttctgtaattatctttgttttgttgacatagagtctgagacttgagcaatgtgctcgagatcacactttccataagtggcagggcatggacgtgaactaaggttagtctggcactgaagtctctgctcttagtcattgttgtatcttgcatcctgactgacggacggtagatgggaggaatgtaggacatatgagcacgggcagatggaagaaagaatcaaagagactcaattaaaccctcaaacaaacagtttaccttgtgatccagatcataaattcagagcgagagatttataaaccatattctatttaaagggaaccctggaataaacctcattgtattctctgtatttcttccagatcataatatttttaaactaaaacaaacttattaaaattaaaacctgttaaacaaaggtttkctgaactacaattgagtgagccaa

SEQ ID NO: 473636 - DNA, 345 bp, Homo sapiens
tgaaaaggtgagagggttgcagaaggtaatgagcmgctgtgtggcatggcaggggcaggctggtggtggttggggtaggaggaggtggatcaacaactttgcaaatagagtgaacggtatgtatctcttcagccctctctccttctttcctcttctgtcgattcacaagacagcagagccttagtgagcaccagtttacagtcaagttttctgggaagccaactctgagatggaatttaacaggagatttattagaaagttccttgggatcaactctgatgaaaggtgggaaaaggaggccagattgaaaggacgaagaaattgaataggaagcaagacccatag

SEQ ID NO: 473637 - DNA, 345 bp, Homo sapiens
tgaaaaggtgagagggttgcagaaggtaatgagcagctgtgtggcatggcaggggcaggctggtggtggttggggtaggaggagrtggatcaacaactttgcaaatagagtgaacggtatgtatctcttcagccctctctccttctttcctcttctgtcgattcacaagacagcagagccttagtgagcaccagtttacagtcaagttttctgggaagccaactctgagatggaatttaacaggagatttattagaaagttccttgggatcaactctgatgaaaggtgggaaaaggaggccagattgaaaggacgaagaaattgaataggaagcaagacccatag

SEQ ID NO: 473638 - DNA, 652 bp, Homo sapiens
ctgacttcactatagcaacaatggaaaccagaaaatagtagagtattttcaatatgctggggccagggaggtgggggcaatcagtgaataccaatgtagaattcatacccagtgaaaataactttcaaaaatgaagagaaaatactgacatgtttacgtttaaaaaaacaaaaatgaagttatcaccagaagaccagaaggaaattttaaagaayatacttcacgcaaaagaaaaacgatctgagatggaagtttcaaaatgcagcagagaataaagtacaagtaagacagtaaacatatggataaatacaaaagaatattggctgtataaaataaaaacaacatcttatggcatttaaaatattatagcaaaattccttggcaacagtaatatataagttagaagggtaataaatggagctaaactattctaaggttctttgtattatctggtagaagagtaaaaatatttattaacattagacttttataaattattaatgaatatttttgataattataaatgcattttttaattttgagagtgagcactaaaagaatgtttaatgtaattcctaaactactagatttttaaacaatggaatcataattaaattcaaaagaaggcattaaagaaaaaaaagaacaagtg

SEQ ID NO: 473639 - DNA, 556 bp, Homo sapiens
atgctggggccagggaggtgggggcaatcagtgaataccaatgtagaattcatacccagtgaaaataactttcaaaaatgaagagaaaatactgacatgtttacgtttaaaaaaacaaaaatgaagttatcaccagaagaccagaaggaaattttaaagaatatacttcacgcaaaagaaaaacgatctgagatggaagtttcaaaatgcagcagagaataaagtacaagtaagacagtaaacatatggataaatacaaaagaatattggctgtrtaaaataaaaacaacatcttatggcatttaaaatattatagcaaaattccttggcaacagtaatatataagttagaagggtaataaatggagctaaactattctaaggttctttgtattatctggtagaagagtaaaaatatttattaacattagacttttataaattattaatgaatatttttgataattataaatgcattttttaattttgagagtgagcactaaaagaatgtttaatgtaattcctaaactactagatttttaaacaatggaatcata

SEQ ID NO: 473640 - DNA, 655 bp, Homo sapiens
ttaaacttaatttgccctttgcagaacatatggccattatgttacgtattcagaaaatgaaactagtatttaagattatatcatttgattccttatagttatgtttttatctgagtatttaaagatgtttcaaaagtaaaatcttgtgagtaagggctgccctctcaacctgacttaaaactgtaaaccgttctctttcctatatctctaataacccttagcctcctcagattttattttagtttttggttattttttatttktttgtttgttgcattttcaccttctaacacaccacatgtctttattttcttccctccctttacccccaattagaatataaatgccacagggattttttaaggacaggaatatttgttttgtttactaatgttttctgtatacttagctaaaacagtgcctgtcatagagtggatgctcactaattgttcaatgcatgaatattttttttaaattagatatgcccttctaccatacttatattaataactagaaatataaaaccacaagtgcaaaactgagtaagaattataacatatccaaccgtggtctgtttttggtaatggcctcagggaatgtttcatgagaaatagcacggacttttgtaataactgttatacatttgggcaaatag

SEQ ID NO: 473641 - DNA, 655 bp, Homo sapiens
ttaaacttaatttgccctttgcagaacatatggccattatgttacgtattcagaaaatgaaactagtatttaagattatatcatttgattccttatagttatgtttttatctgagtatttaaagatgtttcaaaagtaaaatcttgtgagtaagggctgccctctcaacctgacttaaaactgtaaaccgttctctttcctatatctctaataacccttagcctcctcagattttattttagtttttggttattttttatttttttgtttgttgcattttcaccttctaacacaccacatgtctttattttcttscctccctttacccccaattagaatataaatgccacagggattttttaaggacaggaatatttgttttgtttactaatgttttctgtatacttagctaaaacagtgcctgtcatagagtggatgctcactaattgttcaatgcatgaatattttttttaaattagatatgcccttctaccatacttatattaataactagaaatataaaaccacaagtgcaaaactgagtaagaattataacatatccaaccgtggtctgtttttggtaatggcctcagggaatgtttcatgagaaatagcacggacttttgtaataactgttatacatttgggcaaatag

SEQ ID NO: 473642 - DNA, 534 bp, Homo sapiens
tgtttgagttttaactgtgccaatctagcacttcctcaggagagattctctttcatcagcctggagtagcaaccccagaaattaccattccaagagcttaattagatcttgacagatccaaaacaagcataaacccttggagttcaagtacccatggatggtagctgccttaacacacaggaaaccccacattccctggtgtctgtgttctaggagattatttagaaccatgttattcaattggtggccactgctaaaaagagaattccaagaaagcccacatccatcctggacttaagagggttgggttgwccctaaaagagttaagattccactggtattgagcaccatttgtcacagcatgttaggcttcctgtgagtcagtgctcttttcattttccttctcttgccacatatccatcctgtctccaaaacctgtttctgtttgatgcatatgtcttgcttctattcattatctagtttctgcagccaagtatctcatcatttctaccttagtaacctacttctccctct

SEQ ID NO: 473643 - DNA, 395 bp, Homo sapiens
caagccacagcatttatcttacatagggatgtattttccctaaccctctggtctgagccctgtccaccacctgtttccctggtacaggaactcctgcctgtgtgcaaatctgtattcctattgatgcccttttacttgcttcatgtatttggatgttgaacccaggtctcctactcagattctttgcctgcttcctttgatttatgctaactcattcagatctcactgttgctgtcggtattcacaggattyacacaccttcagttccatagctccccagggatcccctggctgtgatatttgccagcgtgcagcagcatcaaccacagcaaaagtgccttggcctggcttttcctgggtcacttgaacttaaggcctctgaagccttagtactg

SEQ ID NO: 473644 - DNA, 582 bp, Homo sapiens
tttacagatagaagtcaaagcacaactgtaagaaataagatatgtgaaagtccataaagcartgcctgtcacataataaacagtcaataaatcttagctattgttgttattacaagttctttatattgcagttgtgcaaactgaaatccagagaaataaaataccttgtctccactcacatggatttctggttgcagaattaaaactaaaccctccatagtcatattctcatccaagggatcctttctactaaactacagtctctcagaattcctcatctataacaattctagaaggtatttacaggaaacatcaattcataaatttaataaccaatagaactcaagacgtattttcatcactttataaatactatgcttctaatgatttgatctttgttattgaaacattcttcctgtttttaattaagaaaatctttcagtaagtatgaatgtatcttctccacctaaataggtgttgtatttctgttcatttttgttggataataaacggtcttaaaatttacttaaaataatcacttatttttctcatgaatctacagtcaccaatttaggctgtgtt

SEQ ID NO: 473645 - DNA, 582 bp, Homo sapiens
tttacagatagaagtcaaagcacaactgtaagaaataagatatgtgaaagtccataaagcagtgcctgtcacataataaacagtcaataaatcttagctattgttgttattacaagttctttatattgcagttgtgcwaactgaaatccagagaaataaaataccttgtctccactcacatggatttctggttgcagaattaaaactaaaccctccatagtcatattctcatccaagggatcctttctactaaactacagtctctcagaattcctcatctataacaattctagaaggtatttacaggaaacatcaattcataaatttaataaccaatagaactcaagacgtattttcatcactttataaatactatgcttctaatgatttgatctttgttattgaaacattcttcctgtttttaattaagaaaatctttcagtaagtatgaatgtatcttctccacctaaataggtgttgtatttctgttcatttttgttggataataaacggtcttaaaatttacttaaaataatcacttatttttctcatgaatctacagtcaccaatttaggctgtgtt

SEQ ID NO: 473646 - DNA, 608 bp, Homo sapiens
gccactgataaagcaggcctcaccggacaccaaatctgctggtgcttgatcttggacttctcagcctccagaactgtaagaatacatttgtgttgctataaattacccaatctgtggtattttgttagagaggcacaagtgaactaagaaacctacataccatgattgcttcagggattggtctctgattggagccaagccaatcttggaatctttataccagtgctttaagaaaaaaatgctttctttctgctggggcactgaagctggaaaaatgtcagtcttgagccycttagtgtccaataactaagccaacagaacaaaagtagagcttagaggtgaaaacagattttcacctctaccatgcaacttagttgggactagcaagagataagcattcaacttctaggaagagtcagggtttttttgttgtttttcttttatgaccacagcatgagatgatgtgttggcaccttcattagttgagatttgagggtagtaaaaaggccattcaagcaagcgtgagcgtaacagactaataggtagggtttgcttcagatacgactggctctgggggtccaaataatataatcataactgtctatttt

SEQ ID NO: 473647 - DNA, 486 bp, Homo sapiens
ctacctatatttaaatcccagatcctaacaagattcccagatgtagattcttggccaaagctttttctgtacccaagtctactttgtaaatcagaatatcacctcctcataagtttgttgtgggaatctagctacataggacctgcaaagcactcacacagctcctgacatacagtagtgaatagttactgggaaatcactctgagtgaaagaggcaggctttggagaacaacattctggacacrttggagacacatggagttcctgagggcaggcagcagaataaaacttaacaggaagagttccagaattctgatctattcttaaatttttatcaagttaggtctccttctttctttagaaattaaaattgggactaagattctggttcagtttaggtttatttattcatcccataaatatttgttaagcacttactatatgctaggcactgttccaggaaccaaagatttgacgactaaagag

SEQ ID NO: 473648 - DNA, 608 bp, Homo sapiens
tggaggataacagccccagaataaaggatgatgacactctgtttaaggagctatttttccaacttctacctactctgttgttaagagagtatctcataagactgtgatgtgtaaccaatttattatttgtgattttgaaaaatattgtggcagtaactataaatatgttacacatttatcttttagaaataaaaaatcctcaacatctaacatrtgtgaaagggctttgacaagcattaagtattgcctccactcctctaaggaggtcagccttgggaaagctaaagacaaaataatttggatacaatgcaacttgaaataagcctaagaccttacatgccagatacagagtaggaaggtgctcaacttctttcatgtcccaaattatatccttagtcgaaaactcattgccacatatccctggccagaggtctttgcagcaattcatctttctgagccctcttaactactttaaagttctttggtgctagaaagtcactagtagatcagttgctattcaaactgtttatatctaaactgtatctaaagtcttcttacagaaattttatttagaaaaagtgaattttccatatgtcttaaaatcaacc

SEQ ID NO: 473649 - DNA, 498 bp, Homo sapiens
cattttgcattctcccctctgcaatgaaatgtccaggtcacaatcacaaaagtcagcaaaatctcaccctcagatgagactttcctaacagtttttcaatgccctactctcagaatgaataggcaaggatcaccagatgtttgagaaatgcttctaaaatgaagagagagaccaaaacagagtggggatgggggcaggatacaaaaagaaggcagagctaattgagggaagagaagaatacttgcagagctctattattatgctccaagagataagaaaatatttttaaaaacaatagaatgcttttgaaaaataaaaaggaacagcatggaacaagaaacaggttgtgacaattaaaaatstatgttaaaattcattatgcaagagaagacagaagttgagcagatctcccaaggagacaggtagcagtggttgctttggggtgcaaggcactgaaatgctgccacacgagctgctcccactagagctgtgtcacag

SEQ ID NO: 473650 - DNA, 656 bp, Homo sapiens
cactcttcaatctacagggcaccagctcagggtcttctcatatttgatttataactgtagtgtaccagcaaaggaaggactcactgagccaagggatgggcttagcagctcaaagttctattggtaaaaaatgcttttgagttctactacagcttcccagacaaagaaaatcccattgggagggtggatgtaaaattaatactgaagagagcagccaacatagacagggagcagccatccagaaattgttcagaaggaacatttacatggccagccactctgagtctgaggctgacaggaagctgacaaaccgtacagagatgagaggtcttagagtcacacaaaccagcttgatattctctcacatgaacctctagtcmagatgaagaaatataaaataccacagacttaagcaaagactgaatacatgcattaaaataacagattctctaattctcattcttatatttaaataaaactttcaaaaaaagtagcttacaaaaagaaaagttagaagaatataatggaccatctgtacactcaccaataagaaataaaataaacacatatgaaggcttcctcatttgcattgcccttccgcttaagaaataaaggactattaacacatataaagcctttctcatttgtattaccct

SEQ ID NO: 473651 - DNA, 529 bp, Homo sapiens
gactgaatacatgcattaaaataacagattctctaattctcattcttatatttaaataaaactttcaaaaaaagtagcttacaaaaagaaaagttagaagaatataatggaccatctgtacactcaccaataagaaataaaataaacacatatgaaggcttcctcatttgcattgcccttccgcttaagaaataaaggactattaacacatataaagcctttctcatttgtattaccctccctttttactcccatagccaaaaacyattctaaatttagtgtttatcattctcatccatgacccttttactatatatatgcaacccataaatgacatgtagcattgttttaatggctttaaaattgtataaatagcaccttactgtgaacattacttctgcaacttgcatttttccctcaacattatgtttcccagaattagcagataaggatttgagatataagatttttgagcagaggaatgacaagactttttgttttgacttaaaccatcatagtcttgggaaca

SEQ ID NO: 473652 - DNA, 608 bp, Homo sapiens
acaccaggcatgctcctaccttaacatccttgaacttgctcctctctgcttggaattctcctttcccttagtatttatctccatataacagactacatattttattcatatgcttctttattagctattttaccctctagaatctagacttcaaagacaaagatctttgggttttctactactatatcttcacattttagaatagggcctggcatgtyagtattcaataactactctttaataaagaaaaggaagcaaggaaagaaaggtgtctaatatcaagaagctggaaaaatacacacaaaaatattattcagtagtgaaacatgaatgtaactatgtgaaaaacatatgcaattcttagaaatataatttgagtgacacaagcaagttgcagaagactatatacagcataatacccaattataaggaaagctaaatagtatattgttaagaatactttcatatgtgataaaaataaaatactattttttttaaaaagggattaatttggttcccaggaaatcctcgcctctagctctcacatatggcttaccccacaatataatagtgtatgttatttaaagatgcatatataaatatacagt

SEQ ID NO: 473653 - DNA, 390 bp, Homo sapiens
ctttagaatgagctgttctccaggagtcatttatttgatgctacgtyactgataaactgcaccaactatgactctgtgtgattaaacttagtttgttcatacacacatcactgcctcctggaacggctaaggccagagcccttaatctttgtcagggactccaaactatttgggcaacttcacaacaggtctccagtggtagccaccagagcttgagatgtcaattatgctcatcaaggtacccgaaatgaaggggaaaaagtgtgaggtggcatgaaggaaggagagcctttgcagaaataatcatgttagagaatctcatcaaactcaggagggttgtccttcaatgtttcctgaaatttgaataactggagtaacatataataacaa

SEQ ID NO: 473654 - DNA, 593 bp, Homo sapiens
ggaaggacactttgcctcatatttggagtcagataaggagcatcagtcatctcactctggtttcctgagctatgttcaccaaggaccactcgaccccttgccttctgtctcaaccccatgctctcctcattcaggcactgttatgggttaaactgtgtttccctcccccaactccrtcaaaaagaagatatgtttaagtccttacctccagtacctcagaatgtgactttatttggaaaatgagtcttcaggggtattcaaattaaaatgagctcatgaggatgggtcttaattcaatgtgactggtgtcctcataaagaggggaaatttggactcagaggttgatgcacacagagggaagatgacatgcagacacacggggagaatgccatgtaaaaatggaggattggaaagatgcacccagaagtcaaggaactcctaagactaccagaagcaaaaagagacgcatggggcagttccttccctagaggcttccgagggagtataaacatgctgacaccttgatttgagatttctggcctccagaatggtgagacataaatctatgttgtttaagacagccaatttgtggt

SEQ ID NO: 473655 - DNA, 292 bp, Homo sapiens
aaccacaatgtgtgttaaatgaataaatgaatgtgcaagtattgtgtcttaactcgagcaatagtggacactaggatgagtgatgtgccttcaaagacattacccttcaaagagggaaataaaacacatacacaaaaatcaggataaaaagaatgagatggttccacaktcgtgggcagagttatacatgtttagcaagcagagtccccaagagaagcaaagaggaaattatgaaagagatttaaattcttaccctgtctttaccactcactggttattccccccggcaagt

SEQ ID NO: 473656 - DNA, 647 bp, Homo sapiens
ctaatttcattttctttggatatgtgcccagtagtgggattgctggatcatgaggtagttctacttttaatttttgagggccctccatgctatttacaagatgtacaaatttatatttctaacagtgtatgagttttcctttctacacatctatactagcatwtgtaattttttctctttttaataacattctaaacaaggtgacattgacagcttattgtgatttcaatttgcattttcctgatgcttagtggtgttgagacttttttcatatacccattaatcatttgtgtcttcttcggggatatgtctagtcaaattttttgctttttttattggatactttttctattgggctgttatacattctggatattagctccttgtccgatgtatagttaacagatattttggcctattctgtatgttgtcttttcactctgtttattgtttcctttgctgtgctgaagattttcagtctgatataatcttatttgtctatttttgcttttgttgcttgtgctttggggtcttatccaaaatattcttgcccagaccaatctcataaatctttgttcaatgcagtttatatttaaaattaatagccttcctcatttctttctgatttgcttatgttctctgtgttt

SEQ ID NO: 473657 - DNA, 647 bp, Homo sapiens
ctaatttcattttctttggatatgtgcccagtagtgggattgctggatcatgaggtagttctacttttaatttttgagggccctccatgctatttacaagatgtacaaatttatatttctaacagtgtatgagttttcctttctacacatctatactagcatatgtaattttttctctttttaataacattctaaacaaggtgacattgacagcttattgtgatttcaatttgcattttcctgatgcttagtggtgttgagacttttttcatatacccattaatcatttgtgtcttcttcggggatatgtctagtcaaattttttgctttttttattggatactttttctattgggctgttatacattctggatattagctccttgtccgatgtatagttaacagatattttggcctattctgtatgttgtcttttcactctgtttattgtttcctttgctgtgctgaagattttcagtctgatataatcttatttgtctatttttgcttttgttgcttgtgctttggggtcttatccaaaatattcttgcccagaccaatctcataaatctttgttcaatgcagtttatatttaaaattaatagccttcctcrtttctttctgatttgcttatgttctctgtgttt

SEQ ID NO: 473658 - DNA, 575 bp, Homo sapiens
gggccttgggagagtactcaggatgcctccatctcaggagtgggccacacttagccctatctgagcccagctccagatccgcccggcagatcacaaaagcaagacacaaaagggtcaaactgtttccaagtaactttaactgcatccaaaagcraagttgaagaacatttatgggaatacaaacatacccagcgcctggcaaggtaaaattcagaatgtcagtcaactaatgaaaaattacagatgggggaagaggcagaaaaacatcatctatgaggggactagtcaatccagaactaacagagatgctacaatgagcagacaagggtgcttaaatgggcgttataactgtattgcttatggtcaaaaagttatgttgagacatggaccatataaaaaaagatccaaatcaaacctttagaaatgaaaattctaacgcctaagatgtaaagtacactgcatgtgactcacagcagactagaaattgcagaagaaaagattagagagattaaagacagaaatagaaactatccaggaatttttttaaaaacaaaaacatcatcagtgagctgtgg

SEQ ID NO: 473659 - DNA, 484 bp, Homo sapiens
attcatggggccttgggagagtactcaggatgcctccatctcaggagtgggccacacttagccctatctgagcccagctccagatccgcccggcagatcacaaaagcaagacacaaaagggtcaaactgtttccaagtaactttaactgcatccaaaagcaaagttgaagaacatttatgggaatacaaacatacccagcgcctggcaaggtaaaattcagaatgtcagtcaactaatgaaaaattacagatgggggaagaggcagaaaaacatcatctatgaggggactagtcaatccagaactaacagagatgctacaatgagcagacaagrgtgcttaaatgggcgttataactgtattgcttatggtcaaaaagttatgttgagacatggaccatataaaaaaagatccaaatcaaacctttagaaatgaaaattctaacgcctaagatgtaaagtacactgcatgtgactcacagcaga

SEQ ID NO: 473660 - DNA, 657 bp, Homo sapiens
atccttactttgtgatattcagaatatttaacaactggctgggagcatcaatcaatgagaccagcactttggtcaaccaggaaagattttcagcttacttacctgaaggccacaccaagtcctactgaatatggaaactatctctggggaaagcaattccacaggccttattggttgcctccatgtttagccaactcctttactttttaaaatgccttttttggaagtagctcaaagacttggaaccttttaattatcccataatcatgtcttatttatacctgcctggatagtgtagagatgggaaaacttcagtcaaaaggacacagtaattgagttctgccttccagaacttgctgagctaaatgcaggttatagcgaccagcttgggctatcttgggtttgtccacacagtgccttgttgtgggtggtcacagtcttactccttagctgatggyatggcctataatctgtttctccacgttcctttctgactctgtcctggggcatggtggatcgatgaaggattttcaaagatcaaagcacatctctgttttctcaggatctgtttgcaactgctttactggaaggaaaagcccagtgggggatcgctcctgctgatcttcattgacatgtctgaggctacctgcctttaaa

SEQ ID NO: 473661 - DNA, 634 bp, Homo sapiens
atattgactgctaacaggctcttcgtgttttcattgaactttaaaagcacccttttcagctttggattttcatatgaactttataaataatcatcacattacattacatggtattgttataaactctcaagtactcctactggtgtatatagttaggcattatttccactcacaggtgtcaaaataaggcatgtagaaaggaaagcggcctacccaaactgcccaaggaggaagggattggaaactatggggcaaccttccaggaaaggggaagaggataccaatggtcgtgggcttctcaaagcaaagattagagagtcctgcagaaagagtaactctgcctcccacacaaggagcatcaagagcttaaaggaaagagtctggaacaaaccctaggtgccctttataagccaggactgtctgggaatccaaacccgaaaacctacttgtggaccaaagggttccagcctgaaacaggaaaacatatacaaaaaaacctgatcaattacctaagctgtctcagatgttctgttcttaaggtccagcgacagagaaggcttaaygagaaaaatggaatcatataagggtttagtgattagagatgatacttgtatttatcctgtagagagtccta

SEQ ID NO: 473662 - DNA, 621 bp, Homo sapiens
ccaataatactgtatctttatcatagtgggtttgccagccatcttgtttagtcaggcatagtgcctgacttaagaggaaactgtgggcactttgatggtgagaaacgtcctctttccaaccttcttcttaggctttgtggcatgtacatgacacaaactgggttgaccttaaaataatactcaatggctaatcctaatgagttataaggaaatagaaagggatggctttttatgcacaacctaaacacattttaattatattttcctaaacacattttaattatattttgctcatttttggagaacccattcccttttacatctattatgaacattctaaaacttaaakttgtgaaaacaaaactctgggagatagatagattgtaattttattccatgaggaaggtgttaaaccagctttgcagtttgaattttattcttaaaggctctgcagttcttacctggatgtcgaaatgatttttaatttcaactgctgtagacctcatcctgtgggaactagaaataatgtccaactgccgtccagtctggcgacattccagccgttcccccaccccacgataacggcctgactcttcctcaattcatgacagcccattctac

SEQ ID NO: 473663 - DNA, 442 bp, Homo sapiens
ttaaggggaatgggtactacrtatttgtctccagacacagaatgtaggaggtaccagccatcagggccatttccaaggtcggtgctgtctttctgctccaccatcctaggattattgttatttccccttgggttttggctcacatagttacaaggaggctacaaagaccaccaagtcaatgcctttctcttcttgtgtgtcccatttaacagtgaggaaaactttcctaggagtcccctgtatagtagacagtgatacctgacagcaattacttaagcataccctgagaatgatgctgtgtggcagacacgcctgaatgtgtatttggactttcgaggaactgggagtggcaaacctggagattactttctcatctatgaggaacatctgagcccctgccctgtcctatggatcaagaccctttgagttcaatgaaggttaa

SEQ ID NO: 473664 - DNA, 467 bp, Homo sapiens
ccatttggaagtaattctttggtcacattttgtggccttttcccaattttttttccacatgtatatataacatatgtaaatttgaatatgttgccatgtaatacatatattttatataatctctgctaaatagtaaatgtatataagtctatttgtattacataagtatatttattattttatatatttatgccccaaagtatttaaatataaatatgtgtttataataatcatataaataaatgatatataaatgtttgtaatctatatatccatataaacataaaaatattttttaacctcatttcactaaaagcctctgaagaaactactattactgtcyccatttttctgttgtgaaaaatcacggcttggaaataagctagtaagagagagagccacagccagatttaagtgtctcactcaagggcttcagtgacagatcacaaagatttagacgtcattct

SEQ ID NO: 473665 - DNA, 467 bp, Homo sapiens
ccatttggaagtaattctttggtcacattttgtggccttttcccaattttttttccacatgtatatataacatatgtaaatttgaatatgttgccatgtaatacatatattttatataatctctgctaaatagtaaatgtatataagtctatttgtattacataagtatatttattattttatatatttatgccccaaagtatttaaatataaatatgtgtttataataatcatataaataaatgatatataaatgtttgtaatctatatatccatataaacataaaaatattttttaacctcatttcactaaaagcctctgaagaaactactattactgtccccatttttctgttgtgaaaaatcacggcttggaaataagytagtaagagagagagccacagccagatttaagtgtctcactcaagggcttcagtgacagatcacaaagatttagacgtcattct

SEQ ID NO: 473666 - DNA, 578 bp, Homo sapiens
aagaaaaacataaaatcataacttttttagagaacaacatttcaaaaaattttataataacaaagccacaaaaacagaagttcttaacaaatccactataggagagggggttagagcctcacaaaggaagtgctagaatctaggccccagcatctcattccagagtcccattctaccactgtattacatgtcacaattaaactgyaaatacattccatctcatcacaatcattccagtaatattctagcagcatcctagctcttgcagtgataactaaaaagcaaaacatgcatttgccatcggaagcagaaacctgcatctcatccgaagcttgagagaacctgaaagccactcgctctcaggcccaaacccctaaccggcaggtagtattgccactccctccaatccaggctggctgcctcagactgcgggctgccccggaacctgacagacatccattctgcacgcacatgatgtccataacagggcgctgcagccacggcattcaaacaacccagcaaaggtgtccaaacctcagcaaaacatataatcccatcattttcaaacagaatgaaac

SEQ ID NO: 473667 - DNA, 578 bp, Homo sapiens
aagaaaaacataaaatcataacttttttagagaacaacatttcaaaaaattttataataacaaagccacaaaaacagaagttcttaacaaatccactataggagagggggttagagcctcacaaaggaagtgctagaatctaggccccagcatctcattccagagtcccattctaccactgtattacatgtcacaattaaactgtaaatacattccatctcatcacaatcattccagtaatattctagcagcatcctagctcttgcagtgataactaaaaagcaaaacatgcatttgccatcggaagcagaaacctgcatctcatccgaagcttgagagaacctgaaagccactcgytctcaggcccaaacccctaaccggcaggtagtattgccactccctccaatccaggctggctgcctcagactgcgggctgccccggaacctgacagacatccattctgcacgcacatgatgtccataacagggcgctgcagccacggcattcaaacaacccagcaaaggtgtccaaacctcagcaaaacatataatcccatcattttcaaacagaatgaaac

SEQ ID NO: 473668 - DNA, 637 bp, Homo sapiens
gatgcctcagcagcagtcaagcaattagttaggatttcatgaaaatgatggcagatgtgtaaaagcacattgtcctatgacttcctatggcgccaagaatgttgtcatcactcagaggtgaaattaataataatacaagcatcccttgctcaacagaagttgaactgtacttggtcacaagttaagtcacacattcattgtttggaatttcttttccatcctctttccacgcaatctgcgtggggatatgttgcttctcacagaaygtctgattctctgtatcacatttcctattgtcaaactctagtaactagctactatctgacagtaaacatttaggcaggaataaaaataccattttgatatgctaagagcccaccaatacactaattattatgaacagagtcaacagaattaatgtgctaattagcatcatgcattagctgattcgaagtaaaacaccacatcttggcacactgggaaaagacaatgatagagaatattataggattaagaaggctattatttatcatggggtaagtatttgaacagcttgtaggatatactctaaggctgacttttccctctgcctattgagagcttgagtattttctcacaggttactatttacaaacag

SEQ ID NO: 473669 - DNA, 577 bp, Homo sapiens
tttttttcaaggtggattttgcccactctgggtgtcactgaccaaaggaattccatggacatagtgggttaaaggagagtcmaacaatgatcaagtggggattgtgattgaagccactgggaaggcacagattggctgctttagcatcttagccaggtctctgaatgcatttgagatttattgactctccctttgtcatacttaacaatgccctgaatactgggtgttctgccactaccagaagatgccaagtttgggctatacccttgaggtgtttgtaaaccagatgcctcaaaaatcactacctcaacaagaacagttggtcaaatgccaccacaccataagccaagtcttctattttttcactctttatgattttttctttaaagcaatcgtctgtgtcaccctaagagtttaacactgcccactttactgtcttgatgaaaaagtatgttgatttattttctactcattcacatattcatccaacaaatagttacagagatggtgaacttggcactgggtagacatagaactttcattctggctggggagacaaaaaataaagtaaacaaat

SEQ ID NO: 473670 - DNA, 577 bp, Homo sapiens
tttttttcaaggtggattttgcccactctgggtgtcactgaccaaaggaattccatggacatagtgggttaaaggagagtcaaacaatgatcaagtggggattgtgattgaagccactgggaaggcacagattggctgctttagcatcttagccaggtctctgaatgcatttgagatttattgactctccctttgtcatacttaacaatgccctgaatactgggtgttcwgccactaccagaagatgccaagtttgggctatacccttgaggtgtttgtaaaccagatgcctcaaaaatcactacctcaacaagaacagttggtcaaatgccaccacaccataagccaagtcttctattttttcactctttatgattttttctttaaagcaatcgtctgtgtcaccctaagagtttaacactgcccactttactgtcttgatgaaaaagtatgttgatttattttctactcattcacatattcatccaacaaatagttacagagatggtgaacttggcactgggtagacatagaactttcattctggctggggagacaaaaaataaagtaaacaaat

SEQ ID NO: 473671 - DNA, 604 bp, Homo sapiens
cagagggagcacaaagagacacactggtttcatctcagtgtacagggagtctagttactaagtggacgaagaactcccgcacattgagatctggtcctcaactggcaagaagcactgttcgagcaatcaggaaaatctgggctttaagcagtggcaccactacgaatttattctcttgcctaagattacttggaattcctatagtagtgggggaggggggactctcttttgtactagttcctccttaaattttaaagaaattgagcccgtggactgaggtgggtgcggatgstgggatgcagaggaaacaaaaatttcttctcatctagcttccactccaaatctgtttctcccagagaaaatacaagacttaggagtgctgtatgaagtctcttgctgctctattctctaggaaacctaatatgaaatcattaagctactgaatgtcagtttcttcaacagtaaagaagacacattattattgctgttattattactactactactaccaccaccaccactaccaccattactatccatttagtgacttctgttttctctacttaatctcacttattcagcatatcagccctaagaggcagat

SEQ ID NO: 473672 - DNA, 608 bp, Homo sapiens
ggaagtttgcacggatggaccagagcagagcttaaggccacacatcccacactcgggagaaacatcctcattactgaaagatcacagccctgcagaagggttcacagtggacataacacccaagagctccagatcactgcagcaagtttgtgcagcccggattggggggtccccaactcatcctgggacccctgctcccagacacctcttggcggaggacaagctgggtctcttagttgaaaagacaccctaattgtgatcacatctcctgctgcaggctcagggctcaggaaaccatggcgctgacttctcaatgccccagaatgtggcaaaatcttaaatgggacaagaaatccaaatgcagaaagggcatgctctccaggactcatctgaaaagtaactttcgggcaggcggggccactctcaggttctcctcaccatctcccagacacatacacagcaggtcaagaaaaccggcctttccctgcctgcaaaatgacggaacaatcaaacaatcccaagtgccagcagcagaacrgaaacagggacttcgcttaacttggaaagcagaaagtagcattggtactcagaggattatttaggggaaa

SEQ ID NO: 473673 - DNA, 554 bp, Homo sapiens
aaggaacagaatcccaaataatatatcataagacatgtcactggagaagaaggtgatgtcagccccctgccagcatagctttctttactaattctagttaaatacattaggtagtcattttrtataatttttattaactttattaagctaaatatataaactgtgtcctgattactaatactgatacctatttaataattcaatataaagaaatattttaaaaataataatagacacaacttaagtaattctctgagaattttagtcattaccactagtgtatacaactcattttccttaataagttaaccctattctgtttctaatgtgatctgttttccacctttcctatgtatctatctatcagtcaatcatgaaagaggttttaactactcatgcacttaatatttattgaacacttatcatgttctacgtaatgtgttaagggtatagtattaaataatacacatctagtagctatcttccatacccaggaagttttacaggttttttttgttacttgctaataataacaactttatcctgataatatt

SEQ ID NO: 473674 - DNA, 633 bp, Homo sapiens
gtcaaaaaaccagaagtgactagattgaaaagtgaccccatcagtcttttctcctttcaaataacaaggaaatagctttaattttttttctttagctccattgatgccacttggcgacagaggtacaaataactagatatgactgttctttgaatagcaccttttccaaaagacaaaatttaggagttaaataacttattmacatttgttttagacacttaagtgttttttattgtattggaggatagcaataacctttctttagtttttttttcattcatttctgtaattgtaaagaccacctacatgcttgaaactgataatttatgctctagcccaaaacatttttaaaagaccaggcttatacatccagttgcctaattgtcatcttcacttagatctctcatatcaaaatatatttaacattttactgtgaagtaaaatgtacacatagaaaagtgccccatcatggtaaccactatcctaatgctctaattttacagcagttatcaatattatatatatgtatataactgatgttcttattagtttaatgtctacttatataagctgtatgcttcatcagtacaagattttattcattatgtatcatagtatctagcagaaagcccg

SEQ ID NO: 473675 - DNA, 633 bp, Homo sapiens
gtcaaaaaaccagaagtgactagattgaaaagtgaccccatcagtcttttctcctttcaaataacaaggaaatagctttaattttttttctttagctccattgatgccacttggcgacagaggtacaaataactagatatgactgttctttgaatagcaccttttccaaaagacaaaatttaggagttaaataacttattcacatttgttttagacacttaagtgttttttattgtattggaggatagcaataacctttctttagttttkttttcattcatttctgtaattgtaaagaccacctacatgcttgaaactgataatttatgctctagcccaaaacatttttaaaagaccaggcttatacatccagttgcctaattgtcatcttcacttagatctctcatatcaaaatatatttaacattttactgtgaagtaaaatgtacacatagaaaagtgccccatcatggtaaccactatcctaatgctctaattttacagcagttatcaatattatatatatgtatataactgatgttcttattagtttaatgtctacttatataagctgtatgcttcatcagtacaagattttattcattatgtatcatagtatctagcagaaagcccg

SEQ ID NO: 473676 - DNA, 569 bp, Homo sapiens
gcatataacaaaagaaagccaacagcatcctctgaatttcttctagccatgaatcaggggttggggtggggaataggaatgtaacacctgtatgtgtagtttttgttcatgataggtcatttccattagattgtaatcccactggatgaaggacctttcatctctttttacctctagatatataatacaaaatagtgcctggaacataataggcactcaattggcagtttcttaataaatgaaatagagaataaagtgagttgattctggaaacacagataaaggtcattttgagtgtttttttttttttttttttttttttaagaaataycaaagaaaataagctattctctgtaggtagtggaattaagattcctacatgagacttgataagctttttgtcagactcgtcatatttttttgtctgttttttcagtctaaacattttttaacactaatcacatatcattttatagatggtgaaaggtttaattaataaaaaatgattactttgaaatcctttgaattgaaaaaacacttaaagctttactgtattcttaaggctagtt

SEQ ID NO: 473677 - DNA, 569 bp, Homo sapiens
gcatataacaaaagaaagccaacagcatcctctgaatttcttctagccatgaatcaggggttggggtggggaataggaatgtaacacctgtatgtgtagtttttgttcatgataggtcatttccattagattgtaatcccactggatgaaggacctttcatctctttttacctctagatatataatacaaaatagtgcctggaacataataggcactcaattggcagtttcttaataaatgaaatagagaataaagtgagttgattctggaaacacagataaaggtcattttgagtgtttttttttttttttttttttttttaagaaataccaaagaaaataagctattctctgtaggtagtggaattragattcctacatgagacttgataagctttttgtcagactcgtcatatttttttgtctgttttttcagtctaaacattttttaacactaatcacatatcattttatagatggtgaaaggtttaattaataaaaaatgattactttgaaatcctttgaattgaaaaaacacttaaagctttactgtattcttaaggctagtt

SEQ ID NO: 473678 - DNA, 575 bp, Homo sapiens
gaagttttgagactgggtatctggtgagggcctcaggctgcttccactcatggcagaagaaggggagctggcatctacagagatcacacagtgagaaagaaagcaagggagagaggagggaagtgtcaggctctttttaacaagatctagtgggaactaacagagcaaggatgcactcacacctcactccacccagggagggtattcatctattcagaaatgatctattcccatgatccaaccattaggccccacctcccaacactgccacacagatgatcaaatttctacatgagatttggtggggaaaataaaccatttccaaactatagcagtggtatagttttgttggcattgattttttaacagtgtatatatattacttytataattacaatgttaaaattaagcattgtagactaggtgcagtggctcatgcctgtaatcccagcactttgggaggccaaggcaggtggatcacctgaggtcaggagtttgagaccagcccggccaacatggcaaaaccctgtctctactaaaaatacaaaaaattagctggtcgtgatggtgggcag

SEQ ID NO: 473679 - DNA, 545 bp, Homo sapiens
actggttgttgtattgacagtgcaggcacaaattcataaaggtgatttaatgggttaaggtgagagaaagaatctagaattaatccatagatagcaagcggtgccagtgcccattttgctttaatgcataacatggsggattttaagtattctaaagcctcagttctgctcttgcttctcctgcttactcattttttgaacctcaaatttattggctatgtaaataaaaatattacattatatgctcaatatatacacctgagctatcctatgaaggagcaccatggatggtctcaatgttagtcaaaatattatataattcttagcctattacaaagttgggagaaaaagaggatattgaaactgagagtagttatctatctagagcaaattacgtttttatttttattgattttctccattgcttgttaaatagggaagtgtcacaggtaagatccggaattactgtgtttctatcaattaactttggaattatatgaagcaattacattaagcaaaaatattagattctgttctaattaaaa

SEQ ID NO: 473680 - DNA, 577 bp, Homo sapiens
cagagagctgccttttttctacctctgtctcggggtggggttcaggtcaaagttttttccactgttgtctctcagtggaggcttgggtcacagaattgacagttaggcactagtggtctcattttacataggatactttaaaaatgcatctgcttttgtatttttgaaattaaggcttgatttttcatttgtgaccaactcctattagttaaacaccagctggttttatgtataacacttatggcagctcttatatatacctcagagtgtggacacatctaacctgggatggtcataaacacaatgacaaaaaatggaaattttaaaaakacctaaaataacttatttgcatgcacaattagaaaaagctagttttagaaccaaataggagacttacttccaatggtacctaaaatgcttctagaagaaattctgagaaatttgcctccattcaggatttaaagatatctatcaccaccacctgaggaaattccccaggtctttgacccctctccctgaaattcctattgtggcattcctagagacactatgaattcttctggttctgagggccacc

SEQ ID NO: 473681 - DNA, 564 bp, Homo sapiens
cttttgtacacttaaaaatgctttctctcgaacccaggaggcggaggttgcggtgagccaagattgcgccactgcattccattttgggcgatagagcaaggctcagtctcaaaaaaaacaacaacaacaaaaaatattttctgctcttttgtcgtacattaatttgcaggagttctaagtatattatggatatgaacactttgtcagataaatataaatatcttcttccagtttgatgtcttgtgatgatcagctctttattttaatgaaatcaaattgaacaaccttttcctttatggctggtgctttttgtatcctatttaagaaagcattgcctttcatttggttttaagaayattttcctatgttaccttctgacattgagctgaaggcaaagatcaagacggagaaagaactgagagattggggtatttgatatataatctgtctcagtgatttttaaactttgctacacattagagacacctggggagctttaaaaactggtgcccctgatgtaccccagaacaatttactcagaatctgttggtttgggacctaggc

SEQ ID NO: 473682 - DNA, 652 bp, Homo sapiens
tggtaacaggtaaagggcttgagtatgagtgatagtgaaaataatgatgacaaatataaataacctaaaaatgtgtattatttgcccttgactatttatytcaacttaagtttacttcttataaaaatgtcatttcttttcattcctgatgtgaaacttgccctttaacaaatgagaaagaatgccgttttatgacttcacataactcaacactatgaattactacaaatatacattaatatacgatttcctcagaagcctatttcatgtagctttgcaaacaaatgagaagggcacgctagaggaattagataatcatttagtagcagttctaacttacagctttgacataacactttaacaaaacaatgaagtgattgagtcaagaaaagtagttatactacaaagtacactctcttaaatatttggttccaaatttcagatgtgagttattattaccacagcctgtaggcactcatttaagtattcttgccttttataaatggtttgtgtgaatcagttctatgagaaaaacattcttcctcgttaccacctccaaaccacaaccatccatccattagtgttaaggggccatatataggagggatggtaggtgggaagtttgactctgaattcattactgtatatacat

SEQ ID NO: 473683 - DNA, 652 bp, Homo sapiens
tggtaacaggtaaagggcttgagtatgagtgatagtgaaaataatgatgacaaatataaataacctaaaaatgtgtattatttgcccttgactatttatctcaacktaagtttacttcttataaaaatgtcatttcttttcattcctgatgtgaaacttgccctttaacaaatgagaaagaatgccgttttatgacttcacataactcaacactatgaattactacaaatatacattaatatacgatttcctcagaagcctatttcatgtagctttgcaaacaaatgagaagggcacgctagaggaattagataatcatttagtagcagttctaacttacagctttgacataacactttaacaaaacaatgaagtgattgagtcaagaaaagtagttatactacaaagtacactctcttaaatatttggttccaaatttcagatgtgagttattattaccacagcctgtaggcactcatttaagtattcttgccttttataaatggtttgtgtgaatcagttctatgagaaaaacattcttcctcgttaccacctccaaaccacaaccatccatccattagtgttaaggggccatatataggagggatggtaggtgggaagtttgactctgaattcattactgtatatacat

SEQ ID NO: 473684 - DNA, 652 bp, Homo sapiens
tggtaacaggtaaagggcttgagtatgagtgatagtgaaaataatgatgacaaatataaataacctaaaaatgtgtattatttgcccttgactatttatctcaacttaagtttacttcttataaaaatgtcatttcttttcattcctgatgtgaaacttgccctttaacaaatgagaaagaatgccgttttatgacttcacataactcaacactatgaattactacaaatatacattaatatacgatttcctcagaagcctatttcatgtagctttgcaaacaaatgagaagggcacgctagaggaattagataatcatttagtagcagttctaacttacagctttgacataacactttaacaaaacaatgaagtgattgagtcaagaaaagtagttatactacaaagtacactctcttaaatatttggttccaaatttcagatgtgagttattattaccacagcctgtaggcactcatttaagtattcttgccttttataaatggtttgtgtgaatcagttctatragaaaaacattcttcctcgttaccacctccaaaccacaaccatccatccattagtgttaaggggccatatataggagggatggtaggtgggaagtttgactctgaattcattactgtatatacat

SEQ ID NO: 473685 - DNA, 652 bp, Homo sapiens
tggtaacaggtaaagggcttgagtatgagtgatagtgaaaataatgatgacaaatataaataacctaaaaatgtgtattatttgcccttgactatttatctcaacttaagtttacttcttataaaaatgtcatttcttttcattcctgatgtgaaacttgccctttaacaaatgagaaagaatgccgttttatgacttcacataactcaacactatgaattactacaaatatacattaatatacgatttcctcagaagcctatttcatgtagctttgcaaacaaatgagaagggcacgctagaggaattagataatcatttagtagcagttctaacttacagctttgacataacactttaacaaaacaatgaagtgattgagtcaagaaaagtagttatactacaaagtacactctcttaaatatttggttccaaatttcagatgtgagttattattaccacagcctgtaggcactcatttaagtattcttgccttttataaatggtttgtgtgaatcagttctatgagaaaaacattcttcctcgttaccacctccaaaccacaaccatccatccattartgttaaggggccatatataggagggatggtaggtgggaagtttgactctgaattcattactgtatatacat

SEQ ID NO: 473686 - DNA, 666 bp, Homo sapiens
atgatgtcacatttactgtgtaatatgtaatttaaaacaactaccaccaaaattttttttagtttgactctcttgattcaccataattatatcacaacaaactcttttcagcaggatcagtttttaaggttgagtttattataaaaatatttacttataatcctccattcattaattgttttatggtctgatatgctttggctctgtgtccccacccaaatctcatctcaaattgtaatccccacgtgttgaaggagggacctggtggtaggtgattggatcatggcgggagtttttcccatgctgttctctgacactgagtgagttctcacaagatctgatggtttaaacgtgttttgcrgtttgcccctcactctctctctctctcctgccactatgtaagatgttccttgctcctcctttgccttccgcaatgactgctaattttctcaaggccttcccagacatgcagaaccatgaattcaatgaaacctcttttcttcataaattatacagtctcaggtagttctttagagcggtgtgaaaatggactaatacatggtcatatttttaatttttggtatgcagtgatttggaaatttccaccagtttttgctgaattaggtaaaaggtattttcagagaacagcatgcaaactaaaagtaa

SEQ ID NO: 473687 - DNA, 525 bp, Homo sapiens
ataaaaatatttacttataatcctccattcattaattgttttatggtctgatatgctttggctctgtgtccccacccaaatctcatctcaaattgtaatccccacgtgttgaaggagggacctggtggtaggtgattggatcatggcgggagtttttcccatgctgttctctgacactgagtgagttctcacaagatctgatggtttaaacgtgttttgcggtttgcccctcactctctctctctctcctgccactatgtaagatgttccttgctcctcctttgccttccgcaatgactgctaattttctcaaggccttcccagacatgcagaaccatgaattcaatgaaacctcttttcttcataaattatacagtctcaggtagttctttagagcggtgtgaaaatggactaatacatggtcatatttttaatttttggtatgcagtgatttggaaatttccaccagtttttgctgaattaggtaaaaggtattttcagagaacarcatgcaaactaaaagta

SEQ ID NO: 473688 - DNA, 669 bp, Homo sapiens
ctgttggtgatagtttcttctaggtttattggttactgctggctacccagcccccaactcctctgcagtagaatacaagttccataagagcagaatcgcgatgtgtctggttcatctcgttattccgagtacccagaaaatttgtctcattggaggtgctcaacacatatttactgaatgaatgaatggcccacataatcaccactggaagcagcttttagtattataaagaaatccctttaaaactgcttattttacatcacatgtttttggtttgactctatataatttaacaaaacttaagcaagaagtactgtaacttgtatttcttcagtaatgagtcaaaaaaactcatggtctaaggacatcatttctagtgctaagtatgtgttsgttgcttgctggggcacaatgacttttctcactgagatgtaatctagattcactgttgcacatactgaattacaacgtttttttttcagaagtcatactattactaaatataaacaatgtaaatgattatttattcaaaaaatatataaagaaacctaatgaaactgaaatctatgtgcttttttaaaaaaacttttatattaagtttaggagtacatgtgtaggtttgttatatagctaaatttgtgtcatggggtttgttgtacagattatttc

SEQ ID NO: 473689 - DNA, 669 bp, Homo sapiens
ctgttggtgatagtttcttctaggtttattggttactgctggctacccagcccccaactcctctgcagtagaatacaagttccataagagcagaatcgcgatgtgtctggttcatctcgttattccgagtacccagaaaatttgtctcattggaggtgctcaacacatatttactgaatgaatgaatggcccacataatcaccactggaagcagcttttagtattataaagaaatccctttaaaactgcttattttacatcacatgtttttggtttgactctatataatttaacaaaacttaagcaagaagtactgtaacttgtatttcttcagtaatgagtcaaaaaaactcatggtctaaggacatcatttctagtgctaagtatgtgttggttgcttgctggggcacaatgacttttytcactgagatgtaatctagattcactgttgcacatactgaattacaacgtttttttttcagaagtcatactattactaaatataaacaatgtaaatgattatttattcaaaaaatatataaagaaacctaatgaaactgaaatctatgtgcttttttaaaaaaacttttatattaagtttaggagtacatgtgtaggtttgttatatagctaaatttgtgtcatggggtttgttgtacagattatttc

SEQ ID NO: 473690 - DNA, 604 bp, Homo sapiens
taccccagcagtgagtgccacagtggggctggaagggcctaacaaggcccaactttctgtgtttctttctcccttttagataccccacttcttccttgtatcttgcctatctatcctgactgctacatgtgacttcattctgaacataccttcatgactgtcctcaacccatgccagaaactctccccttcacttccccaggaagctcccagtccatgaaacaataataagtttatcaagagctacgaccaagaagaacaggagacattgtttgtgccagtctaaatccaagctagaattactcttgatgcaaatatgatgaagaattttcgttattggtttcgtttgtttgtttgttgttsagacaagaattattcttgatgcaaagatgatgaagggagttgcaagcatgtgttctctcctgtggttttcctagcaagacactctacagagtaaaggcagcatgtgctaaacaatcaatggactctagacggttgtgtggtagccgaggaagagccaccatgagaggttccctgccatcagcctggcaagccgcaagggtgaggatatggtttggctctgtgtccccacccaaatctcatct

SEQ ID NO: 473691 - DNA, 501 bp, Homo sapiens
cccactctgtgctggccataaatgaccacttaggasagttttgccgccgaaataggcctgagtgtctgatcaacaatattttgtctcggtctcctgtgtttcttcacacaatggaagcacctctgggcttagagccaccaagaccctaagactggtagagagcccaccccttctccagagccctgaaaacactacagactcataaacaaagcagcctcatcatcatggaaccagggtggccagcatgaaagacgatgcataatagagacactctcctcaatgccttccccaggtggttgggcttcaggaattttgttctattctgagcacagagagccatggcctcagatttcaggggtgggaggaaaagttccagttctgccctttgcccactcagaagccctgaggaaagctctcagttggtcacctctatctttctaaagttagaaagataaccctacttacacctggagaaaaggatgtcagagaagccctacttgc

SEQ ID NO: 473692 - DNA, 499 bp, Homo sapiens
cccactctgtgctggccataaatgaccacttaggacagttttgccgccraaataggcctgagtgtctgatcaacaatattttgtctcggtctcctgtgtttcttcacacaatggaagcacctctgggcttagagccaccaagaccctaagactggtagagagcccaccccttctccagagccctgaaaacactacagactcataaacaaagcagcctcatcatcatggaaccagggtggccagcatgaaagacgatgcataatagagacactctcctcaatgccttccccaggtggttgggcttcaggaattttgttctattctgagcacagagagccatggcctcagatttcaggggtgggaggaaaagttccagttctgccctttgcccactcagaagccctgaggaaagctctcagttggtcacctctatctttctaaagttagaaagataaccctacttacacctggagaaaaggatgtcagagaagccctactt

SEQ ID NO: 473693 - DNA, 660 bp, Homo sapiens
ctgtctcctgagaccccatccctgaaggactccctggcaccaagcaggcccctggggcagagttacccgtgttctggtccagaacctagaggtggccgggtcctcttcactgtccccttcctgctctccttctcattgttgacatttgattctatctcgcagatggactgtaagctgctctgaattttcttcatctttctatttccccttccactccttcttcctctcatcatccccagcacctagcacagggcttarcacaggttggacatgcaataataatctgtcaaaattatcagtcagtttattaatgcatgagataatgaatgagaaagccctttgtaaactgagttgtactccagagagacgtagaacgtatttttgtaaaatgtctccacttgtctcacacggaggacaaggttggccaagagatacagtgttctggtcgccagccctatgtgcagcagcggccccactgtgatctcttgtggcaaatacaacacagtctgacaggtgcttgtgtatagaaccatgcctccctggtgttattcaggtgagaatttacatctacaaggtaagagtttacagaccttggcaccatcttccccagcccatgactacagtcaacctgaaactcacaataaaagccaaactccttgc

SEQ ID NO: 473694 - DNA, 660 bp, Homo sapiens
ctgtctcctgagaccccatccctgaaggactccctggcaccaagcaggcccctggggcagagttacccgtgttctggtccagaacctagaggtggccgggtcctcttcactgtccccttcctgctctccttctcattgttgacatttgattctatctcgcagatggactgtaagctgctctgaattttcttcatctttctatttccccttccactccttcttcctctcatcatccccagcacctagcacagggcttagcacaggttggacatgcaataataatctgtcaaaattatcagtcagtttattaatgcatgagataatgaatgagaaagccctttgtaaactgagttgtactccagagagacgtagaacgtatttttgtaaaatgtctccacttgtctcacacggaggacaaggttggccaagagatacagtgttctggtcgccagccctatgtgcagcrgcggccccactgtgatctcttgtggcaaatacaacacagtctgacaggtgcttgtgtatagaaccatgcctccctggtgttattcaggtgagaatttacatctacaaggtaagagtttacagaccttggcaccatcttccccagcccatgactacagtcaacctgaaactcacaataaaagccaaactccttgc

SEQ ID NO: 473695 - DNA, 622 bp, Homo sapiens
tgccaacacaagtgcattaaggtgcctgcccatggttatttaacctgcgacaatttctttaaaaactcctggaaatgtgtggtgagaaatggcgaaacctgtcattactcaaaccaaaaatgaaccatgattccatcttctgagggctrccaaacagcaatagtagcgaaataaaaatggatgtcagagctgggagccttggctaaggtgttcagagggaggataataagatacccaggaagaaagaggaaggttagacttcttgacttattgtttccttacacatcgtggtgccagcaagtacttgtgatcttaggggttcataaaagtattctagaatacactttttattcccagatagtgcagtaaatgtcccaggagaattgataaatgtcaaattgggcagcatttgaagctcagtctctagggaacattttctttttcaaattcatatagggacacaatacagatttccatcttctgtctctctctttctccccgtttttctccccagtaattccaaggagaaaaatccttgatagaatgcaataagttaatgttctgagcttgaatagtgcttcgatttgcttttccctccctcagtcttgtcttcggagttata

SEQ ID NO: 473696 - DNA, 637 bp, Homo sapiens
ctgccaacacaagtgcattaaggtgcctgcccatggttatttaacctgcgacaatttctttaaaaactcctggaaatgtgtggtgagaaatggcgaaacctgtcattactcaaaccaaaaatgaaccatgattccatcttctgagggctgccaaacagcaatagtagcgaaataaaaatggatgtcagagctgggagccttggctaaggtgttcagagggaggataataagatacccaggaagaaagaggaaggttagacttcttgacttattgtttccttacacatcrtggtgccagcaagtacttgtgatcttaggggttcataaaagtattctagaatacactttttattcccagatagtgcagtaaatgtcccaggagaattgataaatgtcaaattgggcagcatttgaagctcagtctctagggaacattttctttttcaaattcatatagggacacaatacagatttccatcttctgtctctctctttctccccgtttttctccccagtaattccaaggagaaaaatccttgatagaatgcaataagttaatgttctgagcttgaatagtgcttcgatttgcttttccctccctcagtcttgtcttcggagttatataaaacctgacata

SEQ ID NO: 473697 - DNA, 632 bp, Homo sapiens
cattgccctggtcctgtttacttactaaatatatccatcartggaaagctagttaactgaattttagaacaaatatacaatagaatactgtgcagtcattacaaatgatgatgaggatgtataattttcacattaaaagatataaataaatatcttgaaggaaaggaaattagttaaattcaggataagtatgctctagttcataaaaataatactttgtaaatttgtacatgagattgtgtgtctacatatatgcacagaaaactatacaaaaggctattcaataatttaacatcttttatcacttagagatgatgttttggttaatttttactttttcctttgagctttctgtattactttttaaattttacttttacattctaattttattatcaaaaacataaggaactcttttcattgtgaaataaagtatttatgatgctccacaaagtgcactgaacattgctcacatcatttaattatcatttcaaataactattaacatttaaaaacagaaatttaaaattaaataattaaattaaaaataaatagttaaaaactgtattttatatgtgtctgtgctgtagtttatatacgatttctcttatgttgggggtttgggtcaattc

SEQ ID NO: 473698 - DNA, 654 bp, Homo sapiens
caccagactagctttggaaaacaacagctgcaaagaccaagatattataatcgtattagtctcttaagtgtcttatttcatttcctggccctgtggttgacatatagtaggtgctcaataaatgtttgttgaatgaatgaggagaaagccacatatataaagcccactttctctgattcaatgttgtgtcacagagataggtaatgtccagagcagtgattttcaaagggaagtccccagaccagcagcatcttatcctctggaaacttgataacaatacgaatccccgcctccatcccacacagaattggaaactatgcagtgggttcagcagtctgtcttaactagcattctaggtgattctggagagcacagtgaagtttgagagccatttgtctaaaaagatcccttcatttgaggtgtttttctaacctcacatgctagcaataacaattctatacctgtaattcctttgtcattttactgagaaaagtcctcacataagactttaccaagttttactggtgagggtttaaggtgaattcartggcatccagacaagaagaaaagatgttttcagcctgagggagccaaaaagagcagggattcagaacctcagagactacccataaatgaatacagtcttgtgtgtga

SEQ ID NO: 473699 - DNA, 654 bp, Homo sapiens
caccagactagctttggaaaacaacagctgcaaagaccaagatattataatcgtattagtctcttaagtgtcttatttcatttcctggccctgtggttgacatatagtaggtgctcaataaatgtttgttgaatgaatgaggagaaagccacatatataaagcccactttctctgattcaatgttgtgtcacagagataggtaatgtccagagcagtgattttcaaagggaagtccccagaccagcagcatcttatcctctggaaacttgataacaatacgaatccccgcctccatcccacacagaattggaaactatgcagtgggttcagcagtctgtcttaactagcattctaggtgattctggagagcacagtgaagtttgagagccatttgtctaaaaagatcccttcatttgaggtgtttttctaacctcacatgctagcaataacaattctatacctgtaattcctttgtcattttactgagaaaagtcctcacataagactttaccaagttttactggtgagggtttaaggtgaattcaatggcatccagacaagaagaaaagatgttttcagccygagggagccaaaaagagcagggattcagaacctcagagactacccataaatgaatacagtcttgtgtgtga

SEQ ID NO: 473700 - DNA, 614 bp, Homo sapiens
tgaatttcagataaacaaccaataattctttattacatccatgaaatatttaagacatattaaaaaatgattggttatttgagattcaaatctagctgagtgtactgcatttctatttgttaaatctggcaaccctaattcatgcacagtygtaagtcacaaatgaggcttttgtcgtcttccaaggtttcagagatgaagaagaaaatgtcttcttctactccatttgacttgctgagttgcagctattttggctacacatgccccctcctacgctgtcctctaaaacttaatgtttccattttcatcacctgctacagatgtgccagttctggtaaatttcctagcaagcttgaaggaagtgaaggacaactgcaaggaagggcaggatggagcatgcagcccacgtattccccagcttggtggggcagaatgcgttcttggctcctgaggaatgggcaggcaacgcacaggggtcctgggaagaaagggagagaatatcctgggagagccatagaccctggcaccctcctgtggtccttcatcaggtacggatactttctgagctgtgtgattgctgatctgattgccattttgtggatgaggcgttctca

SEQ ID NO: 473701 - DNA, 547 bp, Homo sapiens
ctagacaatctttcttctcaatgagggttgaccatgcrcatggtactccagtggatactcccatgaaatagcttctgaagacatgacctgtcttttctggctctctgtctcttcccctaaccatttcatttttatatagcaactcttgttttgcaaagtactttttgtttacttcatctcattttagcaaggccaaataaccctaaagagataacagaggcatagtgagactaagagattatacagttagaggcaaagcccaaatgagaattcaggtttttgaagtccaactgagagtattttttaacatgataccagttgttcaacttttaaaatactaatgcccgggtcaaagcctggacatggatttttttttttttcaaatctctttgggtggttctactgtgtagtcaaggttaagaaccattgtgcttgaccatattaaatctttccttcccaataagaaccatatcagcagaaagtctaccaataatctacatcaccttaaaaatgaagaaatgtattgtaatccccttgtccctaatat

SEQ ID NO: 473702 - DNA, 601 bp, Homo sapiens
gttcagaatatctgcatcatgtagcatctttctatttttaggagtctttaaactcctttattctgaggccccagaatattctcatccaccacgtactttcacgtggagatgactgacttcatctttgacaatggcagttccctaaccttgatccagcacgggagcaggaattayggcgaaaatggccacccaaactgcacccagtgggaaaacagcattaactcagcttttaaaaaagtgtcaacttggaaaatccaagacctagatctgatgcttagggacccacaatgccaggcagcagtctgggagatgtcacttctggagcttctaatgagatgcaaatcacctagtgaactactggggagctgggaaacaatgtcctgggtaaaagcagataaaaatggaatgaaagaatttctttgaagattggaacgacattttaagtgcttgcggatatgggacaccagatagtgttggttttactaagctaattgtgacggggtctttgattccctgcagcaggggaccctggggcactcgtctccagctctgcctcactctttgaggagctagttccagttctactgtgagtgtgcaaggg

SEQ ID NO: 473703 - DNA, 598 bp, Homo sapiens
agctgtacaaatccccacccaggtccataaattataaaatatttttacacatagagagggcagtcattagtatgaatgacatgatttgggggaggttatatctacaaatgtctggcaggtgtgtgtgtgtgtgagagagagagagagagagggagagagagattgagtggaaatagaaaagaatgtcagtagtagaccaaaataaaatcacaaatataatttttttcttgcatttaattaataagatgtaaaaatgaaatcaatgaagtgttagtggtgagaaatgcagttgtgatctttcagtcttaatcttcaaaaaagccaagaaaatagtaagtatctgagagaagcaaagattaaatagaaaggtatggtttggttattttcctaatttgtgccgaattttggaacaaatttcttaagtacattacattataaaatcaatttggtccaactatccagtaaacattaagacgtttrtacaagtagggcagcacaaagctttcagttctctgctctaatcaagaatttaaatttcagttcttcagggtcacagagaactaccaaatttctttgccttgttttacaatccaatatg

SEQ ID NO: 473704 - DNA, 513 bp, Homo sapiens
aaagtaactgtgacattaaataacatcagtttcaagactgtgttggaggcaaaagytagattagtgagcaagggagggagggggaggtgaagaagggccagtagtaagagttaccttccaaggaatgaggctgtgaagagtggagaagagagcaacaggtggagggctcatgctgggagggaactttctaaagacagaagagatagggcctgtgaattctctgagagtcaggactgaggggagttgtggccttggtgcagcaggacagaatgtgattgatagaaagccttatgctatagatgctgggctttggaccagcagcatcaacatcacctgggagattgtcagaaatatgggatctcagtctgttccagacctactgaatcagaatctgatattaaggttccagatgatctgtgagtgcattaagtttgagaaactctggttaagagcacagcaaagaggagtaagtgctggtgagagaaggaagagcaacttatttgtggaaatggc

SEQ ID NO: 473705 - DNA, 569 bp, Homo sapiens
tggggatggaagtgtgtgagacccaggaaggggaaggaatgaggaccctcgcttgggccagaggctgctgcagcacccagcagcagcaccatttctaccacttcctccccttcacagagctgctgcaatactgcctcggggagagaggagggagaaggctcaaacctgttgctttcctttaacttctccctttgaagccctattttgtgccaaccaagtagagtcttcctgagttaaaaagccttcagggagrgtcttgataggcaactttcagaaaaagttactgtcccaagcagcagagtcagggcaaaccagtttctcagtcccaatcatgtggtgatcatttgccttgccaggccttacccgagttaccttttgctagtggtgacgtgcacgtcttgcttatgtcatttgccttgatttgatggctaacatgatcttcttaaaggcttaactttttcatgtctgtttctgcacttacccaaatatccagaggaactttcagaaggtaattgtttttatttcctagatataccaaatagaactatgtttaagatctttcagtgcct

SEQ ID NO: 473706 - DNA, 654 bp, Homo sapiens
gacaacttgcttttatttttgttatcgattctaaaatgatatttgttgtagaaactgataatgaaccagtcttgcaaacacaatattcaaaacaaagtctatttttaatattttaattatgcaagtaatccatgttcattccagaaaaaaaaatagaagataaagagaacaaaacaacaaaaaattatagaaactaaatccttatataattccactacttggggatacaattgtcaatactttatggatgtccttccagatatattctttgtatatacacacaaatataaataaacacacttgtaagatatataaagacatcaaattttaaatgttcttctatagtttttatttcactcaacatgttactaaacttttgagttcagtagacatacatcataccgccatattaatgccttcgattttctcatatgaatgcatcaaaattttttgactaatctgaaggctatttttaaaatttatttatttttaattttttttctgaagaaaaaatgatttttttctatacaatgatgctagaagaaactgatttaaaagttacagctttgaatgttaaatgatgaagggttttggagtcattccttttgacctactaattttacaattctsttgaacaccaagtgttttttagtg

SEQ ID NO: 473707 - DNA, 553 bp, Homo sapiens
ggttactttctgtagcatgttgtatcagcatatccagtgacctttctactccacctttgctgtccctcgaatcagatctgaaaagtgtctacctttgcagaaaaaacaaatgaagtacagttttgcccaggataacccagtaaagtagtgattggctgagaatgcagatctgaaggctctatcctattaagtttatatcaytccaatttgattcaaggttttttattcataataggaaagataatgtcactgccacgaatcatgaggcaccttctcctcagaaattagcaaaaagcagatgccacactaagcacttggtgctttaaggacaagaaattctctagtagtctgtatattgggccaaaatggggtttcttaggcttgagaaacaaaacttgcttgaaaagtgtttgtttacttttatttatattattttatttcattccatttcatattatctcagtatttcatttatttatttatttttctgactcttttagcaggtcttcttctcctgctcttcatgatgcagaactggcaattattttcattt

SEQ ID NO: 473708 - DNA, 495 bp, Homo sapiens
tgttagaactttgtcactgagtatattgtcaggaactttagaaaattgtagcatacaacactgatggagartcacccttatgtgagcacccatcaccttgactttttaaaatatgtttctttttacttcctacttccactcttttcaagaagagcttattctttcaaggactgtaatttgaaactatgcaggaaaatctaagacttaaaaacctcaagttgataggattctgtcttctgaaatgctatctacttgaagatgaatcttaatgactcactgaaaaagctgatgaaattcaccagcctctgctcacacaaccagcatttaccttgttaaaaaagattaaaaaataaaaaagaaaaaaatcttgctggattgactgtcattcaacttgagattggtttctgtattaaacatccccagttccaagaggcagactagaaagaagaaagagtgaccacagggattcgttcttgagttgaaatgaagaaaaag

SEQ ID NO: 473709 - DNA, 495 bp, Homo sapiens
tgttagaactttgtcactgagtatattgtcaggaactttagaaaattgtagcatacaacactgatggagagtcacccttatgtgagcacccatcaccttgactttttaaaatatgtttctttttacttcctacttccactcttttcaagaasagcttattctttcaaggactgtaatttgaaactatgcaggaaaatctaagacttaaaaacctcaagttgataggattctgtcttctgaaatgctatctacttgaagatgaatcttaatgactcactgaaaaagctgatgaaattcaccagcctctgctcacacaaccagcatttaccttgttaaaaaagattaaaaaataaaaaagaaaaaaatcttgctggattgactgtcattcaacttgagattggtttctgtattaaacatccccagttccaagaggcagactagaaagaagaaagagtgaccacagggattcgttcttgagttgaaatgaagaaaaag

SEQ ID NO: 473710 - DNA, 485 bp, Homo sapiens
tgtttattagtacttacaaggcattctgcttgtttcttatagggataactgttttaaaacactcatattttattgatttgaataatatttaatcaaattatggaaattacggtaacaaaagtgatgtaaacaggttacggaataaaaatactaacccttggcaaatgtgcagttctaccatctggatgtacctgaagaccgcctactaggtgtatgtactcactgtgctacagagaatgttcagttcaccaataagtcatcattaagtagagattggttaggagaacttctactgtyatgcctttctgagctataatatgctagactctgtggcaggtcattaagcttggcctctttggatgaattcacagtctagtgaagaagatatgtaaagtaataattaaactaattacaatattagtgctacagtagagaaatgtgtgttactgaaatgccaggggttctggttaggtcctactgcttgc

SEQ ID NO: 473711 - DNA, 540 bp, Homo sapiens
gtacatgctctgctactgaagatgttaacagtcaaggaacagtttccagactgcagcctattaaaattgctgatgaagttttttgcaagatgaatcagatgggaggtcagaaagaaaaatcaaagaagacagacctcctaagtgaatgaccaagtactgataggaggtctcatggtgtgctttggagtgagagtcaggtttgcacctgaatacagtgacagtgaaataacatggatgtatgaaaaagaagcctaaactactggcttcatatgatarccatgagggtctcccaatggacataactactccaaaggacacttaggagcctctacagacagatggcaggggaaggaagaaaggggaaaaataacattactatgtgctaggaattgtgttaactccttttcacattcttggctctttttaatcaagagacagagatggagtttgaaacagtgacaggattaaatgttccctaaactttaagagagcaggaaaaaaggaattataaacccatggctaaagataaataaggctgac

SEQ ID NO: 473712 - DNA, 242 bp, Homo sapiens
agtgacctactccattttcctcactttatcttgtgagctttcttctcttgagtgattgattcaaggtttggtaccagaaggaatgacaagagggagacccattcattttattatttctcttctattatttctgctcgctctcttttatatagtgatasaagagtgcaggcacctgagattaaaacagcttcccttttgcgtttggagttctttgtcctcattgtgtttgtactgtcaccggg

SEQ ID NO: 473713 - DNA, 680 bp, Homo sapiens
tgtgtttaatgagtagagagattattcaaatcagcccacagcagagcattatttctgaggctctagctatcttgagcaggcatcttctcctacaatcaggcagtaaaagcaaaccatcactcttcagttacctggccatgtaaaataattccgtagacaccagatcacatccctagattgggagagaagctactaatgatgcggtggcctgacaaaaggacagcagaaatagccttcaacatgaaaaaygagaagtcacctgcgctaggctctaccgtgcgtcagctttcaatttgtcactacctgtcagtgatggagactgttagtggctaataatgaaaacatgcagccttacaaaatagtctctttaaaaatcactgtttgtgggcatatggcctttgtcccaataacatcacaatgggactcactgcaaatgggcaggccaatgtttaataatttttaggatgttaaaatgagttcctactcatgtaagatttaaaagtcagaacaactctctaggggagaaacccctgagacagttacaaagttgccaagaaaatttaataagaactaattttgagctgataagcattcaatccaatatggtgggattaagcaataagaattcttcctgggactttacagagagataagcatctcatgaataagtaaattctgaa

SEQ ID NO: 473714 - DNA, 402 bp, Homo sapiens
ccttaaggtttatccacgttatagcatctgacaggatttccttcattttctatttgtttcttcttatataagagtattcaacctttaagtgcatgacaaagtttatacccattcctgttctagaatagtcttayaggctgggctctgtggctcatgcctgtaatcccgtcactttgggaggccaaagtgggaggatcgcttgagcccaggagttcaagaccaggccgggcaacataagtgagatcatgtctctacaaaaaaataaaaaattaatcgggcatggtagtgtatgcctgtagtcccagctactcagaaggctgaggtgggagtattgcttgagcccaggaggtggaggctgcagtgagctgtgatggcccctctgtactcagcctgggcaacaga

SEQ ID NO: 473715 - DNA, 631 bp, Homo sapiens
cagtatctgtcaataagccaagtggacccaactgcatatgtggagttgttcatgatctgaagcaataggtaaggagaaatattcgttgttgattcagatgttagcttaggggtgttaacaatccctgtctgaggctggagtaattcattcagaatatgtttattggtcgcagaggacaccaagttgggatgacttgttagtaaactggaggtaggaaatcatgtcctaagttacctcgacaaacaagagaagtggttttccaagagcagaatgaaattcttattggggaaaaactggttgagacrttagggtcataggaatgacctgatggccaccagagactaaaacataaacatggcccgtggtctagataatgagagacaaaggttgagaatgaatctttcagtattcctcagacccaacgaggccgttttaaagtcttcagtgtaaggccctgcattttaagaagagacatggagaaatccacagaaaagccagaacaatcgctggaaaataaaaagatcttctgaaaacagataaaagagtttgagttattcaacgtggaaaagagaagattaagtgtgccttgatttgagcatgagaaagattatcacaaagagaaaaatggcca

SEQ ID NO: 473716 - DNA, 595 bp, Homo sapiens
aaagtgagctcttgacaggaaaggggttctatccatgatcttacaattcctaaacagcaacagcatcatggacrtatttgttcctggcgtcataagcctgcatacggtaggcattcagttaataggtactgattggtctaacagaggaagctgggcttgattataaaataaactaggctatgaaatcatgcctcctaaaagctcattaaaggcagcaacacgggatggggactgtaaggaagttgtctcccacctgcctccctcctcagacacacatcattccgcagatgtgaaaacgacccagactctgcccgcatgtggcctcccggaccgggcagtagggccttgcccctaccctcatgaagactgtcggctgtgttacagaactgctgctctgtctctgactcccctcactcccatgctctgttggaaactcaagttgtgaaaccacaaaacacagaaaggaagtggtcaactattgcacatactcaagctatgtagtctcagtttattccattcttgcaggatcattgtaggaaggcataagagtcctgcttactggtgagccactgaacacaaactcccttctcacctc

SEQ ID NO: 473717 - DNA, 631 bp, Homo sapiens
cctccaattcttcccctgaacagcactgggccaggtgcatttctctgcccattcaaggattttactaaaactttgatatttcttgtacaacagtttctagataatgttcatcttgtccccatgttctctggagaaaggagtgagtattgattacaaggatggaagctctaatctcaatcaggaatgtgactctcacatttcatgagaatcacattgaagacctactaggcattctccccacaaattttgtgttgcttttcagaattcctgtctccatccctcctcctctgccaccttgctcttccattagtttagtccctcatagataataatttcyttaaaaattgcgccaaaatgtctttccagatttctaggtgcaagttatcttcagcagatacattggagactgagttggaaacactaatgtggagtaaatcacccctcagttcctcagtcggggatctcatcagttgggtttcaaaatgattgatgaagttggagaggaaacatgcatttctgctatctagcaaaataatacataaaaatacatcactttttaatagatgtaggggaggtgaattattcaatctggttaacacatgaaacagcaaatcttacatgtagtcatgaa

SEQ ID NO: 473718 - DNA, 556 bp, Homo sapiens
ctggggcgttgcttacgactggtcctgaggacgygggcggggtcatgatcgcctgggggcgggcactgagggccgggggcggggcccggaggcgcagcgggttgccggcctgcggacctcctgacattccctgggtccttctcaagaatgaactggagctggcggagaccaaatgcaccttgcaggaggagaagctgcagcaggtgagggcagaagcgggttctgttggaggagggtaggctttcgagtgtggatggggaagggcctgtcgccccgcccccgccgagtctaacccgggtgtccacacccaggacgcgctgcagacagcggaggcctgggccatattccaggagcagaccgtagtcctgcaggtgcggccccactcagacgccaaggtgcctcccgcctctcctcccccagacctggggcggtaagtctcccaacccaccgccaggacgcctccccgaggcctcagtccgcactctcacccgctccaggaggtgcaggtgaaggtgatggaggctgcggaggagctggacgcctggcagagtggccg

SEQ ID NO: 473719 - DNA, 298 bp, Homo sapiens
gctgcttactttctttgttcctgacttttaaaagtgtgttgctattgatacacagtctcctgatatgtaaaatgctgggaggatgaagctaagttactcaaagtgccattcagaaactgggcccagttctatttgcagctacatacattagaaatcatttctagaggcygagcatggtaactcatacctgtaattccagcactttgggaggccaaggcaggagaattgcctgagctcaggagtttgagacctgtctgggcaacatggtaaaaccccatctttaccaaaaacacaaaaa

SEQ ID NO: 473720 - DNA, 500 bp, Homo sapiens
gctgattactgtcttcttattttgggatgccagttatacgataccagtagcttttataagaaaaaaaatgcttgatatgacagaaaacatagtgtatgaaatacaatgtccttcctccttatagaaagttcatatcctttaataagtatcacacaaaataaaatcagctatttgtcaataaacctctaatgattccaaaaataaactcagcaaaaagttaataatgaaaagcttccctcttctaggtaaaatgatactagacagattatttgtagtttataaaaaaactttttgtgaccttgtgacattttattaactccttgaaatcattcaaaattgcaatggtacattctaagagaaaataaaaaccaaacaaaaagagaaaaaacaaaaacaaaacaaaaagagagaataaaaacaaaaataaattaacactttcgcatcaccaatarccacccaaacaatgggtgccaagattcagatctaaccttgaagattac

SEQ ID NO: 473721 - DNA, 589 bp, Homo sapiens
cacttagaataaataggaatacgcatacattgtttgcatgaacaaaaaagctgttttgctttctttaaaagatcattttataaaatgcagaaaataccaaagggaaaataatgtttaatattctcctgcctcttcctggactcagaatgacatagttatctgcacatttgcccaagcaaaaaccggggtgtcatccttggtcctttcctattccttacttcccacactcatcaatttcaagtctcttacaaccataacaaccctttcaattctatgcccatggccaccatcctcacacaggcttgtaaggtggcctcactgcaaccrtcttcaggactgcccctccccacctctccataacgcggctctccagcccacatctcctcctctactaggcagacctcccgaagcagcactccacactgagagtgcttttcacctgcccactagttgattctatctacttttgacatgcagaagggatctaagatccaaggcatggacaggcacttgctgtccatgttgctgtagtgatcaaaatacaataagcacttctaagaggaagatgaaagagacctttctcatgatg

SEQ ID NO: 473722 - DNA, 589 bp, Homo sapiens
cacttagaataaataggaatacgcatacattgtttgcatgaacaaaaaagctgttttgctttctttaaaagatcattttataaaatgcagaaaataccaaagggaaaataatgtttaatattctcctgcctcttcctggactcagaatgacatagttatctgcacatttgcccaagcaaaaaccggggtgtcatccttggtcctttcctattccttacttcccacactcatcaatttcaagtctcttacaaccataacaaccctttcaattctatgcccatggccaccatcctcacacaggcttgtaaggtggcctcactgcaaccatcttcaggactgcccctccccacctctccayaacgcggctctccagcccacatctcctcctctactaggcagacctcccgaagcagcactccacactgagagtgcttttcacctgcccactagttgattctatctacttttgacatgcagaagggatctaagatccaaggcatggacaggcacttgctgtccatgttgctgtagtgatcaaaatacaataagcacttctaagaggaagatgaaagagacctttctcatgatg

SEQ ID NO: 473723 - DNA, 423 bp, Homo sapiens
aaagcacctaatgaagtctaaaaaagcaagaataatgtctaaattaaaccaaaacaaagtcagagctgtttttcatagcttgtaactcttgtagaatctttcatcttagcactttttctggccttccaaacaacgttcascgaggtcatgatggacagaaactgcctctgctgattgtgcttcctaggtctccactaacaacactgctgaaagatctccaggagcctttggacataattaaagcagttctggagacagaagccacatcttcacaaccaaaaggaaggttcctaataaagacctctcctaagccttctccactggctcaaccctgaacactcaacaatgaacattccacaatgaaatacaacaccacctaccaaacaaaccacggaaagggctctaatgtaattacacaaaaaa

SEQ ID NO: 473724 - DNA, 548 bp, Homo sapiens
tccaccatcactgcctaattcctgaacgtccttcgaaatttgaatgaaacattacttatgggaaagtgactttcttacctcttgtaagatcctgtataccaaagttccttatcacctgtactatctgttcctttactagactatcagctcctaggcagcaaggcccatctcttcaaacacctttgatatcctagtgcagtttttgatatcccasccttggtcctggcacaggaaagatgctcactaagtgtttgtgtaacaaatgtttgtataataaatgacccagccccccaaatactcaaaactaacaactaattaacacaactatctagttaagcccaaaaagacaaaaatcatggtgtgtcattttcatgactgaccaacataaataaatgatatttgcaaattaaaacaacaataagatactatacgctataaatcgattagaatggctaaaacgcaaaaacattgacaacaccaaatgctgacgagcatgtggagcaacaggaactctcattcactgatgtcagaaatacaaaaaggtcttt

SEQ ID NO: 473725 - DNA, 548 bp, Homo sapiens
tccaccatcactgcctaattcctgaacgtccttcgaaatttgaatgaaacattacttatgggaaagtgactttcttacctcttgtaagatcctgtataccaaagttccttatcacctgtactatctgttcctttactagactatcagctcctaggcagcaaggcccatctcttcaaacacctttgatatcctagtgcagtttttgatatcccacccttggtcctggcacaggaaagatgctcactaagtgtttgtgtaacaaatgtttgtataataaatgacccagccccccaaatactcaaaactaacaactaattaacacaactatctagttaagcccaaaaagacaaaaatcatggtgtgtcattttcatgactgaccaacataaataaatgatatttgcaaattaaaacaacartaagatactatacgctataaatcgattagaatggctaaaacgcaaaaacattgacaacaccaaatgctgacgagcatgtggagcaacaggaactctcattcactgatgtcagaaatacaaaaaggtcttt

SEQ ID NO: 473726 - DNA, 574 bp, Homo sapiens
ggctgttatcctaagtaaactaacagaaacagaaaaccaaatattgcatgttcttacttataaatgggagctaaatcttgggttcacacagacgtaaagacaagaacagtagacactggggactgcaaaaggagggagggagaggggcaaggactgaaaaactatctgttgggtactatgttcactatctgggtgacaggatcaatagaagcccaaacctgagcaccatgcaatacacccttgtaacaaacctgcacatgtgyaccctgaatctcaaatgaaaatcaaaaaattcaaaaaaacagttgtgtaaaaggggcttggggctaagaaaatacttgattcatctgtcagaagcaaacacaaaatcacctttgagagaaacctcttcaacccagtccagaaaagattccctaggataaaacttgacttatcatgaaatgaataaaaacataagaaaagtaacaaagacactatgaaaaaaactaagatttaaaacaacaaacagaacttacttaaaataaatgatcattgcaataaaaagtctcaatgggaatgtcaaacagcatgttat

SEQ ID NO: 473727 - DNA, 465 bp, Homo sapiens
aatttgatctttagccacattctacttagtcaaaaaacagtgattctacctaccctttaaaatatattccatgtatatattaccttgcatttgtatargtatatgtatctttaaacactttcatatgcatcatcttaaaattcatacatatggacatgtttgtcagaaataaaatttaaaaataatttgatgaaaaacatacaatttagacttttagggggtaattaaaaatatatataattttgtaacacaacgaaacagtacaaattattggacaataggaaaaatattaatctattagtttctttataaaagccaaacaagtacctaacataaaggtaaattgtttcaaattgaattttataaaacattttattgtgttgaaggatgacagaatctaccaactccaaatatgctactttggcataagtattattttgagagctaaaggcacttgaaagacag

SEQ ID NO: 473728 - DNA, 520 bp, Homo sapiens
ttcatatagatggtaattttctctgtgaatgacagctttttcccttctttttctattcttataccattttctctttgctaaattatttaagactttcagtataatgttgaatactagtgatgatagtaagtatgcttgcgctgttccttacgttaaagaatgcttttagcattttgctacttaatatgtgttctctttctatatacagttgtcccttggtatcctttgaggattgattccagaacaccccacagataacaaaatctatacattctcaagttcctgatataaaagggtgtaatatttacataatctatgcacatcctcccatatactttaagtcatctctagattatctagaatatctaatacaatgtaaaggctacgtaaatagttgwtacactgtattgtttagggaataatgacaaggaaaaaagtttgtacgtgttcagtagagacactttttttttccaaatatttttgatccacaattggttgaatccatggatgagaaactcac

SEQ ID NO: 473729 - DNA, 601 bp, Homo sapiens
gctacacctctcactatgaatgagtaagtaacctatattagttacttgactggtcttgtctgtagaagagagacctgtgaactttgataatatagatcccattgtgatataccaaagattaatttcagtaattgagcagcctacacattgtctctcctttaggtggaaagagggaaatggaaatatggtagaatctcttcttaattgaaatgaaatcttagcaattttacttagatgtattaaattcacagcaagagaataaactggaatttgctcactatgaaagatgatggtaatttttaagtaatatatatgtatacatttatttattcaaataaaaaattaacaatctcataatgtgatattaaaatcattcatatcagagacattcattgttgacaaaatatttctgtatgaaaataatactaattcggtatttagtaacatttcttcactggaaaatattatctcatatattatgcatayaatacataacttctttttattattttaattatttactggtaattagtataacttaagtgtatgtgcgttagagggtacatatgatgaatgtgtctgtgtgtttatatgaagtata

SEQ ID NO: 473730 - DNA, 432 bp, Homo sapiens
atggcaggaagagttatttccactctctttatgtccccagttctgctttgtgttgaggtgaaaacactaacttttttctaatttctccttatttttcctcttctcctcttctcttcataaaacatgggcaaataagcacttaggttccttttatttctccmgtttttgcccatgcagtctctctctctctctgtcctctctctctctcattctctctctctctctccctctgtctctctctgtcacacacacacacacacacacacacacacacacacacattcacacacacgatctggaaatcagtaattcttgtacacactcctactttgacttgcttgcctgcaaacctcataaggcatctccaggctggaggttcaccttcaataaacatagagctgtctatttcacagctatcttttggccatgaaa

SEQ ID NO: 473731 - DNA, 508 bp, Homo sapiens
gcaaaagtcgtttcaaaaagtaacatctgaaactaccttctttcttcaaaaagtaattactgaatccaaaggatttaaaaaaaaaaatagatgtaggggaaaatagattcctgtcaaaatcacttatcctcaaggtaatatatccatgtttaaaatcttaagacaattaaaaaaattaagtttttctgtatttttggcctcctaatgaaatctgatattataataagaaaatctattttgctcgtgggttttgttctccttcatttgtcaraatcacagacccatagcatacggagatagtaatatcaacatctgcctggaaaaaaataagttcagagaggttcgtttgagagtaaaataaaaatttccggttaatttcatcttgcttaaataccacagtaaactgaggagattgatagctgagaatgaaaaagaaataagcatctacaaaaaggaacagttgagaagaaatataattttcttccagaaagtatcctcctggtataca

SEQ ID NO: 473732 - DNA, 616 bp, Homo sapiens
ggcttctgtaatcaagacagatactcagagaaatgaaagttttagatggagattaaatcttgatgcaagtgtaaaaattagagattttgcaaaatgtattatcttctcataattcaataaattcaaaataaaaaattaaaaacatttttaarggcttaactatttggaaatcaagaaatattttgataactattgaattaaaaaggaaatcaaatgtgaaattttaaaattctataaagcaatttaaaagaacaaataatgattaatacttcctattaaaatctatggagtaaatagttatcaccctttagtattaaaaaatagaaaaataatattaaaaagccaaaatatatgaagaagattgaattgatggatatgcactgaaataaaaagaaaaaagcaagtgagttaaaaactgcttctttgaatatttaaattaaatatataagatatatgaacctcttaaagatctgatcaaggaaaataacaaaataggcaaacgtgtaaatactttttgaaagcataacacggatactggaaaaattaatagaactggagcggaacatgaaaatctgaacgaaatagttggttttctagcaaaaaattatcaaaatta

SEQ ID NO: 473733 - DNA, 538 bp, Homo sapiens
aggtggccttataaccattaaactccactaagtatctgcatttcaacaatgtaaacaataaaagaaagagaaataatcaattatactctggtgacccttcaaataataatgtaagaaaaatggttaatgaaatagaaacaataatccttaaataatcatgaaatagtatattaaagtggaatgttgaaaaaatctagactgttaaatgtaaaattggttttcactctatgtgcctggcttatttcacttaacatgtcttccaaggttaccaatgttgtctcaggattttattctttttagtggctgaatagtataccattgtatatatataccacatttttttcatctactaatctgttgagagacttaggttgattctatatcttggctgtgaacagtgttactatgaatatatgcacacgtgcttttttgagtatckgttttcaaatctttggggtgtatgcccaggaatggaattgcagggtcatatggtaattttgtttaactttggaggtgtcactaaactgctttccaaaac

SEQ ID NO: 473734 - DNA, 519 bp, Homo sapiens
ctttcccttcatagtaaactcactcaacaggctgtgtctgttcaaaacagaaagctatagaaaatagagaaaaaggagataattacccaagattgccaatgtaatagaaaaccagccttaattatttctctragagttctatgtaagtgtcagtgaacacaatattccctcatttcaaagacttaaagcaggtaaataaattaaacacacacataaaatagtgaaaaattctttaaataaactcaaatacagaaaattataattaaaccctccacttttggtggccctcaaatagtaataaagagtttcattacttgtgcttattagctaaatgtccacagtatcttattaattacacaggtgttccatctttattaaagcacccaaaaagattttagaggatcttctagtagactaaaaactgccttaaaagagcaggaaggaaacatacatcaacatactagataaaacacagtgtattcatattctctgctgatcactatgcgaggcatgtatatc

SEQ ID NO: 473735 - DNA, 519 bp, Homo sapiens
ctttcccttcatagtaaactcactcaacaggctgtgtctgttcaaaacagaaagctatagaaaatagagaaaaaggagataattacccaagattgccaatgtaatagaaaaccagccttaattatttctctaagagttctatgtaagtgtcagtgaacacaatattccctcatttcaaagacttaaagcaggtaaataaattaaacacacacataaaatwgtgaaaaattctttaaataaactcaaatacagaaaattataattaaaccctccacttttggtggccctcaaatagtaataaagagtttcattacttgtgcttattagctaaatgtccacagtatcttattaattacacaggtgttccatctttattaaagcacccaaaaagattttagaggatcttctagtagactaaaaactgccttaaaagagcaggaaggaaacatacatcaacatactagataaaacacagtgtattcatattctctgctgatcactatgcgaggcatgtatatc

SEQ ID NO: 473736 - DNA, 519 bp, Homo sapiens
ctttcccttcatagtaaactcactcaacaggctgtgtctgttcaaaacagaaagctatagaaaatagagaaaaaggagataattacccaagattgccaatgtaatagaaaaccagccttaattatttctctaagagttctatgtaagtgtcagtgaacacaatattccctcatttcaaagacttaaagcaggtaaataaattaaacacacacataaaatagtgaaaaattctttaaataaactcaaatacagaaaattataattaaaccctccacttttggtggccctcaaatagtaataaagagtttcattacttgtgcttattagctaaatgtccacagtatcttattaattacacaggkgttccatctttattaaagcacccaaaaagattttagaggatcttctagtagactaaaaactgccttaaaagagcaggaaggaaacatacatcaacatactagataaaacacagtgtattcatattctctgctgatcactatgcgaggcatgtatatc

SEQ ID NO: 473737 - DNA, 486 bp, Homo sapiens
ttatagattacattcaaatatttgcaatataaagttattatggttatctttgtgcaagaaactttgacataattccagattatttccttagtaaatggataaatataaatgaattttctggataaaaggaagtgtagtattttagatttttcacaggttatcaaattgatttcagaaagtatgtaccactttgcattcctacagaggttttataaatacctctgtgtcactatccctcattaacagtaaatattgtttttgtcaattctataaataggaaacatatgattgttrcagacatttatcctgttatttgtcatcatgatacattttgttatatgtttttggggtattctgcaaagtgttttaaccctttctttctcttttatttctattaaggtaaattcattgattgattgaattgggttgtgcacaaaaaaggaaaataaaaggtaacactttgagaaaatattagcacttacaaat

SEQ ID NO: 473738 - DNA, 510 bp, Homo sapiens
ttttctgcttaaagtttgcataatattcattgtttaaaaaaaaaaaaaaaaagaaaccctggatgttattcagaaaaatatgggagccaaaatatctttgctcagtaatttcttttgacaaaattttaaaaataaacttcataaatgtaaaataatatgaacaattcaacttgtaccaaaacayataaaatgagaataaagatttcctcttcacatctgacgtcattactctccctaaagtcatctcaagaagcaaacactaataacatctctctagacatctttctatgaataattacaaattaaagtataatcaataaatacatgagtagatgggtaaatggataaatgagtgtataggtaggtagataagtagatataaatattgtttctaaaactaaaaatataatacatataatttcttaagatttaggacaaatccaattttttatctccttgtatcttctcacagtcacccaactttaaccacttgcttaatttagaacttca

SEQ ID NO: 473739 - DNA, 510 bp, Homo sapiens
ttttctgcttaaagtttgcataatattcattgtttaaaaaaaaaaaaaaaaagaaaccctggatgttattcagaaaaatatgggagccaaaatatctttgctcagtaatttcttttgacaaaattttaaaaataaacttcataaatgtaaaataatatgaacaattcaacttgtaccaaaacatataaaatgagaataaagatttcctcttcacatctgaygtcattactctccctaaagtcatctcaagaagcaaacactaataacatctctctagacatctttctatgaataattacaaattaaagtataatcaataaatacatgagtagatgggtaaatggataaatgagtgtataggtaggtagataagtagatataaatattgtttctaaaactaaaaatataatacatataatttcttaagatttaggacaaatccaattttttatctccttgtatcttctcacagtcacccaactttaaccacttgcttaatttagaacttca

SEQ ID NO: 473740 - DNA, 495 bp, Homo sapiens
cagcccaggggatggtgctcatccagattgagggtgggtctacytctcccagttcactgactcatatgttaacctcctttggcaacacccccacagacacacccaggatgaatactttgcatccttcaatccggtcaagtagacactcaatattaaccgtcacagccatgacttacatagactagagtagtgattgctatgtagaaaaaaatgaagaaacactggtggccaaagtgaaatccagaataactggagtgttttataacaggacattattttttcagaaagtattaaaacaatccagcagatgccaaatactattgctcagtccctacttatgaatatttatgaatgtacataagtttaataaaagaactaaatgtgtatatacatgtgtacacaatttaaaaaaaaacctttaattttttttaaatctaaaatactggtgtaattttaggaattatattggaaatagcacttatatactctcaattt

SEQ ID NO: 473741 - DNA, 495 bp, Homo sapiens
cagcccaggggatggtgctcatccagattgagggtgggtctacctctcccagttcactgactcatatgttaacctcctttggcaacacccccacagacacacccaggatgaatactttgcatccttcaatccggtcaagtagacactcaatattaaccgtcacagccatgacttacatagactagagtagtgattgctatgtagaaaaaaatgaagaaacactggtggccaaagtgaaatccagaataactggagtgttttataacaggacattattttttcagaaagtattaaaacaatccagcagatgccaaatactattgctcagtccctacttatgaatatttatgaatgtacataagtttaataaaagaactaaaygtgtatatacatgtgtacacaatttaaaaaaaaacctttaattttttttaaatctaaaatactggtgtaattttaggaattatattggaaatagcacttatatactctcaattt

SEQ ID NO: 473742 - DNA, 572 bp, Homo sapiens
agctgcaatatacaccattgtgggtagccatataataattaagtaataaatgttattatgctttaagtttcattaaaatcactagtgagatacataacctttttttctcacaacactttgcaagtgttaacatacatttgatttttagtcagtagagatctcatatatcttgtaaatcataccataaaccatttgaattcacaaatatatatatatatttatatagatacatgattttgaagaatcttgaaactaaacttctaatccttatygcatttttgaacacgtttttcagagattcatttatttccatttgattctttgaaatatactatcctgctatactttgagtataaaatacagagtgtactctgcatcacacagttcaggaagcaggctgaggttgggggcctgctgaagcccttgagagagagggctctaaattcagcaagttcctgtcttaaaaaatggcagcctagggtattgcctaaacttagtactttagactttcgttgggtgctaggattagaaaccagctctgacaaatttggatcatcagtttatttattcta

SEQ ID NO: 473743 - DNA, 598 bp, Homo sapiens
tcataactggtatataagatgaccattcaggcaagtcagttttatcttactattgtttgaattaagataaatatttatgttttaaaaattatataccttcaataagtcataaaaggataaaagcagatctaagttaaaacccggatttgacttgaaaaattaagtaaataatagtatagtctattccaatcaaagcttaggaaatatgtcacaaagtactttctgtcagagttaataggattaacaaagagagattattttatcacctccttagagtacagggcttcccaacatttgtcctcatgccattcacagaaaacatttgctcagcccattaggacaaaccaaygaggaagctcccagtctgagatgaccagccactccaggacttatgtggccaccagagggctggcacgcctgcaacccattgtagtacaatgactggaaagttctgcttagactcttcatgatcttccttaccctgtatcccgttctcccagcccctcaaaatgctatagttgtactgcagctctgttctccattgtagtactgtaacagataatgaaaaatagaagagggtaatgtgtaggcgagataa

SEQ ID NO: 473744 - DNA, 598 bp, Homo sapiens
tcataactggtatataagatgaccattcaggcaagtcagttttatcttactattgtttgaattaagataaatatttatgttttaaaaattatataccttcaataagtcataaaaggataaaagcagatctaagttaaaacccggatttgacttgaaaaattaagtaaataatagtatagtctattccaatcaaagcttaggaaatatgtcacaaagtactttctgtcagagttaataggattaacaaagagagattattttatcacctccttagagtacagggcttcccaacatttgtcctcatgccattcacagaaaacatttgctcagcccattaggacaaaccaatgaggaagctcccagtctgagatgaccagccactccaggacttatgtggccaccagagggctggcacgcctgcaacccattgtagtacaatgactggaaagttctgcttagactcttcatgatcttccttaccctstatcccgttctcccagcccctcaaaatgctatagttgtactgcagctctgttctccattgtagtactgtaacagataatgaaaaatagaagagggtaatgtgtaggcgagataa

SEQ ID NO: 473745 - DNA, 598 bp, Homo sapiens
tcataactggtatataagatgaccattcaggcaagtcagttttatcttactattgtttgaattaagataaatatttatgttttaaaaattatataccttcaataagtcataaaaggataaaagcagatctaagttaaaacccggatttgacttgaaaaattaagtaaataatagtatagtctattccaatcaaagcttaggaaatatgtcacaaagtactttctgtcagagttaataggattaacaaagagagattattttatcacctccttagagtacagggcttcccaacatttgtcctcatgccattcacagaaaacatttgctcagcccattaggacaaaccaatgaggaagctcccagtctgagatgaccagccactccaggacttatgtggccaccagagggctggcacgcctgcaacccattgtagtacaatgactggaaagttctgcttagactcttcatgatcttccttaccctgtatcccgttctcccagcccctcaaaatgctatagttgtactgcagctctgttctccattgtagtactgtaacagataatgaaaaayagaagagggtaatgtgtaggcgagataa

SEQ ID NO: 473746 - DNA, 636 bp, Homo sapiens
gctgtggagccctcgtggatttcacaacctgcccaattgtatacagcagcctgatgaaaacaaccctgtcaatgttgcatttatcttaaaggacaaattattcttgaatgtgtaagcttcaagtatgtgatattgaagcagtatttgtcctataaaaataactattatatataattttgtggtacgctcattttcactcaatattgtttgaaagaatttatgttgtttaaaaacaaaatttaaagcaatatattaagttccataatataaatactacaaaaattccctttacttcccctcttatgtttaacattttagttatttacaagttattattaagtattataagtattttctttctacaggtagatgataaatagattgagatattgagatattgagatagatgtaggtatttttaattgycttgggaaagatttcaagtaagaaatgtatgatatagacagcatgagtatctttcagaaattttcagtagttatttcacattaaacttccaatgatagtataaaaattgtcaaattttccatacactagccagtactgggttgtctcttttaaatttttgcttaatgttaaaaagtaaattatagatgctatcttctgttaatgacttca

SEQ ID NO: 473747 - DNA, 576 bp, Homo sapiens
ttcctagaggaaggtcatgtagcagttaaactctaccattttgcctcttagtgtggatacttgagcccacttacccaactcctaagatcttaccaggaagctgctgctcaccaggttcaggtgttttctattgtgagactgccctttcctggcaccaggtgcgaccaattattattttagaaagacagttgaacaagctgtctgatcacctgatggccccctgacattcctgtcaggggaaggcctctcttgccctgcacatgtctgcctagctacctactctaacagtttctgttttaggaaacagaatcttctgcttttaaaacagaattctaaattctagattcagtaatccagaacttagattctagattactcagtttatttagggtgggctccattaatgamtagggcaaacaagcattttctatgcctggactccacatggataactctgaaaaggaagaaaaccttctttacatgagggccaaaattactttttatttagctttctttattcctttagggaggaatagtaactatgctaaaggttgacagattcaattttttaaatca

SEQ ID NO: 473748 - DNA, 521 bp, Homo sapiens
ctctgccaaatatttatgtgtaagaattgagttattcattttactacgacttgatatcttgcagttcctgttccttctttgcttggrtatcttcacaagcctgcattgtgttggcatccaagtaagctctgttagaagacagtatcatgagaatgtggatctagaaaagaagggtgagtaggatgtctagagagcatgtgagaaggcaaagcatcatgctagttaggttagatggagttgacgttgaaggggaaaagtgttattctgtattaatatttgctctattgcagagctgtgaaattctgaaaacatgctctactacttggcttcacattttgaaactgaagaaaagtaagtacacaaacattgcaaagtgtttctattgatgactaaatgtctgtatactcattagtctagatgagtcacatatataacacatctcactacaattggggcttgtctatataaatagatattcataaaatttgcctcagatgtatattgtgataatgctactgagg

SEQ ID NO: 473749 - DNA, 649 bp, Homo sapiens
gaggcgagtctgaggagtcttcctgggagaggtccccttgagcggggacctgaccgggtgagtagcagatggcatccccggaagagsggaccaggagggccggggtgtggagggaggacagcagtgatgtggctgctcctggcaagagcttaggacgagatatggagaggagactgacgggagccacaggccagctcttccaaggcaggctaaggatgttgaggtggttctgcggcgctggggagcattgcaggcttgtgtgggagtaggaacaggtagaggagggggcctgcatccgcagtgccgggagcggcgcaggtatcggggcagggatgggggatggctctcgttgccggcatattattgtgcggtccttcggctaaggtgttagcagagctggtgggggccaggttggtcacactagtctcagagaaaggcctgaggggctggaaagcaagtgcagaggtgggctattgggacactgttgagtgtcacaaggacatgggttcgagttctgcctccaccctgaccagcttcaggtttctaagaagttgatctttgttaggtttaaaaaaaaagaaaaaagaaaaattcaggaaaagagccaggtttggggagaagatgctaatccccgttttggacaagttga

SEQ ID NO: 473750 - DNA, 575 bp, Homo sapiens
gcaattccccaggcctccagtttccttcatgatatccagcaaggagaatttttcccggggcagtggtcctcacacgtagatacctggaagaatcacccgtgggacttcctgacctgtggattcctaagccctaacccagagtctgatgaagaaacattgactaggcctggcctgtggcccagttgaattggtggccatgctctgaggctyatactttgagaaatactgatgtggagggagttggttaaaacagggtgctgccgtgtgtgtgtgtgtgtgttacatattttctttacagaaatgaggtctcgctatcttgcctaggctgtcctcaaactcctaggctcaagcgatcctcccacctcagcctcccaagtagctgggaacgtaccgtcatgcccagtttgagcctaccataaataatactaaagacgatatagacggggctgactaaaatgtcaagaactgtggtggtttatttacttggaattttggtgtggctttcaatggctaggtaagggattctttcagtagcaaggatgatagctacctggccctatgtcagagatcagcca

SEQ ID NO: 473751 - DNA, 605 bp, Homo sapiens
tcctgccttccctctcctcctagaaaacatcaagcttcttcccacctgcgcatttgctgctgcctccgcgtagaccttttcctttctcatgactcacttgttcttgtgatgttcttgtggcctctgctcaaatggcttctccaggaagccttccctgaccaccccatctcctaacacttgttcctgtcatttcttctcctctattttcatctgaattacacactttatttatagtgtggtggctcagagcataggctctgacctgagctgcctgcatttgcatctggcttcaccccttactgctgtgtgcccrtctaggcatcagttttcctcatctatgtaatgggaataacagtgtctatgtcatagggctgttgtaatgtgacatgaaaagagcctcacgagcctgtcacacagagtcaacagatgttgttgcttgttcaaccttcattcaccccacaccagaaagggaagcaagacagaagcgccttgcctggttcactggcagtatcttcggtgcccttcggtgcccagaactatacctggcacattctgtggcatggtaaataactgttgaatgaatagcatgatagtaaaacatgcta

SEQ ID NO: 473752 - DNA, 592 bp, Homo sapiens
attgtgtaagttggactaggtgagctgcctatgatgttggctgttgtttctgctgttaataatcagtcctcttcaattagggcatgaacaagataaattttttccttgcaaattggtgtggatggtctgctgctgtgggcttcatctgcaacatcatctcatcccttcttaaaatgacttatccatttgtaaactgctgatttctttgggggcactgtcctcacaaactttttataaaggatcagtgatttccccatttttccacttcagcttcaccataaatttaatattttcttcttgactcaatttttgcagaattctgttgctttgatgggggctcttttcaaattgatgtcttatccttcttagtgcctcatagtagatcctgttcagacatgttattacaagttagcatgagtttcttttgttgctaaaaaacttcaaactccatgcatgcataattyatttacaatatgcagtttctttgaaatttttgaaattcccttgtatatatacacctactatatgtgtgtagatatctatacacaaacataaacacataataggaaaagtatgaaacatggactatata

SEQ ID NO: 473753 - DNA, 552 bp, Homo sapiens
tagccttatgaaacgtatttctaaaataataaaacttgaaagtcaaaattgacttgatgtatgggctcagggcatagggaagcccgaggagagggagagagatggggaaatggctggtcagtagagtagtcagaacacacataaaatttatcaattaagttcattgttttatatgtgtgaggtttgtggcaccccaaaacaattataatagtaacatcaaagatcactcatcacagatcaccacaatggttataataataataaaaaggtttgaaatgttgtggtaatgaacaaaatgtgatatagagacatgtgtgagcatgtgctgttgaaaatatggcactgatagacaacacagtaaaacaatatccacaaggtkcaataaggtgaagtgcaatgaaacgacatgtgcttgtatgctaagatcttagtaagcacaggaaaataggacctagggcagccattggggtgccagcaaacagctctggaaagaggtaatagctatactaaattccaaggagctgcggagttagtcagcaatgaagtgagaga

SEQ ID NO: 473754 - DNA, 585 bp, Homo sapiens
tgaacccatcccgtaccctggcccaagytcagccaatactaatcaagttcatcagagtcaccccaggcgatttgcagacctgtagtgagaaaaataaatttttgttgttgtatgccctggttggggtgggaggtcacttgttatgtagcattattgtggtaatagctaaccaaagtatcagatgatcctaaagcatgtccctgcttaagaaccactagaccaaaggctaaagtcacaaacaattcatctggcaattgagaccttccttggtcttgtttccatctggcctcatctcccagcttcctcttctgaaccaatcaaggttctgggtgctaaaacagaatccaatgctcatgaaccctaacagaaaagggactccaaggtggctgtaaaatcaaactgagaaaaaaatggacggaaagcagggaaagtcaggcaggtgtggccagggtcagaagaggtcacaggcatagttgaggtggagaaagagaccactgctggttacctgtgcaccaggcgctggatcctcaagctgctgtttgcaaggagggtatctccagctctccctgctcctttggagagaga

SEQ ID NO: 473755 - DNA, 422 bp, Homo sapiens
tttcttcctccatcaggcataggccagacttacatgaggatctgatgtgttctaatattatttgaacaaacacaaaagtatcagtatggggagatgaggttaagcccaagagttctggaaaaggttgggcctcctccaaaaatgggaaagctggattggcaggagaggwcacctatagtatcaaggtcaaaagagtgttcagggccaggcacagtggctcattcctgtaatcccagcactttgggaggccaaggcaggaggatcacttgagcccaggggttcaagaccagcctgggaatcatagcaagacctgtctacaaaaaatttaaaaattagcctggcatggtggcatgcaactgtagtcccagctactcaggaggctgaggcaggaggattgcttgagctcaggaatgggaggctgc

SEQ ID NO: 473756 - DNA, 495 bp, Homo sapiens
ctcgttggtttcctctcaaggctgttttgaggacactagtgaatgtgggctgggtgcacagtaggcactctgtaagtggcagatatggcaatgtggactcctcagcgatcctgcagcttaggagttgggcaaggacagacccagatgtagggtagcgaagcattgctccagaggccacctttttccccaaggaaggcactgctgkcatggctttcaggctgcccatccccaccactacccctactgtttgtaggacttagagctgccacccccatagtctagcttcaagccaagggcagtttcataatacaaatatggtactgaaggccagagacagcaggggcttgtccaagttcacaccacaagtcgggtctggaaggaacagagtgatcccatcaaacttgagagggaaaagtcatgtcctcaagtgttttttgagtgtgtagcagaggcagcatgccacagcagctgtctcactgggggctctgcagccgg

SEQ ID NO: 473757 - DNA, 527 bp, Homo sapiens
ccaggggttggagcagcttcttggggtcgctgtgggctgaaaaataagcaggaagaagcaggagtaagaaccattaggggaaagcaatgatagtaaaccccatggagagagagacacagacagactggtccctgactaactgtatatgctgaccttggatccctccctgtaagactcttaatccccctttcttgagctagggtcaaatagcctagaggagggctccctggaatttaatgtgcatatgaattcacygggatcttgttgagatgcagtgtgagtggagcctgagagtcatttctcaccagctcccaggtgaggctgatggtgctggtgtatagaccacacacagttggaggctctagaaagttaagccttctcagaagcaaccaaggttacatagcttgcccttgcctcgcataagcagccatgctggggaggagatggagaggccaaagtcagggaggaggcaaccaagaaataaaggtgggtgcttctcttttatttatcatgtcattcagtgaaga

SEQ ID NO: 473758 - DNA, 419 bp, Homo sapiens
ctgcagatagggagccccactgggaggcactgtcttgatgcaggccatggggtcattcaaccacaaaagcaatagctaacatgtatataaygtgaatatgacatgcttattttctgcctggcactgtcaatcttcacaaccatgtggagtgggcactatcattatccccattttagacatgagaagcattgaggcaaagcaggttaagtgatttgcccaaggtcacccagataataagtggccaggctgtgaatcctgtgctcgaggctgagatagtaaccactaaggtataatgcttctcaggataaacagagatggagaaatggggaccagggtgggagccacagtagaatggaggtaaaattggcagggcttgactcttgagcaggggcctgggagagagaaggtggagtgagagc

SEQ ID NO: 473759 - DNA, 419 bp, Homo sapiens
ctgcagatagggagccccactgggaggcactgtcttgatgcaggccatggggtcattcaaccacaaaagcaatagctaacatgtatataacgtgaatatgacatgcttattttctgcctggcactgtcaatcttcacaaccatgtggagtgggcactatcattatccccattttagacatgagaagcattgaggcaaagcaggttaagtgatttgcccaaggtcacccagataataagtggccaggctgtgaatcctgtgctcgaggctgagatagtaaccactaaggtataatgcttctcaggataaacagagatggagaaayggggaccagggtgggagccacagtagaatggaggtaaaattggcagggcttgactcttgagcaggggcctgggagagagaaggtggagtgagagc

SEQ ID NO: 473760 - DNA, 622 bp, Homo sapiens
aatttctatattgatatttggaaaaactaacagctagaaaacaccactcaactcatttttaaaaatacgatcatattaaatgacattacacgcatcatttatatattgctcgcagtgccagcatcctcaaatgtgtttctaattttggtagatatcttgctagggggagcacatttctaagttatccagatatagggccctctttccttctctttctgtccacatgcaatcagatgctttgtggagttaaagttgacatttatttaaatgccactttgtgtctgtttttttcccctttaatttagagttttctatctggaatgtaagtaaaataatcacttggagggtttttcyaaaataccaatggccaggccactagccagtcaatcggaagcaaaatctccttggatgggacctagaagtattttcagttttctggcattttaatgaacaccccgattaagaaccactgggtcttaagagtgtggcatatgtatttttcaagttcctagaggctctccaaaacaacaaaaaaatctgctttattttctgcctggtgttgacgtgtcacagtttctttagccactagtcttatcctggatatttatggtcataatttgat

SEQ ID NO: 473761 - DNA, 595 bp, Homo sapiens
ggcgtgtttccagcctcccttgtagctaaattctcaccaaaggcatatgaaaggaagggatgggggcagcttctacttcactcacttacaggaaaattgcttccctgagtatcttctgttttcctgtctgtaagcgggagcacagatatacctgggacacagtttcaccatgcagagmaggaggacatgtgggggctggggcagagcaacaagatggaagggacctggggccactcttgtcttagtacagttcatgcactaaaaagaggactgagtgaattagtttgcttgggaggcaggagcactggcagatgagtggggaggggacaaagagaaggaaaagcagccacagtgtggatgacaagagcttaatcccatagggaggatctgggaaatcgtgtgagacaggctttagggcaggccagggagtgaggaagcaggggcagttttatcctgacacccatcagaccctggtacctccagtcttccacatgctgtgagcagagtgaatgttggcagcccaagggcaaagatgcaagtgctggccatgggcagctgggccagagggtacagaaatggtatggggcaccaaggg

SEQ ID NO: 473762 - DNA, 433 bp, Homo sapiens
ctgccctgcattcagaaactctttatatcccaggcctgcccatgtcagggtggaattccagacatattgctaagacacttagcaacctaagctgattgatatctcaagcctcaagaaagaaaacagtcaggcaggaaaccacagagcaggctttccacccaccagctccagacactagccccagacagtgtgcacgcacacgcacacacacacacgcgtactgcgaatggcatctcagcattgtaggagccctgaatctccaagtcttagaattgtggctggtgagccrcacagactcacagaaacgtgaatcttagaatcctaaagccctgaagttttcaaattatggtgttggaagaactttttaaatcacttttccatgcactgtatctatgtaaacatgcaaaaacagacctgttcctagcatatagga

SEQ ID NO: 473763 - DNA, 545 bp, Homo sapiens
gtattaatggataagctccttactccttcctaccagtctacccactcctaatctcctacatagaaattctggagctactgctgaacagaaattgaaggcctggggtttttctgaggccctttctggctcygatagtctgattgatagtatatatattgcttctggcctcttatgatggggctggtgaggaaggtgcgtaaggagtgaactctacaggtgacctcctcagtgagcctgatgtcattgtttctatctcttttttctgtttttgagatggagtctcactctgtcacccaggctggagtgcaatggcgcaatctcggctcactgtaacctctgcctcccaggtttaagtgattctcctgcctcagcctcccaagtagctgggattacaggtgcacgccaccatacccagctaatttgttttgtattttggtagagacaggtatcaccgtgttgcccaggctggtctcgaactcctgagatcaggcaatccacccatctcggcctcccaaagtgctaggattattggtgtgagccaccac

SEQ ID NO: 473764 - DNA, 545 bp, Homo sapiens
gtattaatggataagctccttactccttcctaccagtctacccactcctaatctcctacatagaaattctggagctactgctgaacagaaattgaaggcctggggtttttctgaggccctttctggctccgatagtctgattgatagtatatatattgcttctggcctcttatgatggggctggtgaggaaggtgcktaaggagtgaactctacaggtgacctcctcagtgagcctgatgtcattgtttctatctcttttttctgtttttgagatggagtctcactctgtcacccaggctggagtgcaatggcgcaatctcggctcactgtaacctctgcctcccaggtttaagtgattctcctgcctcagcctcccaagtagctgggattacaggtgcacgccaccatacccagctaatttgttttgtattttggtagagacaggtatcaccgtgttgcccaggctggtctcgaactcctgagatcaggcaatccacccatctcggcctcccaaagtgctaggattattggtgtgagccaccac

SEQ ID NO: 473765 - DNA, 598 bp, Homo sapiens
agacccccaaaatagcagtggcttcagcaaaacagagctttayttctccctggcgggatcttcaggctggtggcccaggtttggagcagcaatcctcaggtgcagggaccctgtgccttctgccttgccactcagcatcatcactgcatttctcaaggtggctgctggggtgccagcctttatgggcagttccagcctgcaggaaggaggaaagtggaaagaaaggtgcatccgcctagtaagggtgctctccagaagttgcacacaccacttccacatatgcccattgactagaatacggttaagtcacatgatcacatttaactgccaaaaaacctggggcaatgtagtgtttattccaggcagccaaggatccacttaaaagctaagggtgtttcttatgaaggaagaactgaaaatacatattaagggacaacaagcacatagattgagggagccaaccaggaacatcaggagcctcagagagtccctcgagagacgagctcacatggtgtgctggtatttattgctacataacagcttacccctaaatttggcagcctgaaacagcaaacatgttatctcgtgcaatttctga

SEQ ID NO: 473766 - DNA, 664 bp, Homo sapiens
tgttatttcagtattcttcacttatttcatcgctggaaggttatataatgatctcgaactgataataccactcacaatgcttgtggaagccattttgcacaaagtttagatgatatagataaaactactttgatgaagaacaagggcagtaagtacacaccaaccaaagagctacatccaattgatgttataaataaaaaacatggtgggaatacttcacattatgcaactctgattgtgtttaggtttcagccaccaagagaaaaaaatatttaaataccaaaacgggrtatgaaagtgcattgctctgtaagcaaaaatttgtcacacgaaagttgaggagggtcttatgtgaaatgcaattcctagtacacgtcaactcatccctagctaggacagcttccagaacgtgctgctaaacttgaggttgtgaccctgcagccatgacactcaaccgcccctcaaccagagctcacctcattgctctacagcaacagttttaactactggagcctgcctggagcttgaggtgatcctcggacctgcctcccaccagggaaggcctaagtgctctttaatcttcttagagcaaaatccactgagcaaaattataatttgatatggctgcacttaaccaatagaaactcataaaccatcttaacat

SEQ ID NO: 473767 - DNA, 574 bp, Homo sapiens
ttcattgagcacttattatggtccatttggttagaggcgttgggttcacaatgatgtacaagacccttttccttacagaacttgaattctgaagagagagtgaaaagttaattaattaataacaccaggttgtgattatggttattcaggatacaagcagaaaaatttggcagttggaggatggccttttgtcattctggatgacttccctgtggatacagcactggagttgagacttatggttggaaagaaatgagccatcagaagggctgtaggaggagcagcagtcacagagggcagtaagggaggagkttcagagttgagaagaatcatgactgttaaaggaacaaaaagaaagccaggggggctgccacatggcgagagggtggggaaggtgggaagaggtgaagctggagattggtagggccagaacaagtagtgccttggaggtcatgttaaaactttgaattttgctctaaaaaaaaaatagaagcagagaaatgatactatcagattaaaatcacagatttattactgataataaattagctttttattctgcagtatacaaagt

SEQ ID NO: 473768 - DNA, 574 bp, Homo sapiens
ttcattgagcacttattatggtccatttggttagaggcgttgggttcacaatgatgtacaagacccttttccttacagaacttgaattctgaagagagagtgaaaagttaattaattaataacaccaggttgtgattatggttattcaggatacaagcagaaaaatttggcagttggaggatggccttttgtcattctggatgacttccctgtggatacagcactggagttgagacttatggttggaaagaaatgagccatcagaagggctgtaggaggagcagcagtcacagagggcagtaagggaggagtttcagagttgagaagaatcatgactgttaaaggaacaaaaagaaagccaggggggctgccacatggcgagagggtggggaaggtgggaagaggtgaagctggagattggtagggccagaacaagtagtgccttggaggtcatgttaaaactttgaattttgctctaaaaaaaaaatmgaagcagagaaatgatactatcagattaaaatcacagatttattactgataataaattagctttttattctgcagtatacaaagt

SEQ ID NO: 473769 - DNA, 621 bp, Homo sapiens
ggtagagaggttagaattgaattttatggaaaattctgtactctgcttttctgaaaatagtgtttgaaaattagaaccaatattttaggatgatttatatgagagccattccagaggctataagatgcatacaacatcttctagagagagatttttcaggcctgatattattttatctgtaaaatgggaataataactttggtttccctttatcattattcatttggaacttcaataaatctgagaagatttagccttactaattttaaaagtagctactaaaatataaaattaaactataaccacaacaacaaaatgttgaacatgcattgaattctaaagtattattaacacaagactaaaaaataataccatatgcttatttagcattggtcttccaagctgtttaaagcacttcaccttggttacctgaaatattcatatcctcattttatggatggaggaacagaagtgaagatgtgagctagctcactgaaataccaccgatgtcctattcagagctgsgcattgtccctgggtctcaaggtccccagtctggccttttacccaccaagagatatgcaaaagaattttcgttttgaccttcagcctggttgataa

SEQ ID NO: 473770 - DNA, 617 bp, Homo sapiens
gccctccccctcttacaaagacactgtttacacctccatgcctttgtgctgttctctttattagaacttccttctatactctcttttccttgctattcttcctcattcttcaagatttaactcatactttttttttttacagtaaacctttgtttgtaattccagagtggtwtctgagggaggtcatgctttgtgctcacatcagtctttgtgcgtagctctctgcttatcataggacattgaaatgatctgattatgtgttctttttccattagaaatgtgtgctttacaaagacaaggactgtattttgtttatctccaagcacttagcactagacttggcagcctactcagtaagtgtgtgtcaaactgaaccattgtgtttctagaaccttctgaccatgtgatccattcattggttcatgagtggaagtctactttgattaccagacaaaggggagaactggagtacttaccaagccaatagagattagctggtggttgtctacatattcaactgaataaaaatctctatgtttcaaaagtcattttaacatctcttgtgttgcttgcatcataataggcattatgagcatccactaatgaccaggcagacc

SEQ ID NO: 473771 - DNA, 581 bp, Homo sapiens
ggttcaggaatggacctttaaccccgtttgagccaatgacagggtgagtcacaggtgagagaacttcaggaagagrcactcttttccccagaacaatgtggttcagtgggaccctatgagacacgaacctgcttagattattttgttaccacaaggaaataacctggatgaactgaaaatatcaggtgaaactagctgtcctcaaggactagatccatgatgacatcttttggaactagaacttctggatttttctattatgggagccaatccattatttttgaggtttaagccactttggctgggtttcctaccttatacaatgtgtatttagccctcataaaagcatgtgctagttcccttctctaatttctctcttttccctactctcttccatgacctgtcagaactggaacctgaaggccatgttcatggctatctccaggttttacctgctgtgcctacttaagtaaataaatatcctatattgacacttgaataagtaaatatcccatgtcatatatttgtgaaagagtgatgatgaaagtaatatttagcctacagattgtcgggaaaatcaa

SEQ ID NO: 473772 - DNA, 595 bp, Homo sapiens
ggttcaggaatggacctttaaccccgtttgagccaatgacagggtgagtcacaggtgagagaacttcaggaagagacactcttttccccagaacaatgtggttcagtgggaccctatgagacacgaacctgcttagattattttgttaccacaaggaaataacctggatgaactgaaaatatcaggtgaaactagctgtcctcaaggactagatccatgatgacatcttttggaactagaacttctggatttttctattatgggagccaatccattatttttgaggtttaagccactttggctgggtttcctaccttatacaatgtgtatttagccctcataaaagcatgtgctagttcccttctctaatttctctcttttccctactctcttccatgacctgtcagaactggaacctgaaggccatgttcatggctatctccaggttttacctgctgtgcctacttaagtaaataaatatccyatattgacacttgaataagtaaatatcccatgtcatatatttgtgaaagagtgatgatgaaagtaatatttagcctacagattgtcgggaaaatcaaatgagacaatgatc

SEQ ID NO: 473773 - DNA, 663 bp, Homo sapiens
tttagcctacagattgtcgggaaaatcaaatgagacaatgatcaaaaaagtaccataccaatattaattatctttctgaacagtgctaatttaatctagaaattgttgtcaagcccatttccactaatttctttccaaagaaaaatttataatgatctagtaatagacctataaccaggaagaagcaagaagggttatgtgcacataggtcataggtagaataataaaactctagtgtcataattattttatgtrcggcctgatttaatgcattgtggaatattccactgaatgaaatcatcttgcagactgtaagcagcagactaatattaagaattagaatttgtacactgtgattgattatattacaataatttatttcaaagtagacatcattatatctcatctagaatttccttctaatgtaagaaaatgtttctgaatggtaaatttgctcaattttgcagcagctgtttctgagccagagacccttgcaactccctggggctggaatgctgggggttctggaagctgggcagcaccctttgactccaatatagagtgggcaagtgccctaggctttcccctccagcctaactgttgtctaccccaggtctaccattttcaggaaatgctacacagttgcataaacaagttcaaaac

SEQ ID NO: 473774 - DNA, 592 bp, Homo sapiens
tctttctgaacagtgctaatttaatctagaaattgttgtcaagcccatttccactaatttctttccaaagaaaaatttataatgatctagtaatagacctataaccaggaagaagcaagaagggttatgtgcacataggtcataggtagaataataaaactctagtgtcataattattttatgtgcggcctgatttaatgcattgtggaatattccactgaatgaaatcatcttgcagactgtaagcagcagactaatattaagaaytagaatttgtacactgtgattgattatattacaataatttatttcaaagtagacatcattatatctcatctagaatttccttctaatgtaagaaaatgtttctgaatggtaaatttgctcaattttgcagcagctgtttctgagccagagacccttgcaactccctggggctggaatgctgggggttctggaagctgggcagcaccctttgactccaatatagagtgggcaagtgccctaggctttcccctccagcctaactgttgtctaccccaggtctaccattttcaggaaatgctacacagttgcataaacaagttcaaaa

SEQ ID NO: 473775 - DNA, 592 bp, Homo sapiens
tctttctgaacagtgctaatttaatctagaaattgttgtcaagcccatttccactaatttctttccaaagaaaaatttataatgatctagtaatagacctataaccaggaagaagcaagaagggttatgtgcacataggtcataggtagaataataaaactctagtgtcataattattttatgtgcggcctgatttaatgcattgtggaatattccactgaatgaaatcatcttgcagactgtaagcagcagactaatattaagaattagaatttgtacactgtgattgattatattacaataatttatttcaaagtagacatcattatatctcatctagaatttccttctaatgtragaaaatgtttctgaatggtaaatttgctcaattttgcagcagctgtttctgagccagagacccttgcaactccctggggctggaatgctgggggttctggaagctgggcagcaccctttgactccaatatagagtgggcaagtgccctaggctttcccctccagcctaactgttgtctaccccaggtctaccattttcaggaaatgctacacagttgcataaacaagttcaaaa

SEQ ID NO: 473776 - DNA, 663 bp, Homo sapiens
tttagcctacagattgtcgggaaaatcaaatgagacaatgatcaaaaaagtaccataccaatattaattatctttctgaacagtgctaatttaatctagaaattgttgtcaagcccatttccactaatttctttccaaagaaaaatttataatgatctagtaatagacctataaccaggaagaagcaagaagggttatgtgcacataggtcataggtagaataataaaactctagtgtcataattattttatgtgcggcctgatttaatgcattgtggaatattccactgaatgaaatcatcttgcagactgtaagcagcagactaatattaagaattagaatttgtacactgtgattgattatattacaataatttatttcaaagtagacatcattatatctcatctagaatttccttctaatgtaagaaaatgtttctgaatggtaaatttgctcaattttgcagyagctgtttctgagccagagacccttgcaactccctggggctggaatgctgggggttctggaagctgggcagcaccctttgactccaatatagagtgggcaagtgccctaggctttcccctccagcctaactgttgtctaccccaggtctaccattttcaggaaatgctacacagttgcataaacaagttcaaaac

SEQ ID NO: 473777 - DNA, 472 bp, Homo sapiens
gatgaatttaataaattagaaaacaaaatgcaattaataaccaaaaacttcttcagagcattaaaattaccccctcttccttgaaagtctttaaaagaagagacaagaagaaagagaactacaacttttaaaataaaacagaagctggaaatataaatgttaagagattagatgagctagaagaaatattttgtgcaacattatgccaatacatttaaaaatgtagatcaaaataataacttcctaaggagataaattgttaaaattggctcaacaaagataaaccgaggaagcatccatactatttcaataaccagaaaatamatgtaaatatttgtcaaagatctactatttaaaaagataccaggattatgaataactctgtatgtaaatttgataacctagagaaaatgaaccaactttgtgaatgatgtaaccaaaactcacacaaagacaaatagactatctaaat

SEQ ID NO: 473778 - DNA, 318 bp, Homo sapiens
ctgacttcagataaggcaattatcctgaattaactagaagggctcaatgtcatcacargggtttaaaaatggaaaagggaggccgaagagagaatcagagaaaggcatatggaaataaaaacaggtcagaatgatgtgagaataacttgacctgcccttgctggcaatgcagatggaagaagggaccatgaaccaagcaatgtgagcagactctggaagatgaaaaagacaagaaagggatttcttgagagccctttagagtctcttccaaagactccagaaagaaatgcatccctgctgacaccttgatttcagcct

SEQ ID NO: 473779 - DNA, 535 bp, Homo sapiens
ggatcccttagagatgcacagaggagccatgaggaatgcacctcagaggggaggtttatcttcccaccagcttctgtccctcattggataagggtggccttgtggrgtgtcaactccctcatattttcaggttttctaaagtcagaatgactctgaaagtttcctgcaggcatcctatacaatgatggcagagagccctggacttctcttttgtttgtccattcattcatttcattgtttttcattgaatatacacttattttaaatgtgtgccaggcactaggaagtggttaaaagttagagctctttctttgatatccaataaggatgggtcaacacaggcatggagaaatcaagaggaggtggaagaagcagagagcttcacatctgtggccattaacccaacttttacagccacacataccctgaatctcctttctattttaccatccactcttaattactttcagttattcctgttgaggtcgggggagggggtgggaggggtgaattttaaaaggggtttggctattac

SEQ ID NO: 473780 - DNA, 653 bp, Homo sapiens
tatttttcttaaatctcataatgcctattacatgtagattacaacagtcagtgcctcccatctaagcgtgagcatggatcaatgaatccagattttaggcaaacagcccaaaaggatctaaccatatttacttgtttatcaagatttttcctgttaggctaataagagagcttgtcagaggttgttggaaatggcgaactataacatttagaggataaaataggtgatgaaaactctgtttatctcttcaacagtaggcagcgtatccagtttgcaattctattcatccaatccatcacttcatcgggatttatttaatgaaggccttgtgccragaaacacgagttagagagcccagccactcttccactttatcttgaagcaggatttattttatgtcttaactcttggcttgtctgatagcatcgccttgttgcacctgtacattctatagtccaaatcactcgccttcttgacacttttctgaaacttccaaacagcctgcagtgttacagaaaacctagatttggaggctgtgagcatcttgaaatattgcattgtatgtgtgggcatggctatggcagccatgatgctctgaaggtcacctcctgggaaggaaagatactgacataattggatgagccacctgagtg

SEQ ID NO: 473781 - DNA, 636 bp, Homo sapiens
gcacgagaatgtgaatgtacctaatgctgctgaactgtgcacttaaaatggttatgatagtaaattttatcttatgtattttaccacaatttctaaaaagaaaattttaatggaggaaaacagtagaatactgagaaaatgtatagcaggcagatgcaagaaaattcaaagcagaagtcaggatattaacataggaccaaatgcaattcaagggaaatatcattaaataagacaaggttgtttcatgtttttttaagtgaaggtttgcagctccagcgagcctaaaggaggagccaggcacagcggatgaggaaatctcctgcccaagaagtgacaggaagrctcctctccctgctcacacaggctcccaacatcactcccaggaaaacaaggtttgtggcaggcaagaaaacgcacgtgcttccgtcagctagagggagacctgatgccacagcactgagagaccctccttcagacatcctcacccacgctttttccaagcctgtgaccttcagagcaagtcccaggctctgggggactcccagtcctttggcttcttataaaacaaagtttcagatcccgggaggcccaggaaactcaaaacactacaggcctgagcctgagcctgagccgtgg

SEQ ID NO: 473782 - DNA, 615 bp, Homo sapiens
taatgctgctgaactgtgcacttaaaatggttatgatagtaaattttatcttatgtattttaccacaatttctaaaaagaaaattttaatggaggaaaacagtagaatactgagaaaatgtatagcaggcagatgcaagaaaattcaaagcagaagtcaggatattaacataggaccaaatgcaattcaagggaaatatcattaaataagacaaggttgtttcatgtttttttaagtgaaggtttgcagctccagcgagcctaaaggaggagccaggcacagcggatgaggaaatctcctgcccaagaagtgacaggaagactcctctccctgctcacacaggctcccaacatcactcccaggaaaacaaggtttgtggcaggcaagaaaacgcasgtgcttccgtcagctagagggagacctgatgccacagcactgagagaccctccttcagacatcctcacccacgctttttccaagcctgtgaccttcagagcaagtcccaggctctgggggactcccagtcctttggcttcttataaaacaaagtttcagatcccgggaggcccaggaaactcaaaacactacaggcctgagcctgagcctgagccgtgg

SEQ ID NO: 473783 - DNA, 632 bp, Homo sapiens
tccaagcctgtgaccttcagagcaagtcccaggctctgggggactcccagtcctttggcttcttataaaacaaagtttcagatcccgggaggcccaggaaactcaaaacactacaggcctgagcctgagcctgagccgtggggaagctgctagcctctaactgaggcccagtctgaaaccaacaggcagattctctgcatctcggcaataaaagcaayagcttcagcagtgcagaccgagcctcggtccctcagaggccaggctcatcacagcactatctcctttctcacttcccggctgtgctataaactaggacctctgatcccattttacagatgaggaaactgacgctcacaagtcaagtactaaggttaaagtcccaagtaggaggtcctgggatgcaaacttatgacctggcagactccagaaccccagaacccaattctttttttttcttttctttctttcttttttttttttagaggcagggtctcactctgttgcccaagctgtagtgcagtggtgcaaacacagctcactcactgcagtcttgaactcctgggctcaagcagtcctcctacaccacaggtgtgtgccactcgtgcacagataatttttttattttttttgta

SEQ ID NO: 473784 - DNA, 632 bp, Homo sapiens
tccaagcctgtgaccttcagagcaagtcccaggctctgggggactcccagtcctttggcttcttataaaacaaagtttcagatcccgggaggcccaggaaactcaaaacactacaggcctgagcctgagcctgagccgtggggaagctgctagcctctaactgaggcccagtctgaaaccaacaggcagattctctgcatctcggcaataaaagcaacagcttcagcagtgcagacsgagcctcggtccctcagaggccaggctcatcacagcactatctcctttctcacttcccggctgtgctataaactaggacctctgatcccattttacagatgaggaaactgacgctcacaagtcaagtactaaggttaaagtcccaagtaggaggtcctgggatgcaaacttatgacctggcagactccagaaccccagaacccaattctttttttttcttttctttctttcttttttttttttagaggcagggtctcactctgttgcccaagctgtagtgcagtggtgcaaacacagctcactcactgcagtcttgaactcctgggctcaagcagtcctcctacaccacaggtgtgtgccactcgtgcacagataatttttttattttttttgta

SEQ ID NO: 473785 - DNA, 632 bp, Homo sapiens
tccaagcctgtgaccttcagagcaagtcccaggctctgggggactcccagtcctttggcttcttataaaacaaagtttcagatcccgggaggcccaggaaactcaaaacactacaggcctgagcctgagcctgagccgtggggaagctgctagcctctaactgaggcccagtctgaaaccaacaggcagattctctgcatctcggcaataaaagcaacagcttcagcagtgcagaccgagcctcggtccctcagaggccaggctcatcacagcactatctcctttctcacttcccggctgtgctataaactaggacctctgatcccattttacagatgaggaaactgacgctcacaagtcaagtwctaaggttaaagtcccaagtaggaggtcctgggatgcaaacttatgacctggcagactccagaaccccagaacccaattctttttttttcttttctttctttcttttttttttttagaggcagggtctcactctgttgcccaagctgtagtgcagtggtgcaaacacagctcactcactgcagtcttgaactcctgggctcaagcagtcctcctacaccacaggtgtgtgccactcgtgcacagataatttttttattttttttgta

SEQ ID NO: 473786 - DNA, 620 bp, Homo sapiens
tgctgcaggtagagtcttcactcagtgcctggcatgcactaagtaagtgctcaataaatgtgacatcgcccacgtccagggctacctcccacactgacttccgcctgccacccaggcttggagccgtctcacacgccccgtgctcagggaataaaagctgactttaatagcccaattccaatagaactgggaaggaaaatttacacatgcacagcacaaactattaaaaaaaagaaaaaaaaagaaaaaacaccagcaaaaatgagccaaagaaaacaaaacaattcctggcctggctgtctggctgtggattatccactgccagggatgctctgccctccctctccccatagctgagcagagaatccgaaactggcaccgtggcgagccacggccatggagtcacaaggagtgtgcatcctcctacatgcacgaggcatgctcagctcttgcctggaaactggcaaatcccacagctcccactactcccaggcaccccagagaggccctaagactggctgcccaactayggaattacagaactacagaacccagttccctagcaccaacaccacccttgccttctgcaagctgggagacacctcactgcctaggggatg

SEQ ID NO: 473787 - DNA, 605 bp, Homo sapiens
gatcaaacacccaagaaatatgtggcacttaataaacatcattgattagacctatacgtacatatgcaatgtatgatatagaatacaaagtataatctattaattattcttcagtgtcgccagttggtctaagctcagagttctagcttggaggcattatggggttttctctgatactggcttttgggaaaattataagatgaacttggtcatccatttrcccacttgcctttttttttcttttttttttaagacagagtcttgctctgtcatccaggctggatgcagtggtacagtcttggctcactgcaacctctgccccctgggttcaagcaatcctcttgccttagcctcccgagtaattggggttacaggcgtgcaccaccacacctggctaatttttataattttagtagagacggggtttcaccatgttggccaggctggtcttgaactcctgacctcaggtgatccacccgcctcagcctcccaaagtgtgtgggattacaggcacgagccactgcacctggcctccgcttgcccattctttattcgcattgagagcttcctctgtctgcatctctggtaagaaagtcacataaacc

SEQ ID NO: 473788 - DNA, 677 bp, Homo sapiens
gaatattaaaatgagacaactcattttttttcttggagacaaaaaataaaatgagacaacacgtgacatggatcaaacacccaagaaatatgtggcacttaataaacatcattgattagacctatacgtacatatgcaatgtatgatatagaatacaaagtataatctattaattattcttcagtgtcgccagttggtctaagctcagagttctagcttggaggcattatggggttttctctgatactggcttttgggaaaattataagatgaacttggtcatccatttacccrcttgcctttttttttcttttttttttaagacagagtcttgctctgtcatccaggctggatgcagtggtacagtcttggctcactgcaacctctgccccctgggttcaagcaatcctcttgccttagcctcccgagtaattggggttacaggcgtgcaccaccacacctggctaatttttataattttagtagagacggggtttcaccatgttggccaggctggtcttgaactcctgacctcaggtgatccacccgcctcagcctcccaaagtgtgtgggattacaggcacgagccactgcacctggcctccgcttgcccattctttattcgcattgagagcttcctctgtctgcatctctggtaagaaagtcacataaaccag

SEQ ID NO: 473789 - DNA, 478 bp, Homo sapiens
cagtcctccgtctcacctacactgccccaacgtggggcaccactgtcagaaggatttgcagtgtagatgggatggaggactggaagtcagaagacctttgactcgggtccctaggtagccagggtgggggtgggaggagagagggaggtgggacagacacttggagagttggagacttgccctggacccgatgaacaaaaccccactggagttacctcgtgcacccacttagcattcagtgcttcaattgtatgtgctctgcaagggaawgactgcgtgggtttgtggaagaaaaataattcagtggtgtgggttcaggggcgaagtgaccgtgagatggatgctgttctgggctttcggcttccacactcccctcctgtgggagcagacacctgttcagcatgttgaggtccatggtgtgtatttgggaacaccttggctctttcacacagaggacatggcaatttattccaaaagt

SEQ ID NO: 473790 - DNA, 512 bp, Homo sapiens
tgttcactgtcacatggcatttcagcagcccccagagctggctggagaagggcaggcctggtcagtctctgtctttgagatgtccagtgacctctgagtcttttttctcccaaaccgaargaatgatccctacttttccttgcttatactttggggatgatgagatcccattcgtaagaaactctcagctccctggaggaggaatgagtgaataggtgctgctattatttttgctaatagcataattctaactcgagatttcaggaagagccatgtcagcttctggtcacctttgtggagctccttggcttacctctgaggaaagaacctccaatagcctcatccctttcctttcccagggtggacttttgatgtcccaggggtcaaacttaatcctttacacttctcctgtcagatatctaggtgcagtactgatgttacaattgaagggattctctctctctctctctctctccctgtgtgtgtgtgtgtgtgtgtgtgtgtgtgtactt

SEQ ID NO: 473791 - DNA, 510 bp, Homo sapiens
atagtaaggtaggtaggaagcctggcaggtaggaagcctgggtgtggtgggagagggggtgattggagcgtccaggccactcaagtgtggtgggtctggcaggaaaggctgggagggcactgacaggggacctgcatcctccgtgtggggcgtacgcaggcctgtgtactccgagtggctgcagggctgcttcctggcagtgagctccacagggccagaaggtttttgtacatgatacctgaggcttcatgtcacctccactacgtgcctggtattcatgacggtgtggtcccctcctgccccagcatggaagacagagcctctgtgagacccgccttgcactttggatgrtgctaaggaaggttgcgaggctggccttcctgcctgcctacccgagactcaagcagcaggactttcataattaatatgaattaatgcatattaattgagcacctactttgtgccaggctgtgtgctgagtgctgggcatacaacagtgagctggacagg

SEQ ID NO: 473792 - DNA, 520 bp, Homo sapiens
aaagcaaccctttactgctttgaagtacacacacacacacacacacmcagggagagagagagagagagaatcccttcaattgtaacatcagtactgcacctagatatctgacaggagaagtgtaaaggattaagtttgacccctgggacatcaaaagtccaccctgggaaaggaaagggatgaggctattggaggttctttcctcagaggtaagccaaggagctccacaaaggtgaccagaagctgacatggctcttcctgaaatctcgagttagaattatgctattagcaaaaataatagcagcacctattcactcattcctcctccagggagctgagagtttcttacgaatgggatctcatcatccccaaagtataagcaaggaaaagtagggatcattctttcggtttgggagaaaaaagactcagaggtcactggacatctcaaagacagagactgaccaggcctgcccttctccagccagctctgggggctgctgaaatgccatgtgacagtgaa

SEQ ID NO: 473793 - DNA, 615 bp, Homo sapiens
ggcaggggcctgggggacaaagctggtagggacagtggggtgtcagtccaaggaactagaccctggctgctgctcagtcccctcaagaccccatgctgcatgtgagcaggaacctccattgctctatccctagctgagcccacctagtccatgcctggcacacagtaggtgccttgttaatatctgttgtggagacctgctctagaaggctgcagatcagttaaaacttgctgggatggggatgctgcttgatgggggaagattctgccctgggctgcctcctcctccaacttcagatgttgagttttgggggctgctaccttccagagggaggccctgagcttgagcttgagctgttgtgcctggctgggctgccggatgcccgcttgttatggccccagatgggggcagcctgtccagtgttcctgactcccttgtaaaccctcttggctggcctggctgggcctctgagcctgaggacagccatcagccggtgttggtggttcgcgtgcccctgcctttctgggctgtagattccgcccgctgtcyagattgcgtggaaatctgctttgcctggtgtgtgcagagcctggctccagccctcacacactccag

SEQ ID NO: 473794 - DNA, 435 bp, Homo sapiens
tggtgctaggtgtgggtcaagtgttragcatcggaccaggcatattggaatcacccagggggcccctcttcctcccggtttctttttggacagtagcccctaagggaactattctcaatgtaccttgtggcatagaggaaagcacttctttaatttggagtcaggagaactgaattctagccctgggttaccactaagcggctctgagtgaacttggtcctttgtcctctgggtgtcaagttctctgtctagagatgagggttggtctcctccaccgcccacatcctgaaatttgcgattccaaagaaggaatacacttatattaagtataagaatgtattttcaatattaagatgagaatatatttgtatttagttatttgtagctctttctccagtagtgattttacacttccagggtgcaatttgctggtca

SEQ ID NO: 473795 - DNA, 435 bp, Homo sapiens
tggtgctaggtgtgggtcaagtgttgagcatyggaccaggcatattggaatcacccagggggcccctcttcctcccggtttctttttggacagtagcccctaagggaactattctcaatgtaccttgtggcatagaggaaagcacttctttaatttggagtcaggagaactgaattctagccctgggttaccactaagcggctctgagtgaacttggtcctttgtcctctgggtgtcaagttctctgtctagagatgagggttggtctcctccaccgcccacatcctgaaatttgcgattccaaagaaggaatacacttatattaagtataagaatgtattttcaatattaagatgagaatatatttgtatttagttatttgtagctctttctccagtagtgattttacacttccagggtgcaatttgctggtca

SEQ ID NO: 473796 - DNA, 435 bp, Homo sapiens
tggtgctaggtgtgggtcaagtgttgagcatcggaccaggcatattggaatyacccagggggcccctcttcctcccggtttctttttggacagtagcccctaagggaactattctcaatgtaccttgtggcatagaggaaagcacttctttaatttggagtcaggagaactgaattctagccctgggttaccactaagcggctctgagtgaacttggtcctttgtcctctgggtgtcaagttctctgtctagagatgagggttggtctcctccaccgcccacatcctgaaatttgcgattccaaagaaggaatacacttatattaagtataagaatgtattttcaatattaagatgagaatatatttgtatttagttatttgtagctctttctccagtagtgattttacacttccagggtgcaatttgctggtca

SEQ ID NO: 473797 - DNA, 544 bp, Homo sapiens
agctgggtcactgcctgggagcctttcaggacttgtgagatccagagatgtggccattctgagggaggactgccttggttttttggtcgggggaaggacagccacccctcccagatgcatctccagcctggatgcctcctcaggtaccacctgcctgttcctgaccttggtaaagttgtgtggagataccagcaatggtgtaccatgcctttggggcccccggggtgccacacgggattgcttgcagtaactctcaaggcctcttggcctctggctgggtgttgtggagtgtagggasagggcaatatccttgttccgtcacagacactgtgacacccctcgacctcctggaggtcacggaggtgtggggcacgcttttaatgtttctgaaaatacttcaggaaagcagcatatctttgcaaatattggcctaaattctttttttttctttttgaggcagggtctctctctctgtcgccgaggctggagtgcagtggtgccatcatagcccactgcaaccttgacccctcaagcgatcctcctg

SEQ ID NO: 473798 - DNA, 624 bp, Homo sapiens
ggaccacaggcacgcaccaccaygcctggctaattctcctcacccatctttttttttttttttgtagagatggggtcttgccatgttgcccaggctggtctggaactcctgggctcaagccatcctcctgcattgacctcccaaagtgctgggattacaggcatgagccactgtgtccagccccaaattctttattatacaacacaatcttagacccatgccccgggtaaacacatgaatcaacacatcagtaggaacaaatccttctcatccctacacccaaacctccaaatcctcacctgtgtggctgtgctcctggccaagatctcctgaggtgcctggtatgctgtctcgggagccagggtagtgcaggtggctcctggtccagctctaggctcttgctagtatctggaggacagccactggcccaggagcttccgtggagtggatactagcgtggccattctcaaagaaatgggacaccaaccacagggtaactggaggtgctgaaagaagccaatcctacagcttgaaatctgtcttctgctccccacccaccacactgcctgctggcatcgggagtttgtaagttttccttttttattgagtctctcatttatcacg

SEQ ID NO: 473799 - DNA, 599 bp, Homo sapiens
gctgcactcttctgtccagactggatctccagcaatggcatcactagcaggggcagcaggcacagaggaaggagggcccgtctgcarctggagctggggacaggtggccccaacccacactggcagcaggcactctctgggggcccaagcagcgagcccccgacatccctaagagggagttctgctgccgagccccactgcacactgaagactcgcagctcagagaaaccccaatccgcacaggggccgatagggacaacacaccaaaggggctacttggccggcccgcggcgcctcctccagacgtccctagctccatgtctagttgtttaatgtatacaataattggccccactgaagccaagagatacacaccccaccctaccccacttcaaggggaacacagtactcctgtggatgatgggcatttgtaaggtaggtgggtggccagggtgtgcccacactggagggtgcacagggtataccggcatagggacagcacgtgaagcaagtgtgtgcacacagagaggaggcatgggggcaagtgtgtgacacagagcagaggcataggggcaagtgtgtgacacagagcggaggca

SEQ ID NO: 473800 - DNA, 577 bp, Homo sapiens
tggatgatgggcatttgtaaggtaggtgggtggccagggtgtgcccacactggagggtgcacagggtataccggcatagggacagcacgtgaagcaagtgtgtgcacacagagaggaggcatgggggcaagtgtgtgacacagagcagaggcataggggcaagtgtgtgacacagagcggaggcatgagggcaggtgtatgcacacaaggagggcatgcagggtggatgtgaatacacagggagggggcacatggcagagcccgattcaccacgatgctaatgaagccccagctccagagccctttgcaaactcaagcccctctgcacactgggaggggtcccagcagtggggttctgtagccctacatgttttgtaacctttgcaaaggaaagatctgttacctacttaagacctctctgtctctgtctgtctctgtctctctctctctctctctctctcrctctctgagatggggtctttctctgttgtctaggctggagtgcagtggtgtgatcacagctcactgcaggcacaacctcctggctaaggtgattctcctgcctcagcctcccgag

SEQ ID NO: 473801 - DNA, 496 bp, Homo sapiens
tcataaggacctaaacgcctaagaagcactgcctgaagtcacttcagggccgactctggcactttctgctcaaaagtcaccagrcggcagaagtagtgagggagactccatccctgcatcctctccatcccccgcatcctggtgagatggcacagcacctctgtgcagagcagccgggtgccactggaatgacaggtggctcttaatggtgggaaaacaagagaggggactccacaaaaagtcaaacaggtgtccagccttaaggaacccacctggggaagattctcatttaagctccataccagtcaagaggtgacaacacgtggcaatgctaaggaacactgtttaattcccgaggggcttgccagcttgagaggacccagaatgagtgtaaaatgaggttgcaatgtctccctcagcaccagacaacacctgtgccccacccccaggcttcacttggggacatggggctcagatccaagtcttatttcagggt

SEQ ID NO: 473802 - DNA, 571 bp, Homo sapiens
tgcaccagaagctgccgggtaggcaggtactgactcccctctgtgggcccctcaagcacagtatgtaaagccaagttggtactagggtgacgactgtggaacggggtgagatgggrtgggatgggacaggataggatggaatgagaggggtggaatgggatgagtagagcaggtgggataaaataagatgcaatggaacagaatgttggaatgaaggaaagagaaggttacagaggctgggcccaacgatgccccttctccttatcaaccatggaaaaaagtgttcctacagggagacgtgtacaagaatgtttactatagtgaacaactggaaacaccctaaataccccccaccaggggcctgctgcataaagcacggggcatccacactacgcaagccccacagcagctaataagaagtagggagatgtacccgctgaggtgagaagctctctgaggtctaatactaaatggaaaaaaagcaagttgcagaatgatagatccaatatggtatcattcattttttaatcaaaaatcaatataacattgtttctgtggatacacataacac

SEQ ID NO: 473803 - DNA, 552 bp, Homo sapiens
tcacacagttcccaaagatctccaccagcctgggcacctacggaagttggggccccattactctttccccagggctctcttccctttgcagtcagagctctcagcatcacgtgcactcatgcttttgtgggctaatttgtctactttctctctcccttggcaggctgcattttccacagactgccacagcaatatctcccaccccacctgcccttctgcagggagaccttgactccctcatcataacgagggaccgaattctcctccacagtccccctcggggctggccagactcagtggctccttgaccaacaggatgcaacagaagtgctattctagacttctgaggctaggtcagaaggaggcttgcagcttccccctgcatctcctgggacaytcccccttcaagcccagcagccataatatatgaagcccaagccacatggagagagagcacatgggggctccagtcaacagctcccagcttccagcaccgacttcagccatgggagcacaccatcttggacatcccaccccaagaagcctttggat

SEQ ID NO: 473804 - DNA, 552 bp, Homo sapiens
tcacacagttcccaaagatctccaccagcctgggcacctacggaagttggggccccattactctttccccagggctctcttccctttgcagtcagagctctcagcatcacgtgcactcatgcttttgtgggctaatttgtctactttctctctcccttggcaggctgcattttccacagactgccacagcaatatctcccaccccacctgcccttctgcagggagaccttgactccctcatcataacgagggaccgaattctcctccacagtccccctcggggctggccagactcagtggctccttgaccaacaggatgcaacagaagtgctattctagacttctgaggctaggtcagaaggaggcttgcagcttccccctgcatctcctgggacattcccccttcaagcccagcagccataatatatgaagcccaagccacatggagagagagcrcatgggggctccagtcaacagctcccagcttccagcaccgacttcagccatgggagcacaccatcttggacatcccaccccaagaagcctttggat

SEQ ID NO: 473805 - DNA, 439 bp, Homo sapiens
caaggatagaaaatcacaatcagatgataccacttgaattatttattgctgcagaacaaattactccaaaatttagcagcttaagacaaaaaaaaaatagtatctcacatagtttctgaagaccaggaacttgagtagcttagttaggtggttctgatttcaggtgtctcctgaggttgcagtcaaaatgttagctgaagctgcaatcatttgaagcctcaactgaggcaggaagatccatttccaaggtggctcactcacacgactgttggcaggaggcctgagttcctcaccaaacagaccccttctaaagctgcttgaatgtcttcatggcacagcaactgtcttcttccagaatgaatgaatgagagagagcaagacagaagcccagcatcttttacagcttcgcctccraagtcacttgctgctttttccacaa

SEQ ID NO: 473806 - DNA, 462 bp, Homo sapiens
ttaggtagagatcatatgctcgggtaacctcccctatacctacttaccacttactgtgcccrgcaatgcatcaggtactaggctaagcacttcataaagtgcatctcaggcaattctcacaacagaaatctctatgaatagaaagtcctgtagccacttcacaaatgaaggaactgaggcttacctagaattctacaacaattaaaacataagccggaattcaaaccctgctttaactgcaacgtctgaactcttaacactacattatactacctttttaattttttttaacttttattttaggttcaggggtacatgtgtaggtttgttatataagtaaactgtgtgttacgggggcttggtgtgcaaattatttcatcacccaggtaataagcatagtacttgataggtagtttttggatccttaccctcctcccaccctccatgctcaagtaggccccg

SEQ ID NO: 473807 - DNA, 622 bp, Homo sapiens
tcaacttaatggttattttcagcatctatgggtagaattgaatttaattgactcagaagccaatggaagggtgacacaaaagaagccaaagatctatcttcgtggaatttataagttattagaatgagaagcttacattcaaaggacaatcacaaaatgtaacaagaatttacaaagtacatgttagactacgtgatgtaggctgagttagaagaaaggaagaaggtcacagaatctgaaatgttcaaaaaacacatagggcttttaattgggctctataaaaataatttgcattggctgagaacaaaactagattttccatctttactatctagatcagtggttctcaatcagtggctactaatgaacaatgaaacctgaacagtgttacagtgaaattttgcccaatgtgacctttttttttaaatgaaaacacacagagttgcaacatcatctgtctgatggatcctttaattgagcaggcagaaaaatataaaggatgatccaaccttctktgaaccagagtaaagtgtgagctttggcttgtgggtttgtagcagattgtcatcatggcaataaataattctaatcaaatagcaggacagtgtgaaagggtgaccac

SEQ ID NO: 473808 - DNA, 618 bp, Homo sapiens
ctgcaagcttggcagatcctgcactgyacgaaggcgaggaggctattgtgatgcagatgtgctccaaagtgcatctgcagcaagaacatttccatgggtctttactgtatttcttctattattcatagaacacaatgtaaatgaagccataaattttaccccccacactagatggagaaagaagataatggaaattgtgaattatgaatgaatcactgttattgtaattccttaaggattctgatggagatgattaaattcatgcaaagacacagattctaaacttttatgcctgagtgagtccctagtaatgcctcttggaatttcacaaggaatggaatagagacgatcttggtgttgcatttacctgccaaattatctcacagataatctacctaggcctggacagatcaccttattaaagataaagaattcattcccgggggaggagaggatgttgcaaaatatatgtgtcttgcaactactcagacatattgcttaggatcctaaacacaaaacatttgaaacccctaaccctgagtccttggaatgtattcttttagagaactggagggagaaagagcaaaataagtaggagtcaatatctttcttaaaaag

SEQ ID NO: 473809 - DNA, 608 bp, Homo sapiens
cttgggaggctgatacaggagaatcccttgaacctgggaggaggaggttgcagtgagctgagatcacaccactgcactacagtctgagygatagagcaagactgcctcttaaaaaaaaaaaaaaaagagagagagagagagaaacgaaaaaccttaaaacaggcacagacacccatacccaacatacatttgatggtttctaaaaggtcagttaaaaatgagcatttctacagctactgattgaatcatgcatatgtcatttttaaacagctttattgaagcacaagagaaatacaataaagtgaactaattaaagtgtacagtttgataggttggtctatgtatatatctatgaaaccatcaggacaataaaaacatttcaatcaccccaaaaactttccttgtgcatctttgtaattctttcttcccactcatccctgtcccactctttaactccagataatcgctgatctgctttctgtgaaattgtgcattctttaaaatgtatataaatgaaatcatgcattatgtgtacttttttctgccttctgtcatccagcataattattttcagattcatctatattgtagcattgattcattccttt

SEQ ID NO: 473810 - DNA, 608 bp, Homo sapiens
cttgggaggctgatacaggagaatcccttgaacctgggaggaggaggttgcagtgagctgagatcacaccactgcactacagtctgagcgatagagcaagactgcctcttaaaaaaaaaaaaaaaagagagagagagagagaaacgaaaaaccttaaaacaggcacagacacccatacccaacatacatttgatggtttctaaaaggtcagttaaaaatgagcatttctacagctactgattgaatcatgcatatgtcatttttaaacagctttattgaagcacaagagaaatacaataaagtgaactaattaaagtgtacagtttgataggttggtctatgtatatatctatgaaaccatcaggacaataaaaacatttcaatcaccccaaaaactttccttgtgcatctttgtaattcyttcttcccactcatccctgtcccactctttaactccagataatcgctgatctgctttctgtgaaattgtgcattctttaaaatgtatataaatgaaatcatgcattatgtgtacttttttctgccttctgtcatccagcataattattttcagattcatctatattgtagcattgattcattccttt

SEQ ID NO: 473811 - DNA, 493 bp, Homo sapiens
tgggcacggtggctcatgcttgtaatccccagcactttgagaggccgaggcgggcagatcacgaggtcaggagatcgagaccatcctgactaacatggtgaaaccccgtctctactaaatatacaaaaaaattagctgggcatggtggcgggcgcctgttgtcccagcttctcaggaagctgaggcaggagaatggcgtcaacccaggaggcaaagcttgcttgcagtgagctgagatcgcgccactgcactccagcctgggcaacagagcaagactccatctcaaaaagaaaaaaaaaaaaaaaaaactataatctcacctctaggrgaacaaacaccactattactttttttctatatacatgacatctcttccttacttgtacatagtaatggggtacaagtttagttttgctacattggcatattgcattgtgctgaattcagggcctttagatgcccccatcactggagcaatgcatatgatatacat

SEQ ID NO: 473812 - DNA, 493 bp, Homo sapiens
tgggcacggtggctcatgcttgtaatccccagcactttgagaggccgaggcgggcagatcacgaggtcaggagatcgagaccatcctgactaacatggtgaaaccccgtctctactaaatatacaaaaaaattagctgggcatggtggcgggcgcctgttgtcccagcttctcaggaagctgaggcaggagaatggcgtcaacccaggaggcaaagcttgcttgcagtgagctgagatcgcgccactgcactccagcctgggcaacagagcaagactccatctcaaaaagaaaaaaaaaaaaaaaaaactataatctcacctctaggagaacaaacaccactattactttttttctatatacatgacatctcttccttacttgtacatagtaatggggtacaagtttagttttgctacattggcatattgcattgtgctgaaktcagggcctttagatgcccccatcactggagcaatgcatatgatatacat

SEQ ID NO: 473813 - DNA, 609 bp, Homo sapiens
agatcgtctgtctagatccattgtaagtcagaacctgggcagagagaaaggccaggtgctggctgttgggtttggccactgttggtttgttttaggtgattctcaggaatcctaggggtgctgtgtgcaaaccctgcttcccactgcgctctgtggagctgggtgtctgtgaacatgggttctttgccttggtcatgctgtggaaaacccctccctgacacttcatatgactgctcagagtggcrggtacagctcttttggtgaccaaggaacagaagcccacttatgatgattcaagccagaggaaggtttgtggcagagatatgactctcatgggacccaaagtaaaggagcagagatgggctagaatgtcgtggactgaagatggctcgcttgctttctacctaccttccttccttccttccttccttctttcctccctccctcacttccttccttccttccttccttccacaggaaagttcccttgtcctccttgcagggtgtgtgatgggggtgtggcttgcttcttcagtgcccagacctctaggggagcatgtagataggcaggttatagggctctgaccccacggcagtgtctggggtgaa

SEQ ID NO: 473814 - DNA, 462 bp, Homo sapiens
ggctatggctcaggaagcatgcaattaacatcatggggacgtggaaattcccagcgagtacagcagaagagcagagagaagactgggagggggctgtctactgggcccctgtgcacaatcccaactcagcctgaagctggagccctgagatcataaggaaggtgacatcagggctatatccgcggtggcgctggacaggagggtggagcayttgttacttgactgcttttcagcactgaaccaaggaaacaggatctgtggcattggctctgccaactctgctcccacggcaccggcctttttccatttccccttagcctatcctggctccaggttaagcaaggcccctctcccctcctgttgtcttttgtttccgtggcggaaaatttgaaagcccagcgtattgcatttcttttcagcacaccgataaggcagaggaaacatctgcgactggggacaaaa

SEQ ID NO: 473815 - DNA, 612 bp, Homo sapiens
agctcggttctgttgtttctatggggagagtcaaaggaatgcgactgagggtggctcccttgactctattccccaggccaggaagccataggcaggggccaggaatggattttaaaggcaaagttctcagacccaatgggaacatgaactggtaaactctcctcaactyccaaagaaaaaggatttgggtctttgttggtttttgcccacagccacagaactgaaagtctgaaactagattctctcaaaaagacagtaacttaaaccttcagagatagagtgtgagaaaagcccacccttctgccagcttgtgatttagaaagatgcattcactcaacaaacattgactgagcacatactggccagggactgttcttcacaggaaggatataggacggaaaaggcagacaggagcccttggccccagggtttccattctagtcagcctttaactctcagactctcagagctaacagaaacctctgatactctctaactctacctcaggaaacgcaagcccaagaaggatagtttacagcagggcctggactagggattaacataaaaacaacaatgacaaatctcatttaaacttcacaaatgtaaggaaaa

SEQ ID NO: 473816 - DNA, 489 bp, Homo sapiens
aataaatagaaattcacgtactgtacattgtcagatctcactgcttcagagcaagatttggttaaaacttcctagaaaggagtttagccacatgtatcaagagttttaataatacccttttagtcattcttctgacaggacccctgtctagtagatatcatagaggtcaacaatgagtcatgaacagttctgttcccttggcattgtaagtaactgatttcaatatcatggcattgtttatgcaaattatgaaatatctacacattgaaaaattataatgttattagaaacatattcacagaaattttcaatgatgcggatagtgcattatgtaaagaaagtaaactatgaaattttaactacacttaaatttagcaatagaaatacttaaatcaaataacacttaytacatgttgactctcctcccacctttaaatgcagttattatgatatgctattaagtgtaatttttctccttattttataccc

SEQ ID NO: 473817 - DNA, 552 bp, Homo sapiens
agggcagggaccatgcttgtctcatttactactatatcctgtgtctggcaaagtatttgacatatagtaggcacttactaaacatttgttgaatgttttaatggatggacagcaggctttccggctaaatgaatgaataaatgactaatcagactccaagaaccaaacctgttaaactcaatcattaatgttcatgccctctactcaaggcgatgccctcacccatggcctttttttttttttaagtcagggtctccctctgttgcccaggctggagtgcagtggtgcgatcatagctcactgcagacttgaacccctgggctcaagcagtcctcttgcctcagcctcgcaagtacctgggaccgcaagcacgcaccagaacgcttggcaaatttttaaaattttttgtagagacggggtcttgcaatrtcgcccagactggtttcaacctcctggacttgggtgatcctcccacctcagcctcccattgttttgagagtacaggcatgagccactgcactggctactcatgtcctattcatccttaactta

SEQ ID NO: 473818 - DNA, 552 bp, Homo sapiens
agggcagggaccatgcttgtctcatttactactatatcctgtgtctggcaaagtatttgacatatagtaggcacttactaaacatttgttgaatgttttaatggatggacagcaggctttccggctaaatgaatgaataaatgactaatcagactccaagaaccaaacctgttaaactcaatcattaatgttcatgccctctactcaaggcgatgccctcacccatggcctttttttttttttaagtcagggtctccctctgttgcccaggctggagtgcagtggtgcgatcatagctcactgcagacttgaacccctgggctcaagcagtcctcttgcctcagcctcgcaagtacctgggaccgcaagcacgcaccagaacgcttggcaaatttttaaaattttttgtagagacggggtcttgcaatgtcgcccagactggtttcaacctcctggacttgggtgatcctcccacctcagcctcccawtgttttgagagtacaggcatgagccactgcactggctactcatgtcctattcatccttaactta

SEQ ID NO: 473819 - DNA, 511 bp, Homo sapiens
tccattaagattttgggaatttaacgtgttagttcttcccagggaaactgcatttaaaaaaggaagagctgtgatgtctgaataaaggaatgacatgctgatggtaggcacttgcggctaacagggctgcttagattaaatcctgtaaaagaaaacattctttgcgtctgggtaaggttggctttccctgctttcaatgaagaggaaagataaaacttcccacttaaggaggactgccccacctccttcyccaccaccaatgttgagaagagtttgcctacattttgcttttttcaagtgggacaactgaaatatcttctagctatttgttccagtagttcaatatatattcttggttatatcaaatatttgatattttaggaaatcagccttgttaaattaaagtggataagatggcattttaaggtcaccttggtatgatcaaacatgatgctgacatttacaatccatttccattgcttctcacatgtttccttgtcagttaaatcca

SEQ ID NO: 473820 - DNA, 511 bp, Homo sapiens
tccattaagattttgggaatttaacgtgttagttcttcccagggaaactgcatttaaaaaaggaagagctgtgatgtctgaataaaggaatgacatgctgatggtaggcacttgcggctaacagggctgcttagattaaatcctgtaaaagaaaacattctttgcgtctgggtaaggttggctttccctgctttcaatgaagaggaaagataaaacttcccacttaaggaggactgccccacctccttctccaccaccmatgttgagaagagtttgcctacattttgcttttttcaagtgggacaactgaaatatcttctagctatttgttccagtagttcaatatatattcttggttatatcaaatatttgatattttaggaaatcagccttgttaaattaaagtggataagatggcattttaaggtcaccttggtatgatcaaacatgatgctgacatttacaatccatttccattgcttctcacatgtttccttgtcagttaaatcca

SEQ ID NO: 473821 - DNA, 640 bp, Homo sapiens
tgagcagtgtatattgtacccaatatgtagtcttttatctctcatcccttcccatccttctgcccaagtctccaaagtccattatataatggttatgcctttgcatcctcatagcttagcactcacttataagcgagaacatatgatattcgattttacattcctgaattacttcacttagaatgctggcctccagctccatccaaattactgcaaaacacattattttattcctttttatggctgagtagtattccatgatgtatataccacattttctttatctaytcattggttgatgggcatttaggttggttccatagttttgcatcaattaaatttattggcataaaatcataatatccctttatgatctttctaacttcaatagggtctgtagtgtcatccgatttttaatttctgactttatttgtgccttctatctacttttcttggagtctcctatgggtttattagttttagcagcttctcctagaattaatttttggattcgttggttttatttgttgatgtttaatttttatttagttaacttccatttctatatgtttttagacttcctctgttatttttgaatcttattgacatacatacttagctctttttccatctttctctt

SEQ ID NO: 473822 - DNA, 576 bp, Homo sapiens
ctgtgagttcaaatcctgcttataccactcacaagataggggacttgggcaagcttctcaacctctctaagcctgggttggtcccttcatggaagggaggttattagacttacatgggaggcttactgaaagaattaaggtagtgttgaaaaaaccctttaagttagtagtgtttggaaagcccttagctcagtcatgtgtgtgtgcatgctgagagcaagactttgtgtgtggaaagcactctgtgaacagtggctgttgttatcactgatgagaccctctaagcagagccctgtagggggagaaccttcaccttttcatggtccccttacaaagtaggggtttctggagcaagtgcttgttgctatgwaaagactgggaccattagaacatcaaagtcagaagagagcttagtgggacctcaaatgtctgctcattggcatcactggggagctttatgatgcagactcatgggctgcagtcccagcctatcaaatcggaatctctaggcagagacttggaaatatgagctcaaacaatctgagatggttttgaggagctgtcacacttgggaaa

SEQ ID NO: 473823 - DNA, 596 bp, Homo sapiens
actaaaaatacaaaaaagttagccaagcatggtggcgagcgcctgtaatcccagctactcgggaggctgaggcacgagaattgcttgaacccaggtggcagagtttggcagtgagccgagatcatgccactgcacttcagcctgggtgacagagcaagactccatctcaataattaaaaaaaataaataaaagaaaaggtacagtaaaaaaaaaaaatcttaggggatcaccattgcatatgcagtctgttgttgactgaaatgtccttgtgtggggcatgattgtgtgtctgtgtgtataactcagatctttgtgttatacacccagagacagccactacacatatagatgaatctacctttattgataaatactattttgtctatagataggaataacatcatgagaaatgaaatcatgtcctacatattttgtagcctcctttcacttggcagtatattgtaaatatttycaacatttacccttctacaatgatttttttaaaaaagattgaaaggtattcagttgaatgtctatggacagtgacagcactttgagacacaactttccccttctagagggcaaaacagctaga

SEQ ID NO: 473824 - DNA, 510 bp, Homo sapiens
agtccctgaacagttattaaagaccccatggaagcagatggatgctggccagtaggcattgtccccttttatatttataacttcactgaccttcattttacctctaatagagattgtaccattaattggctggattctcccaagctctgtggcaagtaagaatggaaaagtggattttctccgtactccattgcagaggatatcattaatttgctaggtttcgttcccacagggaaatgttaaaaaccagtacagttggttcttcgccactctggattgacagacattctttgtgtaggtgcctctggctttgagaaacgaggccagagtctataygcagacagtgagcagtgatcttccgtttcctacttgttgcagtagacataaaatcagggcaaatggtgagttccagaggaaaggatccagcatgcagcctgctgaataagagaacaggaatgatctcgaatgatgataaatgtttatactctattagagctttggccatgggtt

SEQ ID NO: 473825 - DNA, 510 bp, Homo sapiens
agtccctgaacagttattaaagaccccatggaagcagatggatgctggccagtaggcattgtccccttttatatttataacttcactgaccttcattttacctctaatagagattgtaccattaattggctggattctcccaagctctgtggcaagtaagaatggaaaagtggattttctccgtactccattgcagaggatatcattaatttgctaggtttcgttcccacagggaaatgttaaaaaccagtacagttggttcttcgccactctggattgacagacattctttgtgtaggtgcctctggctttgagaaacgaggccagagtctatatgcagacagtgagcagtgatcttccgtttcctacttgttgcagtagacataaaatcagggcaaatggtgagttccagaggaaaggwtccagcatgcagcctgctgaataagagaacaggaatgatctcgaatgatgataaatgtttatactctattagagctttggccatgggtt

SEQ ID NO: 473826 - DNA, 656 bp, Homo sapiens
atcttcaatcttgcataccaacatctttctctgattcacagatttcctttatccccagcacttcctctggtatgtgcatccccgaaagtaagtgatatctattattggatttgggcgttttaaaatcattagccttctggaggggaggggagaggaaggaggctggatggttacattagaatatttccagagggaacctcactttaatctcatccacctctgacttctgcaccccagataacccccatatttgggagggatgacatcacagtaactgacaatggaattatcaccattgctctttttaatatttaaatgatacacagactcagagaaaacaaaatgagtttacatatagtcataatatccataactagagatataaaacaaaaagctatggagattcttatctagtgaagaaatctcttttagaamgtttctgatgactttcagttgcaaagcatagctctttcacaatatatcaacccactttcaatgatttgagatttggagagggcccagccatagatttacctggtgagtcacagagtagaacttgatatgagaaagcaggaccctatatctatcagcctaatggttctcagaataccaggtcatatccatcatttcttttcccaaatagctgtaacaggcat

SEQ ID NO: 473827 - DNA, 642 bp, Homo sapiens
caggcttggccgttaacacctttttggtcttctgaactgggtattgtagtgtgcttggcaggggggtgcggcaggaaagtgacagaccttggaagctgaagaggagggaggacccacacgctggcttcctcagtgatgggtatctaagcacttcagtgcctcacctaagagcaggtgacaagagcttggtggcttgcaggaagcactgcagttaactctagccccgccccctttttttctttataatttgtagagacctcggaagctgctgttatctgaacccatcattagccagctctacctgcaggaggagatgctgaaccaggctaggaccagagaaagatgagtgaggcgaggtagtgtcactctgtttcctcctgctagcagccataaggaragagaatcatttgtggcactctggggacagttttgtcaccctgacagtaatgctgttatgcgctggcttgacacacaggatgaatccataaagacagataagtaactgtgaaagtggctggggatcaggctgagtgccaccactcacctgcagtgacaaatagatagtcatgaaggattggaaatcctgcccaacacagagatctgtcagcagagagatggactgcaaccccagtgacacaggca

SEQ ID NO: 473828 - DNA, 516 bp, Homo sapiens
cagctgctcagagcaaatgacaccggagtccctaggtactttccaagatgatttggtctaacaggtgccttgaagtcacacatagctggrtgacacacctggccctgatgcttattagctgcggggccttggcctaattgtaaaaacttcagaaatccctgttcttcatatgtacaatggtcataattatatgagtaaaacacacataaagtatggatcctacatcttccagaattggttctcagaacatatttgtagtttcctgctcttctagtcaatggcagtccctctcgtccacactactgtccctccatcttttggaaacaatgattatgtattattctgacctattgggaagtgcctttttttcatgaaaatgaactggcttttcataatttgaaaatatgtatttatttatacctgcctttttgtaacaaaatattaaaataaaatttcaaccagggatggagaaaggaatgacctgctccccacaacagggcaatatggttaccatgc

SEQ ID NO: 473829 - DNA, 516 bp, Homo sapiens
cagctgctcagagcaaatgacaccggagtccctaggtactttccaagatgatttggtctaacaggtgccttgaagtcacacatagctggatgacacacctggccctgatgcttattagctgcggggccttggcctaattgtaaaaacttcagaaatccctgttcttcatatgtacaatggtcataattatatgagtaaaacacacataaagtatggatcctacatcttccagaattggttctcagaacatatttgtagtttcctgctcttctagtcaatggcagtcyctctcgtccacactactgtccctccatcttttggaaacaatgattatgtattattctgacctattgggaagtgcctttttttcatgaaaatgaactggcttttcataatttgaaaatatgtatttatttatacctgcctttttgtaacaaaatattaaaataaaatttcaaccagggatggagaaaggaatgacctgctccccacaacagggcaatatggttaccatgc

SEQ ID NO: 473830 - DNA, 651 bp, Homo sapiens
taatagacagaaggttatcagtgattataagagaaaagagcctttctatgacatcacttctcagctcgaaattgctcttatctgagcagtttcctgcgtctttacacaaagcatcccttgtttagggatgctgtctctcttgttccttacaggttgcacaaagtgagctgctaaagaacactagctacagccaccaccttccttccagactgttttttattgccctgtggctcacttcatgatgttcatacaaatccttctcaatgtccacttctgcccccgtcatactgcaaccaaaatgtcccaaagcgacatgaactgatgcttcatgcacttgtgggaagggctggcttcataatttgcagggctcagtgccagatgaaaatgtgggagcccttgttcaaataacaggaaaaagtcccatccagggtactaactaaaatacagatctcatttctctttcttctgcagtttctctctggccttgccrtgatgtttgttatctctttgtttaatattattctaaggaaagaaaaattaaacccttaaattattagcttgaattttctcattcatattagtattgtgcaatataatttaaaatgcaattatgaggtttaaatgcaaatataagggcacttaactcttata

SEQ ID NO: 473831 - DNA, 566 bp, Homo sapiens
ttcttgattctgtctctctctctctctctctctctctgtcttctgggttcccttcaaattatctcctcatttctctcctctgatctgacaacctactgaaagaatggcctttcctcattgcctcccatattttccacctgcaatacacttcaggaggattgttggccacaccactctygtaaaagtattcctgctaagaccaccactgacctcctagctgtctactccagttttcagaacttccctcagtatgttagtagtagttaaatccatggaatgcctattcctccttcactttgaggccatttaaccctgtaaatctcattgtcacttagtagtcgctttatctggacttgactatataaacatctgtaagtaatgcattcagaaaacaggttttgagcatgtaccctagaacaggctctgcactagggctggggaaaattggtgagcaacacctgccagccctggggcatggtggagtagatggagtgagggatcgctcccatgggggtgtagttgcagggtgtgataagggccatgcaagaatgccaggagaatgttta

SEQ ID NO: 473832 - DNA, 570 bp, Homo sapiens
gcacgactgcagattcagagcaacaacctttaggggtgggctgagaaataaatattttttaaaggcatatcaagagactcttatgaatatctctgattaaggactatagctgtactgtaattaagggattaaagcaaataagcaaataactataacgttaaaagtactgtgggttgcagaggagagaaggcatcttgcggggatatccagaaacctatttgaagtgggggacatctgaattaagataaaactgattagactgggaaaagaatcagaactaatggtaatagatttcagaggtctctaactggaagtsagagataaaactgtagtaattgaggaagagacagacagaagagaaaacaatgtcggggggagattccaggaggtgatgtgaacatttagtgccaggaagtgggtaaagaaacccgagagagagagagaaggtgtctccaggagtcagcagaagaaccaggagagttcactgtcataagataaaatggacacaaagaccaaatattttgcagagtggtcttgggaaaatgggagttggcaagatgttggtggata

SEQ ID NO: 473833 - DNA, 570 bp, Homo sapiens
gcacgactgcagattcagagcaacaacctttaggggtgggctgagaaataaatattttttaaaggcatatcaagagactcttatgaatatctctgattaaggactatagctgtactgtaattaagggattaaagcaaataagcaaataactataacgttaaaagtactgtgggttgcagaggagagaaggcatcttgcggggatatccagaaacctatttgaagtgggggacatctgaattaagataaaactgattagactgggaaaagaatcagaactaatggtaatagatttcagaggtctctaactggaagtcagagataaaactgtagtaattgaggaagagasagacagaagagaaaacaatgtcggggggagattccaggaggtgatgtgaacatttagtgccaggaagtgggtaaagaaacccgagagagagagagaaggtgtctccaggagtcagcagaagaaccaggagagttcactgtcataagataaaatggacacaaagaccaaatattttgcagagtggtcttgggaaaatgggagttggcaagatgttggtggata

SEQ ID NO: 473834 - DNA, 485 bp, Homo sapiens
gcaaccttaattccatttgcaaacttaattccctcttgccatgtaaataacatagttacaggttctgggcattaggaggtggacatgtttgggggtccattattctgccgaccactcttggtcatattaggcattagaggtaagttcttttcccatgttgttctgattctgatttagctttttgattttaacaataatttttagtagggtaggttatccctattcaaatggagaaattggactcccatgaatttggatttctcagctagctttcttggcaccagacatagttcccccataatgttcctgacttttcagawttttttttcctaatagtctctttattctgagagcattcattaattattcagttaatcgattaggcgattttggttacctgctgtatgtgtcattacactgaactattttagtaagttcagtgtgggcaatttttttttcaccaaaatatgttctcaaattaatta

SEQ ID NO: 473835 - DNA, 397 bp, Homo sapiens
gaagctaggacaagagcaaatttcaaggccagtacttttgggttctgtgcttcctgccctccctctccattctaaggtccctaatggtaaaactcatgaaagccaagccaagggatttttaccccttctattttcccatcttcccaagcaagggtgatattttcattgtaccaattagaaacactcttagatttcaaaagcaaattataatccaaccatatttgccctctcaaggggtagagcctccttctccctcataaamttggagacttctctaaaatattttcaaacttctcagcaggttcatctcaataagtgccatcattccaaaaggaaagaagaaaggggctcaagtgccagtaatgttgctccctgtgcagaggagaaaggaaagcca

SEQ ID NO: 473836 - DNA, 397 bp, Homo sapiens
gaagctaggacaagagcaaatttcaaggccagtacttttgggttctgtgcttcctgccctccctctccattctaaggtccctaatggtaaaactcatgaaagccaagccaagggatttttaccccttctattttcccatcttcccaagcaagggtgatattttcattgtaccaattagaaacactcttagatttcaaaagcaaattataatccaaccatatttgccctctcaaggggtagagcctccttctccctcataaacttggagacttctctraaatattttcaaacttctcagcaggttcatctcaataagtgccatcattccaaaaggaaagaagaaaggggctcaagtgccagtaatgttgctccctgtgcagaggagaaaggaaagcca

SEQ ID NO: 473837 - DNA, 488 bp, Homo sapiens
gacttcccatgggatttatatttccaaacctaggaacaccatctgcctgcacggatggaatgctaagtaatgcagtcaaacaatcagtatgttatgtatagttttttagctttaagaaatctagaaaaaactgtaaaatatgtaaacaaacaagtttgtgtctaaaaattatagcacaaattagctggaaaaatacatagcttaaataaggaaggttagtgatgggctcatatttgtaagtgtgattgtgattatgtagataatatgctttttcttggaaactgacgggttgctgcattcttggttataggtttaagagagagactcttttatatcgtataatgcaagtattccacgtggaaatcacaggatctgaattacagataaaatgtcagtcaaggagtccatttttggyggtttatttttcaaaagtacccaagagaataaagaaaagaatctaagaaaataaataagagaaatgtatatgt

SEQ ID NO: 473838 - DNA, 588 bp, Homo sapiens
aaaacactgcatttaaccaagaaaaataatactttgaaagtcactaaccttcttgccagttagtttttacaaaagacaatgttctatataaccaattgtaggttaaaagtattactgtgattgaagccaattcagatggacaaagtgcaagctaaggaaagcagtgagcttggattctggcagaaattcacctccaattcgagacatgggtagccgcatgctcctcctgccaagcccattctttctgttagtaggaacctgaactattatgaataaattaaatacacagaacatccccaaattcagctctctgatttaactgcttctcttttatttgtcaggcagcaaaatgtaatagaatagttatcaccggatgactttgacatctgtgaagcctggtcaaaatggccattatycaaaaggctatttacccaggaacttgggcctgcacttcagttaacttccaccagatggtgatggattcgtgcagcagggctcacacttagctgcaaatcctggaggttggaggtggaagggagagtttaaaagcagatattctgggccccaccttaaaacatactgattcca

SEQ ID NO: 473839 - DNA, 606 bp, Homo sapiens
tttttatttattttatttatttattttttttagagacagggtctctctatgttgcccaggctggtcttgaactcctgggctcaagcaattctcccacctcaacctcccaaagtgctgggattacaggcatgagccactgtgcccagcctttccacttcgaacttttaaaatcatcctttggaactgagaaaaagaatgtctttgggggagggggagatatgtggcttttgaagaagtcaaaacatttcggttttagcttacaacaacaaaaaaagccatttattttattttatttatctttattcttaaaacttcagcttttattttagattcagggtatacatgygcaggtgtgttactaaggcatactgtgtgatgttgaggttcggggtatgattaaacctgtcacccacgtagtgagcatggtacccagtgtttccacccttgcccctctcacttcctcctccctcatatattccccagtgcctactgttcccatccaaaaatctgttttaaaatggtgaaatattaaaagccccacccctgtattttgtggtttttttaggattttaagctccttttgtaatatttttctgctacgcagag

SEQ ID NO: 473840 - DNA, 606 bp, Homo sapiens
tttttatttattttatttatttattttttttagagacagggtctctctatgttgcccaggctggtcttgaactcctgggctcaagcaattctcccacctcaacctcccaaagtgctgggattacaggcatgagccactgtgcccagcctttccacttcgaacttttaaaatcatcctttggaactgagaaaaagaatgtctttgggggagggggagatatgtggcttttgaagaagtcaaaacatttcggttttagcttacaacaacaaaaaaagccatttattttattttatttatctttattcttaaaacttcagcttttattttagattcagggtatacatgtgcaggtgtgttactaaggyatactgtgtgatgttgaggttcggggtatgattaaacctgtcacccacgtagtgagcatggtacccagtgtttccacccttgcccctctcacttcctcctccctcatatattccccagtgcctactgttcccatccaaaaatctgttttaaaatggtgaaatattaaaagccccacccctgtattttgtggtttttttaggattttaagctccttttgtaatatttttctgctacgcagag

SEQ ID NO: 473841 - DNA, 577 bp, Homo sapiens
tggctggtttctagcccatcaggcaaggaagtgtccaccacatgtaggcactataaatacttgtcaactaaacaaacaaacaaatatcacactccagaaaatgcttgtaatttggagggtgaatgctgcttcttcaggttggggggacgtttacctgctgctcttatcaggagaaatcttcattaagatgagattgtgaactctgggaattctctcttagctggatatttacagctaatgctggaggcttaactctttcttaaacagaccggtcatttgactccrctttctatcccaagccccatgctgacattcagtctccaaggcaaatgcaagcacacagctaaacagcagcccaaagggccactgcagatgcagaagaataaaaggaggaatgccctgcataggaaggggagggggaaatcacagtgagaagaaattcagttcaagaaccactctctgagagtgatcaacatgccagggacaatactcggcataatgagtcccagaactgaaggagtctacaatttagggagggagggcaaattcacactcagatttaatataacatcacatg

SEQ ID NO: 473842 - DNA, 676 bp, Homo sapiens
ctggctggtttctagcccatcaggcaaggaagtgtccaccacatgtaggcactataaatacttgtcaactaaacaaacaaacaaatatcacactccagaaaatgcttgtaatttggagggtgaatgctgcttcttcaggttggggggacgtttacctgctgctcttatcaggagaaatcttcattaagatgagattgtgaactctgggaattctctcttagctggatatttacagctaatgctggaggcttaactctttcttaaacagaccggtcatttgactccgctttctatcccaagccccatgctgacattcagtctccaaggcaaatgcaagcacacagctaaacagcagcccaaagggccactgcagatgcagaagaataaaaggaggwatgccctgcataggaaggggagggggaaatcacagtgagaagaaattcagttcaagaaccactctctgagagtgatcaacatgccagggacaatactcggcataatgagtcccagaactgaaggagtctacaatttagggagggagggcaaattcacactcagatttaatataacatcacatgttttattacagagactctgcaattaacaaggggtgagaagagaggaattgagacaggtgcaggggaagtttctagagtgaagtggaagccacataaaa

SEQ ID NO: 473843 - DNA, 501 bp, Homo sapiens
gctcaagccttttgaaggaacacggccctgtctgcaacttgatttcaaactttcagccttcagaattcagagagaataaatttctcttcttctaagccaccaatttgtagtgatgtgttgctgcagccatggaaacaagtacagcctccaatgacaygtcctgatccctctaccacatccatttctccttctctgaaatgtctatgaatctggtcacttcaacactgggacaggactcagacaccatggaaatcagcagcaatacttttaatatgtttttttaaagatttctttttcttaaacaaattaagcttattaagatgaggatgaatgttccagctttgtatcaaatgaaagacaaaataaaagtttcccaacttcagagtttccttcaaatttaccagttgcttcctatattcagtgtcctgtaaaattcaacacaggaatagatacaataaggcagaaaattagcctaatatagcaccttgcaacataaagcag

SEQ ID NO: 473844 - DNA, 588 bp, Homo sapiens
ttaatataagatgatattctctgggtgacacaattaaatatttccttcagtcccagaagcaatggataactgtgctgtggtttcttaatatccctgcatggtaagtcagtataccaatgttcaaactcattyggtgattaattctagtgatttacaaatcaatcctttctgataagtatgtaattaataaatgcccattgttgccattgttatagtttttcaggcagtagatgtggtttgtacaaggacgcaaagttagtactgaatgtttgcaaggaacagagggtggatcagcgtcactgaggcatgagtcccgggaggactgcagaggatgatgatagtggagaactttttatgctacaccaaggtatttagaattaatatgactgcctgtttcctcagcctcctggaaagacataagaaaagtaaattaatgtacaagccaattggcatttgtcatattttcaggaaacttcaaagtgacatcaaactagagatcatgggaacggtgagctgcgtgcagagcctttgcatcagcagtgacaaaagcaaaagctcttcactgatttctggaaatggagtctagtg

SEQ ID NO: 473845 - DNA, 588 bp, Homo sapiens
ttaatataagatgatattctctgggtgacacaattaaatatttccttcagtcccagaagcaatggataactgtgctgtggtttcttaatatccctgcatggtaagtcagtataccaatgttcaaactcattcggtgattaattctagtgatttacaaatcaatcctttctgataagtatgtaattaataaatgcccattgttgccattgttatagtttttcaggcagtagatgtggtttgtacaaggacgcaaagttagtactgaatgtttgcaaggaacagagggtggatcagcgtcactgaggcatgagtcccgggaggactgcagaggatgatgatagtggagaactttttatgctacaccaaggtatttagaattaatatgactgcctgtttcctcagcctcctggaaagacataagaaaagtaaattaatgtacaagccaattggcatttgtcatattttcaggaaasttcaaagtgacatcaaactagagatcatgggaacggtgagctgcgtgcagagcctttgcatcagcagtgacaaaagcaaaagctcttcactgatttctggaaatggagtctagtg

SEQ ID NO: 473846 - DNA, 454 bp, Homo sapiens
aggaactcataggcctgtctcactgtcccctgactctgactgtccttgcctaagccagacaaataatttcaatatctcaatctcttgctttttaaacatttggaaagcagcccttgtggtcatccagatcagccaaggtttctaagtgcaatccacagttaagccaagaaaggaagaaaatttgcaattaagaacatgctaacggattatttctgaagggaatactaggttgtagatcagaaaaacgtaccacatcatcaccctgactaccatttccactactatgtgccagacactaggccagccagggatttcatacatgttaattcatttgatctaamtctcagaaccaggtacatatacccattttacagatgaggaaaattggcttcatagaaatgaatgactttgcccaaggtcatatagccactaagaagctgagtcagaattagaa

SEQ ID NO: 473847 - DNA, 454 bp, Homo sapiens
aggaactcataggcctgtctcactgtcccctgactctgactgtccttgcctaagccagacaaataatttcaatatctcaatctcttgctttttaaacatttggaaagcagcccttgtggtcatccagatcagccaaggtttctaagtgcaatccacagttaagccaagaaaggaagaaaatttgcaattaagaacatgctaacggattatttctgaagggaatactaggttgtagatcagaaaaacgtaccacatcatcaccctgactaccatttccactactatgtgccagacactaggccagccagggatttcatacatgttaattcatttgatctaactctcagaaccaggtacatatacccattttacagatgaggaaaattggcttcatagaaatgaatgactttgcccaaggtcatatagcyactaagaagctgagtcagaattagaa

SEQ ID NO: 473848 - DNA, 531 bp, Homo sapiens
aatgaatgactttgcccaaggtcatatagccactaagaagctgagtcagaattagaagctagatgtgagaccaaaacttgcctatactaaggctttgtgcaaattagacaaatgtggccgagtgtacgtggcttggcgcatagactatgtctatgtactaatttaaacaaagtgtccctttcctgcaagtagatgttgycctagtccaaagtgcatggctgggtacatggcacactgactattgtgcagtgcccacccactcctcagcagagtgcctttgtgaagattacagcctgaacaattcttcatggcaggccggatgtgtctaacctcagtgcaatgattaatgctatgtgtcaacttagctgggccgctatcttagttagcctgggccaccataagaaaataccacacactgagtggcttaaacaacagaaatttatttctcgcagttctacaggttgggaagtccaagatcagagtcctcctatgcttccctctggtgagggctctcatcctggcttgcagaca

SEQ ID NO: 473849 - DNA, 538 bp, Homo sapiens
gagaacttaatgggggaaaagaggaagtataaatatgtccatttggctggttataacaagagggagataataaggagtgccaggaatctcagtgagcctagtcatctaggcgaagtggctgtaacttggacacagatgattattgccactcagaaatgcaggcttagttaccagatgtgggagcgtgcttacaaaaatggctgcaattgcttatacctcccaatatccactcccttttgcaatgagactttgtagctcctctcatcaaggggtgaaatctgcttctccatcttttaaacccagactggccttgtgaattactttgaaaatataatgaagtggaagtgacaagattcactgtgtgaagttcatgtatgcttcctctgactctcttggcaccctgaccaactgccatctgaacaagyccaggccagccctactgaaggatgaaagaccatatggaccagagttgaatgagctcagttttagtctagagatgggacggtgcccagccaagatcatcaaagccacctaccca

SEQ ID NO: 473850 - DNA, 521 bp, Homo sapiens
tgcaaaagtatgccacagttatgttgggaatttcaatatgatggagctctgagtgtacatgtatgtgaggaaaaggaggtaaacaaggagttagaaagatgtgatgagaccaggtggtgatggactgaatataaagcaaagacatctggatttttaattctgtagggaatagctgaccaaggtatatgattacatgtctgctttttaaacagctttgtgatttgaaatgctgggttgttattgttttttttttktttttgtctttttttttttaaaaaaaaaaagatggctaactctgccaaccatagacaaatatgcatactggcatgtggagaaagaagacaggaattgttagaaagatttcattattttccagcctccaaaataatgaggtaattttaggcatagtaataagaatgaggaagacagactagattcaataaacatttttgagttagtatctgcagatgttagtggccagttgaatgagatggagcagagagagggagaagttaatgatg

SEQ ID NO: 473851 - DNA, 521 bp, Homo sapiens
tgcaaaagtatgccacagttatgttgggaatttcaatatgatggagctctgagtgtacatgtatgtgaggaaaaggaggtaaacaaggagttagaaagatgtgatgagaccaggtggtgatggactgaatataaagcaaagacatctggatttttaattctgtagggaatagctgaccaaggtatatgattacatgtctgctttttaaacagctttgtgatttgaaatgctgggttgttattgttttttttttgtttttgtctttttttttttwaaaaaaaaaagatggctaactctgccaaccatagacaaatatgcatactggcatgtggagaaagaagacaggaattgttagaaagatttcattattttccagcctccaaaataatgaggtaattttaggcatagtaataagaatgaggaagacagactagattcaataaacatttttgagttagtatctgcagatgttagtggccagttgaatgagatggagcagagagagggagaagttaatgatg

SEQ ID NO: 473852 - DNA, 593 bp, Homo sapiens
atccccttttactactaaagagcgtttaagtatatgaacatcccacctttcgttaatattcctactgatggccacctgggctatttctcgtttaggcttattatgaaaaagctcctccaaacgttcctagacaaacctttttgtggacatgttttcatttctctctgggtgaattcctgggtcatagaatattcatatttgtagtttcattaaaaaaaaaaagacaaatgccagacttttgtccaggagtttttgccatgacacactcgacaatattgtatgagagttccaattattcatatcgaccaagcagattgatggcccaaacctgtcccctggtttttgcccttggaaaaaggagaaaagaaatgatcacctccctttacctccatttcccttcttcctcccttgcctttctatgtatctgatttgcccacttgttcaccaggaggaatgaaggcagtctccagcttgtctgttttctctctttaaaaaaaaaattatttttaatttgtgtgggtacgtagtaggtgtatrtgtttatagggtacctccgttattttggtacatgcatgcaaggcttaataatcaca

SEQ ID NO: 473853 - DNA, 294 bp, Homo sapiens
aaggatcttcaagactactgctacatgttagtcaagtcagaagaatttccagagatgtagtggggccctttactgagacagaaaagagaacaggcattgggagaacatccaagtgatatagtattttcctaacagcatgggtcaggaaacttggtggagcctgggcatcctcagaagtactgacacactcttcccactgggttgttatatcactgatacctagacccagagcmcagaaattcccaaatgggaagagatgtgatgctataacatcacaagcctagtgatgaggtt

SEQ ID NO: 473854 - DNA, 547 bp, Homo sapiens
tttccactgtttagacataaatttcaacagatcagccccagcaagtaaaggcacatccctgactgctgtggatgatgagcttttcacgcaaagcagagatgtgaaacctgacaggtatgaaagactcccccacacaagtgctccatacgttgaaagttactcccacaaatctattcctgagggatcaggtcatcatctgtgtgtttgagacagtggccagttaggcttcagtcgacatgaggccagtgattttaagtgtaaaatgcctaaaccatcaaaaattttaggtaggtatttgggggcctgctcacttaaatgggttggtgaaatgtcacaccagacacatgactgggaattggggttttctcctctgctcttagcagcaccttggtaaccaaataattaccctccctcatgcctccacgtccacatctgcaaaaaaggcmctggtgagggtgacaattgggcgaagccccagcccatggtctctccctgcaaagctctgaacttgtgcatccccaggccaggcggtaggtgtctttcaaag

SEQ ID NO: 473855 - DNA, 604 bp, Homo sapiens
tggaactgcgatggaaacaggtcctccccgcagaaaggaacgcagctctgccctcacatcggtttcaacccagtgagacccatgtcagacttctggcctacagaaaaggaagagaaggaatgtgtactgtttcaagctgctaaatgcgtggcaatttgttgccctaataggaagtgaatacaagggrcctgggacagggtctcaggggtgaaagagaaaggtcctgaaatgattgtccatgttgctgttggatcccaggagggatagaacgctggctcctggcctggctgccttgagttaaaggtcactgagtcccagggcctctctggctgatgcctcggggaaggggaaggaggaagcctgaggtggccaaggaggcagaaaagagggtcgcatgcacgggtctgaagcctgctgctgctcagagccaccccacgggcccacagtcacctttcctacctctgtccttccagaggcctccctgtgcctggagacaccctgctggcagtctcttcttcccattccgttccagagattgacaccgtctgctctgcaccggggactgttcatctcagcatggatccccatgcactgcttgcttctg

SEQ ID NO: 473856 - DNA, 604 bp, Homo sapiens
tggaactgcgatggaaacaggtcctccccgcagaaaggaacgcagctctgccctcacatcggtttcaacccagtgagacccatgtcagacttctggcctacagaaaaggaagagaaggaatgtgtactgtttcaagctgctaaatgcgtggcaatttgttgccctaataggaagtgaatacaaggggcctgggacagggtctcaggggtgaaagagaaaggtcctgaaatgattgtccatgttgctgttggatcccaggagggatagaacgctggctcctggcctggctgccttgagttaaaggtcactgagtcccagggcctctctggctgatgcctcggggaaggggaaggaggaagcctgaggtggccaaggaggcagaaaagagggtcgcatgcacgggtctgaagcctgctgctgctcagagccaccccacgggcccacagtcacctttcctacctctgtccttccagaggcctccctgtgcctggagacaccctgctggcagtctcttcttcccattccgytccagagattgacaccgtctgctctgcaccggggactgttcatctcagcatggatccccatgcactgcttgcttctg

SEQ ID NO: 473857 - DNA, 608 bp, Homo sapiens
gttagcaaatgcagacaggctaggcacgttgtcacacgcctgtaatcccagcacctcgggagtctgcagcaggcagataccttgagcccatgaattggagaccaccctggggaacayggtgaaagcccatctctgcccaaaatacaaaaaaaataagctgagcttggtggtgcatgcctgtggtcccagctacttgggtcgttgaagtgggagaatctgtgagctgagatcatgccaccgcacaccaacctgggtgacacaactccttctcacaaagtaaataaatagatgtttcttgttctggagaagcacatttattattatttcagctatattccaatcaaattccaggtaaatatatcaacaactcttcctaaacctagaatagatgaaataagactgaagaagtgcaatgccagatgtgatatgaatacttacactaaagctaatgtaataaacaagagtgtgtcattcatgatttaatagacaagcagataagtggaacagaatagtcagccccaaaacaggcccaagtcaaatgattttgtcgaaaatgcaaagaatgtcctttggaaacaataagtctctttcacaagtggcaagaaaac

SEQ ID NO: 473858 - DNA, 608 bp, Homo sapiens
gttagcaaatgcagacaggctaggcacgttgtcacacgcctgtaatcccagcacctcgggagtctgcagcaggcagataccttgagcccatgaattggagaccaccctggggaacatggtgaaagcccatctctgcccaaaatacaaaaaaaataagctgagcttggtggtgcatgcctgtggtcccagctacttgggtcgttgaagtgggagaatctgtgagctgagatcatgccaccgcacaccaacctgggtgacacaactccttctcacaaagtaaataaatagatgtttcttgttctggagaagcacatttattattatttcagctatattccaatcaaattccaggtaaatatatcaacaactyttcctaaacctagaatagatgaaataagactgaagaagtgcaatgccagatgtgatatgaatacttacactaaagctaatgtaataaacaagagtgtgtcattcatgatttaatagacaagcagataagtggaacagaatagtcagccccaaaacaggcccaagtcaaatgattttgtcgaaaatgcaaagaatgtcctttggaaacaataagtctctttcacaagtggcaagaaaac

SEQ ID NO: 473859 - DNA, 621 bp, Homo sapiens
acagttgctattttttcctattgctatttcattccttcccaacttctcccttcatctggtaggtgactgagctgagcggttccacccccgcagtgcatgcttctctctcttcacccctgagctgcgattccttgggaggaaaccatactttctgcagaaagagaggctggggtcaacagagtcttcacatrgcatgagtggcactggcaggctggagtccagagtaatatgaagtttgaatacagatattgatggcagaaattggcaacaaaccctagaatcaaatgaacagtatgggaggtctctgttaccctgatttctgagggcaagggctatcatctgctttgtggtcttaaacgttttaggtgattattttagaggatctagatcagtgtaataacagtgacacggagttttaccctgtaattactaaagtcactaaatttcaaaacattttagaaaagatctaaaatgaattgacactgcacacaaacttacttatgggtctgtcaaaagttttcaataaactaccttttctgaacccagtttattttgaaacatgataagcccagatttatttttatctaacctgacacattcacttttgaactgatctcccca

SEQ ID NO: 473860 - DNA, 502 bp, Homo sapiens
cagtttctttgcacttcaaatcatccctcatagcatattttacaggctttcgataacactgtcttagaggattacatctatagcagcagttacataaatgkagcttcatatttttcttgaataattatgaacatatttgattcattcaggacaatatcctttgtagaagtcaatggaattttttttttaaaatgtgagaatgttcctttaacattcccatgactttcttcataattacttcctagttatctttacaatatgttatttcctcctcccatgttatcaaatcatactagtatgagggctgtattgtgatgaacaatacaaaatattgatgcataacattcatatgatttaaacaatactaactcctttcaatcctgggaattcattaaaatgcaagacattttaggatatattcttttgaattatttataaccttcacacaccctcagggcagaataaaggggaaagaaatgtcttgttagaaatataaaagatg

SEQ ID NO: 473861 - DNA, 590 bp, Homo sapiens
tgcagtttctttgcacttcaaatcatccctcatagcatattttacaggctttcgataacactgtcttagaggattacatctatagcagcagttacataaatggakcttcatatttttcttgaataattatgaacatatttgattcattcaggacaatatcctttgtagaagtcaatggaattttttttttaaaatgtgagaatgttcctttaacattcccatgactttcttcataattacttcctagttatctttacaatatgttatttcctcctcccatgttatcaaatcatactagtatgagggctgtattgtgatgaacaatacaaaatattgatgcataacattcatatgatttaaacaatactaactcctttcaatcctgggaattcattaaaatgcaagacattttaggatatattcttttgaattatttataaccttcacacaccctcagggcagaataaaggggaaagaaatgtcttgttagaaatataaaagatgggaagttattcatatcttgaaattgccccatttaggaataaattaatcaactcaaataagtgttccataattttgctttcattaat

SEQ ID NO: 473862 - DNA, 590 bp, Homo sapiens
tgcagtttctttgcacttcaaatcatccctcatagcatattttacaggctttcgataacactgtcttagaggattacatctatagcagcagttacataaatggagcttcatatttttcttgaataattatgaacatatttgattcattcaggacaatatcctttgtagaagtcaatggaattttttttttaaaatgtgagaatgttcctttaacattcccatgactttcttcataattacttcctagttatctttacaatatgttatttcctcctcccatgttatcaaatcatactagtatgagggctgtattgtgatgaacaatacaaaatattgrtgcataacattcatatgatttaaacaatactaactcctttcaatcctgggaattcattaaaatgcaagacattttaggatatattcttttgaattatttataaccttcacacaccctcagggcagaataaaggggaaagaaatgtcttgttagaaatataaaagatgggaagttattcatatcttgaaattgccccatttaggaataaattaatcaactcaaataagtgttccataattttgctttcattaat

SEQ ID NO: 473863 - DNA, 564 bp, Homo sapiens
ccccgggtccgaggttgccccgaactccgcgcctctgggcttctctggaagtgacgcagcactgctggggattgggatgggagggggttctgcagagagcgcggcaggcaggtggcagagcgggagtgggtccaagcgggtgtcgcgcacacacgtacacacactccaagcagcgctcggggacagatgtgcgaacatctggggtaggagatggcccctgagtcttcacgacccctcccgctccgcacagcacacggaacctgaagttgcatgtgtgtgcgcgccagtgtgagtgccagtgtgtgcgcgctcgcgcgctggggcctactggagtccgtgtctgaatacataatatactgtgggcatcctcacggcgcgcgcgcgtgtgcacacacacacagcgaatcacacaaacatacataatttacgcagcatccaggtctgtgagtggtaatttaattccgcttcaagctgggaatttagaaataaggcaagggggaacggsggaggcccagaaaatctccccaagtgggacccccacccatccctttggcaggatttgca

SEQ ID NO: 473864 - DNA, 474 bp, Homo sapiens
gggttaattcacacccaccatagtcattagttcccactctcctccgtcatatttactcctacatagtttactgagctgccaatcaacccttagtatctggatgagcacactgatggggagggggctggcatggcgcttgctttcctgctgcaaccaagaaatcatttatagaggcagtctcyttttcagtctccagactcagatactatttatttatttcaaaattaaataaaaaagaaaataagtagtacacatcttttaaaaattcaaattacacgaaaaagtatcctgtacaaacttcacacctgtcccttagttttccagttcacttcttccccattgatgcaggttttgcatattcttccagagatattgagacgatatggcaaagttaaaagcaaagacacattttatgtttctctctaactttccttctctagctctttgcctccctctttcctctagtccaaagca

SEQ ID NO: 473865 - DNA, 601 bp, Homo sapiens
aacacaaggtgttttaactagaaacctcaaacagggtcagaccttggagcactccctgtcagagctggaatgattaggggaaaggcacgtggatggatgtacactgaagacacttccaggtcaaagaggcaacttgcctgccctgggctgagcccacaagataaaggggattggtctgtccataaatttctggggctaatccagccatcatcatctcccatctgcaccccctgcattgcctcctataatgtcccaactcccactctggtcttctccaatctacatgccttgggtttcagcccacaagctgtgtccatgctcctcacttcctcttttggtccctcttgccaccgtgccattgagaaagctgtgaccattgcctggtgcaccttccctcccttcttcaccaggtaatgtctgttatttgccttctaacctcacctcaatcatcacctcctyaaagaagtcttccttgagctcctaggctgggtcaaatcccctacgatgtacttccaaggaccataagcctctatgtccagacattgatcatagttttgattttatatttatttatgagtttatcagtatgtctgcccaactt

SEQ ID NO: 473866 - DNA, 598 bp, Homo sapiens
tttatcagtatgtctgcccaacttgtccatatgcccacacagaacagtctgttgtgcccacctttgtgtccacagcaccatgcacagctcttggcccccrgttgaggcagcagagagtgttatttgaaagcaagggctttggactggaactgcctagattcaaaccatggctctaccacttactggtgagtgacctagctctttaagtcttggtttcctcatctgtaaagtgaggagaataatacccatggagtccttatgaggataataaaatatgttacatcttaggtgcttagaatggcatctgtacctagttagcattccataaatgttagctattaatagaaatcgtagatgcttaataaatgtatactgaatgaatgaatgaaaagacaaactctggtaggacttgagtccttgagccagtctttctgggaaggtcatgtggtgcagtcatgctgtttgcagagagttgaaagggagcagagcctagggctcaatcagcaccccaacctcattggagcccccacctcacctgtgacccggcagccgaagagctccagccggagggcgatacctgagtgccaggtctgagggc

SEQ ID NO: 473867 - DNA, 598 bp, Homo sapiens
tttatcagtatgtctgcccaacttgtccatatgcccacacagaacagtctgttgtgcccacctttgtgtccacagcaccatgcacagctcttggcccccggttgaggcagcagagagtgttatttgaaagcaagggctttggactggaactgcctagattcaaaycatggctctaccacttactggtgagtgacctagctctttaagtcttggtttcctcatctgtaaagtgaggagaataatacccatggagtccttatgaggataataaaatatgttacatcttaggtgcttagaatggcatctgtacctagttagcattccataaatgttagctattaatagaaatcgtagatgcttaataaatgtatactgaatgaatgaatgaaaagacaaactctggtaggacttgagtccttgagccagtctttctgggaaggtcatgtggtgcagtcatgctgtttgcagagagttgaaagggagcagagcctagggctcaatcagcaccccaacctcattggagcccccacctcacctgtgacccggcagccgaagagctccagccggagggcgatacctgagtgccaggtctgagggc

SEQ ID NO: 473868 - DNA, 633 bp, Homo sapiens
ccattcacagggcgactataccttgttgatgtgttggttcaataccagttcaaattattaataacaaagagtaatgaataacaacgccttagtccttacatattgtcttttgcccaaagatatcaaagtgcaatttatgaaaatccatttttaatgaaatattaagcagtttctatttatcctgacccaatggktttacaaggtctctatttttctccctgcatctcccctatttatagctagtaaatgctatcatatattatacatctttatgactttctcaatgcttctgtggttttagaatcacccttcatatgttttctgatcaaattcactgagatggattcttggcttccagtctaggcattgcaaggtaaggggttgtgtgcatgggaaatgacgccaggaaattggttttattccctattccctgacaactcactgaatcattataggcaaatcaataaaccttagataccttggtttctccttcaggaaaataaagtcgataataggcttgcagatagacacttaagtttactggccctccctccaaggcttgcatagcacccaggacaaatgttagcgtgtaagccaggtcacaagtaacaagtgggtctttgcacaggtggg

SEQ ID NO: 473869 - DNA, 547 bp, Homo sapiens
cttgcacactcccatctcttcattacctatggtgtgaactactgtttacttctattttgctgtaaatatctgaagtcagccagctccagggactgcaaagaaagcagggaaatatttccaagacagcgcagtgctggagccctggggtagacattgtgcacgagatgttcctcttcttttttaaaataaatatttctctccactaataaatgtttcattgcctccaaagttctccctttcaatgtacttggcacagacactcaagaaggrggaaaacaaagcaggcagaagagaaaagtggcaggaatgcaggacagaggctgggggaagccagaagcatgtttttaaaactagtgtcaggaacaaatgtgctgactcatccgctcaccctgactgcagatctgtgtgtcctccctctcccacccccttcccttgcatctgctctgaaaccagccattgggtctacacgtaaaaataaattgctaatcaatgaatgccatcctgtttaattaatttgttgcacaaaacagtcaagtagggggaggga

SEQ ID NO: 473870 - DNA, 600 bp, Homo sapiens
aatgaaaagagaggtagcctcccaaaggggcaaggtagaaatgaaggaccttgtgctttcaagttgtagttccccagtgtgctagcccatttttttgtttgctaaagtaagccaggcatatacagcaattgtagaggcagtgttgggatggttgacccctggaacwtgcccagtctctgaggataatagcagtggctgggggagggctcctggtccaggtacctagaagttcctcagggcttctcatggccatctgacaggagccagggaatagtgccgctggctcctgagagtgcctgctatccttgaggacctatccaaagtgaagagagggcattgtttgtggccttttctttggctccaggagaaagtagcttacctgagagacaagtagcttggacagagctgccctaggtctctggcagccatgttacatagggttgggtgattaatagctcaaacatataatttgcaggaagctctgagaagatgagtgacttgacaaaattggcaagttgatggtggagtcaggactagaacccatatcctccttctgactcctggtccaatactccttccaccatgcctggagcccccttg

SEQ ID NO: 473871 - DNA, 600 bp, Homo sapiens
aatgaaaagagaggtagcctcccaaaggggcaaggtagaaatgaaggaccttgtgctttcaagttgtagttccccagtgtgctagcccatttttttgtttgctaaagtaagccaggcatatacagcaattgtagaggcagtgttgggatggttgacccctggaacttgcccagtctctgaggataatagcagtggytgggggagggctcctggtccaggtacctagaagttcctcagggcttctcatggccatctgacaggagccagggaatagtgccgctggctcctgagagtgcctgctatccttgaggacctatccaaagtgaagagagggcattgtttgtggccttttctttggctccaggagaaagtagcttacctgagagacaagtagcttggacagagctgccctaggtctctggcagccatgttacatagggttgggtgattaatagctcaaacatataatttgcaggaagctctgagaagatgagtgacttgacaaaattggcaagttgatggtggagtcaggactagaacccatatcctccttctgactcctggtccaatactccttccaccatgcctggagcccccttg

SEQ ID NO: 473872 - DNA, 423 bp, Homo sapiens
ataatagcagtggctgggggagggytcctggtccaggtacctagaagttcctcagggcttctcatggccatctgacaggagccagggaatagtgccgctggctcctgagagtgcctgctatccttgaggacctatccaaagtgaagagagggcattgtttgtggccttttctttggctccaggagaaagtagcttacctgagagacaagtagcttggacagagctgccctaggtctctggcagccatgttacatagggttgggtgattaatagctcaaacatataatttgcaggaagctctgagaagatgagtgacttgacaaaattggcaagttgatggtggagtcaggactagaacccatatcctccttctgactcctggtccaatactccttccaccatgcctggagcccccttgccttc

SEQ ID NO: 473873 - DNA, 600 bp, Homo sapiens
aatgaaaagagaggtagcctcccaaaggggcaaggtagaaatgaaggaccttgtgctttcaagttgtagttccccagtgtgctagcccatttttttgtttgctaaagtaagccaggcatatacagcaattgtagaggcagtgttgggatggttgacccctggaacttgcccagtctctgaggataatagcagtggctgggggagggctcctggtccaggtacctagaagttcctcagggcttctcatggccatctgacaggagccagggaatagtgccgctggctcctgagagtgcctgctatccttgaggacctatccaaagtgaagagagggcattgtttgtggccttttctttggctccaggagaaagtagcttacctgagagacaagtagcttggacagagctgccctaggtctctggcagccatgttacrtagggttgggtgattaatagctcaaacatataatttgcaggaagctctgagaagatgagtgacttgacaaaattggcaagttgatggtggagtcaggactagaacccatatcctccttctgactcctggtccaatactccttccaccatgcctggagcccccttg

SEQ ID NO: 473874 - DNA, 426 bp, Homo sapiens
tttggtcttttctccacactctgcatgtcagtaccttggctcacattcacattattgttctatctggactrctttaccaaccctcaccacaaacccatccatctttcaagcttcagctcctgggccacctcttctacataaatcaccctgatttcctaaaaccaaaattcatcttctttcatgcatccattaatcattaaaaaataaaagtatacgtactatgtgccaggcagaaacaagatgcaggtcctggcatcaagttgttttgagtcttcctgcgggagactggcatgcatgcatcataactaacatttgctgaacatatactaagtgtcagtaatatattaactcatttaatcttcacaacaacccgatgaggtagagactatttcttgctttcattttagaggtaaggaattggaagca

SEQ ID NO: 473875 - DNA, 504 bp, Homo sapiens
ctcagggaacctggatgctggctcacaacagtaccaactagtgaggcctgtccctgcctctcacctttcctccctgtacccacttcarctctggacacgaagagactaccgttggtggccaaggggaagagaggtaaaggcgcaaggcagagaaagaaaattcaatcatgccccctttccactgcagaaagcaagcctggatgtggaggatgagactttaagcttgaatatcatctttacgtttttaaggatcacgtagtattacatacatgttaatgactgaattaagattgtttgggagtggaatatgaacagggtcttttttaaaaaaaaaaatcctctgagcttggcctgacagatttcatccagagcagaggcaagaactgccccctagtgtgtgagtgagcggtaggcggtgtctgggggaaattgaggcatgtgaggatggcacgctctgtgtctgcttgtccaaagcgcacccttgggcttccctttcctgctcct

SEQ ID NO: 473876 - DNA, 504 bp, Homo sapiens
ctcagggaacctggatgctggctcacaacagtaccaactagtgaggcctgtccctgcctctcacctttcctccctgtacccacttcaactctggacaygaagagactaccgttggtggccaaggggaagagaggtaaaggcgcaaggcagagaaagaaaattcaatcatgccccctttccactgcagaaagcaagcctggatgtggaggatgagactttaagcttgaatatcatctttacgtttttaaggatcacgtagtattacatacatgttaatgactgaattaagattgtttgggagtggaatatgaacagggtcttttttaaaaaaaaaaatcctctgagcttggcctgacagatttcatccagagcagaggcaagaactgccccctagtgtgtgagtgagcggtaggcggtgtctgggggaaattgaggcatgtgaggatggcacgctctgtgtctgcttgtccaaagcgcacccttgggcttccctttcctgctcct

SEQ ID NO: 473877 - DNA, 504 bp, Homo sapiens
ctcagggaacctggatgctggctcacaacagtaccaactagtgaggcctgtccctgcctctcacctttcctccctgtacccacttcaactctggacacgaagagactaccgttggtggccaaggggaagagaggtaaaggcgcaaggcagagaaagaaaattcaatcatgccccctttccactgcagaaagcaagcctggatgtggaggatgagactttaagcttgaatatcatctttaygtttttaaggatcacgtagtattacatacatgttaatgactgaattaagattgtttgggagtggaatatgaacagggtcttttttaaaaaaaaaaatcctctgagcttggcctgacagatttcatccagagcagaggcaagaactgccccctagtgtgtgagtgagcggtaggcggtgtctgggggaaattgaggcatgtgaggatggcacgctctgtgtctgcttgtccaaagcgcacccttgggcttccctttcctgctcct

SEQ ID NO: 473878 - DNA, 504 bp, Homo sapiens
ctcagggaacctggatgctggctcacaacagtaccaactagtgaggcctgtccctgcctctcacctttcctccctgtacccacttcaactctggacacgaagagactaccgttggtggccaaggggaagagaggtaaaggcgcaaggcagagaaagaaaattcaatcatgccccctttccactgcagaaagcaagcctggatgtggaggatgagactttaagcttgaatatcatctttacgtttttaaggatcacgtagtattacatacatgttaatgactgaattaagattgtttgggagtggaatatgaacagggtcttttttaaaaaaaaaaatcctctgagcwtggcctgacagatttcatccagagcagaggcaagaactgccccctagtgtgtgagtgagcggtaggcggtgtctgggggaaattgaggcatgtgaggatggcacgctctgtgtctgcttgtccaaagcgcacccttgggcttccctttcctgctcct

SEQ ID NO: 473879 - DNA, 676 bp, Homo sapiens
ctaataaagccagggaatataggaccttttaattcattataaggtctttggattttattttgcgggagacgggaagccttagaaagattttgagcaatgaagggttatgatcgaattgaggttttaagggaggtgttgtcattgctgtgcagmaaatacattaagggcaagaggagaatcaggtgcactaggtgggaggttattataattgtgcaggtgagagatgacagtgcttgggctaggcagtggtgggaaatgtaactattttcatgtggttcagcacacaagaaaaagtttgtctttaattgtatatattttctaatcccggaggaatccagtaccacctaattgtttatcccagaataggcactgctagccaaagcctcttacaatggaaaacacaggctaattaaactaggatttactatatggtttacttttatatctcaaaatctagacatagccatgttataattgctaataaagggccgtggctataaatcaggatgacttcatgaggcaatgtttgcttttaatattgaagaattgacagaactctatttagaactgagttatgtacaacactaatctttcagggatggcttgattttcagtcctctatttccatcattggattgctttgttgcaataggaatgaacacaagcaaatgtaact

SEQ ID NO: 473880 - DNA, 676 bp, Homo sapiens
ctaataaagccagggaatataggaccttttaattcattataaggtctttggattttattttgcgggagacgggaagccttagaaagattttgagcaatgaagggttatgatcgaattgaggttttaagggaggtgttgtcattgctgtgcagcaaatacattaagggcaagaggagaatcaggtgcactaggtgggaggttattataattgtgcaggtgagagatgacagtgcttgggcyaggcagtggtgggaaatgtaactattttcatgtggttcagcacacaagaaaaagtttgtctttaattgtatatattttctaatcccggaggaatccagtaccacctaattgtttatcccagaataggcactgctagccaaagcctcttacaatggaaaacacaggctaattaaactaggatttactatatggtttacttttatatctcaaaatctagacatagccatgttataattgctaataaagggccgtggctataaatcaggatgacttcatgaggcaatgtttgcttttaatattgaagaattgacagaactctatttagaactgagttatgtacaacactaatctttcagggatggcttgattttcagtcctctatttccatcattggattgctttgttgcaataggaatgaacacaagcaaatgtaact

SEQ ID NO: 473881 - DNA, 403 bp, Homo sapiens
ctcacagtcgccatttattgttatggaatttgtgaattagttcttacctctgttgaggcatacttttgggtttgtcctaggcagtctttgaccttgggccatatgctgtctgccctacccttgccataggccccaggatctaatttcagaataaaagttggaaagctgccgccattctgcaacttcctaaataggcccagataataatactgtaatagctaaactaaaaagtattatttttctcattagtctctagttttcaataaagcagatactctaagttttcataytatacattttccatgggactaaatacaattatttagatttacaattatttaaaaatagaatataaataattttttccctgaatctaatcttttcttcttttttcccctctctc

SEQ ID NO: 473882 - DNA, 597 bp, Homo sapiens
tattttttccttttatatagaatggttagaagacaatcacgtagaaagagaacgatggtagcaagatagtataatttgaatccggatcacatacctacattagaaagtcctcctctctgagtaattttctctatggctgtcttcagatctcgagaattcgtgtgtgtcttgaggttaaagtgagtagcagggttgtctctgaagagtcagaacaagaaatacaaattagctgcaaagttaatacctttggaggaaggcagagatcatggttgattcttttatatacaaatagaagctgcttcaaagccttctgctatgccttgtaaaatgtcccattgtggactggtgtgtgtagagaaaaggaggctatttcaaggctcagaaggcgtgtgttgactgtgccatttcctggctgtgtgatcttgaggagacaacttctctgggcttcagattcctcatgtagatgaaaacatcgttataacacccatattgctaatgaacgggactgttgtcaagtgggattttgyaaatgtcaggatcccatctgtggagtgctcagcgttctcagcctaccccagacccccctctccagaaaga

SEQ ID NO: 473883 - DNA, 537 bp, Homo sapiens
ctaacaggttgaaataactttgccttttgcctgacatgctcagtgtacattagctggtatcagggaagcctggaactatatcttgggcacatgtggtctgacccttttttaaggtcccacaaaatttagcctcttcaccagcttccacaaaaaaattcaagcatatcaagcatgttgttgctttattgaagatttgtggggctaatatacagagtgaatatggaggtacattcttggtaatgtatgtcctcataagacctgcttctcaaaccctttcttactctgctgtcagagttttataagaccaacagatgaaaaacagtggtagtagggccacagtgggaatatactctggcatgtgtrgaacaagacctgctttcctcctgcttttgaagatgttctaatggaagtcccactgaggaccaagttcatgggtgctgctgttgcattttggtatgagcaggaatatacaaaaggcagaaaggacatgtttactaaaaggcaagctcatagagtaatctggaaattaagggagcc

SEQ ID NO: 473884 - DNA, 628 bp, Homo sapiens
acacatgaggaaatgcagactcaattagagctgaagaggcgagaatgctattggatgtctttgaggggttattcacaatcaatgtttttagctgctattattgctgtacctgctgctaaatgagaagggcagccttcaaactggttcaggttcttcaaagtgtgcagttagctggggacatagaacctaatcaaaaatgaggtgatcagatctcaaaaataaagggcaagtatgatttttcaagatgaatggcctgggtaaaggacaatgctatttctaccagtaacaagaggcaggccatatggtattcactctgtttatcytttccccatcttcactatgaaaaggtaatttagattttagtaaatttccagaaatacaaacttactgggccacccaggtattattataatttttttttagtaagttcagggttatttttacccatcaaaataatgtagggttagaatctagcatatgatcttaaatggccaggaatatggagctcaggcagaactggaatctgatttatttcaaaagcagaggggtctgtagtagtggaattattttttcttagttctattgataacaacatttatgccagaaaaaaataatgtatctgccataa

SEQ ID NO: 473885 - DNA, 642 bp, Homo sapiens
gctcctgggctaggtttcattagctggtaagtgctccagcagaagcagcagagcgaggccccaaatgccaaaatgacagtgagaacagtggaacaatacaatattcaccaagtgattttaatctcgaagattaaatgtcacccaatcagtttccaggtcttaaaaaaccaacttgcatgaaaccattagaaggcccaagtctttgttcaccagaagaaacaagttttactstttttgaagggggagggtggttagttttaaaacaccaaaaaaaaaaagttttaaacccatgttggtaatatacaattaaaactcttgtcaacccccaacacccacaccacagtaaaagaagttcattcactattgcaaccgggcagataggcagattcctcaataaaaggaaccaatgtttgtttgtttatctatctttcttaaaatgaaagtcttggatgggcttcacaagcctcttccagcttaaatgccctccctcccccaccacgaccacacccattcttctccaaagaaagacagaagtcttaacacagagagagcatacttctttgtttttgagaccttatggtctgcatagctattggcgggtaaataagtacccaaccacataattgtgaacttaaaaaaaaa

SEQ ID NO: 473886 - DNA, 644 bp, Homo sapiens
ctgctcctgggctaggtttcattagctggtaagtgctccagcagaagcagcagagcgaggccccaaatgccaaaatgacagtgagaacagtggaacaatacaatattcaccaagtgattttaatctcgaagattaaatgtcacccaatcagtttccaggtcttaaaaaaccaacttgcatgaaaccattagaaggcccaagtctttgttcaccagaagaaacaagttttactctttttgaaggggragggtggttagttttaaaacaccaaaaaaaaaaagttttaaacccatgttggtaatatacaattaaaactcttgtcaacccccaacacccacaccacagtaaaagaagttcattcactattgcaaccgggcagataggcagattcctcaataaaaggaaccaatgtttgtttgtttatctatctttcttaaaatgaaagtcttggatgggcttcacaagcctcttccagcttaaatgccctccctcccccaccacgaccacacccattcttctccaaagaaagacagaagtcttaacacagagagagcatacttctttgtttttgagaccttatggtctgcatagctattggcgggtaaataagtacccaaccacataattgtgaacttaaaaaaaaa

SEQ ID NO: 473887 - DNA, 644 bp, Homo sapiens
ctgctcctgggctaggtttcattagctggtaagtgctccagcagaagcagcagagcgaggccccaaatgccaaaatgacagtgagaacagtggaacaatacaatattcaccaagtgattttaatctcgaagattaaatgtcacccaatcagtttccaggtcttaaaaaaccaacttgcatgaaaccattagaaggcccaagtctttgttcaccagaagaaacaagttttactctttttgaagggggagggtggttagttttaaaacaccaaaaaaaaaaagttttaaacccatgttggtaatatacaattaaaactcttgtcaacccccaacacccacaccacagtaaaagaagttcattcactattgcaaccgggcagataggcagattcctcaataaaaggaaccaatgtttgtttgtttatctatctttcttaaaatgaaagtcttggatgggcttcacaagcctcttccagcttaaatgccctccctcccccaccacgaccacacccattcttctccaaagaaagacagaagtcttaacacagagagagcatacttctttgtttttgagaccttatggtctgcatagctattggygggtaaataagtacccaaccacataattgtgaacttaaaaaaaaa

SEQ ID NO: 473888 - DNA, 345 bp, Homo sapiens
ccgcccaggaacccctgcaggcagcgagacgggcgcccgggccagctctctgcccctcgccccccgcggggaccctgcccgccccgctgaccggccccacgttgccaaatagctcaaatgcttgtcatatttgcggtcgcgcggctccgcgggctgtgcacgcgctgcactcgccgccgcctttgtcaccagccgcttcgtcattcgcctgagcacttctagagtgtgtagggggcgttactagtggcagtggtggtcctcgggccggagtgtctccttctgtctcccctcctctttcagcccgtccttacgagaaaatmaggggcgcgccggcccggcagggag

SEQ ID NO: 473889 - DNA, 540 bp, Homo sapiens
ccagctgtcccaagccctagactttgtaccagtaagagagggggtgtcgtcacagggccactacatggacagaaaatcgtattttgttttgttttcttggctataagttacctttagcagaagtggtagtaatagattgcgatgggagtcgagttttaggtttagtttctaagtttcacgaaaatatcaggtatagtttgcattggaataactttttgcttgcaagcygagtcgtttcaggaggtagaaagtaagttttcacagacactgaatggggaggacagtcagcagagtgagacagccagcctcagaccacagcagtttttatttgaatcgaattgggcagcctcagttgggcttagggtagagagtacatgttttcaagctttgttcatgaaatacgctttttgatttcccaatgtatgttaagaaatatccataatgtgtgtaaagaggctagaagttgtagtcaccaggattcctgaggccctaagtgttcacagtagctttttgtagttagagactagtccctgacaagag

SEQ ID NO: 473890 - DNA, 532 bp, Homo sapiens
tttattgagcatttgttcaactatgtgctggttaaggcctgttctaggctctgagatacagccatgaacaaaacagacaaaaatctctgccctcagggagtttatagtctcataggacagagagaaaaatcactaaaatatacagcatgttagtgatagggtaaagagaaatgtaaagacagaaaagagaataagaatggaaggtgtccacatgtaaattgtgatgtagtaacatatttgcttctttactaaaacatcaattaacatgatctaatggtgggtctaataactacaatctttgaaatcccctccttttacttctctgacaccactcactactggttctyctaagtaatagacattcttttttcacctctgagagactttaagctctctttatgaggttattctgaactacgctggtgatcccctaccactcttcatccatttgaaaaatataaagaccttttacttgatacagggccacatacagagcttctctaactggagtctccatgtaactccagaggct

SEQ ID NO: 473891 - DNA, 478 bp, Homo sapiens
tttgaagtgagtttttttccccccataagttatttattccttttttctgtgtaaatatatttattttactgtggagcgctaacatctggatcgtaacatgtgcagaatgtatggtaggaatgtattctcttgtaggaatgtaaatctgtattaaaagggggtccaagccaggcccccaggtcttctcattgtatgcacagtccgcattcatttttactcttctctaatatgggtctatttgaaatatgcaaaaggtatgaggaatgttttaatacctccaaatttttaagaaaagcatcaaagggttgatattttttaaagtttttttagtagcactttctctggatgacagaaggrgcaaccacatgggcacccttgttcataccaaagggtgagcagtggccagagcctcctctgcacctctcgagtgtctttaccaattgagctttttatcgccatagccccttggagtgcccca

SEQ ID NO: 473892 - DNA, 476 bp, Homo sapiens
ctctcctgccccactgacccctcctggagtcgctgcaaagaagtccccttctttcccctctgtccatcctttggagctcagattaagccccagctcctccaggaacattccccatcctcctgcagtatgcccccgtgtgcctcctgtcagtgtcccagttagtccgctcagctctcagggtttctttgagaatgtctggggcctgttttagagctcaggctctggaagaacaggaactgagtccagagactgcgcaccagcttgtgagtgtgacttgttgaagtcaaaggaagagaggctgacaggcctcccagccagagaagaactttgtagaggaagtctctccttcgtggggaccagacycccaagaacataccagctcagagaagtcgggtgtggtgccctcgaggggaatccatgcagcagttcctccccagcttcctcccctccccaccctcaagtgcggagccagaacc

SEQ ID NO: 473893 - DNA, 535 bp, Homo sapiens
caggcggacagccccaggagtcataatgagaagaaatgctacctcggtacagtggacgaacgtgcaaaccacacagaaagtttgaaaaaggtctactggaggctctgctttctggtaatggctccaaaatacaaagggcctcacactccggcactgacgaagtccatacggctcttaggctgacacccaccagccagtcaatgggagagctgggaccagagggctgacttgacctcttcagcaggagtgtccaaggcctttgtgggcggtggtgcaggttgtgcgtgtgaataatgaaggcaattcattattactcagaacacaacaccttggcgatctttagaaacatgagaaamagagcttccaaggtacctgctcacacgcctctctggaggtaatcgctgtgccgtggctcttaatgagccactctccacatggcctgaggcctggcaccgtgggaattccctctgtccctgagtcataggcctctgctactgaactgtaaatagggaccgggtcaatgacagcgggacag

SEQ ID NO: 473894 - DNA, 539 bp, Homo sapiens
gggtggcaggatcatttataccccaaacctcagcattatacaatatgcccaggtaacaagtctgtacatgtaccccctgaatctaaaataaaagttgaaattataaagaaaaagaaaaagatgggagaactgttctagatgaaaagaaacatacaaccaaatgagatgtattttccttgagcaacccctggtttgaacaggcaaaccagaaaagacattttagggacatttggaggaattcaaatatagacttcatttcaaatgggagtcagaaattatgtttaactgtcttaggtgtgataacagtggtgaggttagatatggaaaatcatccctttattttggatayggtgttggtgtgtgtgggtgacatgggagaatgtccataatttattctaaaaaatttcagtaaaataaacaagtaaataaaatctaagatatttgaagttagggatggctcgagggaggaagatgagataccctaaaggacaccactcaccttcctgggcttggccaggtaccagatgcttgacaaaccc

SEQ ID NO: 473895 - DNA, 521 bp, Homo sapiens
gttcatctttttttgattttatagtttatgctttgagtcttgtttaaatgcttttcttcttttttctaccctaagattacaaagctattcttctatttttaatttctattagttttaccttttacttttaggtttttttttgttgttgttgttgctaatgtagagctcacctttgcatatggtatgagataggggtttaattttatatttttctcacagtgaatcaatttccccaacattatctatgaaaccaaatctctgtgttasattggattattgttcccaatccttcttgttctcctggctctacaattatacacctgtgccttttggcatgaagttttgcattaccttccactattgatgttcaacttggccatatgacttgtttggccaatggaatgttggtgaatatgatgagaggagaggtgttaaatgtatttgaatgatttggcttgacctcttgccagaaggagacatgtggtgaagacttgaatctgacctgcatcctggagccaagt

SEQ ID NO: 473896 - DNA, 700 bp, Homo sapiens
tgtcaagatgactggaaagcggtgtagttgggctgtggataaaagcgattaactttgagatgtacctgatctcccaacaggaatatcttcctgttccttgkcattggttcacccactcggggcctgggtggtatgcaagagtgtatgcagtaagaggaaagaattattctagcttggttgcaacagattagcaaagattgcccgggctctgttgtgtatgtgggatggcgtcctcacagaactcactctgatttaaatggacacgtaaaatccttgcaaaagcagctaagaatatctggcaaaagaatgaggtaattagaaaataaattgaggctctttatatagtttgtccaggctaatcttttttaaaaaataagatttacttttgttgatgttggtgtctctgaataaataaaaacgtttttgaacattatagaccctgtatttcacaatacagaatcccgattcagtaaatacttttctcactaaatcctggcaggatattatttgtaaggcataaggtcttaatccaagtgtttcacaagtgaaatataacagaaatctaataaatgaatctgctaattgcaattttcctgatgcatttcaaatagggcagtctctaattataagcctcccctacatacaaatggctgctgctcttgccccagttttccccatctaaccaggcccagatgctgct

SEQ ID NO: 473897 - DNA, 587 bp, Homo sapiens
ccactcttacctgccatgctgtgctacttctcattattataatgcattactattgacttactttctttccctacttccacccctattaacactagctcccataaggctgtgagtaattctttatatcccctatagcacctagcaatcacttcatatggagaagacactgttaactctgtagaccttatcatttgagagagatgctggattcatttcccaaaaagtatgctgtttttaaggggtcgtttctgagctacttgtcttctccgacctcttctttattctctctgcatcatgagagtgtcagttaccttcccttttcatgctgttacmcttacttttgtggatttcacacttagtccttaaaagactgttttattccggctttctccaaaggagaaatttaggtgtacatcttcctgtattttattactcatattctgaaaatttggagatttaatcaggattcctatcttcctgagtcgtctaaaattctgcattacagttgcgattattttcctttgatattacaattttgatttatgttttttataacacttgtatttttccttagtaccacatcaata

SEQ ID NO: 473898 - DNA, 600 bp, Homo sapiens
aatgactttgggtaattgtgtaaaccttcaagtactcagttttgttatttgtaacctggatataacagtagtctctaactgtgtcactaggattaagtgacagagaatgttatttagtgcacagtaaatgttttcttacaatgattatctgaatatttatcaaatatttggaaaaaaaaaatcttcttgttgtgtgtcctgtactgggttgtaacctccttgagggaaggggctgtatcttattcctgtatcttattcatttttgtccaatatttatgatagtgcttggcactattattagtattagcattaagcattctatagatcttcctctccaccaggaagtatctccttcaaataccctcacaacaactctatgagggagatactgtttcgtccatttaactaargcatagaaaggttaagtactttgtctaaggccacaagctagtaagaatttggaccccaggcagcctggaacaaattccaagctattaatcaccacactaggctacctcctagtaggtacttagtaaatctccattggaacaaatagatgaatgagattcagataaacaggcaggtgggatggagtgctag

SEQ ID NO: 473899 - DNA, 390 bp, Homo sapiens
ctgctgttgccgcgactgctcctggtaatggatctgctctcttgctgctggaaggagccaactctcctgctctgtgcagataaaggctttgctccccaaacttgatagcacagcttaggacagtttagggtcctctcagaaatccttgctctttcaggtttacagattctccttaaaaggacctgaatcaagttccaaaggaacaaaggtgattgtcatagtgctctctttgcagaattgtagacctctgtaaacacagacctgggyccctaagtgataaataagagagagctactgcaactgtccctcactagatgatgagttttcaggtcctcgtggttgggaatggcctttatctcctccttgttcagaggggttcatattacaggc

SEQ ID NO: 473900 - DNA, 580 bp, Homo sapiens
attttaatactccgaatgatgtattccctttattttcatataaatactacctacaagattgtagtatgtgtaaaagcagcaaaatcatgaaatgaaatgcatgtatgccctttaaaaattaccttttttttttttttttttttttgagacagagttttgctcttgttgcccaggctggagtgcaagggtgtgatctcggctgaccgcaacctctgcctcccgggttcaagcaattctcctgcctcagcctcccaagtagctgggattacaggcatgtgccatcaagcccggctgattttgtatttttagcagagacggagtttctccatgttggtcaggctagtctcgaattcctgacttcaggtgatctgcccgcctcggcctcccaaagtgctgggattacaggtgtgagctactgtgcccagccctcaaaaattacctcttatcattgatatttctattttgtaagtctgtatcagttatctatttattgctacataacaaattayctcaaatttagcagcttacaacaacaagcatttattatctcagtttttccatgagtcaaaaatccagctgc

SEQ ID NO: 473901 - DNA, 543 bp, Homo sapiens
gatttctcttcctgttgccctaccctatgtcaatctcctactcaaccacctgcaactgctcattattacttgctaaactcccactagctaccatatatgatcttgtgtgataaggactcaaccagccatctaacccatcaatcctcccacatcgattactctaaggtgtatgatttgctatttcccaaatgtctccatgctcttcctaacccagttacacttttctaacatctacattacctctattatccccatctccgcaaattaaaatcctacgagttcttcaatttctagttcaaatrccatcacttccacgatgctctcccctaattattcagcaaagaagcaggctctccaaactcacatagctttttgaatgatacttatcaaattccacctatattataacaattatttataaatgtagctatctccctcctcctcttactaagactaattcttagaagaagcagtttagacttgtaggaaaaataggcttttcagacgaacaaagcaaagagtgatatcaacatgttttcccaa

SEQ ID NO: 473902 - DNA, 552 bp, Homo sapiens
aaatttttatagttttaattgaacatctgtgcattttaattgattaatttgaagaaaayacaagaaaagaaaaaagaacagtaggtaaaatgaatttaacaaaccactttttcgtttttctctgcttcttacttaatttttcagtataaataaaacagaagattatcaaacaacattaaatcattcccatgactataaatacactcatattaatttagcagagtaggcaagtattttatgacaggattgtttccaatcaaaaacatatacaaggatacatatgtgaacatatatagtatttattcagattcctgcctctatggaaaatattaaggcaattcacttaggacaacatcccaaacagtgtaaaaatactccaatgccccaaccaccaacgctgctaccattatgcacataagggtgcataaagctaaagatatttctgtaatttttgcaacatccaacagaccattcttcccattttgttttcccttttaaatgtatcacctgcttaccaactcacacttccttaatgcctcaccaatttcatca

SEQ ID NO: 473903 - DNA, 589 bp, Homo sapiens
gccacaggcatggccgtagccctggatttctcatttttccccagtatttagaaagaatggagctccagaacaatatattagctataaaaagaactatgaaaaacctgtcgagaaacagcagtaaaatagccacacaattcccttagacacactgagctatacgaaacactggggagagtttgctcttagttatcattgctatttaactggccaacacattctgttcttaagtaagatcaaagatatttttgtcaacaccatttgaaaaccaacagaaaggatagatgcatttctccattctgttaagaaatgaaagaaaagtaaatgtctcctttagttaagggacaagtgcaaataattctgcataaccctgaataaaaataatcatcatggtaataagagttaatgatgtgtttacattaattcagaattagtcaaatttaaacttttggtaagatgttagtgtgttctttctgtgctagaagaatgtgcagagagaaatatactattttagaatgtgatttgtcatctakgcacttttaaaaccacaagagcagccatgtggggcagcacagtgtttaaccttaca

SEQ ID NO: 473904 - DNA, 541 bp, Homo sapiens
gaattcctaagtcatgaaactggcataataactgcccacagattaggatacacctcaggacatctggtagaagataatgcaaaaatattctgtagacatacactcttaatacagatagcacaggattcccaagacagtaccatgctaaggatgacagctgttagtttacaattacaaaacacatttaaaaaatcaagagttcagacacaactaagagttagtggacacaattaaaaacaggatttgcctttcaggacttcataagattgaagtagttgatggaaaccaaatcaataagtattacttatgtcatgagaaagttaccagccattcaacattctataaaagaaaatagtaacttcaccatttagaatgagtagggtaatttgcttgcatttattgactaacrtatctaggcttcatatatcaattttagaaatttaaatggcaatatgattgttaacaggtcatttgaaataatgttatgagtattttaataattcttttcaggtccaaacggtgtaaaaggtcttttttcaca

SEQ ID NO: 473905 - DNA, 542 bp, Homo sapiens
tgggtcatacgtttatgctatctttacattccagagctcacacaaaaagtttttatcatcatagctgctaacatttattatgtgtttatttgaaattaattaatttaatcctcacccacatcttattaattaaataattttattatgcccagttttttaagataaggaaatgaccctaagagaggtttaagtgactctcagtgtcggctaggatttcacatttgtcataactacagactttggtttctatttctgtgacatggttaaatacctcagggctctgtctttaaaatgtcatggtaaagtttgttctctyccttctttactctgctatccattttccttacatatccatcctgccaataagcaagaagcaagaaaaacaaggtaaagtaacaagttgagaaaaaaggagaaatgaaagaaaagataagcatatctgaaaactcagctacaaaagtgattatgattcagttttgagtctcctggcagcacaggcaaaaagtaacacacaagagactacaaaatttcgattatctaac

SEQ ID NO: 473906 - DNA, 542 bp, Homo sapiens
tgggtcatacgtttatgctatctttacattccagagctcacacaaaaagtttttatcatcatagctgctaacatttattatgtgtttatttgaaattaattaatttaatcctcacccacatcttattaattaaataattttattatgcccagttttttaagataaggaaatgaccctaagagaggtttaagtgactctcagtgtcggctaggatttcacatttgtcataactacagactttggtttctatttctgtgacatggttaaatacctcagggctctgtctttaaaatgtcatggtaaagtttgttctctcccttctttactctgctatccattttccttacatatccatcctgccaataagcaagaagcaagaaaaacaaggtaaagtaacaagttgagaaaaaaggagaaaygaaagaaaagataagcatatctgaaaactcagctacaaaagtgattatgattcagttttgagtctcctggcagcacaggcaaaaagtaacacacaagagactacaaaatttcgattatctaac

SEQ ID NO: 473907 - DNA, 614 bp, Homo sapiens
gagattcagtcgccacctttctaccgactggtattaaagatggtagaacatacacataaaaggaactcaggctccagatgagcctaggaagtgcctgcctaccctgcactaccctcttaaagctttccttcacacgagagaaaaccttctaaatttttaagccacmgactttcccatctctatcagcagcacacaagtcctcgccaacagagcagtgatcacaggcaggcccaggggacagggctgtgagagccgggagctgagatgactgcctgaagctgtcaagtacccacaggcctctcccagaagagtttctgaccaaatctctgttctgagcatgggtttgaaacatcagggaacaatactacgtaagagcttggtctttggagtacaacccaaccacacccaagttgaatctcagctctgccacatactatctatggtctttggaaagttacggagcaactctgagctgcagcatagaaaatttgtcacttatgaaatgagaataataatagctcttcctttatccttttgctctcagaattaaatgaaataatatgagaaattggatgaacgtatagcctggcacatagtaaaccacaaaggattcc

SEQ ID NO: 473908 - DNA, 614 bp, Homo sapiens
gagattcagtcgccacctttctaccgactggtattaaagatggtagaacatacacataaaaggaactcaggctccagatgagcctaggaagtgcctgcctaccctgcactaccctcttaaagctttccttcacacgagagaaaaccttctaaatttttaagccaccgactttcccatctctatcagcagcacacaagtcctcgccaacagagcagtgatcacaggcaggcccaggggacagggctgtgagagccgggagctgagatgactgcctgaagctgtcaagtacccacaggcctctcccagaagagtttctgaccaaatctctgttctgagcatgggtttgaaacatcagggaacaatactacgtaagagcttggtctttggagtacaacccaaccacacccaagttgaatctcagctytgccacatactatctatggtctttggaaagttacggagcaactctgagctgcagcatagaaaatttgtcacttatgaaatgagaataataatagctcttcctttatccttttgctctcagaattaaatgaaataatatgagaaattggatgaacgtatagcctggcacatagtaaaccacaaaggattcc

SEQ ID NO: 473909 - DNA, 619 bp, Homo sapiens
ctggcagccataaaccaaccttaaaacacacacataggacctggcaacaaaatctgcagtgcactgcgagtcactgtgtcttaaggggtataattacatgttgctagcacaagtacgtacacatacattcatctatttaaagtattaatttagagattgtaagcatttgaaatacacgacagtttctgtaatcctatattagcatttcgccattaaaaaaaaacccagcttatcaggtcaagaaatagaatcatctgggccttcacccacctctgatggcctgatccatgagtaagctgctgatgctgggacggaaattgcatgtaaatgatggggacgttggtgctggggaagtgcagtgaaactggacatgttcagcatttgttcgtccaaatataattgcagatgtgtaaccacctacaagcacaggagagtccatgcacagaagcccagatccccagcagcctcatcttcccttgagcaaaacttttcttctccatcatgagatgaaggaaccccaacccctccatcaggtagagaggatgctggggaagaaaggggccctctgcctgcacaggtcatcgagcrgcagccgacagggagaggtcactgggcaggc

SEQ ID NO: 473910 - DNA, 508 bp, Homo sapiens
cctggccagtgtgcatatatccatttccctggccacagcgtaataacctgaccaatgcagagccaaaatcttccctgagaattttgtgcaatgatctggaaaggacgtggttgtaacctctgagattacacagaaatgatggaacgagaaagcctgaaactgccagagccatttttaatacaacaaaaagatcgcctgcctgmgattgaaaacaacacaatggaaagtggacacaacagataaagagaaaagagttttcccacagatagctttaacccttaaatagctttgagtcacatgagctagttcatttttttgagtaagttggcagatttgtgttttttaaaacccaaagaatcatgaataaatgcatctttcttctgtgtttacatctctaacccacagaaccacaggacattgaaatatgcctcaagaattctcccataatcttggttcttgaccacctgtagctccactcatcacaaccagactcagttttactttcctg

SEQ ID NO: 473911 - DNA, 508 bp, Homo sapiens
cctggccagtgtgcatatatccatttccctggccacagcgtaataacctgaccaatgcagagccaaaatcttccctgagaattttgtgcaatgatctggaaaggacgtggttgtaacctctgagattacacagaaatgatggaacgagaaagcctgaaactgccagagccatttttaatacaacaaaaagatcgcctgcctgagattgaaaacaacacaatggaaagtggacacaacagataaagagaaaagagttttcccacagatagctttaacccttaaatagctttgagtcacatgagctagttcatttttttgagtaagttggcagatttgtgttttttaaaacccaaagaatcatgaataaatgcatctttcttctgtgtttacatctctaacccacagaaccacaggacattgaaatatgcctcaagaattctcccataatcttggttcttgaccacctgtagctccactcatcacamccagactcagttttactttcctg

SEQ ID NO: 473912 - DNA, 631 bp, Homo sapiens
tgggcatcctatggcccagtgaagttgacacataaaatcagccatcataataacttcttgtcagatgaaaaattttactcccatgtttttacagagattcagggagctgttgagttttattcaaggaagtcatgactagctagagacaagttaaaactttcacaaacatataggtgcagaaataataaccatcataggtttcataaattatkctggtactaggaatataaaggaataacctgacatctgccctcataaatctcccagcatgttagacacacaaggagctctcagccttttaggaacatgcacagatcattgcagtacattgtggaaagtgcaaagggtgtgatgtgcatggcacatcgtgggagcacagactggggaatcggggtgggacttaattgagttctcttgatgatgttcagacaagtattcccagaggagatgagcaggggcttaacaggttgacttggtgattttttgttgttgtttatttttcttaacataaaaagggatgattatagagttataagctggggagcaaggtgatctaacttaccctttaccaaaggcagttttatgtagaggaaggactattggagagtggtaataaggagacttcttccca

SEQ ID NO: 473913 - DNA, 508 bp, Homo sapiens
tctgggcatcctatggcccagtgaagttgacacataaaatcagccatcataataacttcttgtcagatgaaaaattttactcccatgtttttacagagattcagggagctgttgagttttattcaaggaagtcatgactagctagagacaagttaaaactttcacaaacatataggtgcagaaataataaccatcataggtttcataaattatgctggtactaggaatataaaggaataacctgacatctgccctcataaatctcccagcatgttagacacacaaggagctctcagccttttaggaacatgcacagatcattgcagtacattgtggaaagtgcaaagggtgtgatgtgcatggcacatcrtgggagcacagactggggaatcggggtgggacttaattgagttctcttgatgatgttcagacaagtattcccagaggagatgagcaggggcttaacaggttgacttggtgattttttgttgttgtttatttttcttaa

SEQ ID NO: 473914 - DNA, 494 bp, Homo sapiens
ttgacatgtttccatggattctggaaagaaatatctcatttatttagtagattttttagaagtgtcaaatacagcaatggaatgctggtctctcatccaaaccagccacttacagatgttattaggtaagttttattaacacttaactagattggagtattgaagaaaaataagttactgctgaagaatattactgatgatagaccatacgtatttccattttaattatcattwttatcctcttaatattttgtaataaaagggccagtcccttggattaaattttgtgcacaatttgaaaacgaagctggagtttgagcaacaaaatttgatagacatttcttccaaaacttttttgaaatggaaaataaaaatctccatgttgaaaatattttgtaatatattatcaaattcagcaaaccttattaaacatggaataatatgttcagataacaaggattttcagtatataaattagatgtttattttgtttt

SEQ ID NO: 473915 - DNA, 528 bp, Homo sapiens
cctgcaatctctgtctccgttgtcacatggcaatctttttacagtatgattctctcctcttcttctaaggacaccaaacatatcagagtaggctcaccccattctagtatgacttcctcttaactaattacattggcaatgaccctatttccaaataaggctacattctgaggtactaggggtaggacttcagcatatcttttggggagggataaaatgcaattaataacattgatcaattcatatgttatgtttctttcagtctatgaaaatacttcaacctaaaatgctagtaatactttcaaacaaaatgtagtcccatgttctgtaataccctttcaggagatctataaggccaaaactatttttgtagtaytattatttgacctttttattctcagttttgggcaactatacagaaatccttagtaatccttttcaaattctttataatatgtaataatgtcgtcactctgatggctaatggaatgtgcatttgtatattatattatctagaattttctgatg

SEQ ID NO: 473916 - DNA, 618 bp, Homo sapiens
tccatttctgtaaggaatactcatttcttttagtagagaatggtattcataaactaagacctagactctctatatactcattgctgcttgggtcttgttcctgttaggccttcttaatagataaagctaggaaatatgtatgtatatgcatatatattatataggtacgtttgcttttatatttatttatatatatatctctattaagaattatgagtttattccaatacctccaatttttaatctaaactttagggatggtctagccttaccccgttccacatttctaactttcttctccaacagtaataagcctgtctcccatttttcgtgatatattaatttattttctgaagtctccttcatgtaaccaatctctcagcaagactagttctttacactggccataagcacttctggcttkgccttgactgcatgaagaccttcttgtttacctcagaaaaataagcaaatgaatgttggactagtcacttaaggattgtatgtgttcattgtgactacggtggcatgatttagtcattaaacaacgcagtgatttggccgcattgcattgaccacccgtcttggcctcttccttgcttcaatcctggccacatc

SEQ ID NO: 473917 - DNA, 585 bp, Homo sapiens
ccattgtagttctggtttgtgtttttaaaggtcaccctggcagttgggtgaacaayagactgtaacctttgtcaaagtcaaataaaatgtatagagagccaaatatctaaatttaacagtttacttgagaggaaagaattgcaattcagggtgtacacacagaccaaatggtctttagtatgtctgaagaacagagagaaggttggaggttttatgaaaaggagaaatgttacatattgctctttgagagagttcatccgcactagtaaggttctggggagttggcagattttgattagtgaatgatagtggtggataaaattagtcttagagttgcagcaagttatttcagcaactattagataaaactgatttgagattatagcaggcagcttgagcagccaggcttgtagagacttacagttttggagcaatgttacatattctaagtcctttttcctcctgtgacttctcaactctgttttagtcaggtgtgacaagattgacccaatttctgtgatcaactttcacactttgtacatatttcatttcgcatgtatgtaggtttatctgtaggattaattc

SEQ ID NO: 473918 - DNA, 602 bp, Homo sapiens
ttttgttttaacctggacagcactttcactgtactgcagacttttcccagcctccgtgggaatgggggctactcagggcttcccttgatccctggttcatgggccaccaaccctctgttgtgtgctgcctgggagccttgttgaacatgcctataaagcaggagcctgcacacctctgctggtcgaactctatcaatacaccagacctataagcaagagaagattcaaggaaatgttcaggagaaaaataytttttaaaatgtttcacagtttttacctataaggcacttttaaaactctaattctaatttattgttcctttttacttttcatattttaattctgctgtaatcattatctttccagtttgggggaacatggccttaaagatagacacctgaattggaccccaggtctctcgcttattggatatacattaaataattttaggcaggttgtgttattaatcactaaacaagtatttattaaatgtcctgtgtgccaggcactattctaagcaccagagatataactgtagacaagtaaatatgctataacatgattattatattctaatcaaggaagaagaataatcaaaataa

SEQ ID NO: 473919 - DNA, 632 bp, Homo sapiens
catctttgcctttttttttcagtcctctcctgtgctgatttccatgtttcctggatcccagatatttgtatttttgtgtttatttcttcctgtgttgcatcatgtcttcagcactttttcaatatatcttttataaaaaactaatactcactttttgggaacttacatttttgaaaacttgcatgtttttaaaaaaacttttattcaattttcacacataatgggaagtttggcttaaaatagaattataggttagagatgactatcacatggaatttggaaggcatcacctgccttaagaggttccagtgaagtgcatgtaaagaatctcttagattatgtgaaaaggtgaatkaatgcttgtctgagggatgcaagacacaaatccaggtaagccaactggagaggcaacattggagggaattcagaagatggagatgaatttgaaaaatgaggcagattttccaaatcatcgttgattcaaccatgacagaacagggtagaaactgggaaagcctgaagaaagcaaaaggattggaagtagagacttttatgtggagccaaaaaaaaatgtcctgggacaaaataataaataaaataaactacctccggttgctttcgacttggtgcca

SEQ ID NO: 473920 - DNA, 632 bp, Homo sapiens
catctttgcctttttttttcagtcctctcctgtgctgatttccatgtttcctggatcccagatatttgtatttttgtgtttatttcttcctgtgttgcatcatgtcttcagcactttttcaatatatcttttataaaaaactaatactcactttttgggaacttacatttttgaaaacttgcatgtttttaaaaaaacttttattcaattttcacacataatgggaagtttggcttaaaatagaattataggttagagatgactatcacatggaatttggaaggcatcacctgccttaagaggttccagtgaagtgcatgtaaagaatctcttagattatgtgaaaaggtgaatgaatgcttgtctgagggatgcaagacacaaatccaggtaagccaactggagaggcaacattggagggaattcagaagatggagatgaatttgaaaaatgaggcagattttccaaatcatcgttgattcaaccatgacagaacagggtagaaactgggaaagcctgaagaaagcaaaaggrttggaagtagagacttttatgtggagccaaaaaaaaatgtcctgggacaaaataataaataaaataaactacctccggttgctttcgacttggtgcca

SEQ ID NO: 473921 - DNA, 616 bp, Homo sapiens
tggcctgcagcaaacagcacgtgggctctaagaactgatgtctctaaatgtgcctccttcttccatccttccccaggaaacacctgtctgtccgccgcttcttttggtgggcccgctttatcgcaatcaacaccttcctcttcttcctcttcttctttctcaccacgcctgccatcatcatgaacactatcgacatgtacaacgtcacccgccccatcgagaagctgcaggtgcctcctctgctcaggccaggcctggggaccccagggagatcaaggaakaattcaggcgaggatgggatggggggagccccctgggagggggctgtggagcccatacagtgcgaacattgtggaggtggccatggtgcaaatggcggggtagggcttgctttgttctaaagggatgaaggtgggtgactgccagtcttagggaccagggctagagtgggaagggagagtggggagtccacaggcaggtcctggggtgagttggagggggtgtcgtcctgtcaacatgggctcagaggtcttcatgaacggggtcatcccaggccagcttggggtccagagggtgtggcaagtgtgagtggctctgctctctgcaagttgtccga

SEQ ID NO: 473922 - DNA, 616 bp, Homo sapiens
tggcctgcagcaaacagcacgtgggctctaagaactgatgtctctaaatgtgcctccttcttccatccttccccaggaaacacctgtctgtccgccgcttcttttggtgggcccgctttatcgcaatcaacaccttcctcttcttcctcttcttctttctcaccacgcctgccatcatcatgaacactatcgacatgtacaacgtcacccgccccatcgagaagctgcaggtgcctcctctgctcaggccaggcctggggaccccagggagatcaaggaataattcaggcgaggatgggatggggggrgccccctgggagggggctgtggagcccatacagtgcgaacattgtggaggtggccatggtgcaaatggcggggtagggcttgctttgttctaaagggatgaaggtgggtgactgccagtcttagggaccagggctagagtgggaagggagagtggggagtccacaggcaggtcctggggtgagttggagggggtgtcgtcctgtcaacatgggctcagaggtcttcatgaacggggtcatcccaggccagcttggggtccagagggtgtggcaagtgtgagtggctctgctctctgcaagttgtccga

SEQ ID NO: 473923 - DNA, 664 bp, Homo sapiens
ccagcttttcagggataattttggagcagggacggaaaatctgaccctgctggtaaaattagcagcaaaccatgtaccctggcctgtggtttaagggggtcacgtgagaccaagagctataggcaccactgcctgctccacttgccctctctgtccccatactccccaggcagtttcaccatcacccccaaacttgatctccaggcaccctggctctgccctctctccaacctctccaagccccaaaaaatcatccctctactcagcaaaggcaaccttcagttccccacctcctccccttggtgccctgcctgctcagctccagtcctgtcttcccccctccccaccccacagtcccaagctgctagatcagggtagtgctgagaacttttggggcctggggtgggagtggcgsggaggggagagaaagggaaaggggaagggcatcttctcccctagcagagctggctccacggagtggagtcctgtgctaggaggcctgtctgggtagcccactcacacttcccatgcttccctcccctgtggttccattcagccatctatctgagacagagagaagggcagagcgtgggaggatagtttggggttaaggttatcatggctcacctcctggaaataggacttggggaccagaagctggatt

SEQ ID NO: 473924 - DNA, 608 bp, Homo sapiens
actctggtttggggcaagcctagaatccggccagatgtggctcttccaagagttccctaactcttgacactttatcctctaggaaargattaagacagatggtatcttcatagactgctagagctagggatcttagaggcagaatccaaccgcaatctctttttacttctcaagtattacttgtatcaatagtgtagtttccaatgttgtggttgaacatctcagaggaatcaggtgtaatcttgtcaaaacagcgcgggaagccctttggcttcagacagcccttcctgggctcagtggcctccccttgcccctcagcccagcctgtgccccacgctcctcttcctctccttccaccttcccagttacctccagcaactcctccccactttgcaaaaggaacattgacagtgactggacatcccaagctagaaggtattgaagctaggttagcatctaagtgaggctttcttccctatttaagtaagtaaatacattaataaataaatctttgaggaaggattagagagtccaggaagctttccagaggaagctctaactgtgttaagatttctctatttgagagtgtctcaaatctctcttacatg

SEQ ID NO: 473925 - DNA, 635 bp, Homo sapiens
gggcactgtgtctctgactcaatccattcctttcccagccctcaggatcctgtgctaatgaaggcatcatcagcttcagccacgcttttgttctctacaccatcccttcaaagatggaggttggggcaaggacccctccctggaaccaggccaaaggttcagtattggaaaagcattgattctttccccatagtccttaaatattctttttacaaagactacaccagattaaaacagttccgtggcacaatctctacaggtctgttaattcaggacagagctctggaattaatggccaagaacaagaaccagctttattataactgcatcaattccaacaacatgtgctgggtaaatattacctccaacaaggtccaaactagcctatagccaaatgcagcttataaccatgattttccctatacttcttcctcctagcaagatttggacttctctcttgatgaatcargcctctaggtcatacatccaactggagaagccagaagtaacatcatcttggccaaaaccaacaagtccacctcccagttgtccctcctctgggaaaccgcccatttggctctgcagccagcactgccttcgtggcatgtggtgtaatggatgtaaccaggacagtg

SEQ ID NO: 473926 - DNA, 635 bp, Homo sapiens
gggcactgtgtctctgactcaatccattcctttcccagccctcaggatcctgtgctaatgaaggcatcatcagcttcagccacgcttttgttctctacaccatcccttcaaagatggaggttggggcaaggacccctccctggaaccaggccaaaggttcagtattggaaaagcattgattctttccccatagtccttaaatattctttttacaaagactacaccagattaaaacagttccgtggcacaatctctacaggtctgttaattcaggacagagctctggaattaatggccaagaacaagaaccagctttattataactgcatcaattccaacaacatgtgctgggtaaatattacctccaacaaggtccaaactagcctatagccaaatgcagcttataaccatgattttccctatacttcttcctcctagcaagatttggacttctctcttgatgaatcaggcctctaggtcatacatccaactggagaagccagaagtaacatcatcttggccaaaaccaacaagtccacctcccarttgtccctcctctgggaaaccgcccatttggctctgcagccagcactgccttcgtggcatgtggtgtaatggatgtaaccaggacagtg

SEQ ID NO: 473927 - DNA, 454 bp, Homo sapiens
tgctcctcctggctccctgctggctgcaggccagggctcagattccagtcttttccacagctctagaggaccagactttcaaaggagggaaggaagggaggaaggggagggcaggaagaggtcagaaaagaggatggagaatttaggaggggagaaagggaagtgagaggagcgcaggaggctggtggggaagggaaaatcagaccggaggagaggaakgaaatgagtaactaattctgaaattgcggcacctgaggcctcagtccttttgggccttaactcttgccctggggcctatcacagggggcccaggagcactgtttgctgtgaccatcctgggcaacatggcaaaaccctgtctctactaaaaatacaaaatatattcgattcatgaagcacctcaaatttagatttgcaaagacctccaaacaaaacacctgcattgtaagaagac

SEQ ID NO: 473928 - DNA, 640 bp, Homo sapiens
tctagaacctttccaaatcataaatggtagtatcagtttaaaccctgtgatgttctgataggcttatcacatatgtggtgtgaccctgatattaccagcagcatagcttaattcttgaatttgaccctgtgttagtccgttctctcgctactaataaagacataccccagactgggtaatttatataggaaagaggtttaattgactcacagttcagatggctggggagtcctcaggaaacttacaatgacaatggaaggggaagcaaacacatctttcttcaaatggtggcaggaagaagtgccaagcaaaargggggaaagccccttataaatcagctcttgtaagaactcactatcacgagaacagcatgaggataagttcccccatgattcaattatctcccaccaagtccctctcatgacacgtggggattatgggaactacaatttaagatgagatttggcgggggacacagccaaaccatatcaaccctcttcccctgtttctgggtatattctagcaaactaggtagcattctagctttccttagactagaacgatgtttaaacaattgtccttacatttaacatttgagtacagaaaaagatcgtctaggtttatttactaaaactgtcag

SEQ ID NO: 473929 - DNA, 640 bp, Homo sapiens
tctagaacctttccaaatcataaatggtagtatcagtttaaaccctgtgatgttctgataggcttatcacatatgtggtgtgaccctgatattaccagcagcatagcttaattcttgaatttgaccctgtgttagtccgttctctcgctactaataaagacataccccagactgggtaatttatataggaaagaggtttaattgactcacagttcagatggctggggagtcctcaggaaacttacaatgacaatggaaggggaagcaaacacatctttcttcaaatggtggcaggaagaagtgccaagcaaaaagggggaaagccccttataaatcagctcttgtaagaactcactatcaygagaacagcatgaggataagttcccccatgattcaattatctcccaccaagtccctctcatgacacgtggggattatgggaactacaatttaagatgagatttggcgggggacacagccaaaccatatcaaccctcttcccctgtttctgggtatattctagcaaactaggtagcattctagctttccttagactagaacgatgtttaaacaattgtccttacatttaacatttgagtacagaaaaagatcgtctaggtttatttactaaaactgtcag

SEQ ID NO: 473930 - DNA, 597 bp, Homo sapiens
tacatgacccaggggcactcataaggaaatgaagactcaaagacacatagttgaacatttatatactaaattgggcaaacagtagtaaaatgtaacaagacaaaggggcttgggctagggtagttacttgggtagaggagtgactaggaagataagaattagtctaccaagtacagatttcccctgcctcgacttcctattcttgatgacaagaatgattctttttttctggtataaggaagatatctttcacatgacaatttcatctcctgcttttaagaaacaaaaggaaggtcagagggatcttctaagagtaccycctgttttttaagtgcctttaactcaaaacagtcaatatgccaggacagtatatttgggggttggcatgtttgtactcctttagtgtcaaatttcaaaactgtacatctagaaatttattccaaggaaataatcatggatgcaatgattttgctggaagaatgttcatcttggtctcattcatcttagcaaaatcctggaaacacccaaaataggttaaatatcttacaatacatctattcactagagcactatgcagccatcaagaatgatgttgta

SEQ ID NO: 473931 - DNA, 595 bp, Homo sapiens
ccctgcagaactgccaccactcctgggaactaaaaaagaaatagtgagctcactagtaactggtctgtaatgtcattctgtcatcttcagtcctcatgtacaggaaagacacggatgaaggaagtctaggggtgggggctgtgttgtgacagacccctagacttccatcgctagggtagaaggaattttgtgagaggtttggaaaaatttgaacctccccctcttcaaaccacagatctcagataaatcgcatgagtctgyatgaggtccctcctctacctgggctctgagtagaaaggtacccttagagtctgggagtgcagtggagtccaggaggccttggagagaagcagcgtgggttgggtgcctgggtgccagggtgccagtggcagggtgggctgaccccgcccttaccatccctaggggccatgccactggagctggcacagggtcattccctacagcggccacacagtgtggggctcaagaagtgttttgttgggaaaattgggagatttctcacataaagatccagagttttggcatcttttcagaaaataagaagacttgggaacacatgggaatctgcagtccc

SEQ ID NO: 473932 - DNA, 616 bp, Homo sapiens
tagttctggaaataattgtgctcacatggtgagtgagtattttaactcccgaaaggcctcaccctcgccctccctgtttactttaagattaacatggccaaggttttcctaacaaattttggctttgcaccagactgaagcagcactggagcccaagcgtctcacagaaatatggaatggatgttttgctgtttaacttgcaatagggtctcttggcaagagagaggctaaagtcagaatttcctgttccccatctctttgggcctcaggcattttctgttgcccctagaaagtgaagaggaagaggccagactccgccatctctgagggtcactctagcactttcaattgtgtttccctttggtcacgtgctgaaagaatgtgtacaaacagccaactgagccagcgtcacagggaatagctgcgtgactcccttaccatagacaatgtacaggcagagtcttttctcagtgatatgccccatacattacttttcctcaactgaacttttgcatgagcttagattgtgagatgttataatcacttgctstcacagtgatatgctgccttacatgccaagtgtctgtctggctcttccctccagcatcgtgatctc

SEQ ID NO: 473933 - DNA, 614 bp, Homo sapiens
ctgtcagtgctggtgagtgcctttctctgcatattataaattaaaattgcccaatctgagctgagttttcctactgtggctacttggtctatggcaaagcaccaaagggcttccatggcaaaattaagggagaaataagtttatttgttaatgtatgcacattttaaagactaaattgactatctagatgaagcaaatgtcttcacacatgacattttcctccatctatattgcatctttctggaaatagacaagataaatttaaagcgttttgtgtctctaattcacgaatagccaatcactaggctttgtctggaaaattccctgtaagcagcacaaaggtggccaagtcaaggtcaagaaaaaaagcagcaaaatcctaggtggaaagggaagacactaagacacttgaccacaaccatctgcaycattttacactctcttcaacaacatgcaacaaatacgtgtttgcactggctctagaaatagaaatagaattacattctgtttcttcttgcacaagcaaagtacagagttttatttaggaagttcctacaaaatgaagtgtttttcaaactcacggagtcagaaacatgagggaattaaatagagag

SEQ ID NO: 473934 - DNA, 614 bp, Homo sapiens
ctgtcagtgctggtgagtgcctttctctgcatattataaattaaaattgcccaatctgagctgagttttcctactgtggctacttggtctatggcaaagcaccaaagggcttccatggcaaaattaagggagaaataagtttatttgttaatgtatgcacattttaaagactaaattgactatctagatgaagcaaatgtcttcacacatgacattttcctccatctatattgcatctttctggaaatagacaagataaatttaaagcgttttgtgtctctaattcacgaatagccaatcactaggctttgtctggaaaattccctgtaagcagcacaaaggtggccaagtcaaggtcaagaaaaaaagcagcaaaatcctaggtggaaagggaagacactaagacacttgaccacaaccatctgcatcattttacactctcttcaacaacatkcaacaaatacgtgtttgcactggctctagaaatagaaatagaattacattctgtttcttcttgcacaagcaaagtacagagttttatttaggaagttcctacaaaatgaagtgtttttcaaactcacggagtcagaaacatgagggaattaaatagagag

SEQ ID NO: 473935 - DNA, 598 bp, Homo sapiens
tataaagaaaggaaaacagaacactctgtgagatcacagagtgtggtactcattcaatctcaagctggagtggtgagaaagaaaaacagtagggaagatattctattacagatagataggtcccctgttttcaggttggaaataattttgctgtggagactatattaacycacaaaacaaagaaccataaagaagtacaaacttaaatgttgaattttaaatattagttccttgttatataaagagttctaagaaaagatcagaacttttgatacccagccagaataatcaagaaaatcccctggggaaagagggtctggaagtattactgtccactaccccatttaaaacttgatggtgagtcccatcaagtaatgtccctgttgttaaaatgtctcttagttgtgatcattttctagctctgtgtttttcaagagagctattttaacatagaacagtattagatgtgttttgttcacatgttttattatagctccaggccattacattagcagtgttactacacttgccttctattaatagatgctcattagtggcacttccattaactaatttcaggattatactaaaagctacc

SEQ ID NO: 473936 - DNA, 465 bp, Homo sapiens
attctggatattagacctttgtcagatggatagattgcaactcatcttctgcagaagatgaggcaatattcctgtttgaggagttgtaaaaaataagcaaattttatgcctgataataattcagaatcacttgtgcagctttaaaaatatcacttgcctagctctaactcaaagcctaagcaatcagtttgtctagtgggtgatgggttgaaacaggtaggcaattatgtakttttttcatttccgtggatgatggagctgcacagccatggtaaccatggatcagatgaggtgtgtgaacctcaagccacttagcacagtgccaagaacacattaaatcattcttattctccagctatgacgtctgtgttatctccctcgtattctgcctcttttctcacaaaatgatggaaatgtatctcttgggaacctccagttctaaataggggcttttagcgttgagca

SEQ ID NO: 473937 - DNA, 490 bp, Homo sapiens
ggttaaaactattcagagtcctcagagttggtgagccattgcatgctcatcgctctttttaattaaacctttatctcctcaatgatttaactttttaaagcagccatcatggaatataacgtgtgctgcagtccttttaaaaacagaattgaaattctatcattgttcatacagtcattctttgttaatgtaaatacgaaacaataaaactcgttattaatgatccagatcctttaaagtggccataaaaatactgcacagttgaatgaataagggacctagtggctaattttgagtcatatgattgaaaggttttggttcctgaagccagtcacaggagactcactttgtgaccttggaagttaccaacttctctgagagtcattgttttccctgtcartcgcaggtagtaggaattacttctagggctgttatgaagatctgtgaattaagaaatgcaaagagcctatcattccactggcctctgaga

SEQ ID NO: 473938 - DNA, 670 bp, Homo sapiens
gcattaggcgctgggaaattcagagaattaaaagcatcttctacctatgactccttcatattaggaaagaagactgatattctttagtatgcatagatctaatgaaacttaatggctcagataaataaaataaaaacaagatcataagccaatttccttccagaagacctaaaaaactccaccaaaattaaagaatgsccatgctgttaaaattccgttgtctacaaacactcattgtttcaaaaacattgatcagaattgtacttggccaatgttactggaaacattttttcaagacaaatcagggtttaagaggcttctaataagttagttgtagtatatgaattgtttaagcccttattaattataaggtaacattaggttggtttattttcagagtcatcaagaatgcttatggaaagttgagatttgcataatatttgcatttgtcctacctgcctgtcagtcactcatagccatagcgccataaggcaagaactgttaaaggttggattacaggaagaattctaatcaaaacaccttggtgtatcggtgatgtttgaaagtagtgtaaatggcatgtttcatagaaagttaaaactcaactttggaagaatgaaaataactacaacatcatgactcgcacctgctgccaccccactttcacaac

SEQ ID NO: 473939 - DNA, 670 bp, Homo sapiens
gcattaggcgctgggaaattcagagaattaaaagcatcttctacctatgactccttcatattaggaaagaagactgatattctttagtatgcatagatctaatgaaacttaatggctcagataaataaaataaaaacaagatcataagccaatttccttccagaagacctaaaaaactccaccaaaattaaagaatggccatgctgttaaaattccgttgtctacaaacactcattgtttcaaaaacattgatcagrattgtacttggccaatgttactggaaacattttttcaagacaaatcagggtttaagaggcttctaataagttagttgtagtatatgaattgtttaagcccttattaattataaggtaacattaggttggtttattttcagagtcatcaagaatgcttatggaaagttgagatttgcataatatttgcatttgtcctacctgcctgtcagtcactcatagccatagcgccataaggcaagaactgttaaaggttggattacaggaagaattctaatcaaaacaccttggtgtatcggtgatgtttgaaagtagtgtaaatggcatgtttcatagaaagttaaaactcaactttggaagaatgaaaataactacaacatcatgactcgcacctgctgccaccccactttcacaac

SEQ ID NO: 473940 - DNA, 670 bp, Homo sapiens
gcattaggcgctgggaaattcagagaattaaaagcatcttctacctatgactccttcatattaggaaagaagactgatattctttagtatgcatagatctaatgaaacttaatggctcagataaataaaataaaaacaagatcataagccaatttccttccagaagacctaaaaaactccaccaaaattaaagaatggccatgctgttaaaattccgttgtctacaaacactcattgtttcaaaaacattgatcagaattgtacttggccaatgttactggaaacattttttcaagacaaatcagggtttaagaggcttctartaagttagttgtagtatatgaattgtttaagcccttattaattataaggtaacattaggttggtttattttcagagtcatcaagaatgcttatggaaagttgagatttgcataatatttgcatttgtcctacctgcctgtcagtcactcatagccatagcgccataaggcaagaactgttaaaggttggattacaggaagaattctaatcaaaacaccttggtgtatcggtgatgtttgaaagtagtgtaaatggcatgtttcatagaaagttaaaactcaactttggaagaatgaaaataactacaacatcatgactcgcacctgctgccaccccactttcacaac

SEQ ID NO: 473941 - DNA, 670 bp, Homo sapiens
gcattaggcgctgggaaattcagagaattaaaagcatcttctacctatgactccttcatattaggaaagaagactgatattctttagtatgcatagatctaatgaaacttaatggctcagataaataaaataaaaacaagatcataagccaatttccttccagaagacctaaaaaactccaccaaaattaaagaatggccatgctgttaaaattccgttgtctacaaacactcattgtttcaaaaacattgatcagaattgtacttggccaatgttactggaaacattttttcaagacaaatcagggtttaagaggcttctaataagttagttgtagtatatgaattgtttaagcccttattaattataaggtaacattaggttggtttattttcagagtcatcaagaatgcttatggaaagttgagatttgcataatatttgcatttgtcctacctgcctgtcagtcactcatagccatagcrccataaggcaagaactgttaaaggttggattacaggaagaattctaatcaaaacaccttggtgtatcggtgatgtttgaaagtagtgtaaatggcatgtttcatagaaagttaaaactcaactttggaagaatgaaaataactacaacatcatgactcgcacctgctgccaccccactttcacaac

SEQ ID NO: 473942 - DNA, 603 bp, Homo sapiens
caacaatggagccaccatagcgtggtccctcagcaggggggaggccatgggtctttggaggtaatgggaggtatggacttctacagaagctaatatttaaatgcaccaggcaggaagccaggaccaaacatcccttttattgsatgtctttttagtcaacagccccctgttggaggcactttgtccagaggtcctagaaatgaggccatcagggctgaggtctttccatatcagataatgtttcattggagacaatgttcattccacttaaatctgagaagaagtagcttgtcttgtttcagcattctgggcctaaaggataagggtaattataggaccagtgtttgcccttcttatatgcatggccttttcagtctgggatttatcctaatgaccttcacaaagagagagccaactgtgagcttcccctcattaatgggctcttggatccattaacatttcctcagcacccaccgtcctctcctggactgtaagctacatggtagttctggaaataattgtgctcacatggtgagtgagtattttaactcccgaaaggcctcaccctcgccctccctgtttactttaagattaacatggcca

SEQ ID NO: 473943 - DNA, 617 bp, Homo sapiens
tctgaagccaggacagactgggctcaggaaagaggctgttcgactacagaacagattctcccattaatcaggaaagctcatgggaggaagaattggagccagtcagctactggtctggatatggctaataatttctgtctttggtttctggaggaactgtgccagggtttcttccaactgcacacagcaaatatgactttccttctgtatctgaaaaactggcagcaaaaacactgaaaagaaatgggactatggccaaaaggataagcttaaatgaaattaggcgtaaactaaaatcaaatgacaggtcaaaaaatactaaacctgtgatgtctcttcctttcagaagacaaacgcagtgttgtagtaggagttacatcttgttttctaaattctgaatgtgttttatacttacagatactttctgataatctgttcacagcacctttattgattgttttcaatcaaggaaccggtcattctagtcttaacttcacatgytacctctctcctcacaagcttgcaatggcaataaagttcccattcttttagcatatcatgaaagttatcttttataatttaggttcctcaatggcaataaagtcccattttttagc

SEQ ID NO: 473944 - DNA, 624 bp, Homo sapiens
cgggatgagctggcgtgcaagccagactcggctcaggcggctgagtgggtgggatgcctccagtggcacgtctggggcagagcaagggggtggggggcgagggtgtgtcactggctagaggtcccggctgataaagtgaccaagagaattcctgtgtcactactgacttkggtatattatatttttacccaaccatcttaatattcttcattggttttcagttgatttccagatttacaattatattagctataaataatgattattttatctcttcctttctaaattttacacttattatttattttctaattgtttagggttaatctccaaaactatatgaaataatagggaacaatcataaaattaagtagaatttatgaccaattaaaaaaagcagaaagaatctttttgaggtaatcaaaactttgggggcattgtagttacacaggtgtatacatttgtcaaactttatcaaattgtgaacttaaaatataagcatttcatacaaggtatgtaaattttctttcttcttggtttaaaaaaagaatagtggtgatattgaaaattcaatttctattcttatctacaattggaatgatcttagtttcctcattaaatgtg

SEQ ID NO: 473945 - DNA, 287 bp, Homo sapiens
aacacagttaaatacatagcccacagacactataaagcaactaaacggtcacgtctgcaaaataaccagctaacaacagatggcaggatcaaaatctcacatatcaatactaaccctgcatataaatagtctcaacggcccacttaaaagacagrgtggcaaactgctatctttaagtggcaagtttgctatcttcaagagacccatctcaatgttagataggtctcaacagagcagattcccttttaattcatccacaaaattatgtaatttgaagttatgttttc

SEQ ID NO: 473946 - DNA, 655 bp, Homo sapiens
ccaactcacaatatcattcattttggtttctacttttcataattgagtgcctttttgtacttctctttgataagtggagttaacatctccatgtgaactggaaaagctaagttggtggtagtcccttgaggattttgtgtcttgctctgacaccttcattgacttcatcagaatttagatgtattaagggatcaaggagttgcacttatgtgcatgaagttctcaaggtgtttggagagcctgttcctaagccaagttctgatggtccctaggagagaaaactttttgccaaatgaacacagtttgatggaaaagttcatgayaagccaacataatactttaaccattttctagcagtgactcagcagttatggaaaatgactatgggaaaaataccaaaaaattcttcttttctgtcttcccctactttgataagcattcttttcacttctccttccaagattcagaattgtactttcattcccttgttgcttttcttctcaaactggggagtgtcgagtgaggtggtggtatcctgggtgaaccctgggctgtaggataaacatggcaactttcatggagcatttattttacttatgaatttttgaggaaaatgtaattaatggaaagatcatcattacatgatggagtcaaa

SEQ ID NO: 473947 - DNA, 655 bp, Homo sapiens
ccaactcacaatatcattcattttggtttctacttttcataattgagtgcctttttgtacttctctttgataagtggagttaacatctccatgtgaactggaaaagctaagttggtggtagtcccttgaggattttgtgtcttgctctgacaccttcattgacttcatcagaatttagatgtattaagggatcaaggagttgcacttatgtgcatgaagttctcaaggtgtttggagagcctgttcctaagccaagttctgatggtccctaggagagaaaactttttgccaaatgaacacagtttgatggaaaagttcatgacaagccaacataatactttaaycattttctagcagtgactcagcagttatggaaaatgactatgggaaaaataccaaaaaattcttcttttctgtcttcccctactttgataagcattcttttcacttctccttccaagattcagaattgtactttcattcccttgttgcttttcttctcaaactggggagtgtcgagtgaggtggtggtatcctgggtgaaccctgggctgtaggataaacatggcaactttcatggagcatttattttacttatgaatttttgaggaaaatgtaattaatggaaagatcatcattacatgatggagtcaaa

SEQ ID NO: 473948 - DNA, 655 bp, Homo sapiens
ccaactcacaatatcattcattttggtttctacttttcataattgagtgcctttttgtacttctctttgataagtggagttaacatctccatgtgaactggaaaagctaagttggtggtagtcccttgaggattttgtgtcttgctctgacaccttcattgacttcatcagaatttagatgtattaagggatcaaggagttgcacttatgtgcatgaagttctcaaggtgtttggagagcctgttcctaagccaagttctgatggtccctaggagagaaaactttttgccaaatgaacacagtttgatggaaaagttcatgacaagccaacataatactttaaccattttctagcagtgactcagcagttatggaaaatgactatgggaaaaataccaaaaaattcttcttttctgtcttcccctactttgataagcattcttttcacttctccttccaagattcagaattgtactttcawtcccttgttgcttttcttctcaaactggggagtgtcgagtgaggtggtggtatcctgggtgaaccctgggctgtaggataaacatggcaactttcatggagcatttattttacttatgaatttttgaggaaaatgtaattaatggaaagatcatcattacatgatggagtcaaa

SEQ ID NO: 473949 - DNA, 624 bp, Homo sapiens
cttggcaccatgtcttgagaggatctcaagctgggtctcagagcacagaaaagatttgcaggaaccatgaatagagaagagcggcagaacttgtgtctgggggcagtgagatgcagaggtaaattggagcagatkctttaactttgcaaggtcacctgctttgaggttcaattataactacctggagtggcctttcaaccctcaaatagtgaagagggtggtttcattgtctaactcccacgttcatctgccttaatagtgactagctctaagtccagaaggagaactgggaggggtgagaatatgaaatattactcattgacagcaatttccacatgcttcctaaaacaataaccaacccaaattacctacatctacacagatgacacaggtgatacaataatgaaataattgatgaaataataatgagaggagtcctaaaagtagagattttaaaagccctgtgttcccaagagccatatgctactagctgaaaagcgctcctttctgtgcgtgatcaaaaccttttctgttcccttaaaaaataatacattggtaagcaggtgtttcattggttgaagaggtcattgctcggtgtcaggttggttttcagagaacagaaat

SEQ ID NO: 473950 - DNA, 624 bp, Homo sapiens
cttggcaccatgtcttgagaggatctcaagctgggtctcagagcacagaaaagatttgcaggaaccatgaatagagaagagcggcagaacttgtgtctgggggcagtgagatgcagaggtaaattggagcagatgctttaactttgcaaggtcacctgctttgaggttcaattataactacctggagtggcctttcaaccctcaaatagtgaagagggtggtttcattgtctaactcccacgttcatctgccttaatagtgactagctctaagtccagaaggagaactgggaggggtgagaatatgaaatattactcattgacagcaatttccacatgcttcctaaaacaataaccaacccaaattacctacatctacacagatgacacaggtgatacaataatgaaataattgatgaaataataatgagaggagtcctaaaagtagagattttaaaagccctgtgttcccaagagccatatgctactagctgaaaascgctcctttctgtgcgtgatcaaaaccttttctgttcccttaaaaaataatacattggtaagcaggtgtttcattggttgaagaggtcattgctcggtgtcaggttggttttcagagaacagaaat

SEQ ID NO: 473951 - DNA, 583 bp, Homo sapiens
tcacccaaagactaccaatgttgaccccagacacttgggatctcagctcttggctggagctgggcattcttgctgagtccagaaggaaagaaaacagccaggtgagcagggcaccaggagctcygggtctgtgtggctgctggctgtggcacagggctgagagcatgcaccttgggaggtttgtgcctgatgcaacaatgaggtttccaagaaagctttccattgctctattattgtttataaagaaaagaaagtttttgtttttttctttccaaacacacaggtagaatttgtccagtagaactcaacaacctgggccaaagaggagggaaaggaaagtcatttcttattgtcttattggcgattgtaattgtggttctgaggctggcgttgcccaggatatggcatagtgcaacattctaggaagttgtggggacatttggtattagccttgccattcagatccaggagctgtgtcaacactggggtggtgacatcctcttatctgttcacttaacaagtttccttcctaccccatttactcctcattctttctggaagagatgctattttctgagaaaat

SEQ ID NO: 473952 - DNA, 492 bp, Homo sapiens
aaaaatatttgtcattataaagctttctgtctcttaactttcagaacacagttacttagaaggttgtaattatttaccttttaagaatttgggttaagtttatgtacatttataactatactgtttgaaatagcatttgagctgttatgggtcaagttttattttatactaaatgattaattttcaattctatttgaagaaagccatatttattctgaataggaaattctatttttcatttctygtaatttcatattttaaatcaacttaattttatattaatagtatgatttggtacagctcaatacagatcatgttgtggcactcagaattccaaacctgaagcttcttattggatgcaggaagtcaggaaataagtgctttttcaggttatgaagaagatattacagactcttttttggtttttggctttcttaaccattgctttctgtcgttagccataatctagacaatcacagtttaggttgcagt

SEQ ID NO: 473953 - DNA, 636 bp, Homo sapiens
agagggatgactggagaaaccagcakgacatggtagctggcaaatattgaagatgaggaaaggcattaataaggagtaacaatctctttttccaaaggcaaactgatccactcgatggtagcccacctagaagctgttacaagtttagcagttgatcccaatggcctttacttgatgtctggcagtaagtacctcaactatggattatttatttgtccttaccattttcatgttaatgtaatttttccttttaattttttttttggatataggtcatgactgttcaatacgtttatggaatctagaaagtaagacgtgtatccaagaattcacagctcatcgaaaaaagtttgaagaatcgattcatgatgtagctttccacccatccaaatgctatatagccagtgctggagctgacgcactggctaaagtctttgtatgacgcaatgcatcatcttcaccttctagctgtttataagtaatcaactgcacacaagagatacagaagacgagggcaagaatcatctcgtcctgcccttttgttctgctgaaggagcacagagaacatttgttgaagtatagttttgcaattcatatactgttttctaaaactaaggtttgttcaggttgctgcaa

SEQ ID NO: 473954 - DNA, 546 bp, Homo sapiens
cttttgcagaagcactaataaaaacaaatattttgtaccctagaagtcctctattaatccctgtaagaatctcctggaaacctggatgaaagagtttaatgccaaatattggctaamaagttctgtctttctctctccctattcctcccccattgtttaattgagatatacatgttttaatgggcagtggatcagtattgtttctggggaaatccacaccttaaaaggccaggcttccccagcccaacttacctgtgacccacctacatgtgttcaccttttgggattctgaagaccctgctatctagacctagtctcctgtcataaagacattatttctatagtggtttatgtctctcttactctttgtcccaaatgacagagaccaatctagaaattggaaataaattattaacgtccaactttccaccaaaaaacatataaataggctcttagattttaaaaatattaaatctatagatattttaaccaattaaaacaatttctacatattccattccccacattttccatcgtcataacaat

SEQ ID NO: 473955 - DNA, 604 bp, Homo sapiens
tgcttttgcagaagcactaataaaaacaaatattttgtaccctagaagtcctctattaatccctgtaagaatctcctggaaacctggatgaaagagtttaatgccaaatattggctaaaaagttctgtctttctctctccctattcctcccccattgtttaattgagatatacatgttttaatgggcagtggatcagtattgtttctggggaaatccacaccttaaaaggccaggcttccccagcccaacttacctgtgacccacctacatgtgttcaccttttgggattctgaagaccctgctatctagacctagtctcctgtcataaagacattatttctatagtggtttatgtctctcttactctttgtcccaaatgacagagaccaatctagaaattggaaataaattattaacgtccaactttccaccaaaaaacatataaataggctcttagattttaaaaatattaaatctatagatattttaaccaattaaaacwatttctacatattccattccccacattttccatcgtcataacaatgatgcttctcatgatacgtacatctactccttgaaaaagtattctggtggtggtgt

SEQ ID NO: 473956 - DNA, 604 bp, Homo sapiens
tgcttttgcagaagcactaataaaaacaaatattttgtaccctagaagtcctctattaatccctgtaagaatctcctggaaacctggatgaaagagtttaatgccaaatattggctaaaaagttctgtctttctctctccctattcctcccccattgtttaattgagatatacatgttttaatgggcagtggatcagtattgtttctggggaaatccacaccttaaaaggccaggcttccccagcccaacttacctgtgacccacctacatgtgttcaccttttgggattctgaagaccctgctatctagacctagtctcctgtcataaagacattatttctatagtggtttatgtctctcttactctttgtcccaaatgacagagaccaatctagaaattggaaataaattattaacgtccaactttccaccaaaaaacatataaataggctcttagattttaaaaatattaaatctatagatattttaaccaattaaaacaatttctacatattccattccccacattttccatcgtcataacaatgatgcttctcatgataygtacatctactccttgaaaaagtattctggtggtggtgt

SEQ ID NO: 473957 - DNA, 631 bp, Homo sapiens
gacagagcttttaaaaaaaattagcttgtgccatgtaaaagtgctggtatttgatcttgaccatttttgacctaacaaactggcagtgttttatgctttgacataaaacatggattaatttaataaaaatagttatatataccaggtgcgatggcatgcctgtaagcccagcactttgtgaggccaaggcaggaggattgctcacatccagaagttcaagactagccttgacaatatagcgagacctcgtctctccaaaaaatcagaacctatccaggtatggtggtgtgtgcctgtagtcctagctacttgggaggctaaagtgggaggatcacttgagcccaggaggttgaggctacagtgagctgtgatcrtgccactacactcagcctggacgacagagtgagaccctgtctcaaaaaaataaaaaaataactcaagaagagctatatatatttatatatgtaatatttgacttattacatacaatttgtcttatttcatattttatttctatacatagtatagttcagtatatttaacattaaaaccctactaaacatagcatcattttgatgattgagaaagcacttccttcctcattcactagacattcactgagcacctatta

SEQ ID NO: 473958 - DNA, 556 bp, Homo sapiens
cggggaacttgctctagggcatcttggcaggagggagggcgtctgagggtactggtgcctgcagacttcaagcacggagagacttcttgaagcggtgctgcctggccacttggaaaaaggtagggagaaatccacrtggaagaaagtagggagtaatcagaaagtccaaggtgggatgtgaaattacagagcccttgagagcctgtttggaggttctaacaggggagtgcagctactcatataccctccatcgaagagtgatcctcctctatcagagtaggttgtcctttttgacggagctcacagcttcaggaggaaggggacacctggctagtcagacagatcaaaaacagagctcttaaggttctcaaaagcatctttggatagggggtcctgggcgaccaggtgggcatatggggcaaggcagttacagagagatcgtgcagtttctgaccccaaaatcctctctattgtctttttgtttctggcagagtaaactgttgaatagtagaagcccagtctgtggagatagtttttcctgtggctgagatatcat

SEQ ID NO: 473959 - DNA, 604 bp, Homo sapiens
catttaatgctttatatttctagtactgaactatagattggttgcatactaattcacaggatactcagtattcgctttctttctttcttttttgtttagatacagggtcttgctgygttgcccaggctggtctcaaagtgggctcaagtgatcctcccgccttggtctcccaaagtgctggcattacaggtttaaggcactatgtctggcctcatactttttaaaagatgaaattcttagaagaattttttttttttagatggagtctcgctcttgtttcccaggctgaagtgcagtagtgtgatctcggctcactgcaacctccgcctcccaggttcaggcgattctcttcccttagcctctacaggtgtgcgccaccatacctggctaatttttgtatttttagtagagacggggttttaccacgttggccgggctggtctcaaactcctgacctccggtgatctgcctgcctcggcctctgaaagtgctgggattaccagcatgagccaccatgcctggcccagaagaatttttttaagtgtaatacaataaaaacaattaacatttattaagcacttactcctgcgcagagctttacaca

SEQ ID NO: 473960 - DNA, 522 bp, Homo sapiens
agttaacagaaagaatgaatcagattccatgctagatttttggtccaaacctgttaaatcagagaaaacatactatcaaaatgttttmaagggagctttaccctcatgacatctgttttatggttatgccttattaagactgccacatttcttttgtttacacagtcctggcttttcatattccttacaaaataaaaaataaactataaatagtctaacaatttagatttgaactcagatctggagtataaatcgaaaccatttggaatctaaattatgtaactgcttagcgtgaggaaagattcctataagctcagagtaacagtggactaggagaggaaccgtatacaataagatgaattactgagcacacaactactgttggatggaatggctatgtcattatgcagtgtttactggagtcacaacattatcagacctgtcctaccattcatgctggaatcagacaggcattttcctcaaatttatattaaccaagttattttgtgatgactgcagcag

SEQ ID NO: 473961 - DNA, 517 bp, Homo sapiens
gctcttaccctgctaaccacacacacgccagagacattttgcccctctctgaatctcggattctctagctcctcaggatggaagggtgttacccgaagagggcaaatctctggcagttgtagtaatagattctgaacccttagctattgtactaaycagagcacgctgtattctggaagaaagcagacaaagcagaaaaggagaaaataaaaacaaaaagacaataacgaatcaacaaacatttaaattattttccagcaaccataaaacccttatttttgctacaattgaactgactacaaagtggcattacatgtaaattacatcaacatccttatgatgttggcatctactcctcacctaaaagtcctcaagtcttgtttaaccctgttgtgggtggtagtgggtagcaaaagacaggtctcaagcatattaggataatacgttttctccaaacttcactagaaacataaatgtggcggagagaacttttggtttactatttcacgagttgcag

SEQ ID NO: 473962 - DNA, 628 bp, Homo sapiens
tgcagcctggttctcaacaggccacagacgggtggtctgtggcccatgggttagggacccctgccttacgggctttaacttcagggagttgtcctctctttawagaagactgtaggccagaaggggctaggctgtttttccaacaacatgagactcaggctcattgagtggatacaattcaatttcatgtgtatttattgaggtaggattcagcatcgttggacctttttcaggctttaggattctagtgaacctcaactaattaccaggtggaacttttacttcctaacaaaaatgactagctcttcagacctctggttatgtttctgtcttttccagtttttctctttaatcaataactggagccacattatttttaaatggcctttcctcaatttcaggaatacctggtatggattcttcctttcataatgtagtataggggaaagagccttttatttggagtcccaaggccagggctgtagtcttagctatgaggctggctaactgggtgactttttgcaattcatgtcattttctgggtcttactttcttcatctctgaaatgaagaaactgaatgaggtcaaattttttctaattgtagattgcaattcatacgggtcacaa

SEQ ID NO: 473963 - DNA, 628 bp, Homo sapiens
tgcagcctggttctcaacaggccacagacgggtggtctgtggcccatgggttagggacccctgccttacgggctttaacttcagggagttgtcctctctttatagaagactgtaggccagaaggggctaggctgtttttccaacaacatgagactcaggctcattgagtggatacaattcaatttcatgtgtatttattgaggtaggattcagcatcgttggacctttttcaggctttaggattctagtgaacctcaactaattaccaggtggaacttttacttcctaacaaaaatgactagctcttcagacctctggttatgyttctgtcttttccagtttttctctttaatcaataactggagccacattatttttaaatggcctttcctcaatttcaggaatacctggtatggattcttcctttcataatgtagtataggggaaagagccttttatttggagtcccaaggccagggctgtagtcttagctatgaggctggctaactgggtgactttttgcaattcatgtcattttctgggtcttactttcttcatctctgaaatgaagaaactgaatgaggtcaaattttttctaattgtagattgcaattcatacgggtcacaa

SEQ ID NO: 473964 - DNA, 631 bp, Homo sapiens
gtcattctcacctcatctgtctttcaccctgccttgtggctggttgtatactgcatggagtacaagcatcttgaaggaaggaactgagtcttacatatctaactatctcccttcgagcttaacacagggctttgcacatcacaggtgctctacaaatgtatgttgaatttgttcaagagagtttaaagtaaagagaaaacccacacacrtacagtaactataaaaggttgaatgtgggtaggggctggaggaaggtaggggaaaagaggagaaagtgggctttctttgggagccagggattgatggtggttgaggtgagactgatttctaaattctgaagaaggaaggaagtaggagggatggtgggctgaataaagggttgtattgggtccaacacagaatgactgtaaattttatcagggtagaggttattttatttgtcttgtttgccaagaacaagattatactgtcttatctctgttgccctacagagtacttgaaatacaataggtgctcaataaatcttacactgggattcaatttctctgacttcccagtgagctcagcatgactaactggtgctgaggaaattgagagctctcttgactcaagattaactggaaactgggct

SEQ ID NO: 473965 - DNA, 618 bp, Homo sapiens
tcgaccccaggaggttgaggccacagtgagttgagatcatgccactgtactccagcctgggtgatggagtgagaccctgtctcaaaaaaagggatcggataaggaccaaaaaacagagagatcctgaagggtcaagtactatacagatatttcatattggtgagtgtattcaagtatccatttatttttctcctaacgactgctaacagctaacagctactgatcattttctttgtgccaggaactatattaggcactatacatcaatatcttatttaatcctaataactcaccacacaggtactactattattcccatttttaaggatgaggaaaccaaggcacggagaagttaaataacttaatgacaygcctgtaatcccagcactctgggaggcagaggcaggaggattgcttgagcccaggagttcaagaccagcctggacaacatggcaagacccccatcaccattaaaaaaaaaattaatcagagttagtaacatggcagagctaaagcctgtttgacttagagagcctgagcttagctgccttcctaacctgtaagaataactcgctcaagaagttaaataaatgtttctgttgtgtcacctttagacta

SEQ ID NO: 473966 - DNA, 592 bp, Homo sapiens
cgcacactgcactccagcctgggtgacagagcgagactccgtctcaaaaaacaaacaaacaaacaaacaaaaagctgggtgtggtggtgtgcacctgtaatctcagctactctggagactgaggcaggaggatcgctgaagcctaggagttyggggatgcagtgagctaggatcccaacactgcactccagtctgggcaaaagagcaagacccagactttaaaaaaaaaaaaaaaaaaaaaaagctgtgatccccttaaaagtcctaataggccaccactatctgcccttttggcaagaacttttggtctccctcatgagtggtttttttttgttgttgtttgtttgtttttaaatacggatgtcctagatttttgttgttttaagtgaacaatctctctcttaagtgcagacagccatcacattttccagaaggagaaatggaaacagttggaaaggcaagtcactttgcccagggtttgctgtttttcacaacctcagcaatgaggagctttgcctcaataactcaagacaaaatatattaataactccaaggctcagaatccaaaatcatcagaaatctggagaaggag

SEQ ID NO: 473967 - DNA, 511 bp, Homo sapiens
tgctgtcttggctcctcctgcctacttaggtcttcccttctcagggagcaggagcctgaggtcccaccagcaccagggctgggccacagccagcttagccatggtggaaaatacggccttttcaggacatatatgcctgagcaatttaagagaatacacatacacatacacacacacaygttgtattagtccattctcacactgctataaagaactacctgagactgggtaatttataaataaaagaggtttaattggctcatggttttgcaggctgtacaggaagcatggctggggaggcctcaggaaacttacaatcatggtggaaggtgaagggaaagcaggtacgtcttacatggctggagcagaaggaagagagagaggagtaaggtaccacacacttttaaacaaccagatctcatgagaactcactcactatcatgagaacagcaagggggaagtctgcctccgtgatccaatcacctcccaccagacctcacctccaacactg

SEQ ID NO: 473968 - DNA, 574 bp, Homo sapiens
caaggtacttacacaattaaaatataaagaatttaaagactgtgactgagtggtctttttgaggtgactcttaaatgaagggcagccatatgtactgacaaggtaaaaccagagctagacagtaattgaagtggtaaaaacaggtttctgtttatgactatctcactaggggaaaagagatcacagtgtagamctggattcacttctgaatacagtgtgggcaagtgggaatttatagccaggagcagggtgggggttggcgggtgggataagggagactctagcttaacaggatttttgctgaagacagggcagggtgatcacacatcacctggggatggtggaggatgaggaacccaatcagatatggagagggatcagatatggagggtgggggattctggctaaaccaatttagccgggttcttgctaaacttgtctttacaaggaagtgtacagataaatgtaggagaagattcaggagcctgactaaagtttggtcaaacaaagcatctttgtcagatcaaatctgggaaagcaagaatttaaaggctggccggcgttcgttttgacc

SEQ ID NO: 473969 - DNA, 615 bp, Homo sapiens
gtttgggaacaagataccagagaggcaaggtacttacacaattaaaatataaagaatttaaagactgtgactgagtggtctttttgaggtgactcttaaatgaagggcagccatatgtactgacaaggtaaaaccagagctagacagtaattgaagtggtaaaaacaggtttctgtttatgactatctcactaggggaaaagagatcacagtgtagacctggattcacttctgaatacagtgtgggcaagtgggaatttatagccaggagcagggtgggggttggcgggtgggataagggagactctagcttaacaggatttttgctgaagacagggcagggtgatcacacatcacctggggatggtggaggatgaggaacccaatcagatatggagagggatcagatatggagggtgggggattctggctaaaccaatttagccgggttcttgctaaacttgtctttacaaggaagtgtacagataaatgtaggagaagattcaggagcctgactaaagtttggtcaaacaaagcatctttgtcagatcaaatctgggaaagcaagaatttaaaggctggccggcrttcgttttgacccaaacacataggccat

SEQ ID NO: 473970 - DNA, 625 bp, Homo sapiens
gccttgcttctgtggtctaattggactaattttaggctgttaattagcctctggcaattatttttcactccagaaattccccagttttatttacacagagtgatttagccttttcacagacagagttatttccttatatttggttctgtttaaaaaaacctccagtccccaaagccttccaaaaagctgggccggaagcagagcccaggatcaagtatctgcaacttcagaggcaaggaaggtctgggggctaaaattcacacagtcaacaattttaagcagtttaggccaatgctcacttgttctttctttcccttctttccttcttccctccatcctttccttacctcctttctttctgcttaaaacccctctgttcttaatgtgcttggcttatactccttaatagatactaagcatctattagaagtcaaacattttgggaagagcttaagagaggctatgttctcagtaagatatctataatttaccttcacaaagttcagcatagacagaaratattgagtttgtgctatttggtagaagctctgactccaagggcagcacctcttgccaagaacacaatcagggcatagtcagctccattccaattaggaagttaagg

SEQ ID NO: 473971 - DNA, 604 bp, Homo sapiens
taactgttcatggcttgtaagcggaggctacctgctcagtttgtggacctggtcagacaggaggagctggcaacattccttcctattgtttagcacgttttataaatgaagttaaataaagccccccggagaagatttattgcccacagatcacttcaaatagagagctctgatcttagttaacttatttgttaaaaaagtttttatcttcagatgtttgggcaggcaagtgatttggtctctgtggtgagtgtagggccttcccaccttagctcttagtttggtaggtagctcacagtaaggggttgtacaggctggacagagggaactstgctattttaatgctggagtgagatgtcacatctccacttggctgtaagaacagtccattggttggctgtgtgaaccctcaggagagggaatgatgactcttcatcttctggaaggaaaacctgggaacagcctggtgataacctgttctttgtcactcttctttttgctgcccagtcctccaggcttttaggctctggtgtgcaacccctgctgtggtcatttgagaggagataaaaggaatcttctgagagccagaagttctgtcttcagc

SEQ ID NO: 473972 - DNA, 604 bp, Homo sapiens
taactgttcatggcttgtaagcggaggctacctgctcagtttgtggacctggtcagacaggaggagctggcaacattccttcctattgtttagcacgttttataaatgaagttaaataaagccccccggagaagatttattgcccacagatcacttcaaatagagagctctgatcttagttaacttatttgttaaaaaagtttttatcttcagatgtttgggcaggcaagtgatttggtctctgtggtgagtgtagggccttcccaccttagctcttagtttggtaggtagctcacagtaaggggttgtacaggctggacagagggaactgtgctattttaatgctggagtgagatgtcacatctccacttggctgtaagaacagtccattggttggctgtgtgaaccctcaggagagggaatgatgactcttcatcttctggaaggaaaacctgggamcagcctggtgataacctgttctttgtcactcttctttttgctgcccagtcctccaggcttttaggctctggtgtgcaacccctgctgtggtcatttgagaggagataaaaggaatcttctgagagccagaagttctgtcttcagc

SEQ ID NO: 473973 - DNA, 506 bp, Homo sapiens
tctctcaactccaagggcctccctgagctctgagtcatgcatccttctgatcaaagaagcctttttgatttggacactgcgtcccttttcttctccagactagaaccctagggtatggatgctatgctgcattttacagagttttctctgccctttgcgatgtkgtcatttgaaatggggactctttcttgagtggcgacaagtcttatccgtcctggttaatttccccagctcttgcccctgttttagtctatttcttctttcccagtgctttgtgatcaggacattctagttaggccagaagactgataaaagtgagtttctagatctgtaaaactgagaacctaaacctggaccaagaaggactgtactagtggagttctctgagaggcccatcttgaaataggcttcttctcttagccagcataacaaagcttcacagggaacagtggccatgttatctaggcttttgtgggggcaagtgtcttctccaagtcctcactgct

SEQ ID NO: 473974 - DNA, 506 bp, Homo sapiens
gtgctttttccagtggccatccattcactaatgaaccatatacctagtagctgtgaaaagggaaaaaaaaaacacatattaaagtattataaagtataaaagtataccacaatataaaatttcacataaatatgcactatatgccaaaaagcaaaatgtgtacagccatatgtatgttgttcaatacatacgtacatgttcacataggaacttcctgggactacatcataacatacaccatttaggaagattaataggaaaaaataaggcagcctctgctataaaaggtcccatgacatagataagaggatatcactagcagaaaggtattagtatttgaaagcaaataaacatatgaaatgtgattatgccatttcttcatattcatatgatttaaacaattacatgattcttataataactaatgtttttcgatacscacattctacttcctcgtatacactatttcctatttctaaattcatagaaggtacttagtggaaatg

SEQ ID NO: 473975 - DNA, 579 bp, Homo sapiens
tgcctgttggagatttctacctaagagtcccacacacttcaaattcatataccagcctgaactctccatccttcctcccgyattccttctcccaaagcaatgaatccacaccacccaccatcagccaagtaggaaagtcatccttcccgcatcataaatccaatcagctacattctgtctcctaaacacccttggaccgtgtcctctcctctttactggcactgcctctgacgtgagccagccctgaccaactgacaaattatctgtccccaggtcctcagaaatggctcttcccctggcaggcacccccactgcctgggctgagaaccttcgggcttctccctcctggcttgcacctcgcaaatcggctagagagggcctagtcctcgggctacccgacccataccttggctggattagtcaacacctccttcatgtactcggccacagtgatgggaccagtagactttattttgtacataagatgccgcagcatcggcgtcaccgggttttctgcaggctcattcccggagctgaagtatttccctctccaaataaaaggaatggctgcgaaaaaca

SEQ ID NO: 473976 - DNA, 513 bp, Homo sapiens
tgcaccatttcacattcccaccaacagtgcctaagagtttcaatctccctacatctttgctaacacctgttgttttctgtctttttttcacagtagctatccttatgaatgtgaggagatatctcactgtggttttgatttgcatttccctaatgattagtgatgctsaagtgttgctttgcttcagtgttcttaattggtaaaacaagaagttggcaacttgcttagtctccatttttaaacaaatttatgggttattgatatctgaaaatctgaaaatcaccagcgtactctctatgtcctcttctcatctaaaaattaccccatcaattcactgcagtctggctttggccctcaatcttctcctgacttctctcatcagaattaacaaactaacttgtaattgccaaatagaacggaccttcttcagtctgtatgtaattagtggaaagtgcagagtctctggggccaaacctaaagtcccgcttccttcagcggagtaggatctcaaca

SEQ ID NO: 473977 - DNA, 429 bp, Homo sapiens
gtgtgattaattatgggcaatgaaatttgagaataagtggcatgtgtcacttctgggctgaggcagtaaaaagctgctgtgtsacttttcagtttcttgattttcctcaggtagtgagtgtaagagcaatgtgttgagatagcaaacccacaagatcacagcagcctggatctctgagttactatatggatgatgaagcactacactgttgagtctgacctaaagcaatctttatattgtgagaaatttgtgtgtgttaaaccactgagattttggagtcatatgtcacagaagcataatctagtctatcctgattaacacatgaagatgcaccaagaggtagaggatggcatgaagtgatgaatttccaattaactttctgtagccatatctatgaattctttctaagggtgaaatacttcttttaac

SEQ ID NO: 473978 - DNA, 713 bp, Homo sapiens
aaggaagacaacacgtgcctgtgcasacacgtccagcaaaataatgtgggtggttgctgtgggcacaggggaagctgctgtgtggggagtggttgagctgatgcatggccatgggggccaccctgctggagcactccactggtcaggcatggttgccagtacaggagctatgatgtgggttctcagggcacctgaggctgccttgcaagcaggctgggccaggctggggcctcaggagaggccaggagaacaaggagtgcccaaatcagaccaggctggtctgatgggtaagaccaatctgcaaagttcaggtccgacagttctcctagggctaaagtctcctatgggagctacttgaacctagggggatggccgtctctggctgtgctttgctacagatgcactggcaccaaaccatctgagttccacctcattgctgcccctaccacttctgtaagcagctctccctgccaactcaggtggcggtcgaggggtctcctcctgcagtgattccagagccctgtggtgagagccatttgctccttgccaggagttattgggagccacgaataagtcctggtgtgcagtagccctgtgcagggttcccagcttcctctcccttcagcccagcttctgtgtcttccctctgtccatcctcagggccttccctctgaagatctgttaggagttgtcttggtccctctgtggcagct

SEQ ID NO: 473979 - DNA, 554 bp, Homo sapiens
cttctggtaagttttcctgagttgatgtctgggctttttcctcaaaggagatagatgtgaagctcttaatctggttccttctagcatggggagcagaaagtcagaagccaagatgccctggctgatctgttcttctgtcttgaggaaagagtatacgttaaactatttccatctgatgtaaatctgaaacactctctgcggtaagggaagacaggggaaaaatttcttatcactccaawtgaggaacaaaagaaggtaaaataattacctcagtccaccaaaaggtagagaaatgggtctgggcccacctgaaagtacggtgtgccttgtgttctctctcttcttcccctctattcaagtaagacctggaaactcttaaaaacctccggggaggtaggtaacaaacactttctcttagtaactctctaaggccatcatagttcttaataacccttatgtaaggatgtttcccctctagagcaaacataaatcatttggctgcaggttaattctattttctctcttctctctagtgaggagaaagaacagctgtt

SEQ ID NO: 473980 - DNA, 629 bp, Homo sapiens
tcaagcacttacttttggtaagcaatgtactaggaacttaagatatatattaatttttgtctttacaagtggtaagtgatgtactactctatagtctcaatcttataaatgaaaaaaaccctccgatttgaaaagtaaagaaacttaatccagaacacacatggaagcccagaatttgaaagtggttttggctgcagagggctgtcttctgagctgcctctccatagcctcaggttctgcatcttcaggatgagtgtcttgggtgggagggtgtctatgtagtggtgatcttccatggccagttgattttctcccgcccctactctcctgagcctagccttggcattttcaatagctctctggcatctgggcctgtctctcaaagaccttctggaccacatgtctgaaacggaactcactgattctctagctgccatgtctctactctgtgatccatgtgatgtttaatgggagggagtaccctcgattctgtagtccgaacttaaggctctctaactacctaccttttttcacctgtcatgattatyatccaacctggcagagaagtgacctgtgcaggaggcattacagtctgaccacctgggtttgaaccctgacttccctgttta

SEQ ID NO: 473981 - DNA, 572 bp, Homo sapiens
ctgcttaacttggcactctgtgagggaggggggatctttttgaagccctgacaccattcccctgtccagctcgtcttgcagggcagtgaacaagaggctgagcagaaggtatcagaatctttggaaatgggacccatcagatgtttcacaagtcaaagtattctgatgcatactcaagtttgagagctactggtttatagcagttcagctcctcacaaacacaaatatatgcacatttgtggtattccttcagtgaagatggctctggtcacattgaaacagtgaatatgtgcctttgtgtgtgtgtgcgtgtrtgtgtgtgtgtgtgtctgtgtgtgtgtctggtgtttgggggtagaagtgataaccaggaaatgtcccatgaaatgtctcatgaagcaaaggcaggggtattttctatgaactatctccattaatctgtgggcctgcattcctggaaaatcttcactcaggatccctaaggcttcctagagcaaaggtggcccagcctgggtcttggcatagtatgacctcagggtgtccaggctgaggacaaggtgaatgtcctgcct

SEQ ID NO: 473982 - DNA, 358 bp, Homo sapiens
gctgaatactctggaggatgatcatgggacaggatcttttgaaggttgcctgttcacaggacacaaaataacttataatgattaacatagtacactaatcatatcttcaagcattttataacaaaggtattaaaaaaaaaacacccagacccagcaacaattaaggaataataaaactattacaagattagaatacaaaagtgtgatttgtgatataataaaaaatatrtatttgatcttcactgcagttcctggcacagagcttctaaaaaccctcataattccctgaatgagaaggataagaggagtatcttttgttactcataataagtccttttaaaacatacctcaatttata

SEQ ID NO: 473983 - DNA, 483 bp, Homo sapiens
aacacagaccaacccaaagactacgtataaccagaaggccatagggcaggaactcctgcttgccatcaggtgcttctctttgagggagttcttgaaatggtccacggctcaggtgtgaagagatgagatctatattggacaggttctggagccatcgtggcttagaagcctcattcccctaggagttgatatctcttgtaactccatagacaaagcttccaaggtctcatagggatgtgcccagtttccagaatcatggccctcagggaagccccaagcatggtgtcctatcaggtaattttagttttcaaccagcctaccaattacagtcatagctgtaacttgttactatgacgtttttactcttatcaggttgctacaataaaacagctagacagatacccraagtcaaattctcatgcacagttacaagtagagtgaatttgcattatttttcacaaaaattaaaaactagaactagaa

SEQ ID NO: 473984 - DNA, 586 bp, Homo sapiens
aatcctgccttggaaggggagggcagggacaggaaggaaagagggggaaccttagcagtgatcaggacacactccaggcagaggcttccagcaggccagggaagcagaatctcagtttggacccctggatttggagcatttgaatttttctgactttgggtagggggacatttttgtttgtttttcccttaggctttcaatactctagcctgttttacttgtgcaaaggggcctatgaatgatattcctaaagccaggaagaggtaatcatgttaagcagagtgaaaaaaaacccccagggtttcagggttgttgtktttttttttttaagcagtacctctttaacaagccatcccttcctttcaggaactcccaccccaggtgcctcatcaccccaccccaccccttccagaagggattgagagagataaggtaggtggggtgtcattcctgagctgtccccttagaggcctctgcagggagcctgccttgcagcagcaaagacctcaggccattccccccagcaaggctcagtgtaggctcagaagctcttctagctattctaagcagatgccaaaggatttca

SEQ ID NO: 473985 - DNA, 586 bp, Homo sapiens
aatcctgccttggaaggggagggcagggacaggaaggaaagagggggaaccttagcagtgatcaggacacactccaggcagaggcttccagcaggccagggaagcagaatctcagtttggacccctggatttggagcatttgaatttttctgactttgggtagggggacatttttgtttgtttttcccttaggctttcaatactctagcctgttttacttgtgcaaaggggcctatgaatgatattcctaaagccaggaagaggtaatcatgttaagcagagtgaaaaaaaacccccagggtttcagggttgttgtttttttttttttaagcagtacctctttaacaagccatcccttccyttcaggaactcccaccccaggtgcctcatcaccccaccccaccccttccagaagggattgagagagataaggtaggtggggtgtcattcctgagctgtccccttagaggcctctgcagggagcctgccttgcagcagcaaagacctcaggccattccccccagcaaggctcagtgtaggctcagaagctcttctagctattctaagcagatgccaaaggatttca

SEQ ID NO: 473986 - DNA, 584 bp, Homo sapiens
gccttttaaagagccagcacccccagtgttacatagggcaagggtccctacagaacagtttgaggatacaggaaacctgagtaaaaggccttgcgctggggtcgttgaaggagaccccrcagcccctttaatctgcaaggtctttcccaccaacctcacatgcatctacctctggtcctgctagcatcctttgttcacctcatgaactaggacctaatctcacacatccatgatccccttctgattccagtctcccctcaggaatagggagaaaaacccaagatggcagggaccctttctggagcatccatgtactatttctcatgcactgcctatgtagatgtgtgagacctcagttactgtgctaaggtaagagaggggacctttcaaggtactgggagttcagtcaaagattctgctttgtaaagatagacaaacaaatcaatgcgacagaatggagaatacggaagtagacccccacacatatggacaatcgaatttcaacaaaggtgcaaaggcaattcacggagaaagataactttttcaacaaatggtgctggaacaatcaatttcacaccattata

SEQ ID NO: 473987 - DNA, 505 bp, Homo sapiens
ccaccaagaaatcaaggaaacagctattgggtatgtatccttttttgtctaatagaataaaccatatcctaagccataagataagaggtgggaataaatgctcatttggcaaattaaggttgaaattgttttgtggggttttttttactgggcatttccccccactgtttgggcataagagaaaataggaacactttgcatctaaactggagggtaatcctgcactatccctcccctctccagactggggaagctgtgaacgttcaaaactgaaacaagactcgggagtgctggtgtggaggaggggaaggaggaaagttagtaggcccagagagaggagatggtgggaagcagagggagtatgttaagggtgggaggtctaaaggctcacatgsggaactgctggcctccggaatctccatgtggagacatctcaaaagctgagcagtgaggctcaggccatgatagggtgttaagaacaggatggcaaaaataggagagatgt

SEQ ID NO: 473988 - DNA, 648 bp, Homo sapiens
gtgggctcccaggcaaatccattaaccaattttgacatttctctaatcaataataaaatgaagatgttggactggatttgaagttttcaaactgtgttccaagaacctggaagtttccaagaggtacatcagggattctacaagcatttgatccaatctgttttaastatttaaaaggccattatatactacacctttaatattcctaattcaaatacatctgagactaccaataccttgtgctaattcttcttttccttgacgtcagaataaagcttccctgcctatgcagatttaagaactacccaaaacatgtttttggttaagaaagtgctatttctgagctagttattttttagagagtaaaacccatttgtgtctgctcacatgaaaatgtataatcaagtacattaccagagaaaatattcactgggcccagtgacacaccagaaacagctcagctacatctgcttggaatcagctcttgacaaggcagaactaagttgtaggtgttcttagctaacttttaatatttatacatattatttattttagatgaagtgaaatcatttcccttaaaaaaagaaatggactgctggttgaagaacaggaattctaaaagaaaatatgacgatatctgcaatcaaa

SEQ ID NO: 473989 - DNA, 619 bp, Homo sapiens
aggtggtatccaaggacaacaaaagaccctgcagagaggagataaattgagtccaacccctgtagccaacagttagagaaacagattaattgtatgtattacataaatatcactcaatgtaagttattgtcaaaataaggactgtttttatctaaattcactgtgaaacaaatctattttgaaaacctacaggttatggaaatgacagggaaaagttgtaaataatagatatccctttttcagaactcaataatgagctagtgagactgtcgttatgataatgacttgtaaaatagcacccaataaataaaataccttttgtgattraagggattcttccaagaaggaatcgaaccaagcaagaatattccaacttgctttgtaaggcccagctcaaatgtcaacccctttgtgagattttctctgatctctggagcagaattaataggcctcttctatgagctctgagggcgctcatcagtgggtggtggaattatttaccatggtaaatctctcgaatagttctctttgattacagtacctagcatactactcagcttccttttccttttggagctttaaagaatatgcaaacattaaaagcatcagcagtagtaca

SEQ ID NO: 473990 - DNA, 540 bp, Homo sapiens
attcctgatcactgtataccatattgatgtgtcaactaaatgaataataactggactactcattataccaggaaacattggcccaagctattattctgtttcttgacttctgtttggcttcattagcctcctttgggtgccagataaaatggtcatataaagcatccttatttaataagggcttggcaaaataaaatggttgagctgggcatcaatcggagcagaggaatcaggaaaaggatcagattgtggaggacagtagaactagaaggtacggtaaggatgtagttggggatgatggagccatatcaatttttctcatttctcactctcattatgcattggcttccttcacacagtagctagcagtgtctttacaagctacttgcaactgggggagagagagtattaagagaagcctaacagaggggagggccaagttggtatttaatagattggttttcttctaaattcaatctaattaacaaagcccatttactatggacccccrtggcttttgtacctcttgctatgtatttc

SEQ ID NO: 473991 - DNA, 630 bp, Homo sapiens
tggccattgggattgcaagataattttgaaggacacttctttaggatccagtaatgtcctctgtagagctaatacaggggacaaaatggtcaaagctgggcttttggtttcttttgttttttgcttgtttgtttgtttgtttgagatggagtctcactctgtcaccaaggctggagtgcagtggtgcaatctcggctcactgcaagctccacctcccgagttcatgccattctcctgcctcagcctcccaagtagctgggactacaggtgcccaccaccacgmccagctaattttttttgtatttttagtggacacggggtttcaccgtgttagccatgatggtcttgatctcctgaccttatgatccacccgtctcagcctcccaaagtgctgggattacaggtgtgatggcttttggattttaagattgaagggatgatgatagattggtggaaactgagaagttggagtgggaacttgcttttcacagaagctgcatcaaattctgaactgagggctggacacattagtgaggatgtcttgtagtgcctacagctatgcagtctggaacgtggaattacagatttaaaatttatcagcatagagtggatacaactgtcagtggccca

SEQ ID NO: 473992 - DNA, 591 bp, Homo sapiens
ggctcatgtaccctctcccttcccctcaaaatctccccaaaggaaaatggagaagagctagctggattggggtggggaaatggcaaatatagcagccatcccagaattctgttaagcattgggtttgttgggagatgggggaagtggaattggccatccatttctaactcaggaggcaaatctcatgcctgtttccattctcacccacaaatgctgtttacaccatgaagagataattgtacttgtgcgcaaggagcaaataacctacatatttacccagaggggggtgattaaataatttgtgaagtcttgatgttacgtggcaattaaacagtgataaatctgtttgtactgatataaaaatatattttagacatattgtttagtgaaagggccacaggataaaattcaaataggatgtttctgtttacacaaaaaagccaagctatttatatatttaaatgtagaagtagagaagtatatatatgcttgtatttaaatatacatgtatccatagacatgtktatacatttaaagtatatatctgtattttaaaagcagaagtagataagtatatatataaatacttta

SEQ ID NO: 473993 - DNA, 446 bp, Homo sapiens
ttacccagtgctatcacacttggcaagtttattcatgcccatagcatmgactgccatctgtaattgaactgcaaatttatattctcagcccaactgcttagttgatgccttctttgacgtctaaaagttatctcacatagcatgtttaaatcaaacccataatatttctgcttctctcctctcccaagcttggtatcccaagtgttctttgtttcaataaatggtggcatcattcaactagttacataagaaaagccaaattcacccttgaagcctcccctttccttacagccagtgccatcaccaaacaaaagtttctcatatagtttctaaagacttctaaaatccatccatttcctacccatccacacccaccaatttagtccaagaccccatctcttcttccttgaatgataacaattgtcttctaatttagcttcccttca

SEQ ID NO: 473994 - DNA, 554 bp, Homo sapiens
tgtaagccttgctctcttagctagattttctccatcagtcaacttggagcagaatgagtgtgatctactgctaatctcccctgtggaattctcaacaaactccaggctgcacaggttatagacactaatgaaacgttatgggtgagcattgaggacaaaggctttaacatctgtgaagtagacaggagtctgcagcccctgagcccacccatctgcgtagactgcaggagctccctgccttgtatttggttgggtgctgttttaagtctttgtggggttacaactagcacattctgtttgatttgtaacacttcagcaaccaaccatataggctgtttggcagatagtcatttataaataagaataatatatattattcttattaagcataagaatgctgttaggcattttaaacggaaaagtttcatggctattccattgataactggatttacctgtggggtaacaagacaaagctgagtgtttttgccttrgaatcctggggtattagaattgatctcgtttaagaggctctctctttctacatgtgagga

SEQ ID NO: 473995 - DNA, 600 bp, Homo sapiens
gtacaaaaggggacatgtacaaagtcaagtcctcttcatctgtgaagcaatcagattctgcagtgctcttytgggcactggggagagcagttgattgtaaaactcatgaaatccctctcctttcctctggataccagcctttggcctgtgctgctctttgaacatcttggagtggttgggttaacaagtttgaaaagaagagctatactgaagtggaagcagggcccctctgctctccctaaacatcagccagtcccagtggaggctccttagaactccccatgcaactcagagtccagtttgaaaatgccctggtagcatgaaagggtgccagatttggatttggaagatctggatttaaatcctggcatcaccagttgtgtgatggataaatttaattgtgtgtattggggtaaatttcttgatcactttgtgttgtattcttaatataagattggatatgataattgcactttgtattgtacagggctattgtgcaaatagagagcagatgtgtaaacgacactttggtacatatttagagctttgcaaatatctggattttgtttgttatcatgaatgcatagctgtaaaactggt

SEQ ID NO: 473996 - DNA, 488 bp, Homo sapiens
ctgtagctgcacatttgcatctggactcacctcacccacactaaatstgctgcaccatcaagctcttttgaagtcagagttctttgggtgttggtactcaaatccaagtcactggaataatttaaacataactcaaaaaacatactgttttacatgttttcctgtagcccatactagggatcatacgtaattcatatgttattctatgataagtggaaatagactgttgctcatttctataagtgaaacacctaattaacaaagtgattaattctctttcctatactgattatcaatgtgacattatgtttcagagaacattaggcttcaattgatttctctttgcatgggctactgtgtatttattttcaacatattggggttaaacatttaaaaatgtatttttaaactgtgaacattcaataacctaacagatgttgttcaaatatatggagtgaagagatattgattaaagaaaaggcaccaag

SEQ ID NO: 473997 - DNA, 488 bp, Homo sapiens
ctgtagctgcacatttgcatctggactcacctcacccacactaaatctgctgcaccatcaagctcttttgaagtcagagttctttgggtgttggtactcaaatccaagtcactggaataatttaaacataactcaaaaaacatactgttttacatgttttcctgtagcccatactagggatcatacgtaattcatatgttattctatgataagtggaaatagactgttgctcatttctataagtgaaacacctaattaacaaagtgattaattctctttcctatactgattatcaatgtgacattatgtttcagagaacattaggcttcaattgatttctctttgcatgggctactgtgtatttattttcaacatattggggttaaacatttaaaaatgtatttttaaactgtgaacattcaataacctaacagatgttgttcaaatatatggagtgaagagatatkgattaaagaaaaggcaccaag

SEQ ID NO: 473998 - DNA, 463 bp, Homo sapiens
tgaaggggagtcacctcctgcttctcctggctcacagaataaccagtgtccccacagtgggctctctgtgaactgctggctgtggayagagttgcaggatgagttctctctttgtgcactctttgctgaccatctaagtggtgtgtctgactagtttggcatgttgcttgttaaaattcattcttttaaagccgagtatccacttagttcctctactctgaactttcatcattcattattaacaatgaaagccaaagtgcatgaaacaagttcagccctatctgtttctggcatgaaagtgatgtcttggcatattagtgggacacagctctatcttacataaaatgctgcctgggcccacaacaaaggcgctgtctctcagcgcctaataggatcacctacttcaaatgtgaaacttccttctttgaaatatttgttgagatttcataaacctatgaagatt

SEQ ID NO: 473999 - DNA, 431 bp, Homo sapiens
atcagttttacaagtaatttgttttctaatcaacaatgagtaatggatctcttttcatgtaagtatataaacttttaatgtgtacataacatttcatattgtgaatataccattgatttaaccatttctaatagttgcaaatataggttttctccattttttgatattatcaaaaacactgcaataaacacacttgcacattactctttatttacttgtatatgtaaggatgtatgcctagasctggtgctgatgattaaaagaatactttaaaatttgatagatctacaaaatctccctccagagcttctgtttatttctaccaccagtgtatgaaagatattatttcttctcactctctaccttagtcattataaaatctatttgaaatattattttcatttttacagactaaaaacattctgttgtca

SEQ ID NO: 474000 - DNA, 534 bp, Homo sapiens
aaaaggccatcatttgactgtattttaaacaactgaggttgttaaatgaagagcatcttcagaagtaagatgttaatatatattcattagggcggggcacggtggctcatgcctgtaatcccagcactttgggaggctgaggtgggcggatcacgaggtcargagttcgaaaccagcctggccaacgtggtgaaaacccgacactactaaaaatacaaaaattagccaggtgtggtggcaggcacctgtaatcccagctacttgggaggccgaggccagagaatcgcttgaaaccagaaggcggaggttgcagtgagctgagatcacgccactgcgctccagcctgggcaacaagagcaaaactctgtctcaaaaaaaaaaaaacaaaacaaaacatatatatgtatgtatgtatatatatattcattgggcaaataagattaaagaattacagctttttaaagagaaatcgcctaacattgttatgatttacaggttcacttatgtagttcccatttgttacttcgacgagca

SEQ ID NO: 474001 - DNA, 645 bp, Homo sapiens
gctgaaaatagtttgttaactacaagcaatttgctgggtagacaaaatctttcccacataggatttctaaggaaaaagaaaatgttaaatgtggcatttgtgtgcccagaagtttgaaacttgtggtttatagagtccacatacttcttgtggytgggactggagtgaaaaatacaaaaactagagcaaagaaaaaacttttagttttccctaacccaacctaaatgaaatcttttggcaaatctcacttgccagtcagactatgaagccagcagcagggtggagagcggaatggaagctatgctgaaaaaattcatcaactttgcaggtcagtcacactcttcccatgcaaagatctccccactccaatgttttttcctacttgatcatttttctctagaactagccctgtttaccttcaactctgggtgaagtacctgaggtgacaaaactacacacctgtgaagcttattggctacactatccacccttgtcctctgaaagcaaattaaagggaaatgatcattttgaccttgcaagaagcagtttgagaggcagatgcaattaggactgagatcaagagaacaagtagccactctgcttttctattttggcctagactgcatctgatttatccccggggtt

SEQ ID NO: 474002 - DNA, 445 bp, Homo sapiens
atcatgactcactgcagcctcgatcacctgggctcaagcaatcctcccacctcagcctcctgagtatctgagaccacaggtgtgcaccaccacatccggctatttttttttttttatttttgaagagacagggtctcrctttgttgcccaagctggtcttgaactcctggctcttaagcgatcctcctgcctgggcctcccaaagtgctgggattgcaggcgtgagccaccttcctggcccacctttagagcagtcctctcctttctagctctaggatcttcagggattgcaacattcaactcttcacctagatgaaacattcgtgcacataattctcctcccattttcacctggtgaaaacgtaggatggacagatcccagcccttgatggagacccatgctctgctaggtctggctttatcattagctaggaaatgtccattt

SEQ ID NO: 474003 - DNA, 390 bp, Homo sapiens
  misc_feature (1)...(390): n = A,T,C or G
taccagctggcggccctcttcagcmgaccatccgaagggcacacaccgagagccagcccggctagctgctcgcgcggagctgggggctccgagtcgggaacgcagcgtcgccgtggagactgcacggcgcgtggaggaagctcgggcagcagcgagggtgggggctgggggaattgggcgacggcgggggaggtggcgggggcgggggcgggggcaggggcagccctgggaaccacggagaggcagggtggaggcgggcccaggcgtnaggcggtggagggcgcgggacggagcgggcgcgcgaggagggccggggcgggctgggaggcgggtccggggggcggggcggggcgggcggccgagctgagggacagccccgcggttgtgggt

SEQ ID NO: 474004 - DNA, 560 bp, Homo sapiens
gaatgtgtgtggaagtaatgcgtctccttcaggctgaggcagttaagagacaaggactattgggggccatctctgaggctagctatcacagagaccataagatattcagcaacgtgatagactcagtttgcctgtgtaatttatagaggacatgaagacaaatttcaggttgctgttttgttgtataattccctgaaattatcttgtttattgggtctttcctgccttactggaatatcagcttcctgagagtgtaaagctcgtgtctgttctgctgtctgytgtttccctggcgcctgacacagtgactgccacatgagaagagcccctaaaatagtgaaataaatgaagaatcacatgagtgaaatcctcttggtacctgagtatgggcaaagctggaaaacagtgatggagttttccatagcagcatcctaagaagacacccttaagctagtgagaacgcattttgaggacatcagcaaacacagcctaagaggggcttaaatggtgatatcacctgggcttgctttctcaggtactcttttaaaaggatgtaattc

SEQ ID NO: 474005 - DNA, 575 bp, Homo sapiens
agctggtaggcagcccaggaaaggtgggctgctctgcttcttgtgatggtctgaggacccttatgccttctgttttgttgctttgccatcctctcgggtgttgtcctatccacatgattgagttaaatgcccaacattatgtccgcattccagcctcaagaaagaggaaagaagaaagggagagcatgcaactttcttttaaggatgtgacctagaagtgacatacatcacttaggctcacatgccattggtgggaacttagtcatatggccacamctagttgcaagtgaggctgggatatgtcatctctagatggacaatcatgtacctcccaaaaacttggggattactattaccaaaaggaagaaagaaaatatgaatgggtgggattggcagtctctcatcagtaggaaagcatcatgactgatgctgagaaactctttgcccaagtctttatggcctatatatgtaactccatattactgacagtgtgcatcacagggtgtggtaggtggcttctaaaatggcctcaaatgattcctgtctcctggtactcatgcccttgtgtaatccct

SEQ ID NO: 474006 - DNA, 507 bp, Homo sapiens
atattgaataaatatttgtggaatacatgaatctaaaagtgaatggaatgataaagaggtaagatatcaggtgagggagtaagattttacagtacggtgactttactagaatgcaaactctaygagggctggaccttgatgagtattggttgcttcatctgtacaataaagaggcttgatttggtgaactctgaaatcattttggttataaacctcaatgactctgattctgaactgtcacagaaagatatgagcccagaataaaatatctagaacatatatatttaactcaatttttgtgacttcagttcagaatttaattaattttagttgggaatttagcaaacccacgtgatcatttagtgtctttattcttatattttgacagggaaagggtcatgacatctactacagcatttggcacagacccaggtaaataagataaaacttctaagtcacttctcctcttcgagatcatggaatatattgtgtcagacctcagcaatc

SEQ ID NO: 474007 - DNA, 507 bp, Homo sapiens
atattgaataaatatttgtggaatacatgaatctaaaagtgaatggaatgataaagaggtaagatatcaggtgagggagtaagattttacagtacggtgactttactagaatgcaaactctatgagggctggaccttgatgagtattggttgcttcatctgtacaataaagaggcttgatttggtgaactctgaaatcattttggttataaacctcaatgactctgattctgaactgtcacagaaagatatgagcccagaataaaatatctagaacatatatatttaactcaatttttgtgacttcagttcagaatttaattaattttagttgggaatttagcaaacccacgtgatcatttagtgtctttattcttatattttgacagggaaaggrtcatgacatctactacagcatttggcacagacccaggtaaataagataaaacttctaagtcacttctcctcttcgagatcatggaatatattgtgtcagacctcagcaatc

SEQ ID NO: 474008 - DNA, 499 bp, Homo sapiens
ccgctattataccgccgcccctcctccgtcccggccgtccctcccccgccaccgcaccccacgcacgcacccaccggccgagggaaacttttggtgcctgcgctrcctgaacgtggggcccgcgagcgcttcttgctaaactacttggtgcactgagacgccatccagccttagaggaagcaggcgcgaagtgggagggggaggcatccgacgggcccctcccggctccgtggtcagtaagagtcgggaaacacccacaaccccgccggccggccgctctccctcccatcttttaagctctcttgtcctcactgccttcgcgctcctccctggcccgccccaggctgaaatcagcaggagggcccagcagggtgagctccggtcctgttctcggccagccgggcacctccgaacaatcccggatccacgcgtccctccagcaaaggccacaccggattaggtgtgaagttggcgtgggcacccctaggcctggctccag

SEQ ID NO: 474009 - DNA, 415 bp, Homo sapiens
ggactgaattcagcgtgggctgttgaatctaagattttggctggctgctcgtgaagaaacgcctgcagaaagctgtaaatgccggcagyggcagtgagtgtgatggacaaggctaaagagaagactcatgaactttcggtaagtagggagggctgaaaaagtgagctcataagagtgagtggagatcaaacaggtagagaaaagctacaacaggatttggagagaatgcacaaatataagatgaacagaggaagagaagccatcaaagcagcccaagaaaataacggtgagagaggcaggagaaaacacagagagtaggggtgggaggatgagcaagaccaatgtgcttgcccaggctggggaaggcggtggagagggccgcgtggtgagcaacaggaagagtctttttgctgga

SEQ ID NO: 474010 - DNA, 530 bp, Homo sapiens
tctcagcagtaacctcttctggccacagactctactttggctctgacccagaaaattagaaagtcagtgaacaggccgggtgcaatggctcacgcctgtaatcccagcacttgggaggccgaggcgggtggatctcctgaggtcaggagtttgagaccagcctggccaacatggtgrcaccccgtctctacgaaaagtacaaaaattagctgggcatggtggcaggcacctgtaatcccagctactcaggaggctgaggcaggagaatcgcttgaaaccaggaggcagaggttgcagtgagccgagatcgcgccactgcactccagtctgggcaacaaagcgagactctgtctcaaaaaaaagaaaaaaaaaaaaagtcagggaacagcaggcatctatgtttatctgataaattagggaatgagctcctttctacaaaggagaaactcaagtaactggtcccaagagggctcctcagtccttttgggaaggttgtctaaggtactgactgtgctggcctcccctccctt

SEQ ID NO: 474011 - DNA, 680 bp, Homo sapiens
cctctcaatcagaagtgggtcttggcaccaatcagcaacctctcctccagcacacaaaagtactgccatttgccttgcgagcagaacataaaacatataccttagctgttgaatttgaacattaagcagaatcactrcagatcacattttgttgggttacttcaatacccacctggtctagttcaaaatatctgtctgtacatccagtttatacatattccgcaggtatattgaacaatatgccatctatcgtcccattatttatttttacatggcagttcttgttgcccaagcaaacattaagattataaagagctctcttgaaggaaattttcaggtgaaggtacgttaatgagaaaccttaaaagttaaacaaatctagttcttttttactgaactggtgggataaaagcagaatggctattctgaagagcagcttcatttgtttcctcccgggaaaagaccaaattttctggactgctttatttaaaaacaaagtcaattaaaaaaaaataaaatgtacaccttgggatattataaaacttgaaataatggcaggtagtatggaatggaaagcagaggtttttgttgttttttttttccaaaaaaaggaaactatagcagattttcagggaaaagcaaacaaaacataccagaacataccagaacactacgcagac

SEQ ID NO: 474012 - DNA, 680 bp, Homo sapiens
cctctcaatcagaagtgggtcttggcaccaatcagcaacctctcctccagcacacaaaagtactgccatttgccttgcgagcagaacataaaacatataccttagctgttgaatttgaacattaagcagaatcactgyagatcacattttgttgggttacttcaatacccacctggtctagttcaaaatatctgtctgtacatccagtttatacatattccgcaggtatattgaacaatatgccatctatcgtcccattatttatttttacatggcagttcttgttgcccaagcaaacattaagattataaagagctctcttgaaggaaattttcaggtgaaggtacgttaatgagaaaccttaaaagttaaacaaatctagttcttttttactgaactggtgggataaaagcagaatggctattctgaagagcagcttcatttgtttcctcccgggaaaagaccaaattttctggactgctttatttaaaaacaaagtcaattaaaaaaaaataaaatgtacaccttgggatattataaaacttgaaataatggcaggtagtatggaatggaaagcagaggtttttgttgttttttttttccaaaaaaaggaaactatagcagattttcagggaaaagcaaacaaaacataccagaacataccagaacactacgcagac

SEQ ID NO: 474013 - DNA, 587 bp, Homo sapiens
atatgaaatgacagacatcagattaaaaaacatgggtcccagtgttgccacaatagcagacctccctaggggtcaaaataaatgaaaagagaggaagagtatagtctcattaaggcagcaaaatatagaaaatagacatgaatgtgcatctgtggtgaaatacagtactgayggaaattttagtcttacttaaattttgcaagtcagcctgtagcaattgttacaagggaaggcaaagctaccatgagtggcaaacacttgacatctgtgtcatcactctcccctcctataaacatggtaaccattgctaattcatagctacacttcccttctttaatcttaacaagtcctcagaggccttatcagctcagcatttttggtagccactttgagtccatttgagttggcatgtgtaatgcgacctatctgccactcttgaatttaatttgtattgtaataggaagtgagagccacatttccaggacaagctataccatacaaataacaagtttagatgaaagaaggttcctgatttccaaaccgaatttagcacccacctagagaggagaagaatatgaagtaatgcc

SEQ ID NO: 474014 - DNA, 292 bp, Homo sapiens
atggtaaccattgctaattcatagctacacttcccttctttaatcttaacaagtcctcagaggccttatcagctcagcatttttggtagccactttgagtccatttgagttggcatgtgtaatgcgacctatctgccactcttgaatttaatttgtattgtaataggaagtgagagccacatttccaggacaagytataccatacaaataacaagtttagatgaaagaaggttcctgatttccaaaccgaatttagcacccacctagagaggagaagaatatgaagtaatgc

SEQ ID NO: 474015 - DNA, 629 bp, Homo sapiens
tgttaaaaatctattgtttgttggatttctattctcattctaaatagtcattctaattattaagttattatttataattttaggtgcttttatttttttaaaaaagaagactccctaaattgtaaagtttcagaatcacagaaatttaaatccattctaacaggagttttttcctctctctttctttctctctctctctcacacacacatatagtttagtgcactygacctctgtgctgtttgcaatatatacaatgtatataatgtatatattgcagggatgtaaaatatatatatatacacatataatatgctgcaaagaaggactatatatagattaataggtatctatgtgatatatcatatctacatatagatatctagatgtagatagatatagttagatacagatatacacacagaagcactatatatatatgtatatgtgtgtgtgtatatatatatatatatatatatatatatacacagtcaaatctggcttcttgatattttagtttagaaagggacatttcaaaactctttctgatgtaatagtcacttattgggggaagaggaggtggtgtctgagttgataagagaaaattgcactcttccatgagcttccattt

SEQ ID NO: 474016 - DNA, 551 bp, Homo sapiens
atgaaggtacgtaccaggatttgttcattttcccaggaatccttctacctgcctaaacatcttactcctcactctattttcatctctttatcagaatcaatggttcttaactagggagttggattgctaaatatccagcacaaaattatgtgtgcacatctgcatatgtgtatatgcatgtgtgtgcacatgtatgtgtacatgtaagtgtgcatgcattcatagtgtgaagagaggatccaaaggaatctttgagccctgcctcccccaatcytccaaaagttaagaactttgatactttattttattatgatataaaagataaatttatttttataaatacaaggcatgaaaaagataaaaaccatttaaaatgtttccacagtcttcaaagcactcatctacccataggtgaggctttaaggagattcttgtaatcaaaagtggaatagtgacctgaacattgtatcaggatagcaaatctacactcttgataactgcacagaactgtgataagctgtgtcttacattccaggaaatgtgcaatactc

SEQ ID NO: 474017 - DNA, 551 bp, Homo sapiens
atgaaggtacgtaccaggatttgttcattttcccaggaatccttctacctgcctaaacatcttactcctcactctattttcatctctttatcagaatcaatggttcttaactagggagttggattgctaaatatccagcacaaaattatgtgtgcacatctgcatatgtgtatatgcatgtgtgtgcacatgtatgtgtacatgtaagtgtgcatgcattcatagtgtgaagagaggatccaaaggaatctttgagccctgcctcccccaatcttccaaaagttaagaactttgatactttattttattatgatataaaagayaaatttatttttataaatacaaggcatgaaaaagataaaaaccatttaaaatgtttccacagtcttcaaagcactcatctacccataggtgaggctttaaggagattcttgtaatcaaaagtggaatagtgacctgaacattgtatcaggatagcaaatctacactcttgataactgcacagaactgtgataagctgtgtcttacattccaggaaatgtgcaatactc

SEQ ID NO: 474018 - DNA, 528 bp, Homo sapiens
aatatcttaaacaggaaagagatttgcctgtatcatgcaataaaagcacgggggttggtagaaaaagggcaggatagtaggggctcaatgatgtgattaagactccatctatttccccaatatttccccctctgcacgagcccttcttcaacatgtgtataatctcatagtcacaaaatggatgctgcacctccacgctyatgttcatgttacatgcagaatgatgcagaaaaagactacaatcctcttatcaagtggtggaatctatttccttacccattgagtctggtttggccttgtgacttgccacggccaacagaatgtgaaggaatcaaagatattccagccccaagaagtctttcatgcttttaaaatttgctttgatgccaccaaaacagcctgctagaggatgagaaaccatgtgaggcagagactgactattccagatgagtctacattagactggtgacccctcaactgacccacatctcaccacaacacatgtgtgagccagccaaaactgtaaga

SEQ ID NO: 474019 - DNA, 604 bp, Homo sapiens
cctacaatgtctgttctgatttaacatcttcattcataagccagagtagggaacagacagcgcactgatataattcacagatggtactcatttgggagatattatgaatactagagatatcagagaaatgatacaaaaggacctagagaaggaataacaatgagacttgacttgactttgaaaatgcaaagtgatatgtcagcgtgaaaaaaggaaatcttcaacatttmaacagcagggagaaactggaagtcaatgtttaaagtgacatcaagttaaataatggaatgaaatttaaaattggaaaattttaaatatagcagtaaaattactagtatatcttttaatcgtctttaattactgaaagcttaattaggtatccttccgatgtgcccctatatccctatcttgtcacattgtttttatacattacatttgatttgtttatccttccctccagactttgagcttcttgaacatagagactgggttacattcatcattgtaaatctggggtccacctcaatgacgagcacatgagaggcattggataaatacttcctgaaggtaaaaatgaactacttccaatagcatctctttgtac

SEQ ID NO: 474020 - DNA, 528 bp, Homo sapiens
ctgcaagtttttttctggtcaaagcaaactgaattaaaaagcagtggttgaagtggcaaagatgcatgaatcagagagcttggtggggaagagatgtctgcacttgtgaagtaggttcttagaggtaaaatggggaaagggaagggtctctcagtgctactcccagcacatctactttgctccaaagcaaaagtcctgagaaactgggtaaaccacatttctggagcccaactcttaatgtcattgttaccatatgttcaaatgggttttattttcatcatgactgatttccagtcagcaaggacttagctttaattcattctccatcaccatttagaatcactgatctgatcctgtgtacctacaacatctcaatggcttccaaggctcttaaaataaagacctgaatcctcaccatggggaccttacttcacctctgcagcctcatctcaagccactctctggttctctgctccagccacaaaggctttttccaagttcctyaaaagcagagtgcctcacctcttc

SEQ ID NO: 474021 - DNA, 554 bp, Homo sapiens
gtctcacagtgcggcaagagctcctgcagttgttattaaggatggagctttaaattacttacttccactttatgtgaagtggctttccccggaaggaatgaacaaaactgaggacgcctaggggagccaattattgtttgaggctttgaagtgtgcacgtgtgcagagggacggtgtattagggttctctagagggacaggattaataggatagatgtatatataaagggagtttattgaagagtattgactcacactatcacaaggtgaagtcccacgataggctgtctgcaagctgagaagcaagaaagccagtctgagtcccaaaacctcaaaagtaggaaagcccacagtgcagccttcagtcagcggtcaaaggctcgagagcccctggcaaaccgctagtgtaggtccaaaagtccaaaagctgaagaacttggagtccgatgttcgaaggcaggaagcatccagcaggggagaaagatgcagkctggaagactcagccagtgtagtccttccacgttcctctgcctgcttttatcctagccgtgggc

SEQ ID NO: 474022 - DNA, 484 bp, Homo sapiens
tgtcctccatggctcccagaacagtgaattctcctcaagtggcaagtgctgaaataacggaaggaacaaagtttaattgcaatgcagaggaggagtttttatttctgcctcggagacttcctggaggaagtggcacttgagttgtcttttttctttcttcttttgagacaggttcttgctctgttgcccaggctggactgcagtggcaccagcatggctcactgcagcctcgaccccctaggctcaagtgatcctcctgcttcagcctcctgagtagctgggaccacaggtgcgtgctaccacacccagcctgagttgtcttttttacctttaagaatgacaaaatcrttcatgcttattgtgataaatctaaataaggcagaagagtgtaaaggaaacacaaatcttctccttccttgatgtcagttctacctctggcatttatccttttggagtactttctacatttatgtatacacatatc

SEQ ID NO: 474023 - DNA, 592 bp, Homo sapiens
gttcactaaaaaggaaatgcagacacatattcctcagggatgttagcttaatccattyggcagtagaatttcattttaaaatcaaagaggcaggttctgtctttgatgcacccacacacctctcattagagttaatgggaatatgctcccgcatcaggagaaaatataactgtaatggttcccagtgaccattcacagtggtgtggcttaataaccaaagtggcttttagtattctggggaatagtttttccctatcttttgaagattcttttccttgtttttataaatccttttttgtctttgagatatgaagtacagattggtctttgtgtcagaatgaaccttctatggcaattatattgtcatgtaccaaatccctacttcaatttttaaaaattgtatttatttagaatttatttgtatgatttgacacttttattaagagcaatttcaaattaaagaatatgcttcatctcttttttatttcatgattcctttgtttcttctgctcatgtcattttcatttaatataagattttttttaagaagaaaatataagaaaacaatactggttagataaacattagcagt

SEQ ID NO: 474024 - DNA, 565 bp, Homo sapiens
tacccgcagaggtggtttaactcctcaaaggtctaagctccattttcttttcttttcttttcttttttttttgaggcagagtctcactctgtcaccgaggctggagtgcaatggcaagatctcagctcactgcaacctctgcctcccaggttcaagagagtctcctgcctcagcctcccaagtagctgggactataggcatgtgctatgatgcctggctattttttgtatttttagtagagatggggtttcaccatgttggccaggctggtctcgaacttctgacctcaagtcatctgcccaccttggcctcccaaagtgttgggattacaggtgggagccactgcgcctggcctcattttctttttttttaaaatgtatcccccaattttgtatacatatataawatatatattttatgaatatatttataaatgtatcatatacaatataaacatataagtatatataatatataaatataatataaacatacataactactctatggcaatatgtaactataaatgcaagcaaatatcaatcagacctttcccgtagaactc

SEQ ID NO: 474025 - DNA, 565 bp, Homo sapiens
tacccgcagaggtggtttaactcctcaaaggtctaagctccattttcttttcttttcttttcttttttttttgaggcagagtctcactctgtcaccgaggctggagtgcaatggcaagatctcagctcactgcaacctctgcctcccaggttcaagagagtctcctgcctcagcctcccaagtagctgggactataggcatgtgctatgatgcctggctattttttgtatttttagtagagatggggtttcaccatgttggccaggctggtctcgaacttctgacctcaagtcatctgcccaccttggcctcccaaagtgttgggattacaggtgggagccactgcgcctggcctcattttctttttttttaaaatgtatcccccaattttgtatacatatataaaatatatrttttatgaatatatttataaatgtatcatatacaatataaacatataagtatatataatatataaatataatataaacatacataactactctatggcaatatgtaactataaatgcaagcaaatatcaatcagacctttcccgtagaactc

SEQ ID NO: 474026 - DNA, 610 bp, Homo sapiens
ggagttctaaaatcagatggatgtgttttcaaatcctgatatgtcccagttgtacggcccttttgcctttctgggcctcagattaccctctgtgaacgaggttgatagcatctaagagatggggtgtggatgcaccaggctgtgtgcagcaagcattaatgttttccattttgacgaaatcccacatgagttttgaatttcagccctgagaatgaatcctccaggagcgctccaattcaggagtattatcagttcattcgttcattcagcatctacttggcaccaagcaccatgctaggcaytagggattcagcagggaactaaacaaaaagcccagtcctcctggaacataccttctgctggcagtgctgagaatttaataagacagtgtcagtgatggccccggcaagaagtgcctaggcccctaaactgtgctccatcagagtgggatccagggacggttgggtccaagattcattccgggctttgagggacttctagtctgtctggagtggcaaaaggagcccagatgggaggaaagcagcatgtacctggcctggcctcacctgcttctcgtcatcacagtggctgccccttctccgttcaagca

SEQ ID NO: 474027 - DNA, 566 bp, Homo sapiens
aggacagcagtctccctttcattttttcatgtctctctccctactctgcccaaattggagaaattgagaacggtaaggaccatacactgtgtagcctggcagttaaaaaccagacttcagaggcccagcgtctgcctccactgcgtcttagtgcaccggctcctctttccagcctgggctgtcctcatagagcacagcaagtgtgggccctgcagtgacatccccgcttctgccctcttatttcagccacagccacagcagacacttccgtacaagatcacctcgggcttgcagcctcccacctaccaggtgcaytgcaggacattctgctccccgccccaagaaattttctggcatgaaaggggcctcttagaaccttctgtaaatgcagcacagaagtgtagggctaacactcctgggggctgccttcaatcaatgggggcaaaagctggcagataaccctccagcctcccatccttcatgtaggcaagtctgggagacatctcgtgcacttttctgagaccctaggggaatcaaggccctgctgcctccagccacaatctcag

SEQ ID NO: 474028 - DNA, 580 bp, Homo sapiens
ccctttaaaaatatatgctacaaagctgggtgtagtggctcacataggtaatcccagcacttcgagaggccaaagtgggagaattgcttgagcccaggagttagagaccaacctgggcaacatagcaagactctaactctacaataaatttaaaacgtagctggccgtggtggcatgcacttgtaggtacttgggaggctaaggcaggagaattgcttgagcccaagaagtcaaggttgcagtgagccatgttcrtactactggactccagcctcagcaacagggtgagaccttgtctcagagaagaaatacataatacatgctactataggagacagcagctatgggagaatgcacccaagacattcctccccatcatcttccttctcttaccactgcgaccagtgtgattctggcatcaaacctctctcctgggccactttataacctcctatttcacctccctacatctttagagattgattctcttatgtccactaaatatttaagacttctttgcttaccgtatttaggccctagccaatattcaaggctcttctttcttgaccctctagctaaa

SEQ ID NO: 474029 - DNA, 580 bp, Homo sapiens
ccctttaaaaatatatgctacaaagctgggtgtagtggctcacataggtaatcccagcacttcgagaggccaaagtgggagaattgcttgagcccaggagttagagaccaacctgggcaacatagcaagactctaactctacaataaatttaaaacgtagctggccgtggtggcatgcacttgtaggtacttgggaggctaaggcaggagaattgcttgagcccaagaagtcaaggttgcagtgagccatgttcgtactactggactccagcctcrgcaacagggtgagaccttgtctcagagaagaaatacataatacatgctactataggagacagcagctatgggagaatgcacccaagacattcctccccatcatcttccttctcttaccactgcgaccagtgtgattctggcatcaaacctctctcctgggccactttataacctcctatttcacctccctacatctttagagattgattctcttatgtccactaaatatttaagacttctttgcttaccgtatttaggccctagccaatattcaaggctcttctttcttgaccctctagctaaa

SEQ ID NO: 474030 - DNA, 596 bp, Homo sapiens
atacagtaaaaatattttaaaaaattaatccaaatgccaatttttactcctatccaaatactttagcaatatctctcacttcaaaatcccaaatatttcttggatttaccaaattttctatgtccaattgacactgcctgggtaaatttagtctaaaaagtcctcattatttgcagcctctacgattacagttgtctcttgattacttttcctgatgttaatgtcaaccttatcaaataatgtagtcggagtaatttatttagtctagaattacaacctgaattatacatctcccctgcttaatatccttacacataagattctttgtgatctgaccattactctctccttgacatcaccacccaacctggaccaacgtcttcaccatacccacttacaccaagcagatcttaaattgctttcttttatatttctgtgtctttgaaatgcttttctttctggcttacacagatatccccagaatttttggaattaatttaaattctatttcatakttgtaatgcctctttactgtgcttcttctcaaaggtctccatgagatttttttgtggtcattattccacaaacctgtttct

SEQ ID NO: 474031 - DNA, 594 bp, Homo sapiens
tcttcataatggaggtcaggtgatttgtatttctggatttttagaatagacagggcttatcattgatttgaagatggaaagtacactatttcactaccccctgtcatttagtggatgtggttcttgagtatgtccagaattatawggctgttaatgtgtcttgagccctgacctaaactgtagatgagaaggctctttaaatattaaaatggagaacaaacaggattgcttatgcagtaggaaagtgcacagtattcagaagtcaggcctaatctttttatggggcagctattgggcatgctacatttctgtccaaaatataactcttttgaaaactccctctttaacaaaaatactaagttgatggtctctcttaaaaaaaaaaaaaaaaaaaaggccaagtaagggaatatataacttcagagttatcaaatatatttatcccccttacatgtcaaagtttaagtgctgtgttttgtatatacagtcatcatgatatttgaaaaggccataaagaaaaacaattatataattgtttttaaagaacgcagaagcaaggataaaaaggcctttagaaactagagaacagtatta

SEQ ID NO: 474032 - DNA, 649 bp, Homo sapiens
cctgcctttttattgtttgtgtcaccactgtaatataatctctgtgatgatgggaccatgaatggttttttttcctgctgttgcttcttcagaacctggaataaggcctgacacatagcgctccaaaatacttgtcgggtaactgaaactgaagtagaaagctgtaaagatatcccaatattggtataggcttaaatacgctgacccagaatcagaaaccatagtaaatacgcactcttggtggttacaggcacacaatcagctggtctgacttgactgaactgattgctggttccttgggtggtatcagtgcagtggccttgtttgtgaraaattgatgtgaggttcttaacggacctgtttcccagggacctttctctaaagcacatttgccttgttttatttatttattttttcctcttgcttctgaacgtccttattttccaattggtttcccaaataatacattcaagggtggccccaatatgtggaaaattgctttgttagaattattttgaagttacaatgatccagaggttctccccaccttaaataatttgctgttaccccactttgcttacaggaaaattatacaactttataaatatactcatgaaataatataatttagtacctacttctggcagtt

SEQ ID NO: 474033 - DNA, 649 bp, Homo sapiens
cctgcctttttattgtttgtgtcaccactgtaatataatctctgtgatgatgggaccatgaatggttttttttcctgctgttgcttcttcagaacctggaataaggcctgacacatagcgctccaaaatacttgtcgggtaactgaaactgaagtagaaagctgtaaagatatcccaatattggtataggcttaaatacgctgacccagaatcagaaaccatagtaaatacgcactcttggtggttacaggcacacaatcagctggtctgacttgactgaactgattgctggttccttgggtggtatcagtgcagtggccttgtttgtgagaaattgatgtgaggttcttaacggacctgtttcccagggacctttctctaaagcacatttgccttgttttatttatttattttttcctcttgcttctgaacgtccttattttccaattrgtttcccaaataatacattcaagggtggccccaatatgtggaaaattgctttgttagaattattttgaagttacaatgatccagaggttctccccaccttaaataatttgctgttaccccactttgcttacaggaaaattatacaactttataaatatactcatgaaataatataatttagtacctacttctggcagtt

SEQ ID NO: 474034 - DNA, 492 bp, Homo sapiens
acagggagatgccattccacttgccagtgaggtcttgatggtggaggacagtgttgctccaggtgatgccgagatggtctgggatgagtctgaggaagctcctaggctacagcaccagttccttgtagtacacgagcaggcacttgtccttgcccacctccatgcactgggtgtacatcacctctatggccttgttccacttggtgaggcagttgccatagctgctgaggtcgaagcctgkgtagtgaccttgcaatagtgaccttgcatgtgatcaaggagtgcatggagacatggctgtcctgagccataagcaggaacttggagctggagaacaggtgtgacaggtagaccagtgattcaaggacttgagtctgaagtggtccttgttggagagcacatgggctggctccctttgcttagagatcacctccaggatgaaggcctgcatggcaatgtccagcacctcgtcagtcacgcccgccttgtcca

SEQ ID NO: 474035 - DNA, 646 bp, Homo sapiens
atttattatctcggagggctgggctggttcatggatgattcatgactctgctttccactgccgctggaggtgacatcatctattcgggacccagaatagacacaggagcaacagtgggccgtgttttgtgtgtctctcaccagccctrggctccctcccacttgccaccccgctgctgggtgttcattgagtgagaatggtggtgacccaaggagtccgtcggaaatgtcttcttagtggaaggtcataaatgtgtttcaacactgttgcacaataaagcagagaagggacctttcccaaagttcatctcttcccttacgttcttctagttggaatttagatttcactggcaacccaagagctgcttcactctgtggccgactttgattttctcatgtagagacagggttggttaggaaagtctggctgagataatttatcccacagccttagcattggtcaccctgcatgatgactgattaatgtcatgttagatgttggaattggatcgatggtttccaacctggttgtacactaaaatcccctggggagtttttaagatgtcctgatgcctgagtcccaccccagaccaattaagtgagactgaaagatggagccctggcattggttatttttaacatttttc

SEQ ID NO: 474036 - DNA, 585 bp, Homo sapiens
cctgctggaggagccaccatgccaggccattttcctcccagtaactgacttcagaaatggggagcagaaggggaaggccccaggagcctgtttgttcaggcttggttgcttagcaacaaaagggggccctgacttgagaagagatttttaagccaggccagtccctttgaggtttatgaccggcttgcctacccccatcttccattcttaccttgactttgctcttccccctattacatttgatcgcatctagaaaaatacgtttgatttgtctgcaggcaccattttaaaccttggtttattgctttgcccagcgtcttcccctccattggagattgtagtctgggaggagtgaggcatgaatagcccacgattccttttctcaaagggattagcgccagcccccaagctcatttgtgagcctttgagtgcacatcaacggtgctcagtccttcttagccacaggcacacagtgaaattgctctgaggacagggccccccgctaacagttttacccccccyacagccacacggactgggttgtatttttaccatcaaccttgagcacaaagtaaatgaagagag

SEQ ID NO: 474037 - DNA, 667 bp, Homo sapiens
  misc_feature (1)...(667): n = A,T,C or G
nnnnnnnnnnnnnnnnnnnnnnnnnnnnnnnnnnnntacttcctaatctcctttaccctgtgttccactgttgttttttttaagtggctcctaccgttttctaattgtgcaatgtaattttcttttttggtatatttttgctgtttatcctatacctccctccgcttgagttgagttctgtcatgaccgggattcgtttctgttctgttcactgatttatccctggtgtccagcatggtacctgacacacagcatgtgttcagcgtttgctgaatgaccacgtgccatggccatagaccaggtgtgtggtccgggacaagtttcttcaactcactgagcctcagttcctcaactgaggaaaaaagaggcaggtacctacttcatagcattgctgagaggattaaattaaagagcagatgcaaaagcaactggaatggtgcccagcacaacagcggtgctcaaagcaggttattttatggaggaaaacaacattctctataaggctaaagatgcaattttcactgctaagaccaaacgcargtccttatgtagttattggtcttattacccccacaatatacccctcttctagaaactccacctcctctacttctccagcccccaaacccactccaggtccacagtctgtctcctggcaccaaaaaag

SEQ ID NO: 474038 - DNA, 590 bp, Homo sapiens
ctgtgtgatttggggcaagtggcttagctctctattcttcatttatcctacccatggggtaataatcttacttcatggggttgttcagggataaatgcaactgtatcttgcctggtaaatgctgtatttagtctaatctgagatgccatggctagtaagatgtatgttcatgtactcttcagaaagaaaaaatatgctattaattaaaccgcataatgctttcttatcacattggctgcaagatagatcccrctttcagagaagttaaagtgtggaaaagatgtgtgtcttcaaatcagcaaggtatcgtagcatgtactcaagctgggagttgttattaacaaggcactaggaagccctaccacttggacttccttaccacccaaggctgagaacctagctagactcacgaatgtgacctgtgctgtggcaactgcggcctctttctccttgtggactcccagcccaaggagtttggattattcttgagtagccaccttctgacaaagatctgtgtgctggattccaggcctcatcagccctgggccctcctgaatttcccagtgactgtggtgaggccatccatatgc

SEQ ID NO: 474039 - DNA, 439 bp, Homo sapiens
acagcagcgcccccggccacaggagagaggtgacccagacccttaataaaaaaaccctcatgrgagacaaattattctgtgaaggaaaataactcaggctttcctcattgccaccctccgtgagattttaccccagacctgaggcggctgtactaacaggactctgatctttctctttgtgttcaaggatatcccaacttcgtggcgacctatggccgtggctaccccggatttgctccaagctatggctatcagttcccaggtgagtggcttggtctcccagggctttggaagcacaagaggtgggctgcatttgcggggaggtgagaggacccctaaagagaatgcatttcttacatgcatccacttgaaaatgacctatacatgataaatttcaaatccactgaagttcaaggccaggatgcagctcagagttttt

SEQ ID NO: 474040 - DNA, 618 bp, Homo sapiens
tatttaatcctccacagagtgtatggatgggcatatggatggatgaaatataagttcttctgatttcttctccctttaatctgtcttctacatagttgctggaatgatctttataaaatgcaaattatatcatgttgtttctaaaaacaccagcacttgatttttcattcattacctttaagtacaaacctgctagcatggcctcacctgactcttcatcctccatataactcacgctccatgcgcatttgcctagtcaccactcccttggatagatgagtctgttttaattttgttcktataattccctcaggctagaatgctgttctcctcatccctgccatattaaatcatgcttatccagcaagttccatattagttgtaactcctctatgaagccttcatggacgtgtgagacagaattagtggctccctcttctgttccccagatcacttttttatattgctggtatagcatgggctccattctaatatagatctgtttttaactgtcttgtttctctaactatgttatgagccacttcgatgtagggcctgggtttgattctcttcttaagtaatctcctgtgtcttattgctattttgcttttttaaact

SEQ ID NO: 474041 - DNA, 649 bp, Homo sapiens
ctttttccactatagtgtgtgttgctggagagacacagtttgcatggctatgaacacattctctagtggcataagttaccattctgtgacacctgatgacaataaactgccaccttcctttaaaaaaaattataaaaattggttctcctgggtcttgaagaaatccctcagcttctgcaaggccacatgctaatgaaggagaaagcagagacaatacccacatttccctgcaatctctctctcccttgagcgattctgtaacctgaaaaacccacttgcctgcgcaaccctaggagaaactaaaaaggcaggttgggcgaaattttgaaactccttggattcagtgctgaggatttcagactttaccttgagagcratggggagccactgaaggcttctaattagagaagaaatttttaaaactaaaaagtgggtatcttagagaagacttttggaatttatatttttagaaaagcgaatcattctggctgggttgaagaggcgggatgagagaaagggaaagactgcaagtagggagactaacgagaagactgttacattcttctgggcatgagatgatgagggcttgaatttttgtttaagcagtagttatgagaatggatttgaaataaatgtaggataaaaggga

SEQ ID NO: 474042 - DNA, 386 bp, Homo sapiens
ttcccatgttatagatgtcaaatcatgcagaagtcaaggtctaagtatgtgaaatttagcaggcatgattggttcaaacctatgtcttacttttcatgtgtgacatctttgttctatcaacgcctatatctttagaatgcttttggctgcaagtaacagaaacctgactcaaactagcatatgcattaaagacatttcttacattatagaactactgctccacagatggggctatgctgtggtctggwtggtttttttcccaaaaaattcgtacactgaaatcctcacccctaaggtgatgacattaggagttgggacctttgtgacgtgattaggtcatggggcaaagccctcatgaatggtgttagtgtccttaaaaaggagga

SEQ ID NO: 474043 - DNA, 548 bp, Homo sapiens
ccttaaaaatgagaacttaatgggggaaaagaggaagtataaatatgtccatttggctggttataacaagagggagataataaggagtgccaggaatctcagtgagcctagtcatctaggcgaagtggctgtaacttggacacagatgattattgccactcagaaatgcaggcttagttaccwgatgtgggagcgtgcttacaaaaatggctgcaattgcttatacctcccaatatccactcccttttgcaatgagactttgtagctcctctcatcaaggggtgaaatctgcttctccatcttttaaacccagactggccttgtgaattactttgaaaatataatgaagtggaagtgacaagattcactgtgtgaagttcatgtatgcttcctctgactctcttggcaccctgaccaactgccatctgaacaagcccaggccagccctactgaaggatgaaagaccatatggaccagagttgaatgagctcagttttagtctagagatgggacggtgcccagccaagatcatcaaagccacctaccca

SEQ ID NO: 474044 - DNA, 198 bp, Homo sapiens
ccctgtgccattttgcatttgtgactttagcaacccaaagaaaatgtgtttctgacttcamatgtgcctgttttcttgcttctcccttatttaatgtatgctgttgttgaaagggcaaaataagaattctaaaattaattctgaaatgcacgcaatttacactttagatcgtatcaaaataatttttcccatttatgc

SEQ ID NO: 474045 - DNA, 653 bp, Homo sapiens
gcttaaatatgatcatcccttgaaacaaagtaagaagagtttgggggaaagtcccagttataggtaggtggccaggaaaaaacactgtaaacaagagtaagatttgttatggagatttaaactgatgctttttccattgatgggtttttctagtgatttagtcatccttctcttcctgatggagagagggaaacacccttataaatggagatttcctttatagttgtaaatttctcttacaatagggtaacttctactcttcatttcagagtttttttgtgtgtgtctgcagtttctctaaataaccagctcaaaatagtcctcattccaaagaggcatattttgagtagtataacagtaaaaggtttgttgcttgatgcacgtggcaagtcaatatgctgagataccaggctgcggcagagaaacaggtttaattgcagagccattgaatgaggagatgggaggaaacctcaaatctgtctccctggggagtttgggsttagaatttttaagggttttggagagggccaaagtggggagatggttattggtcagagagaacaaggtgaaatcatggggtagggagatgaagaaactgaattctcatgcagtttggttcttcttttgggggtcttcaaactggttgtcatcag

SEQ ID NO: 474046 - DNA, 464 bp, Homo sapiens
tgctgatgttgaaacaccagatctctggggaaaaacacacgaatctgcttgatattattttccgatttccacagtgtaacgactctcactatggccaacttaaagaaccaacatgaggtcaatgaacgcagagcagaacagagttgtacaaaagtggctctcaggagctggtatgagctccccactggagataaacatgtaggtgaataaatacgtagggaaaaaacagakctcttactaccaaagaaaaccaactaatacatgtagaagaaatcatagtattagaaaattttcctttggaaatcatcagagcaataattaattcagataagaaatgtcaatgccaaaactgatgggtgaaattggggtaatgaggctttacatagtttcactgtgtctccctacaaacttttcatgaattagctgctaaggtagggagaaagtattatagtggagacatctgg

SEQ ID NO: 474047 - DNA, 516 bp, Homo sapiens
agattgttacctagcttaagcaatgatctcccaaaagaatgagagacacatttccagggaagaattcagggaatcttgcataataagttgttgccaaaacttgaaaaacaaaaaaayaaaataaatggcagcagatttttgtggaacaaatcaagtacctattcaccacatcatacgataatttataaagcctatgtcagtcccaagccacaatgctgaataaaatactatcatactacatttttatctaaaaaatgacattatcagttggtttttatggatgcatcagaatgtaaacctctagaaaaccctgaagactctgtgtggttaaacaatcctggactatgaatctctctacaaaccatgccaaatcagatttctagagacattttatcgttttgtccctaccaaaaaaaaaaaaaaaggaagaagaaatgatatttagcagaaattcttatactgaacgaaagaacagcagcaaaggctctttatcagtaggtcaatatttataaacca

SEQ ID NO: 474048 - DNA, 639 bp, Homo sapiens
gtgtcaaggttgtctgttaggacaatgagcataaccgaaggtataatcaagccctcattcagttgctgcggtagttcaatcaaaaggcagaaaggtgttgtgggccatttttctccaaggggtggcaccaggtgagtatcagatggatgcagcacagatgaggcaaactgtctcactgacaagaagcccccaacaaaaggctcctatcttactggactgagtgttgaatcagaccttggaaaattgcctcattcaagatcccagataaagaagtcatcacagaggtccctggaactaggaatgcagacgtacatatgagtattggctagcctgaaggcctgagtccttgactgcaacacttttcagaaaactgcagtgcattagctgtacaacaaggctgatgtgggaagggcagcttccctcccatccccataaggcctggcaggcaatttcataattgcttctggtaggtctgaaagatcatacataggatcttggcctggagtcagscttcttaaaatgtgctgtacactagtaagaataaaagaatgaacttaatatggtccttgctcttcagtaaattaagttttgtcaaatgcagcatttttcttcaaaataaaaaatgtattctgcaatgat

SEQ ID NO: 474049 - DNA, 505 bp, Homo sapiens
gcctgctgtctaaaccatctgagctacttgggggaggggcaatgtccaacactgggactgatagctgcctaacacactaatctcccagagcgggggaagggcagcagccatctctatagctccaggtcacacttctcccctactgaagcctgggaggctagatggcttggtcccaagagatatctatcccccacagctcaacgcaggagccgtggcatactgtagayagagtgccccttcaggcctgaccttggcccatccctcctcactgggcagggcctccctgaaggaactctgacaactccatccaggggcttagggacccaactctgatctccctgggcataagcccctagggaagggggtgaccatagtctccacaaaccagcagacttagactttcctcctgctaattctgaggaattcaggcagcccagatgattgtgtttccccccgaaacgaagcacacccctccaccaagggacagtcaaagtgctttgttaaa

SEQ ID NO: 474050 - DNA, 631 bp, Homo sapiens
agttgttttcattctgcaacaaaacccctagccctttccttctcatacctcaggccaatattttctaccttatttgggagggttgcttcttattttcacatttaccctcaactggaaaactgaagactgcttcaaaaggaccattaaaatgcaggtgctttttgaaaaatgtccaaacccgtattctttctttagggccccatgacagccaaaaaatctttcatctcatggccctctctacaatcctgccattcttcatttgtttgtttgttcatttgtttgtttgtttaactcagtgagccttcagtaagcttctctacactcattagctcacggatggatcttctgctatttcttttgttgttgcagtaggagtggctttttatgtagacagatgtttaagagatcagaaaagaaatatcaccattataatcaagagacattgcattatcaatggaatggatttccattttattattgattttgaaaagtggaagcaagtgaatttgatatmaacttaaatactgtattttgggggattcggagaaaaataaaactttctatgagcaataaggaagtaaaaattaatgctttttacccagaaacatgtagataagggattattaatact

SEQ ID NO: 474051 - DNA, 471 bp, Homo sapiens
cccagactgaccggcagaaaaatgtatttttagttgtgacagggtttcgccatgttggtctggggccaggctggtcttgaactcctggcctcaagtgattcccccaaagtgctaggaaaacaggcatgagctaccatgcccagcccaaatcacttatttttcatataaattagagtgtattctagattatctttatatcatcactcacattcgttgactcattcaacaaacatttatggagtgcccacacacatgaacaaagcaaagcacctgcccttggaaagcttatgctcttaaacaacagactggtaaacaaatatrtaacctagtgcagggtagcagtaagtgcaaggtaaggagacagttacccaggtgacccaagatagttttactaaggaatgtaaatagtacattttgggtggagactttatggagtaagagggagtcatgcaaaaatcagaaggaaggcca

SEQ ID NO: 474052 - DNA, 603 bp, Homo sapiens
tctgcctgggctctatcatgcaatggttgtcagccagtcccttagctggctgctgggtaatccaggatagcatcagctctacattatggatttggctgagcacgttgtttctcctctgtttggcctcttctctccagcagtgctcagacttattcatgtggtacctcagttcctaaaacagcaagatggcaagccccaatcctctttgcaagcttttactttcatcacgtttgctaatgagccattgactcaggaaagacatggccagatttaagagatgagggaatatatcccacctgttggtggaaagatctctgacaccacatggcaaagataagaatgtaaggggtggggggattatggccgtttttatcgtctcccatggaaaggaaattcactggctctgaacagtgctaatcaaaattgttactgaacatcataaagaacgtgaggagaggcctctactatgcattatgttcatagaatcctyaatggaaaaaagtttgaaaatactgactacttggtgtctagagccccctccagctttagtatcctgtgactaagaaatatcacttgtccaccaagtgacatctagagactctt

SEQ ID NO: 474053 - DNA, 619 bp, Homo sapiens
acttctattcctttacctttctttctataacccctttaagcatctgtatttataaaccatacattaataggcaaaaataagttatttttgatcatgtaaacattcgaggacttatttaagcgacagaagtcrcttgtataaaagaattacaagaacaaaagagaacaagtagcattttcccactctgaatgctaataccaatgtgcctttttcttccccataaggccccactcatcaacataccaactgcaatattttcatatttttatatgaaaatattggccactaattcaaaacttaaaacaattaaaagcttgaaaaaacaaccacaacagacagaaaaaaaaaaaaccctctctgagcttgtacaagccaaacaaaacatgactttggtctttgatcagtctaatgattctcactttcaaactttgctaaacaaaggcatatcttgtccttagcatgcttgtatataagaatatataagaacagagcagaagaagtagcattttctcccctctgaatgctaataccaatgggtctttatcttttcaaaataagagacaagagtagaataaaagtttttgtttattattcatttatcctttcaaatagtgctatt

SEQ ID NO: 474054 - DNA, 376 bp, Homo sapiens
gataagctggctcatgtgatcttgtggctcaccctggaactgactgactcagtgcaagaggacagcttcagttccctatggtttcatctccagccaaccaatcagcactcttgactcactggccttcctccacccgccaaattatccttaaaatctctgatcctggaatgcttgggyaaaactgatttgaataataaaactcctgtgtccgcacagccggctctgagaattttactctttctctgttgcaagtcccctgtcttgataaatcagctctgtctaggcaccgggtaaggtgagcccattgggcagttacaagtcctgtgatggcttctgcccctcccatcttttgcagccaggggtcaggaggtggctt

SEQ ID NO: 474055 - DNA, 376 bp, Homo sapiens
gataagctggctcatgtgatcttgtggctcaccctggaactgactgactcagtgcaagaggacagcttcagttccctatggtttcatctccagccaaccaatcagcactcttgactcactggccttcctccacccgccaaattatccttaaaatctctgatcctggaatgcttgggtaaaactgatttgaataataaaactcctgtstccgcacagccggctctgagaattttactctttctctgttgcaagtcccctgtcttgataaatcagctctgtctaggcaccgggtaaggtgagcccattgggcagttacaagtcctgtgatggcttctgcccctcccatcttttgcagccaggggtcaggaggtggctt

SEQ ID NO: 474056 - DNA, 178 bp, Homo sapiens
tgcctcagcatgataaatgaccatgcttattcctccatccatatkagaaagaaattaggtctatactcagtgggatgcaggacagagtcttgcctaggaggcttccatagaaaatggcttcatctgtgccaccagaaaatgtcgaccaggctttgagcaccttaaagtctcctaccta

SEQ ID NO: 474057 - DNA, 583 bp, Homo sapiens
gcctcagcatgataaatgaccatgcttattcctccatccatattagaaagaaattaggtctatactcagtgggatgcaggacagagtcttgcctaggaggcttccatagaaaatggcttcatctgtgccaccagaaaatgtcgaccaggctttgagcaccttaaagtctcctacctacctatatatgatggtgcaacattttccttgtctaccctgggatccaaaagcaaagaagattttaaagaacagaaagtaaggagcatcacagagaagtaaatgcccttaaatgaatctgaaataaaaggtctgagattcatctgaaggaatgagccactctcagccttcttctattagagggagacaggctagggagagggctgctttatggccagttcctgaacatggtacaactactgtctaagagatcataggcakgtagaagtagatcaccaacgcctggggaaaatgctctaattagtttctaagcagatgattttgctgcctgaaggtgaaatagggacagttcatcattttagcaaacactttgctatctgttcttcccctcacatgagtctttaatgga

SEQ ID NO: 474058 - DNA, 605 bp, Homo sapiens
ttaaaattctttcattaatgactgaatgctatttttaaagaatgcaacaatttgggtttttatctacttcattctaaagatgaagccatcaggccaatagttcccaggtattgaatttggaactgaaaccattasactcttccctttttccatttatgcccagtttacactcacatgtccatttcaactcatttttttacccacttgtgtccatttcacagttcattaacatctatttctaaaggcaaagtcacgaagaagagaaaatacttcaaatttgttcctctgtttttataaaaaattcttggtaaaaagtagagaaagatgagtaaatgagcccttaatacttggacacatttttaaattattcatttttaccaaaccaaactgtattattaaaaaaatcagtgttcactgtattttaaaaatattctcttcaaaagtatattataaatatatatgcacatatgtatttatttgttcaattatattaactatccaaatgcttatcatttctgttttttagaaggacacagtttattcaacagaaggcataaaaattagaattatctttcccaaaatacgacttaatttctctgtttttc

SEQ ID NO: 474059 - DNA, 605 bp, Homo sapiens
ttaaaattctttcattaatgactgaatgctatttttaaagaatgcaacaatttgggtttttatctacttcattctaaagatgaagccatcaggccaatagttcccaggtattgaatttggaactgaaaccattagactcttccctttttccatttatgcccagtttacactcacatgtccatttcaactcatttttttacccacttgtgtccatttcacagttcattaacatctatttctaaaggcaaagtcacgaagaagagaaaatacttcaaatttgttcctctgtttttataaaaaattcttggtaaaaagtagagaaagatgagtaaatgagcccttaatacttggacacatttttaaattattcatttttaccaaaccaaactgtattattaaaaaaatcagtgttcactgtattttaaaaatattctcttcaaaagtatattataaatatatatgcacatatgtatttatttgttcaattatattaactatccaaatgcttatcatttctgttttttagaaggacacagtttattcaacagaaggcataaaaattagaattatctttcccaaaataygacttaatttctctgtttttc

SEQ ID NO: 474060 - DNA, 453 bp, Homo sapiens
agtgccagatttcgtctggaaagtcctccagtcagtgaaaaggctaagggaacacagaggttttctccaacaggcagccttcccagagcagtaggatggcgataacttttgctcttggctaattcagggtttcccacagagcatctgctccggactcttccacrgttctgatcaaccctgttcaccgccttcctaccctcaccccaaggggatcttacttccactttgaagttcaatactgccaagtggtccctttcttaagacttggccactcggtaatagctaatatttcagagcagtggccctgctgttaacacgtgtggtgggggtcagtgagatttcagtaaggtggccgtctgttatgagcagcatgatttacaggctatgttgctgattatctcttaaaatctcttttagctctgcattttggtgaagagcactgtatattatacg

SEQ ID NO: 474061 - DNA, 453 bp, Homo sapiens
agtgccagatttcgtctggaaagtcctccagtcagtgaaaaggctaagggaacacagaggttttctccaacaggcagccttcccagagcagtaggatggcgataacttttgctcttggctaattcagggtttcccacagagcatctgctccggactcttccacggttctgatcaaccctgttcaccgccttcctaccctcaccccaaggggatcttacttccactttgaagttcaatactgccaagtggtccctttcttaagacttggccactcggtaatagctaatatttcagagcagtggccctgctgttaacacgtgtggtgggggtcagtgagatttcagtaaggtggccgtctgttatgagcagcatgatttacaggctatgttgctgattmtctcttaaaatctcttttagctctgcattttggtgaagagcactgtatattatacg

SEQ ID NO: 474062 - DNA, 420 bp, Homo sapiens
ggagggagggaggaaggaaagaagtccatccatgttccttccccctcctcccacagtcttttggatcagacttcgaagtcgcttacaatccaagcttgagattggcaactgcgcaccttatggttaaagagttctactatgatttgtgaacagtcattttgatgttttgggaatgcatataggtttgatgtggtgtaaagcccgggaagggggaagcaaagcccaggaaaggggaagcaagtttaaggaaaacttttwaaaagatatgtgtgcatgtgcatgcgggtgtgtacagaattagacctaattttaattgtcccacaaagtaagagttgcaaagagttgtagggatctgaagacgtggccctgagctcagtacagcacacccagaggacagccaagtacaggagcagacgggca

SEQ ID NO: 474063 - DNA, 635 bp, Homo sapiens
ctgggtgcagtggtgtgcgcctgtagtcccagatactcaggaggcagaggcaggagaatcacttgaacctggaaggcggagattgcagtaagctgagattttgccactgcattccagcctgggtgagagttasactctgtctaaaatagaaaagaaagaaaaaaaaaggtattgccaagcaaacttaaattttaagaaaaaactacaacagagcattgaaagtcatagcagggccaggtgcggtggctcacgcctgttaataccagcactgtgggaggccaatcacttgaggtcaggggttcgagaccagcctggccaaatggtgaaaccccatctctactaaaaatacaaaaatcagccaggtgtggcggcacatgcctgtagtcccatatattcgggaggctgaggcaggagaatgacttgaacctgggaggcagaggttgcagtgagccaagatcacgccactgcactccagcctaggcaacagagcgagactgcatctcaaaaaaaaagtcatgacagtgtaagttgctgtatgcatctctgtaccactccaaaaacatcccagacccttttctgacaatcaaggtgtgcaaaatggtctctaaagggcatgaaagctcatgaaagacaga

SEQ ID NO: 474064 - DNA, 632 bp, Homo sapiens
aacgctttcaatcatgtcagtttatctgtgcctataaacacactcctttagagaaaatcaaaagtttatagccaggcgcggtggctcacgcctgtaatcccagcactttgggaggccgaggtgggtggatcaccttaggtcaggagttcgagaccagcctgaccaacgtggtgaattaccatctctactagaaacacaaattgrccgggcgtgtttgtgggcacctgtaatcccagctactcgggaggctgagacaggagaatcgcttgaacccgggggacggaggtggtagtgagccaagatcgcaccactgcactccagcctgggcaacaagagtgaaactccgtctcaaaaaaaaaagtttacatataaggctctcttagtatccctgggaagagggttcatcctgtctatgaacgggtttaggatgacacaaattatcaaattatccgattagtgcactttcctaacccatatgtttaatcagtggcacatcctggttttgaattatttaaacgcattattatttagccattcacatacttacgtttgtcacttccagttaaactgtagccacctacagagagcgaaacagaagtcggctgataaaattttgataaaatttcatttgc

SEQ ID NO: 474065 - DNA, 632 bp, Homo sapiens
aacgctttcaatcatgtcagtttatctgtgcctataaacacactcctttagagaaaatcaaaagtttatagccaggcgcggtggctcacgcctgtaatcccagcactttgggaggccgaggtgggtggatcaccttaggtcaggagttcgagaccagcctgaccaacgtggtgaattaccatctctactagaaacacaaattggmcgggcgtgtttgtgggcacctgtaatcccagctactcgggaggctgagacaggagaatcgcttgaacccgggggacggaggtggtagtgagccaagatcgcaccactgcactccagcctgggcaacaagagtgaaactccgtctcaaaaaaaaaagtttacatataaggctctcttagtatccctgggaagagggttcatcctgtctatgaacgggtttaggatgacacaaattatcaaattatccgattagtgcactttcctaacccatatgtttaatcagtggcacatcctggttttgaattatttaaacgcattattatttagccattcacatacttacgtttgtcacttccagttaaactgtagccacctacagagagcgaaacagaagtcggctgataaaattttgataaaatttcatttgc

SEQ ID NO: 474066 - DNA, 496 bp, Homo sapiens
caactttctattatttctgggtcttatgcatttaatgagttacaatgtccttcatttctccctcttcaatatgatcatgtcacagttcataamagtgagggaaagaactctagatacaatctgacttctatcttagatgtaggaaaaacctttgtaaattcaatgttaatttctagaaacactctaggatggtttactaagcagatgatatgtgagcacttaaaagagaatattttttgatcatcaggagttgcatggattttctgggattcagaattactttgaccagtctaagcacttggctgaaaccagcaaggtgaaatggagagggaataatagagctaaaatctactgtttcctagcaaatgggtaggcactgtgttagatgttatctcatttaatcagcgctgaaactcctgagtgtagatattgctattaaaatgcctttttttttttttttttgaggtggactctggctctgtcaccccggctggag

SEQ ID NO: 474067 - DNA, 496 bp, Homo sapiens
caactttctattatttctgggtcttatgcatttaatgagttacaatgtccttcatttctccctcttcaatatgatcatgtcacagttcataacagtgagggaaagaactctagatacaatctgacttctatcttagatgtaggaaaaacctttgtaaattcaatgttaatttctagaaacactctaggatggtttactaagcagatgatatgtgagcacttaaaagagaatattttttgatcatcaggagttgcatggattttctgggattcagaattactttgaccagtctaagcacttggctgaaaccagcaaggtgaaatggagagggaataatagagctaaaatctactgtttcctagcaaatggktaggcactgtgttagatgttatctcatttaatcagcgctgaaactcctgagtgtagatattgctattaaaatgcctttttttttttttttttgaggtggactctggctctgtcaccccggctggag

SEQ ID NO: 474068 - DNA, 507 bp, Homo sapiens
cagtggaatttatagcataactttctttttaatattccatttctgggtcaatccttgatcctgttaacactttaataagcagcaacaaagagaggcatcactgcagagactgtgcagatactaaatcagcttatgtacattctgtctaggaagacttttggaacagaggctggcttgctgttcatcaaatttatttgtgagttctagcccatggaatgtgagtggaagtgatgtgtgccatcctccatgggccatcttccatgtttcttctctgttgaccaacttgatacgaacatgcacagtgacctcacagtccaagtattgaagatggtgaagatggtggagccacaggatgaaaggatcctggtcctgcttagagaagagatagctcctgttctgttacatctatttttgactttacatgagcaaaaagtaaacttctattaggtttaarccattttacattttaatatagctactgaaacctcgcatcttgactacagcttt

SEQ ID NO: 474069 - DNA, 550 bp, Homo sapiens
cctgagaattcctaaacactactgtaaccagaggcagtttagatacctccagcctccggcatcaaatcaaagagcaaagtactatagctcttttagactcttgggacctattagagcaggacatatgactgagggaagcttttcaagccttcataagcctttttaattacctcacattatttttcttagcctttgacttttccctattgttattagaataatctttaaaatgagagattttcattggagcaactctgtcctgctttaccagcatggtgggaaggagccaaggggcaggtaaagaggctctgtagactcagtcagtgatgtctctaccgaggatgaaaaattcgatgtgacctttggggttgtggcaaagataatgacactatccacctcataggaaggaggcaatagctaaattagttcatttatgtgaacaccacttaggacagagcttggcacataaytggggctctgaaaagttagttgcagttacttaggagtaatcatgatgctttgagagcagaaatatcttcttgattttccc

SEQ ID NO: 474070 - DNA, 642 bp, Homo sapiens
tgcctcccttaccatttcttacatatggtaactttcacttcttgttctccaaggtctccagtgcctctctctcaatgttttatctagatattacatatctgagggacacctagttagaaaatccttaagagacaatttaatatagattcacacttccttttctattaatgaagcattttcttctataaaattatttgctgcaattctcgaaagagtcaagtaatagcaaatgttgcaaaactttccagagtgaaatgaaggctagcttgaaaacttaacaaccattttgtattttcttggtaaaatgtatcttgttacaagtgataaaaatgaaatgagggagtttatgagaaatttctccctgacactgctacagtagttattggcttcatggtgtaatacctgaaatcctcctgtcacggagctactctgtgttctaactctatttsccttcccagactgtcctccccacctccactcagtaatcttatctactaaagtaaaaccagaaaagtaaactgcagtgcacctggacaggaatgtgcaaacttggggaagattcttcactggggagacatgcgggagatgccttccttccctccaggtggtccaggccaagtattcataacatcagggttacct

SEQ ID NO: 474071 - DNA, 590 bp, Homo sapiens
agacaggattggtctcactcttgctttatcagttcaaccagttgcaatttttacaattttaaattacagggatgaatgaatggtawtattttacaagttgataagctatttgcaattgatgatacaagttacttattaaacagtctacaaaaaatggaaacacaatattctgtttgccaatttttgccagactttaaaattaattacatgcaaccgacatgaagaaatgtgtctctctaaataccaattactgttcaggctctcaaaatgttaattaaagtagacgatgaaatcttaaaaactaacagaaattattttcatttctattttgatcactagcaattaggtaaattattttatgaatccaataaggtgactgctaaattctctttcaagtctgagagtatttgagttctgtaagaatctctaaaatgtcttcttacataaacaattttccaaatattatggctaggaaagagtataaacataaagaagtttacattacacataacttattttttgaacaattatactatctgacttacccaaatcaaactaattggaaaatatattttattaggtgctgcaaa

SEQ ID NO: 474072 - DNA, 608 bp, Homo sapiens
cagcatttaactctgcagcagcactaccaatgcagcattcattgctcaatcmacccctcagaatcctgtttagcctatagcatcatactaacctaagcattatcccagagtaccgcctccaggaaacagaatgggccatttccttctgtctcccgatcgtggaagaagccttggatcagttttaaaatatgtcaaggttctgcggaaagctttctaaagctcagagcgtgcagaacggaaggccccctctcacagtcccccctttcaagaagggacttgaccaattgtgacttgatcactactgctctgaatccccagagctttgttttacttatttttcccacaacaacctcaatagtacggacggcaggggaaatacggcaagtataattagtttcaataggttgaccatttatacattgattacatttagtgtccgtttttattaacaaaatatcatatttaaattaatgttgtttacttcatgttttataacttctgtctgctaagccctctcccaaccactgattcagagattcatagagtaggtgctcagttaatttgtattaaacagacagataccagtttctgctgccagaaatataaaa

SEQ ID NO: 474073 - DNA, 608 bp, Homo sapiens
cagcatttaactctgcagcagcactaccaatgcagcattcattgctcaatcaacccctcagaatcctgtttagcctatagcatcatactaacctaagcattatcccagagtaccgcctccaggaaacagaatgggccatttccttctgtctcccgatcgtggaagaagccttggatcagttttaaaatatgtcaaggttctgcggaaagctttctaaagctcagagcgtgcagaacggaaggccccctctcacagtcccccctttcaagaagggacttgaccaattgtgacttgatcactactgctctgaatccccagagctttgttttacttatttttcccacaacaacctcaatagtacggacggcaggggaaatacggcaagtataattagtttcaataggttgaccatttatacattgattacatttagtgtccrtttttattaacaaaatatcatatttaaattaatgttgtttacttcatgttttataacttctgtctgctaagccctctcccaaccactgattcagagattcatagagtaggtgctcagttaatttgtattaaacagacagataccagtttctgctgccagaaatataaaa

SEQ ID NO: 474074 - DNA, 641 bp, Homo sapiens
gcattgctccattttagaggaagaatctgagctgcagggaagtctcatcacacgcccagtggcacacagctcaaaagtggcagaggattccaatccatgttcatgaaactccaaagcccacgtgtttcccactgtctgtgcagcctcccaccacattagagcagttcccaaggaatgtctgaagctgtggtaggcactacagaaaataagagatgggacagtaacctaagaaaaaaggaagaaatgaaaataggaaatacctaaggaatagtaaaacttaaatgtttatggtattttaaagctcttgcatatatattataacaatatctaattgtaaatagtacttcccaaagccacctctttacttgatcttcccaatcctgctataagaagtagaggggatcttgttttctccagtttacaggtgggaaagccgatactgacagaggttgtgtgacctgcctgaaggcacaaagccaggargtaacaaacctgggccttgacccatgtctttgaacaacaaacccaacggtattcccacagtaccatcttgcctctggattaataagtaaacattacatatgtatcattccaaaatatccttataggcagtgtgagaataaacctacctttgaggaaaa

SEQ ID NO: 474075 - DNA, 575 bp, Homo sapiens
atttactttgagaaaaccatattcaccacagtcataaataaatcctcctatatttttttctaatatattatagttttgtttttcatagttattactttaatccatctagattacttttgggttaatagcattagctatcggtataactttattgtttttgccacgatgtatagttagagtctcttatacatgggctcattcctggattctcaatcctgtcctattcatcttattggacttttcctactctgatattatatattactgtagatttattaataatttgattccttgtggggcatgatcaccatattggttgattttgtttgcttattttttaatttgcttggttggctatcrttgcacatttactctttcatatgaactttataatcagcaggtaaaattccatgaaatttcctttcaagattttgattgggattgtattgaattcataatgtaaccagagagaagtgacatcttaaaaatcctgagtctttccatgctcaaatattgtatatgtttacttattttttgatatgtcaggttttcttttacactcttcaggaaatttt

SEQ ID NO: 474076 - DNA, 620 bp, Homo sapiens
tctgaaagttgatagagagttgatagaacaatcttttcataaggtataaattctatctatttttccctaaaaacaaacaaacagcaaccattcttgcttctaattgggcagtacaatctgataggttggctagagacttgcagtggggtgtccctggtacctattcaaagactgtagctttcttctatctcattctcattttctattctttgcattgtagagttttggagcaaagaaggtcatcaaacttatacagtgarcctaacagtttccttttaagatgaggaaactgagccccagccagccatgtgattcatcacagttccttggtggctgagttgggaggagaacacacatcttctcagctcctcccactgctctttccattaagacagacagcctctcattcaaagtaagagaatttccatcatatgagcaagggacaatgagagaactgcttctcagtactccccgcttcttcctcacctacttcctcttcactggatttgtcaactcacctgtctttacgcaatagttacaatgccagcatttctctacattacatacttcagcgattctcttactggctttgcaaagtcacccaaacacgaatggaaata

SEQ ID NO: 474077 - DNA, 620 bp, Homo sapiens
tctgaaagttgatagagagttgatagaacaatcttttcataaggtataaattctatctatttttccctaaaaacaaacaaacagcaaccattcttgcttctaattgggcagtacaatctgataggttggctagagacttgcagtggggtgtccctggtacctattcaaagactgtagctttcttctatctcattctcattttctattctttgcattgtagagttttggagcaaagaaggtcatcaaacttatacagtgagcctaacagtttccttttaagatgaggaaactgagccccagccagccatgtgattcatcacagttccttggtggctgagttgggaggagaacacacatcttctcagctcctcccactgctctttccattaagacagacagcctctcattcaaagtaagagaatttccatcatatgagcaagggacaatgagagaactgcttctcagtactcccygcttcttcctcacctacttcctcttcactggatttgtcaactcacctgtctttacgcaatagttacaatgccagcatttctctacattacatacttcagcgattctcttactggctttgcaaagtcacccaaacacgaatggaaata

SEQ ID NO: 474078 - DNA, 621 bp, Homo sapiens
tataatctcacagtcatattgtgatgtctccattaaaaaaaagtttacaatgatttgaagaaaatcttatatatttagttttgtactagatggamtagagaactaaaatatgtacttataagtgtactcaggttttggaaaaactgatacatggaaattcttatagcataattctatttggagagtattttttcaccttaaaaatcactagtagtttcctttaaataattttcccagtgtagttaaaatcagatcaaattttcaaaaaactcagttcctgttcaggctttcagcatctgtagggagacattcactggataaggagaagcacatctgtattgctcttttgccttcctccaccccccacaccaggacttgctaggcctctccccctggaaccatctcatttctaaccttcaggtggacccctttgtgcccacccgtagattccatttggcccagattctggaatcggagctgcccttggaatgccctgcactcactggtcttctcttgctcccaagtctacgctagctactgccccatctcttcactcctttttccaacaaagctcttcagaaagtagtctccactgattgtctccaatccttcccctcccat

SEQ ID NO: 474079 - DNA, 652 bp, Homo sapiens
gctgctctgagcacactagctgcagtcactgcctgtgtactctctgggatgggggcgttccactggctattttaaggccagactggtgaatgttaggttccccttcgtttacctaggctttcaatattttccctggcacacgctaagktggtcacagaatgtgggaaaccaggcaagggaaaaaattaatgcagtgtgctgacgcccctggtagctgctgctagattccatggaaaagatggggggcttgctatctgtgtccatgggggcctcctaaagctgttagctgtgttggcacctgctcaactccagagatgctggaaaaggaaaactggctgcaaacttggtccgcagcctgcctggtagccccagctccacccattcccgtggagtggctttgcccactgtgaatgcccctttatcgtcagtgagcgataatgacttttcaaaaatactgtgtaggccttgtgtcccggatgcctgtggtacgaaggctctgcttccctttcaagggtgttggcttaaaaactcacccagaaacctgagaaaaatatctccacttggcagctcaggaggctgacaccagccaccttctgtgcttcagcctgctggccatgagctaactagcggacagttattataagggaaggaa

SEQ ID NO: 474080 - DNA, 612 bp, Homo sapiens
ccaaagcacacatattcatatgctcttgttccttctcaaataattccatcactaatacacattccttgctgctgcttcctgctttcgcttttgaagtgcccttccatccactcctcagctctattccctgcatatctctaggaggctgtgaggggaaggaattattctctttgttttccacctaaagaaacagaagctctggcaatagtcggctgcttgctcaaggtgacacagttaatggagaggcagatctctggatgcggcgtctcaggggccacgcctgcctcccccgccgccgcgcgcatacacagaattcctcatgctgctgctatcacggaactcagggtacgggtgcaccccgcaagcccactcctccacagtcttcttgttctccctgtgctcttgttcactcttttttgggtcacgtggacagactgggactccactrttttgtgaagtgcatctctgattttatctcttcccctctcccctaatcagggtttggctgactttgtctactaggagcagagaacaaagtgtgacttgaaccatgcacatcaaacgtgtcctccatttgtttaatttccttttcatgagacccttctcccgggt

SEQ ID NO: 474081 - DNA, 610 bp, Homo sapiens
ttaataataaaaataatccttcttccagttctaaaacgttataattttttggtgccaatctctgttcaatcactctcttcaagaccttggccaaaacgctttcttttaattttttcctaactaactctaactcactctgaccttcaaagcacttaaccaaatcgttattgtagactattttatgcttttttaaataggtctctggaatggtttagaaattttgtattttrttttctgagcaagtttttcagctatcaagtgtagaatcacatttgtttgtaatccaaggccctcagaaatctgtattgtacgatagaacttaattgtgaattcctatgtattaacttgtcactgacagtatttttttcatccagtctgctgttaaattcttaggtggtttagatgtttttaagtcaacacattcattcaggtagggaagattctcaagcagaaatgggtggaaatgcccagttggtgtagtatactggccccatattatagaacacacaataaaaaatttgcatttttgcaatgtcctttctggtaataagaccattagtgttcttggcctttttggctatgcctctttctgccactgccatttattgtt

SEQ ID NO: 474082 - DNA, 613 bp, Homo sapiens
gtattctatttcattcctcgaagagtctaggatttttagacttaaatacagaaagctaattttgtatctttgatttctgattcatatcctttctctgaggcaactaaaacacaatggcctgaaatttaagtgagagcaaaaacaaaggacagaatggaaatatggaagaaaaatcaaataattcttcaaaatagtatcccctctctgaccaaaaccatgctgtcttttaatattaagaatgatggttaatagtcagtagactttgctttatgtaaaaggggggaagtaaatacatccagtactttcaatgcaaattatatagttataaaacttaagttttagttaggtcaaggacctaagttctcagtttttaacgttgaatgactttgagtatgccacatgattcctctatttcaatttattcatgagtacagttcaagagtgttatatctgtggtttgattttaccctacatacaaattaataggttagcttattactgtttaatgggtgcctgcagaagacagaatatttctggatgggagaccaaggaatttgttactcacagctcarcagtctgtgtatcagttctccttgttcccaagtctcgtgaa

SEQ ID NO: 474083 - DNA, 461 bp, Homo sapiens
gctggaaactctcctcactttatggatgggaatgctgagaccaccagaagttgagtgtgttagcaaattgctgattgtgggtggagacaggtcctaaaatgatgtcccttcttctgtgtcatatctttaggarcagtcatttcagcatccctagatagacattgtattacttagagatttgcttccaccaggacttgtgcagagggtgtgtaggatttgctagcagtgtgatcattctgtagggcaagctgggagtcaccacaaagaggatcttttccatctcctttgttccaatatggggaaagtgagaaattaagttgttagccaaagattctcataactacgaggctgaataatgcagggaaaagcatgcaggctttgagtaggtcaggccaaggatgaaacttggttctaccactttttagctgtgtgacctggcgacaagtagttgtagctttata

SEQ ID NO: 474084 - DNA, 580 bp, Homo sapiens
tttatcacctcttaagatcctaaaattttgacctatacccaagaggtgggactatcaagaaagaaagggactcctaggatgatgaagttatgttttccgacagctaggcagaaactcaaaggccaaattgttatacaacattaaaggataattggaacacctgaactgcagccctatggtcatacctatcatttcttttcaatccattaggggcaatgcagatgggaatcagatgtggacccatcttaacttctcttaacaggagaagttaagaactggcatraggattccactgaaaaacaataatacaagagataacaatgaaatagtttatttgaataagtgaatttatttgtccagctaagagaaggcacaaaaatgtagctacttcctgatataattgctaaattttcattttcctatttatgaaatattttccacagatatatcattagggttgtcttagtctgctcagtttgctggaacaaaataccataaactgggtggacaacagaaatgtattttttacagttctgcaggctgagaagtctaaggtcgaggctccagcagtttcagtgtc

SEQ ID NO: 474085 - DNA, 603 bp, Homo sapiens
ttccatggtgtatttgtaccatattttctttatccagtccaccattgatgagcatctagattgattccatgtccttgctattgtgaatagtgctgtgatattcatgttcttgwctggtttagttacctgctcttactcctgagactaacaccacacaggacagagtaaagtagaagatgacctaagaaaacatacagaagtcttaactggattgcttttgttatgagatgttcactgaagtccttcttgtgactgacattccaatactggagttttacttggaggcagatgtacaagtttttcagaagccatgggcaacatgaatactacatgcttcccagaaacacatggtgagcttgtcaacccccttttggtgccctccctctcattgccagctcctgcacctgcaactccaccccacagccttgtgatgctggctgctctcttggtcttggtctcgtcaaagcatcccaagtttggctactttcttcagcatccgcatagcccaggggaagctccatatcacagccaaggctaccacgttctgcctcttcaatatccatcagcttctccctgctcagactacatggagtggagggtgca

SEQ ID NO: 474086 - DNA, 603 bp, Homo sapiens
ttccatggtgtatttgtaccatattttctttatccagtccaccattgatgagcatctagattgattccatgtccttgctattgtgaatagtgctgtgatattcatgttcttgtctggtttagttacctgctcttactcctgagactaacaccacacaggwcagagtaaagtagaagatgacctaagaaaacatacagaagtcttaactggattgcttttgttatgagatgttcactgaagtccttcttgtgactgacattccaatactggagttttacttggaggcagatgtacaagtttttcagaagccatgggcaacatgaatactacatgcttcccagaaacacatggtgagcttgtcaacccccttttggtgccctccctctcattgccagctcctgcacctgcaactccaccccacagccttgtgatgctggctgctctcttggtcttggtctcgtcaaagcatcccaagtttggctactttcttcagcatccgcatagcccaggggaagctccatatcacagccaaggctaccacgttctgcctcttcaatatccatcagcttctccctgctcagactacatggagtggagggtgca

SEQ ID NO: 474087 - DNA, 587 bp, Homo sapiens
caaggtttccaatgaaggaagacaaatggatgacattaggaattccagcacgtgtgtctgcccagccctggagtcacacaggccagggtctacacctgatcctaccaaattgcccagtgagttcttgggaaaatccactggagttactaattcttagttttctcttctgaaaaacatgatgggcacaatgatgcatatgacacagtgctactgagagcagtaaatgcagagtgaggtgtttcacatgtagaaggcacggagtcagtgatacctctggcactcaagacttatccctggtgagtccagtgtttaccaggggtgaattgaatcctgcatcctcaagtytggatgcctccattgcatctggaaaggaggatgaaaggaaagaatccgaccactcagacatggacacgtgacggaatgagggggaagaagagctagccagcacatctggcctttcatgcttgcaccatttatcaatctattcacataaaacatgataaggtgacttcattttattttatctttttctctcatttcaatcttggggctttattgtcctcttgcatttggttttcttggtataa

SEQ ID NO: 474088 - DNA, 560 bp, Homo sapiens
caccagactggtttccattccttgaaaatctgcgttttttttctgccctcattgttggacaggctactctccattcttagaatgatacctacatggttccattgtgctttacttagttatcacctaagaatcttagcccaagcacaacttcctctgaatgtcattccctgataagcctgtctgttttataagctcaccaggaattacagtcattttgtatggacatcttatgcatctggaaatatgaatatctaccctccccaggagttccgtgggggtggggaaggtgtttggttttggtccccattaaacctaaacctaatgcagtgcctggctcrttataagaacttaataaatatttattaaattaataaattatactctcatatcatctggtttttaaaagatatatcaggttttattttttgttgttacttggtatcactgatctgtaataaagcccaactctgcacatatatgttgtaaaatgtttgaaataagatcacagggcgcagggggaggtgagagggagttggtaggcattttggtgtgatttctaa

SEQ ID NO: 474089 - DNA, 604 bp, Homo sapiens
gttataaaaatagatgaaacttgattctatctcataccatattaaaatagagaatgaaaggtaaaaccaaaactgtcttctagaagataatacagtccataggataatatcttcatgtccttggggtagagaaggtttccttaactagaacacaaaaggcactaatctaaaagataaggatgataaattagcctacattaaaattaaaattttatgttaaccaaaagaaaccataaaaggaatttttaaagatatttgcttcatataagcaatcatcaaaagttcatacccattatagggagataattcttacatattggtaagaaaagaccatgtgatggaaacgtggctgtgggactagtgagtgtggctggtcccacctgctccggttagcacagatattgcacaggtaggtgcccattgatggtgattgaaaatcttccactgttcttgttacaagtttcctgtgcttgggaaccttcttgtttagacycctcttgttgacctgtcctcttagcagcctgtgacccattgggagtcccacttactcctagcagctttctgaacagttatcttgtgagactctgggaggatgacttcccac

SEQ ID NO: 474090 - DNA, 459 bp, Homo sapiens
acagccagggtgatggaaatatgatatgattcaaatccagactcagcggccctaaatactgtgcttcaatctttaaaacccaaaatacatgtggaccaatgtttggagcaacaagaggctgtgcctttctmcattgtctaactttagggagagaagccttcaagacacggagagacctggccccatggagagaaagagcgattcacacctaggaaggtatagtgtagccagcagtgctcaggagacagcaccagatttttgctggtgagagacttttgattccttttccctttggggctcaaagctttgataaatacaaacactcaggactagacatcattgcctgtggtagttccatgttttatattcacctaaacattatactagcttcaagcctctattatttggttggaaaggcaaatctggatttagtaaaagacaagtcaaacccttatattc

SEQ ID NO: 474091 - DNA, 616 bp, Homo sapiens
tgtggcgggaagaagcacaggtgactcatagaccagtgtggggaggaagcagatgggatggtctcagcagctcccaggcaagctcctccacagctcctgctgtagtgttgcaagctgaaaactttagcaataacttcactgtcctttgttccctggcttttccaaaattttgctaggttttatttccttgcattaaaatcttcccatgacgaaagagtcatctttttaatgcatggtgctgrgtcagttagatacacagagttgaggtggaggataaatcctgacccctccctcataaaaacaaaatccggacagttcagatctacatgtgaaaagtaaaacaataatgttttaaagaaaacatacaaaagcatcttcataaccttggggtaggcagaccttatacaagacacaaaaaattgctagtcataacacacaaaatgataaatagaactccaataaatttagaaatttagtattctctgcatatcaaaagacaccattaggaaaagtcaagccacagaataagaaaggatatttgcacaacacatatctgagaagactacccagaatatataaaaatttacacaaatcaataaaaaagacagacgtctcg

SEQ ID NO: 474092 - DNA, 616 bp, Homo sapiens
tgtggcgggaagaagcacaggtgactcatagaccagtgtggggaggaagcagatgggatggtctcagcagctcccaggcaagctcctccacagctcctgctgtagtgttgcaagctgaaaactttagcaataacttcactgtcctttgttccctggcttttccaaaattttgctaggttttatttccttgcattaaaatcttcccatgacgaaagagtcatctttttaatgcatggtgctgggtcagttagatacacagagttgaggtggaggataaatcctgacccctccctcataaaaacaaaatccggacagttcagatctacatgtgaaaagtaaaacaataatgttttaaagaaaacatacaaaagcatcttcataaccttggggtaggcagaccttatamaagacacaaaaaattgctagtcataacacacaaaatgataaatagaactccaataaatttagaaatttagtattctctgcatatcaaaagacaccattaggaaaagtcaagccacagaataagaaaggatatttgcacaacacatatctgagaagactacccagaatatataaaaatttacacaaatcaataaaaaagacagacgtctcg

SEQ ID NO: 474093 - DNA, 616 bp, Homo sapiens
tgtggcgggaagaagcacaggtgactcatagaccagtgtggggaggaagcagatgggatggtctcagcagctcccaggcaagctcctccacagctcctgctgtagtgttgcaagctgaaaactttagcaataacttcactgtcctttgttccctggcttttccaaaattttgctaggttttatttccttgcattaaaatcttcccatgacgaaagagtcatctttttaatgcatggtgctgggtcagttagatacacagagttgaggtggaggataaatcctgacccctccctcataaaaacaaaatccggacagttcagatctacatgtgaaaagtaaaacaataatgttttaaagaaaacatacaaaagcatcttcataaccttggggtaggcagaccttatacaagacacaaaaaattgctagtcataacacacaaaatgataaatagaactycaataaatttagaaatttagtattctctgcatatcaaaagacaccattaggaaaagtcaagccacagaataagaaaggatatttgcacaacacatatctgagaagactacccagaatatataaaaatttacacaaatcaataaaaaagacagacgtctcg

SEQ ID NO: 474094 - DNA, 616 bp, Homo sapiens
tgtggcgggaagaagcacaggtgactcatagaccagtgtggggaggaagcagatgggatggtctcagcagctcccaggcaagctcctccacagctcctgctgtagtgttgcaagctgaaaactttagcaataacttcactgtcctttgttccctggcttttccaaaattttgctaggttttatttccttgcattaaaatcttcccatgacgaaagagtcatctttttaatgcatggtgctgggtcagttagatacacagagttgaggtggaggataaatcctgacccctccctcataaaaacaaaatccggacagttcagatctacatgtgaaaagtaaaacaataatgttttaaagaaaacatacaaaagcatcttcataaccttggggtaggcagaccttatacaagacacaaaaaattgctagtcataacacacaaaatgataaatagaactccaataaatttagaaatttagtattctctgcatatcaaaagacaccattaggaaaagtcaagccacagaataagaaaggatatttgcacracacatatctgagaagactacccagaatatataaaaatttacacaaatcaataaaaaagacagacgtctcg

SEQ ID NO: 474095 - DNA, 580 bp, Homo sapiens
gagtgcctttccctgctggacttcgccacttcctgcccctgaatgctcatcatccctggccactcccctctgtcccctgctcacacagctcaaataacctaagcctttattttccccccagacctttaagcttctatatccatctcttagctggatattttcgcctgaataccyagatcccatagatcaatgaagacgaccatgcgagaggagaaaagagacgagatggcaatacccacagcacgtttctatcctccatgctgagcacgctatgtagttaagaaatgtttgttgaatgaatgaatgagtgaatgaatacatgtatagccaagtgagctcggaaatactcagaggataccttttcctggtccctgtctgccatcactgtgactttccccagccacatacagggaagtgtagttcatctgatgggcagtttcaaagcagatgaaattagccagaatgccgaagactgcctttagtataggcacactttttcaagttttcatcagttaatgcattttcccctctcttgtaatgtagcttctagcttccaaaaaactgtatttcggaaaatgtt

SEQ ID NO: 474096 - DNA, 541 bp, Homo sapiens
tgtcccctgctcacacagctcaaataacctaagcctttattttccccccagacctttaagcttctatatccatctcttagctggatattttcgcctgaatacccagatcccatagatcaatgaagacgaccatgcgagaggagaaaagagacgagatggcaatacccacagcacgtttctatcctccatgctgagcacgctatgtagttaagaaatgtttgttgaatgaatgaatgagtgaatgaatacatgtatagccaagtgagctcggaaatactcagaggataccttttcctggtccctgtctgccatcactgtgactttccccagccacatacagggaagtgtagttcatctgatgggcagtttcaaagcagatgaaattagccagaatgccgaagactgcctttagtataggcacactttttcaagttttcatcagttaatgcattttcccctctcttrtaatgtagcttctagcttccaaaaaactgtatttcggaaaatgttcctaaggagaccaggactgctcatacgagac

SEQ ID NO: 474097 - DNA, 403 bp, Homo sapiens
agtggctcatgcctgtattcccggcactttgggagcccgaggtgggcggatcatgaggtcaggaggtcttgaactggccaatatggtgaaaccccatctctactaaaaatataaaaattagttgggcatggtggcacattcctgtaatcccagctagttgggaggctgaggcaggagaattgcttgaaccrggacccgagaggaagaggttgcagtgagccaagatcgcctcactgcactctagactgggctacagagcaagactccctcaaaaaaaaagaaggaaaaaaaggaggagggagaagcaggaggaggaggaggaggaatgtggatctgcagagagaaaacaccatgaagaccctgggagaagacaagccacagagagaggtctggagcagaccct

SEQ ID NO: 474098 - DNA, 507 bp, Homo sapiens
ctggaaaatattattaaactcagatattaagcraactctgtgtgctgggtgccacggcagctcatctgtctttgtactcagcccatcagatgagtagcccatctgtctctgggtcctcttttagctaagaaataaatgccaaccaaacaatcctaaatgtgcttgatctaaatttaatctatacttaactttttagttatcatacttgcatctatcgccatcattttatatcacttgccctattcacatagcactctctctcatttttttacattctcatgttcacaatctatccatattatggttctagttcttctctctggtgcttagttgcaagccaacaaaagcaaggatgtatacacataaacatataaatattatcagtgatcacaccactgggtttaacacaagtcaatatcagtatattatactctctactttgcaattccattataggctcaacactgctggtcataaaaagtagtattctgggcccaggcctgtgat

SEQ ID NO: 474099 - DNA, 581 bp, Homo sapiens
ttattaaactcagatattaagcgaactctgtgtgctgggtgccacggcagctcatctgtctttgtactcagcccatcagatgagtagcccatctgtctctgggtcctcttttagctaagaaataaatgccaaccaaacaatcctaaatgtgcttgatctaaatttaatctatacttaactttttagttatcatacttgcatctatcgccatcattttatatcacttgccctattcacatagcactctctctcatttttttacattctcatgttcacaatctatccatattatggttctagytcttctctctggtgcttagttgcaagccaacaaaagcaaggatgtatacacataaacatataaatattatcagtgatcacaccactgggtttaacacaagtcaatatcagtatattatactctctactttgcaattccattataggctcaacactgctggtcataaaaagtagtattctgggcccaggcctgtgatagtaataatggaaaaaaaagggtcattgctctttccaacccgaatgaaaaattaaaattgctagggcatttagctcaaaggaaa

SEQ ID NO: 474100 - DNA, 613 bp, Homo sapiens
actgctgttgcttctccacaggcagatgatttgaataattgagaataaaactgtctagagggtagtggttaatactgaaggattaaaaggaggctgtagaatatccaaacattccctgccctgctaattacttcttgagttaataacctctttgtgcctcagttccctcagctatcatattgaggataagaaaagcatagaagggtgcmtggcacatcgtgagtgctcataaagcaatggtgatcattactgtcacagtcacttttgtaccacctctaaacatttcaatgagggaaatcttagatttggttcaatccatcattgaattcttaaatatgatcatgcgttctacaaacagctaaaaaggacttcataaaaaatgctttccctttttattcaaaaagggaaacaactccttaaatttttttaaaacaattaaactcctgaaattgttttttcaaacaatgccttacatttcttcttttgacacaggtatatatatgttcatctgttcatcacatatagaggccattgtgataagatagattaatagtggagtcttagttgcccttctccttaggctataatcacctaattagtctgagatttaatt

SEQ ID NO: 474101 - DNA, 491 bp, Homo sapiens
gattttttccctctctttccttttgccattaactctttgtatgtcttgctaaaacagtaaatgtttcttctgcttttgattgttgagtggtttgtatgtttatgtgggttgtatatgacagtactctcaaaataaggcataatataaagaattttaatgtttcctcaaaaaccattagcataacataaaaggtcaawgtttgattgatttcttggagggtacatatatgaatgtatctttacatattgtatagcctgggcacctgtattttttaaggttaaatgctatttttataattttttgtatttttcccctttttatatctatccgattgtacttgaaaaaaaagagcatttcaattctcaataactgagttatttacagaactgatagaaagtgaggtttttcagtttcatgttcatatgaataacaatttctttataaatacactttaagcaaggtttcaatctaatgttaaaatgtcaagccaa

SEQ ID NO: 474102 - DNA, 491 bp, Homo sapiens
gattttttccctctctttccttttgccattaactctttgtatgtcttgctaaaacagtaaatgtttcttctgcttttgattgttgagtggtttgtatgtttatgtgggttgtatatgacagtactctcaaaataaggcataatataaagaattttaatgtttcctcaaaaaccattagcataacataaaaggtcaatgtttgattgatttcttggagggtacatatatgaatgtatctttacatattgtatagcctgggcacctgtattttttaaggttaaatgctatttttataattttttgtatttttcccctttttatayctatccgattgtacttgaaaaaaaagagcatttcaattctcaataactgagttatttacagaactgatagaaagtgaggtttttcagtttcatgttcatatgaataacaatttctttataaatacactttaagcaaggtttcaatctaatgttaaaatgtcaagccaa

SEQ ID NO: 474103 - DNA, 613 bp, Homo sapiens
aaatctaagctccctacgatgatctgtgacgctatccactcggtcaccgcctcctctgtgactctggcttatgccacgctctcccttagttattcaactccaattacaaagctttatttgcctcaggcctgattagctcttgcagttctttctgtctgaaatcgacttcttgtgactggctcatcgctgagattgaatcttggcatcttaggcattcttcccagccccatctttctatcacattgctctagtttattttcttcatactcctatcattacttgattttatcttttttatttatctgtttacaagaatggaatcttcatggaagcagcgtccttgtttgacttgtctattgatagaactccaatatctagcacagtgcctggcagacagtaggcactcaataatgtgatgatggaaacagacaaagcaaggtctgagagagaaggccaagtgacaacggaagcagagattggagagatgcactttaaaaatggcrgaaggagccatgagccaggaacataggcagccaagtaaaagccaatgacaatgagtctgcaaaaggaatcagctcagttgacatcttgactctagctcagtgaaactaac

SEQ ID NO: 474104 - DNA, 591 bp, Homo sapiens
aaagtgctgggattacacgtgtgagccacagcgctcagcctatgaacaacagttattataaagtttagtggcttcttaaagttctgaattagaattaaattgaagtttcataaggagttaagtaggcacaatttttcattctattatggaagacttgtagaaaaattaaattcattaatttgtcgtggaagaggcacacaagtctctcgagtgctcagcaattgttttatttatttctaagtccctaaagcttctcccacatcagctaactcaaaaccttccaaaacagaagcctcccatttctgtatttctctttatcagacctttgaaaaaaattccctaattttctccttcctcarcctcaaaatggtctctgcatctaacctgtcttcttagccttatgtatgagggacccctctcccccccaagcctatcagtcgtccagttctctctagtccccgaaatcttgaaaatctattcactgaaatcatcccttgagtctctcctaaaaaccctgcaagtactctcacttctatccttttctttcttttattgccaagttggagaacccagaggtgtcatccaggaagt

SEQ ID NO: 474105 - DNA, 620 bp, Homo sapiens
cagcctaagcatacataatttgaaaattttccttattatttagatagacaaatattcaagactaattatgatgacctattaatgcaatagagagtgagaaactaaagaattatcattaatatrtaaataaaagcttatcaatctcctaagcaggcttcccgagctccagtgtcattggcacttaaaggtaaactcctggaattacaccatgacagtgccacgagaggccttattgaacacctcgttcaatgctctcattttaccagtgaagaaccaaaagctctgagaggtgtcgaaccttgaccaagacctcccaccagagtcagggcagggctgagattagaacccgatctctgcctgtacgctttcctttatgcacaatcactctctaatgcagccccagcttcctgagtcagctctggaacacaatgaaaatataatacaattccccagaaagggaggtttctctgggttagtatgttctgagcattcctgagtgcctgggatgtatatagttacaagggcacagtggcagttatgatgctttacaaaaataccatatatgttttgtacttttaggaaaatgaaaactgcacatttgaaataaaaaaagaagatgc

SEQ ID NO: 474106 - DNA, 620 bp, Homo sapiens
cagcctaagcatacataatttgaaaattttccttattatttagatagacaaatattcaagactaattatgatgacctattaatgcaatagagagtgagaaactaaagaattatcattaatatataaataaaagcttatcaatctcctaagcaggcttcccgagctccagtgtcattggcacttaaaggtaaactcctggaattacaccatgacagtgccacgagaggccttattgaacacctcgttcaatgctctcattttaccagtgaagaaccaaaagctctgagaggtgtcgaaccttgaccaagacctcccaccagagtcagggcagggctgagattagaacccgatctctgcctgtacgctttcctttatgcacaatcactctctaatgcagccccagcttcctgagtcagctctggaacacaatgaaaatataatacaattccccagaaagggaggtttctctgggttagtatgttctgagcattcctgagtgcctgggatgtatatagttacaagggcacagtggcarttatgatgctttacaaaaataccatatatgttttgtacttttaggaaaatgaaaactgcacatttgaaataaaaaaagaagatgc

SEQ ID NO: 474107 - DNA, 715 bp, Homo sapiens
tgtcaagccaaggcaaacatcaccctaccacccactctaccatgaacagatttcagtaagtaaccaagatgacagaatgcacttaaagtgctcttcttctccaagttaaaagtgctactgtcatctgtcgatactttcagaaattcttaaataacagctcggattcagctttcaagatataggttcccctctactgcatccaagagcaattcttagcagtagaaacatcaggaagaggacagaatgaactgtgtcttcctcctggcaattggtagatccataaggtcagttatgagcagccgggagatactcctgccctttcccgggcctgctgttggcaggccatccctgccttcctcgagaggtacacattgcatattatcctgaactggtccaggatatgggtgccatgctgtgggaaaaacaggtacaacttcacttcataaaaatctcactgcatttgtttaattgaaatgattctcctackttctgcaattacaaccttcctattctgttaatacttaaatatgcttttgtttatgaaacaatggttctagtagatgaggggtttcatttatgtttttacttggtgaaataaaaaacttggttgccttatcatgacctccacttaaaaaaattgactagtttgggagttgttcttctggaaaacaacatattactattttcactacatcattaagacaactagaaagca

SEQ ID NO: 474108 - DNA, 556 bp, Homo sapiens
cactgcatgctttgtacaggaagtaagaatgtaaaagttaagcccttaaacagctccttgtcccacttggaaaaagtcatacaaacaagtaattacactgtgattatctgtaatgtagggaggttaaagcattgaggtggtaagctgaagaagcctccacaggatagagttagaggacttgacctgggtcttgaaaaatgggaagaaatttttctttaactctatttttacaggatagttccagactgaagaagcagaatttacaagtggagaacaagttgaagatgtggtgggtcatgtagacaggaatcagaacacgaaggcgcccgtaggctgtytaaagaatttccatctcattctacgtgtggaggtgagctgtgtgccagcctgtgagacagatcatgctggctctcactggaaaatgggacacgggagaaagatgctgggtggaggtagaccagttaggagcccatgacactagggagagaaaataaatgtctgaattaggagaataagggtggtgactagacgctggagagcaggtttggtaatggta

SEQ ID NO: 474109 - DNA, 652 bp, Homo sapiens
attggccatttactaatactcccaatcttcttgtttatcatatggctagaaagaatcttaaaagataatccgatcctctgagaaccttttagggctgtctgttctaaaccattttagacagatgggartccctagtgttttttaaggtctctagataagcagattccaaaacttcttttgataaccattccggagtttaagaatcttactgtcaggaaattctttcttttatctaacttaaatcctgcatgctttagtttaaacctatttccttccactccctttccctcacttaagaggaggatggagaccatctgatcaccacccttcatagcatgactcttcatataaacaacactaacaatggattattgtatttcttcttagctttctcttctctggacgaaataaggctggcatcttcaattttggagattgtatgtcctaaatgattaatttacaaatcatttaatcgtcctcactgcattcttttgaaatgtcttcaaattttacaagttttaacacagctccaatcattcttgaagatgcaaggcactatttgaaggtatcagtagaaattttagagtggaggtcgtctttctagaagccactgcttttaccaagaagaaactttaaaagagttcagactcct

SEQ ID NO: 474110 - DNA, 635 bp, Homo sapiens
gagagctgagtcaacacttgattattagtctattgaggttattcaggaaaaatttaaaattctaactccttcaaacaaagcgctatgggctgtctccactttccatcagtgtatgggtgcttatggaatgtaaagctaattttaatgtttcctaagttgaattaggaaagaaaaaaattggtttaaagtaacccacagagctctagccaacataaatatggataatggatggatggatgaatggatggataaacggatggatggatgagtggggggatagatgggtgggtgggtagatagataggataaatggataatcttttgctttggctgattttgtcactgattatcttcaacagggtataagagctgactgctttatgtggtcatgtaacctatacccttctccaaaataattggaaagatcctatttccaacactactgaattggcaccctgtgattcacatgtgtggcgatataggcagktgtcatttttcttcaacagagtttattaatttattcatctgaagcctatcttaaattcatcagtgtgaataataaaaggaaagtaagaaatgacttgagtcccaacacgctatgcttggaatgcctttccttccataaagataaatgc

SEQ ID NO: 474111 - DNA, 551 bp, Homo sapiens
aactgaagtaatgcagagaagtaagacgaccttagtcataatgaggatatttattataaacagacttgagacatacaagatttagcattgaggataatgctgatagaaatgaattttgggagtttccttcctaatgaaaagccagataaaggaaaagagatttagtcattctgtgttgccaaattggtaaaagcttttgaggacaaagtaataatatagatattgcctgggtaacagacaaaagagattccagaaaagattgtggaaagcaattttccgttaaattaatcttgttttctcactgacttacattataaaatcaaagatgcatggtgatgagaaaaaaatgttgacacctggatggaataaggttcaaagaacacagtaactcaggtaaaataaggtattttaggacacgtttttcaggtcaaagtagttctaatattaaatactamaacatcactaataataccatgatgtaatcaaagaaatcacaacataaaacactgacaatgaaatcagagtaaattctcagaaattctctggtcata

SEQ ID NO: 474112 - DNA, 635 bp, Homo sapiens
tattttctaacaacaagaacacatcttcatattggtgacacagtccaggagacacagtccaggaaatataaaatgcacttttgtctgtcacaagcctgtttctgctcttccctccttctcagttcaactccttttccttcttrtttctttaattaccagttggattaacaataaaatgttgttccgtttatgaatgcatcctttgtcttttaaaatctattgttctcttaacagcctggagaaacacatgctgtcacatactgaagagagggaatacaagtgtgatcagtgtcccaaggcatttaactggaagtccaatttaattcgccaccagatgtcacatgacagtggaaagcactatgaatgtgaaaactgtgccaaggtacagtgaatttgtaggctacttggcctctctatgtcatcctgctctctcttaatccatcacttgctacgatatataaaaacaagccttcagaggggaaactataaatatcttgagaaaagtacactgagtgttgtatgctaaaaggcattagtagagtgtataaaaacacttagtgggtatccttttatttttgtaagggaggaagtgaggcttaatggtgagttccagaactaggtgtcagacatccttg

SEQ ID NO: 474113 - DNA, 635 bp, Homo sapiens
tattttctaacaacaagaacacatcttcatattggtgacacagtccaggagacacagtccaggaaatataaaatgcacttttgtctgtcacaagcctgtttctgctcttccctccttctcagttcaactccttttccttcttgtttctttaattaccagttggattaacaataaaatgwtgttccgtttatgaatgcatcctttgtcttttaaaatctattgttctcttaacagcctggagaaacacatgctgtcacatactgaagagagggaatacaagtgtgatcagtgtcccaaggcatttaactggaagtccaatttaattcgccaccagatgtcacatgacagtggaaagcactatgaatgtgaaaactgtgccaaggtacagtgaatttgtaggctacttggcctctctatgtcatcctgctctctcttaatccatcacttgctacgatatataaaaacaagccttcagaggggaaactataaatatcttgagaaaagtacactgagtgttgtatgctaaaaggcattagtagagtgtataaaaacacttagtgggtatccttttatttttgtaagggaggaagtgaggcttaatggtgagttccagaactaggtgtcagacatccttg

SEQ ID NO: 474114 - DNA, 518 bp, Homo sapiens
cctgcccatctgcatacgctctccctagcggtccgagctgcagggcacagaaaaagcaagccgcayccttgttgcacgccctgcaaaggggataaaagaacttttcccgtttcaatggttttataagggcaaactcctttcatttggttctcattttctttcttgcctgctgccatgtaaaacataccttttgccttccaccttgatttgtgaggcctccctagccacgtggaaccatgagtccattaaacctctttttctttataaattaacccagtctcagatatgtctttatcagcagcatgagaacagactaatacagcttcctttcccttcaatctgatagcattttgcaagtactaagttcatgttgtcaaatataaacagttatcacatttcaggtaaatatactagctttctattaatctaggagtcaggtggattgaataataaattagaacacctttcttcacagctatttgttcaataatatagtaaacgattaaggaaggaaatca

SEQ ID NO: 474115 - DNA, 421 bp, Homo sapiens
tcggtggtacagtgggtctttttgattcctaaaacattgtaacttcttctgcattacactatatccatggatttggccaccacgtatctgtgtagcctgagacagcattagctttttcagcagccatgtcatatatctggctcctttggattttgtggacaaaggaaacattagatcttcctagacatctgtgcatgtctgtgtttctatatacagatacacctgtacttcatcacttttttgctgcaattgacttagattccaattctgtgagattttttgtttatctctattagagttcatcttgctgagcttcaaaaatctttccagtttgctaagtgactttaagtattgattcctttacccagcatgtagttcttmtttttagctccaggcaatgtggaatgtatgctttctacgg

SEQ ID NO: 474116 - DNA, 544 bp, Homo sapiens
acgttttaggtgttcattacttcacagataatactttgaaatgctaattttccccaagataattcagctgttaaatcaccagtgaatttaattccatccactaatttcagcgtctgtgttcctccccgtcactagctgcctcaaaaaatccaaaacttaatttttattttgctctgcactttacacattattttggcatatactaacttaacccatctgttcacaacagtcttgtgagctgggcataaagaaattgagggtgaaactttttttaagagactaacacaggcaaagccccaattgaaagagtttaattctgagcatcattagtcagcctgagattcacagcacccaatgcacaacattactcatacatccctgatgactggcaggccttccccctttcctagcctgtcctgtctaatgtctattcctttcttcattgcagctttggtgtstagttccttgggaaactgagcccaaccactgagctgcttaaagttcccctctctaggcttcttttgtatttaatgaatgtctttga

SEQ ID NO: 474117 - DNA, 643 bp, Homo sapiens
aaaatatatcagaaaagaaaccttgttctgtcaatttgggtggaagctgtctacttagtgtcatcatcgatcagatgtgacatccatgggttagtagtcacactccaatgattgtcacctggagaattcttaaaaattctcagtttaaggtcctctaatggagtgtatgtatagttttctggaaagatggttagtgatatagtctgaatattagtttccacccaaatttcatgttgaaatgtaatccccaatgtttgagatggggccttttaggaggtgtttgggtcccgggggcagatccctcatgaaattcttgggctatccccttgataataagtgaactgctgctctgagttcacatgagatctgrccgcttgaaagcatatgacactttcttcccctgctctctctttcttttgccatatggtgtacaagctcctgctttgctttccacaaaaagtaaaagctccctgaggcctctctagaagttgagcaacattggtgctatgtttcctatacagtgtgcagaaccatgagccaattaaacttcttttctttataaattatccagtcttaggttttttatagctatgcaagaatagtctaatacagaaaattggtaccaggggtgaggtattgctat

SEQ ID NO: 474118 - DNA, 643 bp, Homo sapiens
aaaatatatcagaaaagaaaccttgttctgtcaatttgggtggaagctgtctacttagtgtcatcatcgatcagatgtgacatccatgggttagtagtcacactccaatgattgtcacctggagaattcttaaaaattctcagtttaaggtcctctaatggagtgtatgtatagttttctggaaagatggttagtgatatagtctgaatattagtttccacccaaatttcatgttgaaatgtaatccccaatgtttgagatggggccttttaggaggtgtttgggtcccgggggcagatccctcatgaaattcttgggctatccccttgataataagtgaactgctgctctgagttcacatgagatctggccgcttgaaagcatatgrcactttcttcccctgctctctctttcttttgccatatggtgtacaagctcctgctttgctttccacaaaaagtaaaagctccctgaggcctctctagaagttgagcaacattggtgctatgtttcctatacagtgtgcagaaccatgagccaattaaacttcttttctttataaattatccagtcttaggttttttatagctatgcaagaatagtctaatacagaaaattggtaccaggggtgaggtattgctat

SEQ ID NO: 474119 - DNA, 643 bp, Homo sapiens
aaaatatatcagaaaagaaaccttgttctgtcaatttgggtggaagctgtctacttagtgtcatcatcgatcagatgtgacatccatgggttagtagtcacactccaatgattgtcacctggagaattcttaaaaattctcagtttaaggtcctctaatggagtgtatgtatagttttctggaaagatggttagtgatatagtctgaatattagtttccacccaaatttcatgttgaaatgtaatccccaatgtttgagatggggccttttaggaggtgtttgggtcccgggggcagatccctcatgaaattcttgggctatccccttgataataagtgaactgctgctctgagttcacatgagatctggccgcttgaaagcatatgacactttcttcccctgctctctctttcttttgccatatggtgtacaagctcctgctttgctttccacaawaagtaaaagctccctgaggcctctctagaagttgagcaacattggtgctatgtttcctatacagtgtgcagaaccatgagccaattaaacttcttttctttataaattatccagtcttaggttttttatagctatgcaagaatagtctaatacagaaaattggtaccaggggtgaggtattgctat

SEQ ID NO: 474120 - DNA, 608 bp, Homo sapiens
tcatccaaagttttcttcaaatgagcaggattaagcttttatttttgtcaaactggatggtttatttgctctgcacaattcttacagcctcrttgtcatccatttcaactcgcaaaatttaggctgaacatatactgcagtgaggtagactggattgacatttagttaaacatttgatgagactggtttacaacacatgcaggaaacaagggcagcagctaattttgtccacgttcgatgcctattgcaggaaggtcaagggtttgcctcctttggtaaacaacctcttcctacaaaataagaaaattgtaagctgaaatcttgcttgttttaaacatatataaacaaacatttagatgtatgtttcttttcctcgttttcattgatacataatagttgtacatattctgggggtacatgtgatattttgatacaaggatgtaatatataatgattagatcagggtagttgggatatcattacctcaaacatttatcttttctctatgttgcaaaaatggcaattcttctcttctaactactttaactatataatagattcttgttaactatagtcaccctactgtactatcaaaactagattttatt

SEQ ID NO: 474121 - DNA, 608 bp, Homo sapiens
tcatccaaagttttcttcaaatgagcaggattaagcttttatttttgtcaaactggatggtttatttgctctgcacaattcttacagcctcattgtcatccatttcaactcgcaaaatttaggctgaacatatactgcagtgaggtagactggattgacatttagttaaacatttgatgagactggtttacaacrcatgcaggaaacaagggcagcagctaattttgtccacgttcgatgcctattgcaggaaggtcaagggtttgcctcctttggtaaacaacctcttcctacaaaataagaaaattgtaagctgaaatcttgcttgttttaaacatatataaacaaacatttagatgtatgtttcttttcctcgttttcattgatacataatagttgtacatattctgggggtacatgtgatattttgatacaaggatgtaatatataatgattagatcagggtagttgggatatcattacctcaaacatttatcttttctctatgttgcaaaaatggcaattcttctcttctaactactttaactatataatagattcttgttaactatagtcaccctactgtactatcaaaactagattttatt

SEQ ID NO: 474122 - DNA, 632 bp, Homo sapiens
agaaagcctatctctctcttttttattttaaatgtaaatctactttgtttctcatgattaatgagcattttagttcctgaatctgatcagtctcatattcttttttgcctaggaccttatgttggcagattaaattttctaaaaaagccccttgcaattcccgagacaatatcaggtcaaacatgtcctgtgccttggtcatgggtagcacacaggatggagctcctttcaatccacactgaattcatcggttccagtacttccaatttgctcctacctgaagctctcatttctccaggagccttctggagccaacagggattatttttggctcagacccttcttgtcaagctcactgccatctccaattcacaggctggcagtcatggggcagccactgaagtctcatgcccagtgggcagctattctgggatgtttgtgcttgacattsacaatggcttcctgactgactcactcctcaatccagcccccatcgtgctgggctagggtggctcagcagcctgttttgattctcctaatcaaagagcagcatcttaaaatctcgcagtcagccttgcacactagactgggaagcaattgtcagctgctaaatttaaccacagccactttag

SEQ ID NO: 474123 - DNA, 606 bp, Homo sapiens
aatttgattcatctgaggaggggataagtttctggataaagaaatttgcttaaaacaggtcaaacagatacttgcttagacttctccagtttatttcatcagctctctcttagagcttcctattaccagcgttcccataacaatgccacattcatgtagcagccacagtaatctttccaaaacacaaasaaagtcctttccatccaccacggcatgatcctcaaactttcatggaggtaaagatcatttggagaaattgttacacagacattcctggggcccacattcaaagattctaaggtagtttatatttgatggagtccaagtttatatttaattagcagcccagtgggttccaatacagtgtcccagagaaaatacatggttttgtatgctgcaatggcttgtggtgtggtatggctcctcacacggggcgccggttgaggtattgctcctcacacttgagagcatttgctgtggggtctgcccgcagaccctgacccaaatgatggatgaataaaacgtacactgacacacagatattctgttttgccagtcctgctgagtgtctgaccacctacacaccaagagaggtttgtcactgcg

SEQ ID NO: 474124 - DNA, 606 bp, Homo sapiens
aatttgattcatctgaggaggggataagtttctggataaagaaatttgcttaaaacaggtcaaacagatacttgcttagacttctccagtttatttcatcagctctctcttagagcttcctattaccagcgttcccataacaatgccacattcatgtagcagccacagtaatctttccaaaacacaaagaaagtcctttccatccaccacrgcatgatcctcaaactttcatggaggtaaagatcatttggagaaattgttacacagacattcctggggcccacattcaaagattctaaggtagtttatatttgatggagtccaagtttatatttaattagcagcccagtgggttccaatacagtgtcccagagaaaatacatggttttgtatgctgcaatggcttgtggtgtggtatggctcctcacacggggcgccggttgaggtattgctcctcacacttgagagcatttgctgtggggtctgcccgcagaccctgacccaaatgatggatgaataaaacgtacactgacacacagatattctgttttgccagtcctgctgagtgtctgaccacctacacaccaagagaggtttgtcactgcg

SEQ ID NO: 474125 - DNA, 577 bp, Homo sapiens
aaatgtaaattaaaatgctatagcttaaaaacaygaggatagggttatacatcaaccccacctttcctttcatgttctaggatagaactaatgctttattcttgttaggagaaagtatacttacttacacatttgatgcttttttaaatttaaggttaacaactaaagacacacacacacacacacactccacatcattagagaaaaattttacaaaaatcaacttaaaagaagctggagaattaaacaaaaaaatatctgttactgatggtgtaagtccaaatatatctgtggttataattcatacaaatggattaaaatcaccaaataaataaaaattaggggttttcatattataaaaaatgatagtactactctggcccattggtttattgtttctaagtcaaggtatatgctacttcctggagaaacatctgtaagagatctaagagaagagtttaaaatacaataatgaaaaagacacatcgtataaatgaggcatccccaaccctgggagcatggactggtacctgtccatggcctgttaggtaccaggcagcacagcaggaggtgagca

SEQ ID NO: 474126 - DNA, 540 bp, Homo sapiens
atgaacaactattgtaaaccaataaaaaatttaaataaatacaaggtaattttgtcttttcatttgtgctttctaagaaagaagatgatattttgccatcaggtacttaagagtagagatggcggaaccctaaaaggagaagttagttagaaaaaggaaactaggctggatttcgcatccgcagaggaacaatgcctgaactcatcaccattctgtctctatatcagattgagctagcccagaaactggctgccaaaatgggcactgtgccctattccagctcctggaatagacgatccagccagcaccaatccagatgcagactgctttggccagttgccaatctgttaycattattccacaatctctgtgtctggtcatctgggccaccttctgagagggagcctcattcattccaaatttcagaactgccttctgtcagttctcctagctgttatggatggagacttgagttttaaactctgaagacagacaatacatcccgatggactctaagttggggatttccaggtgaaagga

SEQ ID NO: 474127 - DNA, 482 bp, Homo sapiens
cttgcagggctcaaaggtcctgaactgcatggcaagggaatggggtcaccagactggactggctctttgtccaagaacaaagggyagtgatggagagaaaagagggtgtgatgagtgcaggcacccagggcactgcagggaaggcagccagagcccctcacctgcttcaagtttactcaactccaagtaccggcagcctccagggacccctcctttctccatggcactgagaaagagcctagccatggcccatgctcttgtcgttctctctccaaggcctccctcccccgctttacagaggccatttgtcactgagctgggactagggcgtgaggctctggggaggtctgggttcacagtgcccctgccctgagccctgtgcacatggggagaattaaggggactgctgctttccagcccagaccccccccaccccagcactccaacgaggctgggactccacctccctgtaacttggacac

SEQ ID NO: 474128 - DNA, 482 bp, Homo sapiens
cttgcagggctcaaaggtcctgaactgcatggcaagggaatggggtcaccagactggactggctctttgtccaagaacaaagggtagtgatggagagaaaagagggtgtgatgagtgcaggcacccagggcactgcagggaargcagccagagcccctcacctgcttcaagtttactcaactccaagtaccggcagcctccagggacccctcctttctccatggcactgagaaagagcctagccatggcccatgctcttgtcgttctctctccaaggcctccctcccccgctttacagaggccatttgtcactgagctgggactagggcgtgaggctctggggaggtctgggttcacagtgcccctgccctgagccctgtgcacatggggagaattaaggggactgctgctttccagcccagaccccccccaccccagcactccaacgaggctgggactccacctccctgtaacttggacac

SEQ ID NO: 474129 - DNA, 482 bp, Homo sapiens
cttgcagggctcaaaggtcctgaactgcatggcaagggaatggggtcaccagactggactggctctttgtccaagaacaaagggtagtgatggagagaaaagagggtgtgatgagtgcaggcacccagggcactgcagggaaggcagccagagcccctcacctgcttcaagtttactcaactccaagtaccggcagcctccagggacccctcctttctccatggcactgagaaagagcctagccatggcccatgctcttgtcgttctctctccaaggcctccctcccccgctttacagaggccatttgtcactgagctgggactagggygtgaggctctggggaggtctgggttcacagtgcccctgccctgagccctgtgcacatggggagaattaaggggactgctgctttccagcccagaccccccccaccccagcactccaacgaggctgggactccacctccctgtaacttggacac

SEQ ID NO: 474130 - DNA, 540 bp, Homo sapiens
gggccatgacctgtgccagctcctacagtctctgcttggtgaggggctccacatgcatggyttctgggcactgtgtgccctcagcgaggccccttccagacccactgagtggcctggtctgagcccctgataagggctctaagagggtcagctcaaatgatgggggtgagggtggaggggatactctttggggctatgggaaaaacaatgaaacccactgctgaggtggagagctgaaggcagcgaagtttggaaggtagtggggagagtagatgggagcttgttccccaagcagaatttgggagcttcccttggaaaccagaagaggtcttttgatgggctataagtgagatgtttctttctattgggcaaagtgtacttttgaaacttggcattccagggctggcctggcctgaaacgtgatgcattcagaagggggtaggaagccctccaatctggagttataagagaccacgtggatggtggcaggagtgggtgggaagttctctctgagcccttgatgttcatgatgtggaggcc

SEQ ID NO: 474131 - DNA, 620 bp, Homo sapiens
cttcttgtttgaatctgttatcactgtgatggatgccaaatgacaattttctaatgttatcagtccttctagatttattagttggcattttactgtaaggtagggttttccttgctataccatatatttcttgtttattcgtttacatcaatatagactcatgacttcaaattttaatcaatttattactattattttttaattctgatttcaaattttcttagacttagccaatagaagcccctttatgacatgtttccatcattctttcatcacttccttattttctggcactacaatgtgccatgcttatcttgtattttcctgacctgccttggaatcagccttytctgccacgaattttggtttctttagtggaaagtggcatttagaaaaaactctgagcactagaagtgttcattactagcctctctcagcagagaccctagaaaatttttgtgtataaacaagtgtgcatatgtgtgttcaacagcaggaaatctggctacctttatcttcagtgtatgtacttacttgctcaattccccccatatgtaagcaaattactgtggctgaaagcttggccctagaaaagtgaattcatctctgcctggtatgtc

SEQ ID NO: 474132 - DNA, 669 bp, Homo sapiens
tgcttttgagcaaggtgttactattcttaccttacttaataggaggagatgctaagaggttaggcaatttttctaatgccatattactagcccatggcagtattgccatttgaactctgcatttcttttcttttttttttacttatgtctagtacattttccacaatattaaataaatacatttggaatacatagtgtgtgaaacatagtgccaattaatggtagttrctattattgttattatttgagaatgacctctcttgaggtttgagaatctgctccatgcgtgtatcattaaagcagtctataatgaacttatgcaaacttagttttagaattgaactctcttccatgactatatcagtcttgtggacagctgcagtggctcttgactctgagagactactagtcaaagcccaaggattttaagctcctccctcaggtggcccttcttttcctcatgggtactgaataactttcttacttcatggtcattggacttttgctactgacattgtggcttggtggcttcatttttctggctgctgttgatctgcatgcttccactgttcctgttgcttgctactacagagggcgtgaaagtcgaaatgtgtttttaccacccagaccagtgaatacattgctatgttagggtctcaaaagtagttg

SEQ ID NO: 474133 - DNA, 642 bp, Homo sapiens
tccagtagcccattgttaaaatcacataatatgaacatattgatccataactcctagtggttctttaacaaatgtgtagataagctgactcatgtaggactcggtttgggatgcagggaagagaaagactgaaacttgaggtactgctgcggtaggagaacaacaatatagggacattagtcagcccacgggcagtcgaagataactgtgcataggcataggatgaggcagttatgacaaaaccagatgaaaagagagaaaaatgcgagtaagtggtagagaataaaattcaacttgacttcctttgcatcaaacaagcccacaagaggaaaatatctaagtgttgggggaatatggtcatccagtaaataaatcacccttgccatcatttctgctgtgatctctttgcatkcatcttagtactgaggatatcagctccaccaggaaaaacagaagcacaatgctggcatcatcagaaacattgccatgaatgttctcagcagaatgatgccacagaaagaaccatagattggggtcaggagacaggtttcagacctggctcatgattaactttacctctttgaggctcatttgtagctcctttagtcactgtccgtaattcagtccccaccggctaggcag

SEQ ID NO: 474134 - DNA, 604 bp, Homo sapiens
gctgactattttttatgcctacatttccaaagtatgcctacattccaagtatgcttacattccaaagtgaggctcttgaaccaccaatgcccaaaatagggtccaaaccctattttgacacccttagtgtagtgtaatatctcctcctggcataaagagttgagtttgaagaggggttggaaattggaaagaaacaatccctttcagaaatattaacagttattgatttcttgtaatattactcttcattctcccaatagaaaaagggagttgttgctttcccccttaccccaagccaagtaagagtgacctcggaaagattcagagagctttacttttggtcctcagacatttgggggtcacaagagcctggtgtctaacttggaaatctaaagggcaacagttgtggctgtctagtggctctgacaatacaggaaagacaggacggtgcactgacagtagcctacacacttaaagtttgtccacataaatggctcttttgtatctcatttggacaatgtattagtttcccattgctcctgtrataaattgccataaacttcgtggcttaaaacaacacaaatttattatctcacagttttgg

SEQ ID NO: 474135 - DNA, 600 bp, Homo sapiens
cccaataaaaccctggcaaccaagtcttggatgagcaatcctgtttaacaacactttccccatgttgtcacacatggttgctgggaaaattaagtgctgtctgtgtccgtccagtgggagaggacaactggaagactacacccatttcttgtggactctaccctatgcatctttaccctttattggtttttatctgtatccctttattgtaatgtatgatgatgatgactgtaacagcttttgtaagttctgtcagtccttctagtgaatcatcccattgaagggtgatcatggggacccccaacaggaccatgttttattgtttcattcacacaaaagataaaatcatcttctattcataagtttatatatatatataaagtgtgtgtgtatatatatacatacacacaccagatatgaaattaatttgccackataaccaaccattttgacaaactttaggttgtctaaatcctacacaggatttaggcaagaaaaggcaagtgtgaaaatgagagttacttatattcagacaaatgatacataagtctacacaacagcccaaaggcaaaataccggtagctctgggaggaagacaaa

SEQ ID NO: 474136 - DNA, 626 bp, Homo sapiens
tgaaatttgcactcttgctctattgtggtattgctctgagtcctaaatcctcctttagattaaaagtagcctcttggttgcctctcttagaactctagaatgaagacttcatatagcaaaaacagactaaaaactgatgtttataatcctgactttgagtgatcactaygaagctaaataataattagcatgctacagtcaagaagaaggcaagttggaaggagtgtaagctgttttagaaatatatccctataaaatgaagtacatgcatagaaatggtcctggaaaaatgttcacccagatgacacaatggttatttctggataataaaattataagtgatttttagaaatgttttccttgactatatttcctaatctttctacagtaaacacacattgtaattattaaactaatttcaatttgaaaaataagatgtatatgagcactaaggaatacttaaaggaagaggttttttaaagaattttagagatttgtaaatcatattttattaagctatcttaagtacttagctcagtgcctaacacctagaaagcaaaatgtcagtagaatcagaatgaaattgtgtctccctttctacacaagacatgaccttagcatttcag

SEQ ID NO: 474137 - DNA, 618 bp, Homo sapiens
atatttcttagattcattccaatacatgttaaagattgttataacaaattatagcaaacccatatrtatgtgtgttcccacaacatttactgtgtatcatcattttaagcactgtattatactttgctgtaggtgttccattataacctttataagagcaaaggaccatatatttgtcatctttgtaacccacagtacctgacatagcacctataggtactaataaatgtttattaattgactgattgattaaacaaatgaagaaaagttttggtgacaccatttcatatctctattctaaaatcccatacattatatttaaatatggcttttaaaacactttgttttgaaagagatggtagcccatttagaaagccatttttgctaatagaagaaaattgtgtaactataaggattttcaaaagagaagtggattctgaaagcagatgtatttggttttgtgtgatggttgctaagggaacacttaaatgtaaatttcattttacgtaacgttcagttaaagtattgatcagaagaaagagaagatgcttcaagccaagtaataaagtgactgagaaactactttcttactgggaaaaaggattatatcttatgtaa

SEQ ID NO: 474138 - DNA, 538 bp, Homo sapiens
agtgagagaatcgcttgagcctgggaaatagaggttgcagccagccgagatcgcaccactgcactccagccttggcgacacagcgtgaccatgtctcaaaaaacaaactaaacgccacaactagccaagatggaaggttgaacacatttctgtrtctatcttaatatgtttcctgtatcatttccaggatgccaaaaaaaaaaaaaatcaactctctagccttcacttcaggtctttctcattagtccagaattgtccccttgtaagctacttgctacactgtccctgaataccactaactttatacagtcaccaagtcctctgctacaaggcctttcaaagtctgaaatctttaaaggatttccaggatgcatttttaaattccccaccagaactcagactaggacttcaaatatgaattacagcaagctttccacatttctataaataaaaataagactcatatgttataaattgctttcaggccttaaaacacctatctaatcgtccctatcacctttgagaccatggattcaca

SEQ ID NO: 474139 - DNA, 574 bp, Homo sapiens
gctactcagaaggctgaggcaggagaatcgcttgaaccccggaggcagaggttgcagtgagccaagatcgcaccactgcactccagcctgggtgacagagactctgtctcaaaaaaaaaaaaaaaaaaaaaaaaaaagaaagaaagaaagaaaagaagattgccttaaaactggatggggaattggaagcatgggttccagtcctgctctgtgtctaactcactccatggtattagatggaccatgtcacatctcctggcctcaggtgccttatttagacataaccaccttgtaaggccctgctgaggggaccagctgttcctggaagaataaagctgttctcaaacgcctgtacttacctgcaggggkagtgtgacctgggtttggagatcctcttagggggcaggggaggagttcatgctgagaataagtcattggcagagcagcagagccctggggaacatctgccaggaaaaggctacaccagggcatggagtgctgctgctcaagacactgtttaaagtaaccttctcagttagaaagtaacaaatactcactggggacagttagaaaa

SEQ ID NO: 474140 - DNA, 574 bp, Homo sapiens
gctactcagaaggctgaggcaggagaatcgcttgaaccccggaggcagaggttgcagtgagccaagatcgcaccactgcactccagcctgggtgacagagactctgtctcaaaaaaaaaaaaaaaaaaaaaaaaaaagaaagaaagaaagaaaagaagattgccttaaaactggatggggaattggaagcatgggttccagtcctgctctgtgtctaactcactccatggtattagatggaccatgtcacatctcctggcctcaggtgccttatttagacataaccaccttgtaaggccctgctgaggggaccagctgttcctggaagaataaagctgttctcaaacgcctgtacttacctgcagggggagtgtgacctgggtttggagatcctcttagggggcaggggaggagttcatgctgagaataagtcattggcagagcagcagagccctggggaacatctgccaggaaaaggctacaccagggcatggagtgctgctgctcaagacactgtttaaagtaaccttctcagttagaaagtaamaaatactcactggggacagttagaaaa

SEQ ID NO: 474141 - DNA, 573 bp, Homo sapiens
attagtttctggttgccttggtctacctctctgactgcactctgagtttcttgaagtcagaaaccacatcttgcaaatcactcagttcctagggccttgtaacatttgttaaatgaagccatgcatgcttgaaaaaaaaatagaataaaaaaaagcaggctgactgttttacatcaccagacctaaacttcctaaaatagtaagtggcccaacaccccttcaaaatggccagaaaaagacttctcgttatagatgatgccatagatttctgatgtatctctctaagggctgcgatgytggactcctgcatgagaagatcgagggttatctccaccacagttttgtgcagtgccctgcaagaagagcactgctgagacaggaagctgactcacctcatgatagaggctaggaattctgggtaagatagcagacatgtagccaactaaggaaatggaaacaaaaattcattaagcacgctagatgttatttcacttaacttcaccataaccagggccaccatgagacacaactctgggggcaccacgcatagcatagtctaatacgaagggcatc

SEQ ID NO: 474142 - DNA, 573 bp, Homo sapiens
tataaatatatacctgtcagctctttcttcttttgatgcgatgtaggaaaatagcaaaggaaaagtttaatacattcagttgcaagaaaatttcaacatctatacaatgaaaaatactgtaactacaataaaaaggaaaagtcaaaatataaaaagggttaatataataaaagtctcccaaaataaagaggtaatcaacatgaacagactaatcacaaaataaaaagcacaattaacaagcatataaagttatggttaatcatgagagaaacccaagaggggcaactagaatactgagaaactagtttatagaatttacattcgtccgcagttttctacatgataatactcattgctggacagattataattaaatcgatatatattcaaaggatcatataarttaatgtaacctttctagaatgtattcaggccatagaattaagagcttctgaccatggaccaggctactgtacttctaggaaataagagtgaataaataaataattcataaataattcaaaagattacatactccagtttccccacatgtaaaatgattctctacattac

SEQ ID NO: 474143 - DNA, 566 bp, Homo sapiens
agccactggaggcctcaggtgccgctcacatgtgctaatgaaaagtgctctggccaccttggaggacagggggagcatgttcctgctaaggcagtagggttcaaatttggctgcaggctagaatcctctgggagctgccacagtcctgatgtccaggccacagaccagagcagataagctgaaatttctggggatgggtgggacctaggcatcagtattcttttaagctggccaaataattccagcatgcagccaagtttaagaactagtacctaaggaaagaacactaggcagggcctacagacggtgtccttcttacctctctctctttttccttccatttctcttttcctattttcttctytccttccttccttccttctctccgcccctcccttcctccctccccccgactcccttccttccttccttcctttgttccttccttccctccttcctttttccttcctccttccttttcttctgcccttcctccccgcctccctttctcattagttactgaaacagcatattctgtagttaaagcccagagtttatagtcagac

SEQ ID NO: 474144 - DNA, 534 bp, Homo sapiens
aaaaataataaatgtttcaggtgagaaatacactaattaccctgatttgaatactacacattgtttacatgtgttgaaatactattctgtatcccataaatatgtacaattactacatgtcaactaaaaattaaaaaaataaggctgataggatcactatttagtcagacccctggtggctcaagccttccttgaggtttattttttgcctctggagagtagagacctcagtcactgttgcaccctcatgcccatgcccacccagtcctctggcatggtggcatggccacagtaggcacccatccgagaggccaacctgaaggaatggatcataccacactcacgcaagcaagagtctgartaaggcacctctaactcaggatagaactcctgactccaatcaggaatagcctccagaaaagaaaagtgcttttatggggacctccgcccatttgttagtcatttatccacatgaatccttaggccaggagtccaaaatgcacatacttttggaggcttagacaggtgacataa

SEQ ID NO: 474145 - DNA, 615 bp, Homo sapiens
cttttaaaatgcaaacaccatggtactccccaccttcatctgataacaaacacccttcagtgacttcctgttggtcctctgggatggagatgatgggtgatgggtccatcttctgctaaagtgcccttacccctcactgtgcttacccttaccctcatgccccagccttgtggccttctccaagctctcaaacaaccagacaccctcctgtcaccaccacagctttcccccttccttctccttgaaatgccactgtccttcccttccaccttcaattcacatctacttctctttcacatctcagatcaatgygacttcctcacctacaccctgatggggtcaatctctccttttaagaccctcagagcactaagcttcttttcttcctcctacagttaggattttcaatctctacttttcttttttcttttaagagataaggtcttgcactgttgcccgggctggagtgcagtggcacgatcataactcactggagccttgaacttgagtgatccttctacctcagccccctgagtagctaggattacagattggagggaaagttccctagggtatcatccatgtctgtcttgttcactgctctacccggggcca

SEQ ID NO: 474146 - DNA, 615 bp, Homo sapiens
cttttaaaatgcaaacaccatggtactccccaccttcatctgataacaaacacccttcagtgacttcctgttggtcctctgggatggagatgatgggtgatgggtccatcttctgctaaagtgcccttacccctcactgtgcttacccttaccctcatgccccagccttgtggccttctccaagctctcaaacaaccagacaccctcctgtcaccaccacagctttcccccttccttctccttgaaatgccactgtccttcccttccaccttcaattcacatctacttctctttcacatctcagatcaatgtgacttcctcayctacaccctgatggggtcaatctctccttttaagaccctcagagcactaagcttcttttcttcctcctacagttaggattttcaatctctacttttcttttttcttttaagagataaggtcttgcactgttgcccgggctggagtgcagtggcacgatcataactcactggagccttgaacttgagtgatccttctacctcagccccctgagtagctaggattacagattggagggaaagttccctagggtatcatccatgtctgtcttgttcactgctctacccggggcca

SEQ ID NO: 474147 - DNA, 632 bp, Homo sapiens
ggcaatttatgttataaaattaataagatatgagggtttaatagaaatcacttcttgttgctcttcttgggaacaccagcctctggcgtcagcaggaatcatctgccctacaaattcaggcataccatccagctgttgactctcttatttatatattttcctcttacctcctctaagtgaactaagagcaaagagcttgcttattattttcatgagatgacctttccctacatgtttcaaggatactttccattgtgaccaacacagataatgccagggagcaaatragttctgagcactgaataattgtgaatgctctgacatcctctgaaaatattatcagagctccaagttgctacgtatccatcatgtcttctctgggagttttttttttttttctccttaaactaaactgatcttaactttaactgaaatgctcaagagcctttggagtctgccaattttctcagttaccttgaccttgaagatatgtagtctcctttggataccctcaaagaaagggctttgggaaggcaatgcatatgtgtttacaatagctgaaggatgagatgtgaattattctttttgtcctttggggtgagccttcatgatttcacatcctgagaacacag

SEQ ID NO: 474148 - DNA, 552 bp, Homo sapiens
atgtgaaggcctaggacactactatgcactactatagactttataaacgctgtacacttaggctacactaagtttataaaaaatattttttcttcaatgataagttaaccttagcttactgaaagaccactgtcatatatacagtacatccttgactgaaatgtcattatgtgacacacgactgtrcagatatatatatatatatatatatatacacaaacatatatacactcacatggttaatatatatatactttcatgattacataatcttgacaacccacccatacattctaaattatgcttgcctcaggaaagaggtagattacctgtgattcttgaagtatgtgagtttggagtgttagagatctgagaagcagatactacacatcaccatcaaagttctgcaggtggagatgattagagatggctccaataattatgtgtattttgatttcataaaacactgcatagaatgaaatagcatgtgtaggatgccagcaacaatgtatagagacacctgcaggtatacaagaaacttctaaccccaga

SEQ ID NO: 474149 - DNA, 667 bp, Homo sapiens
aatatgtatgtaggggggtggtatggcttatgtttggcctaattggagtatcacattccatgttgaaagcaatattaagttacatttaggaaacaggaatattatatgttaaaaaccagaaaaaagctacacatctggtatattttagttgtgggatatgtaatatctctatccctcccaaattctgtctactggaaaccaaaatgaacaacttgaggaygtgttttctttcagttgaaacttgaggcccaaacagaaaggttggtgaatggattgaaaatggatgtgaaaaatcaatagcaatggaacaaggagattagagcctacaaaataaatgactatttctaaagggatcaaatcttgggatatatggggcttggaggcagtttacactgaaaacagcccaacagaagagcccatggagtgactccaggatgctggaaagtgaatcaaccttaagccatggtcagaatacaggatccaacagctctgtatcagaagtaggggatggcttccttctgggcctcgatgcttcttctagactctcccaatcttatttggtagcacatacagtcacctattagaggaagattttccctggtgggaggaaatatgtagctatctactggattgtgtgcaaagcccaaaataatttaggcgagggcct

SEQ ID NO: 474150 - DNA, 413 bp, Homo sapiens
atttaattcaaaaatttaaaatatgtagaattagccaacttttgatgctggcaaacaggaaaaacttgtcttcttgagcaaattactgattctctgaaccataaatttttcacaattgaaaaacagtactatcccacctcctatgattgtttttaagattacccacctcctatgattgtttttaagattaagtgagatacaacacatttatatatatactgcttatattaagcacacaatacattttagytcttttcctttagtcaagcttcttatacataataatcactgtataaatatgtatggaaagaaataaaatttagcattcaatacatttaaccttgatagactctaattactcaccatccatttttttctacagtagactcagattcaacacacacattttgagc

SEQ ID NO: 474151 - DNA, 506 bp, Homo sapiens
atttaggatggtgggtaaaatggttggaaatcctatcttttggagcacagggctgtgatgagatgggggaagtagcaggggagataggcctggggctgatgttgtctttttaaatctagttcaatgtgtggtgttagccgtaaaacactttttttgcctaaagaacatggacagataaataggttagataggtaggtaggtaggtggataatagatgggtggtagatagatggatgatagagagatgatggatagatgatagatggatagataatagatacgtaatagatggatgatggatagatggatagtttggcagatggatagatgatagataatcaatagatggataaaagatagatcaacgatagatagacagacagacagatagataggaatctmttttctgtttaccaaagcaatatatttctccttgtaaaaagtctagagaatatgaaactgtaaaaaaaaaaaaaaaagtcagggtggctggacgcagtggctca

SEQ ID NO: 474152 - DNA, 567 bp, Homo sapiens
caagtcacattcgtttccaaaaagcyctgtatactgctacttgtgtgtttgttaacaatgtccccacaacaggtctgcaattagagcccatctgttcagtttctcagagagcattgccaactgacgctggtgaacttggagccctcattgttgtgaattcctgaccagaaaccctgagtgggaagctacttgtccttgagtgtatgtctggggctggaagccccttgggtaccagtcctaatgggcacgtataataaatatgaaggaaggaatgatcaggtgatgacagggggtgcttatgtggactccatgaggtgtctgtgctggtcttctcaattaaaaacagactcctaccctggcagacctgcccatctgtctggctacatctttttggtctgtctgccactactggtacctagaggtcattttccagtcaatgctatgtggttgaaatcaggtattgttatttccttcaggaggtgagaggtccccaatcacatcccagtaagagatgccctgtagtcagtgttcaccacaaagtccattctcacaaaggagtcaatggta

SEQ ID NO: 474153 - DNA, 567 bp, Homo sapiens
caagtcacattcgtttccaaaaagctctgtatactgctacttgtgtgtttgttaacaatgtccccacaacaggtctgcaattagagcccatctgttcagtttctcagagagcattgccaactgacgctggtgaacttggagccctcattgttgtgaattcctgaccagaaaccctgagtgggaagctacttgtccttgagtgtatgtctggggctggaagccccttgggtaccagtcctaatgggcacgtataataaatatgaaggaaggaatgatcaggtgatgacagsgggtgcttatgtggactccatgaggtgtctgtgctggtcttctcaattaaaaacagactcctaccctggcagacctgcccatctgtctggctacatctttttggtctgtctgccactactggtacctagaggtcattttccagtcaatgctatgtggttgaaatcaggtattgttatttccttcaggaggtgagaggtccccaatcacatcccagtaagagatgccctgtagtcagtgttcaccacaaagtccattctcacaaaggagtcaatggta

SEQ ID NO: 474154 - DNA, 564 bp, Homo sapiens
ctgcctggcatccacaggtgccccttctaaccatctgtctactgcccaagcacaargcatttattaaaggccccaggcattctcttaagagcaagaggagctaagtagaagcacacaccctcatctgcatcttgcgacaagattccactgactgctggtagagaatagatggaggaggtcaagagtgaaatcaggagtgacacccactgctgagccccttgaaggtgttcagatgagagatcaggagccaaggctgggctggcattgggagaggtagggagaagtggtcaatttgagagatgtgaggtgttctcatctttgtgcttaccttaattttatttgaagaatataaaaattagctctgactgactaagcattaaggggagggaggtgtcagctcaccagagagcctagacagcccctccagggaccttgctgtcacttctcactgcctctgctgtcagggtgaggggcttggagcccctgctcctggagttgggggttgcaggagccagcagatcccaggggaccagcattcagactgattccccaagaactgagcaa

SEQ ID NO: 474155 - DNA, 564 bp, Homo sapiens
ctgcctggcatccacaggtgccccttctaaccatctgtctactgcccaagcacaaagcatttattaaaggccccaggcattctcttaagagcaagaggagctaagtagaagcacacaccctcatctgcatcttgcgacaagattccactgactgctggtagagaatagatggaggaggtcaagagtgaaatcargagtgacacccactgctgagccccttgaaggtgttcagatgagagatcaggagccaaggctgggctggcattgggagaggtagggagaagtggtcaatttgagagatgtgaggtgttctcatctttgtgcttaccttaattttatttgaagaatataaaaattagctctgactgactaagcattaaggggagggaggtgtcagctcaccagagagcctagacagcccctccagggaccttgctgtcacttctcactgcctctgctgtcagggtgaggggcttggagcccctgctcctggagttgggggttgcaggagccagcagatcccaggggaccagcattcagactgattccccaagaactgagcaa

SEQ ID NO: 474156 - DNA, 515 bp, Homo sapiens
atttggatgtttttagttaaaaaaaagacacatgattatattgaaataataccatgcttaatgtagccacccayagttcacgtttttgccaacgtttgtaattggtgtatatggaacccaagaatcagagaataacaacaaccataatgataaagctttattgatcccttgctgtgtgccaggcataaagcaggctccacactcccggtctttatctccaatttgaagggcttatggccccaccccgccctgccccaccctccccagcagcctcttgctgcacgcatgaacctttcgctttgggtgcacagaggacagctcacgcacatgtgtccaccagccgtttcccagctccatgaatttgtggtgcattcccaggttgaggcagtgagcaccctgcacaggtggggaggcttgtagaagtatgaagtgccttgacttcaatggaaggtggtgatcatcatttctctatcaccaatgggatgatgtgctttggaaaaggctttggaaattgc

SEQ ID NO: 474157 - DNA, 644 bp, Homo sapiens
tgtgcagatgacttttcaattgccacgtttttttgttcttttgctataaccacttaccatctatgctactgattacttaatatgtttcttcaaagagactctctacttaaacagtttattttataagaaaactttatattatgattgtaaataggaaacctggcataaatagaatataaatagacacacaaaaatagtgttattcatagaattagctaagatatatacctaaaacttgctcttttcttgttaaaaggaaagctggcaagaattagcaaagtattaaaggcatatgagcaccgaacttagactttctcttgtcattatgatcataagaaggatcaaaagagttcatttcctcattarctcatgaattagtgttgtgcccatgtgtcacctaaaaatcacttgagtgccactggaactttgggaaatgctaaactaaccactaatcaatagttatgcccttatatttaatttgctcacttttttttctctagactgaaagtccctcaaatgcaaacaatagacttgtatttcttaacagtttcacccaagaaccagcaattttagagctcataataggcactcaataaatgtttgttgccctggtcaaatctagctgcatcttaggtttagaactc

SEQ ID NO: 474158 - DNA, 636 bp, Homo sapiens
gttccaaagataggtttctagacttcttggactatgaatccttttttaaaaaattagcctcatatttaacatgtaaggacaatgccatatattgctatagttaaggcctgagtagaatctcaatgaatccccaacagaagtgatttgttagcaggcacttcagatcaccagcgacaattcatttctgtaaaataatgtaaactaattatctacaatgyggaagcaaagactgcgcctgcatgataaattgcagaatattgcattataaaaagaaatattaattcacataacataaaattaaaattgatgacaaactttttcctcttttaattgtttaattttttaattactattgtcttgcagcagcagacatcacatacctcaagaggcacacaaatgtatttgcctgaaagcacattctttgcagaaaaaaatgtttattcagaaaatgagtgtttattagttctttcttttatttcatgaaaatttattttctctcctgggaaataaattttaatgtgctgtcttttttttttgcagtgggaggattttttcctagcacacgagtacattttttatcagaaaaaatcttaaacttttaataaaatgaaggaagcaaaaccatcaagataaaca

SEQ ID NO: 474159 - DNA, 636 bp, Homo sapiens
gttccaaagataggtttctagacttcttggactatgaatccttttttaaaaaattagcctcatatttaacatgtaaggacaatgccatatattgctatagttaaggcctgagtagaatctcaatgaatccccaacagaagtgatttgttagcaggcacttcagatcaccagcgacaattcatttctgtaaaataatgtaaactaattatctacaatgcggaagcaaagactgcgcctgcatgataaattgcagaatattgcattataaaaagaaatattaattcacataacataaaattaaaattgatgacaaactttttcctcttttaattgtttaattttttaattactattgtcttgcagcagcagacatcacatacctcaagaggcacacaaatgtatttgcctgaaagcacattctttgcagaaaaaaatgtttattcagaaaatgagtgtttattagttctttcttttatttcatgaaaatttattttctctcctgggaaataaattttaatgtgctgtctyttttttttgcagtgggaggattttttcctagcacacgagtacattttttatcagaaaaaatcttaaacttttaataaaatgaaggaagcaaaaccatcaagataaaca

SEQ ID NO: 474160 - DNA, 524 bp, Homo sapiens
ggtattttgatttacttaaccaggatattgattactgaagtatgatacctgctgatctattgaagttttatggaagttaagaaaaactggagagaaaagatttttttccttgctcagcttttttatgtctaagcattagyacttactactacttatgcctcagagacagaatgggcatcatctctgcaaaacaaaataaaacaaaacaggctcggtatggtggtgcatgtttatagtcccagctacttgggaggctgaggcaggaagatcacctgagcccaggagttcaaggccagtatggagaatgtggtgagcccccgtctctcaaaataaaaaaaaaattaaaaataaaaaagccagaactaccataacatgttaccataaaacacttattgaacacctactatgtgtcaggtattgttcaaagagctaggatccctgagaagtaggaactgtcatgtccccactttgtagataagtaaaatgaggcacagaaggataaatgacttgtccaataccagaca

SEQ ID NO: 474161 - DNA, 524 bp, Homo sapiens
ggtattttgatttacttaaccaggatattgattactgaagtatgatacctgctgatctattgaagttttatggaagttaagaaaaactggagagaaaagatttttttccttgctcagcttttttatgtctaagcattagcacttactactacttatgcctcagrgacagaatgggcatcatctctgcaaaacaaaataaaacaaaacaggctcggtatggtggtgcatgtttatagtcccagctacttgggaggctgaggcaggaagatcacctgagcccaggagttcaaggccagtatggagaatgtggtgagcccccgtctctcaaaataaaaaaaaaattaaaaataaaaaagccagaactaccataacatgttaccataaaacacttattgaacacctactatgtgtcaggtattgttcaaagagctaggatccctgagaagtaggaactgtcatgtccccactttgtagataagtaaaatgaggcacagaaggataaatgacttgtccaataccagaca

SEQ ID NO: 474162 - DNA, 603 bp, Homo sapiens
tgtagaagcctgagctgcaaacacacccgattcagggctgtaccacctccacacaggcatggaccagatactctttttttgtaatttgtaagatattttttcctataggatacactttagggaatttcctctttctatatttcacatttctctattatttgaacttataacacaaatcagagaagagtatacttattttaaatatttagatattaaaatatttaatattaaaataatttagacattattttaaattagtcttcccttttttctttctttcttttccttttctttctttctcttttttcttctttcttttcctttctttctttctttctttctttctttctttctttctttctttctttctttcttctttccttccttctttctttctccccttccttcctttcttacttcccttccttccttcctttctccccttccttccttccttccttccttcctgccttccttccttccctccctctctctctctytttctttctttcttcctttctttctttccttcactacaagtatgccaacaacctgtaaggactatctttagagttcagtaaagcaaaaatttgatcaatagga

SEQ ID NO: 474163 - DNA, 665 bp, Homo sapiens
cgaaactgtagaagcctgagctgcaaacacacccgattcagggctgtaccacctccacacaggcatggaccagatactctttttttgtaatttgtaagatattttttcctataggatacactttagggaatttcctctttctatatttcacatttctctattatttgaacttataacacaaatcagagaagagtatacttattttaaatatttagatattaaaatatttaatattaaaataatttagacattattttaaattagtcttcccttttttctttctttcttttccttttctttctttctcttttttcttctttcttttcctttctttctttctttctttctttctttctttctttctttctttctttctttcttctttccttccttctttctttctccccttccttcctttcttacttcccttccttccttcctttctccccttccttccttccttccttccttcctgccttccttccttccctccctctctctctctctttctttctttcttcctttctttctttccttcactacaagtatgccaacaacctgtaaggactatctttagagtkcagtaaagcaaaaatttgatcaataggaactcatctaatggtttcattcactctacccttggaaaggaacagataataagaaaa

SEQ ID NO: 474164 - DNA, 535 bp, Homo sapiens
tgcagaaataacacaaactcatggacccacacgatagatcagggacaggaagccaaggagcagtgtccttactaaaaggaattcaataaattgttggtaaaagcaagtcttcctttctcacatacataagtggacatagtgctggagtagaattaaaaatctgggttccagttttagctccaactaagttgcattaacagaaggtagttttattagttgcgccgtgttggttttttcccgagttgccacagggctgcccatgtgttattctctctgcagaatactgcgggagcccttgccgcgagaagaagcttagtaaacatctgcgttgagaggcttattttaycgattagtggacagaggcccagcaaagctaagcgccttcctcaaagccacacatcaagcatctcctcggtgccaggcggtgccctaagtagtggaactcacagatgactgagaccagggtctagggaggaagcatggcacttcactactacacggatcagagcaatgggtaaggtgctggggaagctac

SEQ ID NO: 474165 - DNA, 681 bp, Homo sapiens
tgagtgacaccaactccaggacactgatcacagatccagtcctccctgcctgcaccagaatcccattctccttttaaaataatgacttaytgttacttgaagagccatttagattcactaatctatctaacatcaacactggagaaaatacagagtgtgtatagattcttgggatttagggcgcatcagtcaggagtttattgattgtgagtgacagaaaacacaactgtaactgcttagcaaaaataattattttaaaatgtattcttataaataaaaaattaagatatctgccttcaggcatggcttgatccaagggctttaacatcatcatcaggactcagtttctcaccacctctgcattctgcttcactctgttggctttattctcagacagcctttctctgtggtcacccctggtagctccagactcactccgcctagctccacgtcccacagaaatagagtgtttctcttcctcatgagcgtaaacaaaattcctatgcttgactctcattggcccaaattgagtcacatgtttatctctgaaccaatcactgtggccagaaggatgggattatctgattggcccaaccaaaacacaggtgagggtggagtcaacaccacccaaactacttgactttgatatgagaggtagttaaccctgaaggaaaattgaga

SEQ ID NO: 474166 - DNA, 681 bp, Homo sapiens
tgagtgacaccaactccaggacactgatcacagatccagtcctccctgcctgcaccagaatcccattctccttttaaaataatgacttactgttacttgaagagccatttagattcactaatctatctaacatcaacactggagaaaatacagagtgtgtatagattcttgggatttagggcrcatcagtcaggagtttattgattgtgagtgacagaaaacacaactgtaactgcttagcaaaaataattattttaaaatgtattcttataaataaaaaattaagatatctgccttcaggcatggcttgatccaagggctttaacatcatcatcaggactcagtttctcaccacctctgcattctgcttcactctgttggctttattctcagacagcctttctctgtggtcacccctggtagctccagactcactccgcctagctccacgtcccacagaaatagagtgtttctcttcctcatgagcgtaaacaaaattcctatgcttgactctcattggcccaaattgagtcacatgtttatctctgaaccaatcactgtggccagaaggatgggattatctgattggcccaaccaaaacacaggtgagggtggagtcaacaccacccaaactacttgactttgatatgagaggtagttaaccctgaaggaaaattgaga

SEQ ID NO: 474167 - DNA, 681 bp, Homo sapiens
tgagtgacaccaactccaggacactgatcacagatccagtcctccctgcctgcaccagaatcccattctccttttaaaataatgacttactgttacttgaagagccatttagattcactaatctatctaacatcaacactggagaaaatacagagtgtgtatagattcttgggatttagggcgcatcagtcaggagtttattgattgtgagtgacagaaaacacaactgtaactgcttagcaaaaataattattttaaaatgtattcttataaataaaaaattaagatatctgccttcaggcatggcttgatccaagggctttaacatcatcatcaggactcagtttctcaccacctctgcattctgcttcactctgttggctttattctcagacagcctttctctgtggtcacccctggtagctccagactcactccgcctagctccacgtcccacagaaatagagtgtttctcttcctcatgagcktaaacaaaattcctatgcttgactctcattggcccaaattgagtcacatgtttatctctgaaccaatcactgtggccagaaggatgggattatctgattggcccaaccaaaacacaggtgagggtggagtcaacaccacccaaactacttgactttgatatgagaggtagttaaccctgaaggaaaattgaga

SEQ ID NO: 474168 - DNA, 681 bp, Homo sapiens
tgagtgacaccaactccaggacactgatcacagatccagtcctccctgcctgcaccagaatcccattctccttttaaaataatgacttactgttacttgaagagccatttagattcactaatctatctaacatcaacactggagaaaatacagagtgtgtatagattcttgggatttagggcgcatcagtcaggagtttattgattgtgagtgacagaaaacacaactgtaactgcttagcaaaaataattattttaaaatgtattcttataaataaaaaattaagatatctgccttcaggcatggcttgatccaagggctttaacatcatcatcaggactcagtttctcaccacctctgcattctgcttcactctgttggctttattctcagacagcctttctctgtggtcacccctggtagctccagactcactccgcctagctccacgtcccacagaaatagagtgtttctcttcctcatgagcgtaaacaaaattcctatgcttgactctcattggcccaaattgagtcacatgtttatctctgaaccaatcactgtggccagaaggatgggattatctgattggcccaaccaaaacacaggtgagggtggagtcaacaccacycaaactacttgactttgatatgagaggtagttaaccctgaaggaaaattgaga

SEQ ID NO: 474169 - DNA, 611 bp, Homo sapiens
cacatcatttttggccctaggctgaaaacagcatttgctacacacgttagccattagctctatgatgctttcccctrgctgcccacggcagaatgacgcatacctttccctggactcctggaacaagttagtcaaacctcccttaggatttaccaggtcgtgaggtttatttatactttcatgtctgattcctgggtccaactttgagctcctgtaggattttatttatttatttacctatcttaatcactggagcctagtacagtctggccagataataggtgtcaggtaaatatttgttgaataaagaaacagataaacagccttctatcagaggagcaatgctactcataggccccttttctgagttcttccttccttggaaaggtcttttggggttgagacgactacctcaggagggacacacacagaccaatgctgagaaagggggagggttttctgccaaggcagataagccacaacagcccagagatgccaggtgtgacagatggcacaagtcaatgaactgtgttttgccagaattctcactttgcttaatacgattagtcactgctcctctctagttaaaagctacctcatactctgtggct

SEQ ID NO: 474170 - DNA, 550 bp, Homo sapiens
cctttctgctaggcactgtgtttttttatgtgtctttcacagattagctcatttgagcctctcaacaatccaatgaaatagggattcttactgtccccattttacagaagtgggactgctgggtgaaaggacaagtacattttgcatcttgattcacactttctagctgccttccaaatgactgtaccaattaattctaccctcaacagtacaaagggtcaatttcccttccccgcttgccaatgctggatactatcaattattttaattgccagtcatagccaaactgatatgtgaaaaattataactcattatagatatttgtttttctttcatttttaatgagtgtcttagtccattcaggctgctataacaaaatatgatacactgggtggctgacaaacaacagagctttatttctcatggttctggaggctggaaagtccaagatcaaggcaccagcagatttggcatyttgtgatggcgcatttcctgaatcacagatggtaccttcttgctgtgtcctcacaaggtggacagggcaaagcag

SEQ ID NO: 474171 - DNA, 576 bp, Homo sapiens
taatacatcaattgataattcttgcctgaatcagtgattccattagagatcagggtggaattttgacctggcattcccactctgtggaactatggtttggtctgaaatatgcttttggtctctgagggcctgatctccctccaagttggaccatctggcttagacccaccatcaccaggcccaggggcagaggtggcctgagatgggaaggggttgggagacctggtgactggtacctgcttctgaaaggcagccaccttggtgtgtctatgcccctctctctatccaatgcccctgagggcctgggctctgtctgtgtggggttgtatcttcctgcagcagagctctgcctgtctgttggattagactctcctaaagcctgtcttgttccctggggccygatcacaatgaaccagccatgcagagctgcatctggagatacagtcatgtaatgctggcatcaccaaccactggtaaggtgcccatcagataacaaacatcaggacacttaggaaagtttgggtggggtgcacatactccctccaccctggactccctcctggaaaatggctcagc

SEQ ID NO: 474172 - DNA, 597 bp, Homo sapiens
gtctaaaaggggaaggaacccttagttcagggaattgcccgcccctttcctgggaaactcatgaataatscaccccttgtttagtatgtaatcaagaaataactacaagtataatcagtgaacagcccaagccactgctctgcctacggagtagccattctttgattcctttactttcttaataaacttgcatagactttacttatggacttgccctgaattctttcttgtgcgaggtccaagaatcctctcttggggtctggatcgggatccctttccagtaacagaatggtcactgtgcctatctggatgttggttactgcatcggtgacatctctgctcatctgccacctggcttgctctttctcctgcctccaatctgcgctcgagaatgccaaggcataatcatgacattaaccacaaacaacttcttgagcacttactaagtgtcagtcattgcacggagcactacatgcatttcgtcactgaatcttctctaagtgggtcctcttgttatctctattctaaagagagacttagagaggtttgccaacttacacaacacataagaggcaaggatggtggttgggccagcag

SEQ ID NO: 474173 - DNA, 644 bp, Homo sapiens
accacaagccaggagagacatggaacccgcaagaaggacagagattgtgagctggccggaagcagaggacagagaggaagggagagaggacctgagggcacaagaagggtcatgacccaggggtccagtgctcttcctgcctgtctgccagtatctccaggaattgagcccctttctgattcactccaacccaggctactccagcctratggtctcctggacagatgctctagcttcattccccgaggttaccctctttagagctcctggggcttccaaaaagacttcagtggctctcaaagctgaagcctgatgatacttagctcttgggcatgagacagccagtaggttggtatggcaggtgacttgcactcccaccatcctgcctgtgtgtaaaacccctgcccctaggcacctccttgcacctctaggggacatagcccagtacctaagcagcctacctagccccagctccccgctgggcagagcaagggcctgagagggacccttggctgctggatccagggtgttcaatgtaccaggcattgcagggggagaaaagagagagacatggggccagctccctgccctttggagcctcgggcccaggacacaggctcagcaagccccaagcatgcaggagc

SEQ ID NO: 474174 - DNA, 540 bp, Homo sapiens
acaccagccacgcaggagaggaggcaggttacctatggagggggtggggagggatgatgagttgcattgagcttgaggacccaggtgaagacatctggttgaatgcacaggtctggggctcaggagagaggaggctggatgtgcagacctgggaggacatggcacctgtagacccaggtccatccctgtctccccgtcagctttcagccctgcttccttatatttaaatgttcacgttctttgattcatcaaccagatgttggaaccctgatgtgtccctcatgctgtgccaagccctgagggaaaacaacaagcaccaccagatgtggcttcaacccggtcagattaatctcactcagaagccaaggaggcctgacaccccatgtcccaggttgggttccccagaagcaggccctcacacaaggatgtgagggcaagcagcagattagggargtggtcctaggaggtaccagcaggagagtggggaaggacatgggaggggaaggaagctaacacaggctagaggaaggggcagtttac

SEQ ID NO: 474175 - DNA, 625 bp, Homo sapiens
cttcccaaattctccttcataaaagcagcccagaggcctggcaagcagcttctgccaggctctgccatttgccccaaggaaggaggatcgatatgacagcccagccctcgctacctcaccaccccctcccctccagtgagccaccstgggggtcttcacctggcaaccctccgccaaagctcctggctcagtcacaggtgcagcagtggcatagagcgtcagagcatgggggccacagaggccccagtgccaggaatagaaaccagagccccaggccagcacaccactggggaggggcaggaggggagagacagacagacagagaacatcagagacacacaggaagagagcaaaggcagaaagcgtgaagacacacagacggggccccctcctcatgtgccctcccacagcactcgccatcagcatatgtaactctctcctctctggggctgggggtaagagggggacaaggaggacccttttagaaccagcaaataaaagttgggcagcaatttgggcatacatttctttagtttctattctcctcaagtctcctaagcagggaaagaggctccggggcaaagtgagggaggacagatgcccatggggcagggtatgggggtca

SEQ ID NO: 474176 - DNA, 625 bp, Homo sapiens
cttcccaaattctccttcataaaagcagcccagaggcctggcaagcagcttctgccaggctctgccatttgccccaaggaaggaggatcgatatgacagcccagccctcgctacctcaccaccccctcccctccagtgagccaccgtgggggtcttcacctggcaaccctccgccaaagctcctggctcagtcacaggtgcagcagtggcatagagcrtcagagcatgggggccacagaggccccagtgccaggaatagaaaccagagccccaggccagcacaccactggggaggggcaggaggggagagacagacagacagagaacatcagagacacacaggaagagagcaaaggcagaaagcgtgaagacacacagacggggccccctcctcatgtgccctcccacagcactcgccatcagcatatgtaactctctcctctctggggctgggggtaagagggggacaaggaggacccttttagaaccagcaaataaaagttgggcagcaatttgggcatacatttctttagtttctattctcctcaagtctcctaagcagggaaagaggctccggggcaaagtgagggaggacagatgcccatggggcagggtatgggggtca

SEQ ID NO: 474177 - DNA, 440 bp, Homo sapiens
gtaaacaggaagaggtcaagtagccttggggaaactctgtaccttgcctgaggcatggcagataataacactgactactcacccttattgagcctggccctgtcctaagcatttttatgcatcaactcaatgaattatcaccaatgagattggtacatttataaccccattttacagatgaggaagccaaggctttcaagtaacgagcccaaagtgtcatacggcagaaagggggcaagtcacgygtctattccaccaaaccctgagcctcctgaggttaggggctgtgtcttgtttgtatctgaagtccctgtggaccctaacaatcactgtgcttaatggatatctggtgaagtgaaagcctggggcagggggcgctgtcactgtgttctccaccctccccaccctccccatcccaggaggaaattaccaggctcagt

SEQ ID NO: 474178 - DNA, 566 bp, Homo sapiens
  misc_feature (1)...(566): n = A,T,C or G
ctgctgcagaccttgaacatcctctttgagaacatcagtcacgagacctcactttgtaaggacattccttggtatttgcctctgtgctgctgtgcatgtagcagggtgaagttgggcgtggttttctgtgtctgcgcttactattcgtcggctcaggctatcctaacaaaataccatagactgagtgggttaaacaatagagatttgttttctcactgttctggagcrttgaagtccaagattggccaggcatggtatctcatccctgtaaccccagcacttaggaggccaaggtgggcagatcacttgagctcaggagtttgagaacagcctggacaacaaggtgaaaccccgtctctacaaaaaaccacaaaaattagctgggtgtggtggtgtgcacatgtagtcccagctactcaggaggctgaggcaggaagattgtttgtcaaggaagtcgaggttgcagtgagccgtgattgtgccactgcactccagcctgngtgacagagcaagaccttgtctccaacaacaacaaaaaaaaaagttcaagatcaagttgccagcag

SEQ ID NO: 474179 - DNA, 566 bp, Homo sapiens
  misc_feature (1)...(566): n = A,T,C or G
ctgctgcagaccttgaacatcctctttgagaacatcagtcacgagacctcactttgtaaggacattccttggtatttgcctctgtgctgctgtgcatgtagcagggtgaagttgggcgtggttttctgtgtctgcgcttactattcgtcggctcaggctatcctaacaaaataccatagactgagtgggttaaacaatagagatttgttttctcactgttctggagcattgaagtccaagattggccaggcatggtatctcatccctgtaaccccagcacttaggaggccaaggtgggcagatcacttgagctcaggagtttgagaacagcctggacaacaaggtgaaaccccgtctctacaaaaaaccacaaraattagctgggtgtggtggtgtgcacatgtagtcccagctactcaggaggctgaggcaggaagattgtttgtcaaggaagtcgaggttgcagtgagccgtgattgtgccactgcactccagcctgngtgacagagcaagaccttgtctccaacaacaacaaaaaaaaaagttcaagatcaagttgccagcag

SEQ ID NO: 474180 - DNA, 402 bp, Homo sapiens
agacatggcatagagaagccagagcaccaacaggggcatggtaatcatcatccgggctttccagcgcgtgggcaccaccatatccagaagggtttggaaaaaaagaaggggcatgtatgagcctcacggtgcacaaggggttgaacacctcccctctctaacctgcacatggggtgctagctgcctttgacacagctctttaggccacaactgtgtgcctggtccagcaccacgcactgaggacacagacaaatgagagacaggctctgcctgsggaagccgctatccagaggggaacctgaccaaggaacagactgcttgcttagtcacacaacaatcattcaccaggtattccagacacagggaatcaattatacaaactccccacaccaaagctcccgt

SEQ ID NO: 474181 - DNA, 402 bp, Homo sapiens
agacatggcatagagaagccagagcaccaacaggggcatggtaatcatcatccgggctttccagcgcgtgggcaccaccatatccagaagggtttggaaaaaaagaaggggcatgtatgagcctcacggtgcacaaggggttgaacacctcccctctctaacctgcacatggggtgctagctgcctttgacacagctctttaggccacaactgtgtgcctggtccagcaccacgcactgaggacacagacaaatgagagacaggctctgcctgcggaagccgctatccagaggggaacctgaycaaggaacagactgcttgcttagtcacacaacaatcattcaccaggtattccagacacagggaatcaattatacaaactccccacaccaaagctcccgt

SEQ ID NO: 474182 - DNA, 588 bp, Homo sapiens
gctgccagcaggaagcactcttcctttaagcggagaggcaagctgagttttttcctcctttcctcttcaacctttcaaggagtttgttggtttctgaaaactattaagctagggcacgaaggtttagatttctcatctgttacaagggcttacatttcttccgggaagggggattcaattttactgttgtagcaatttttcaccacaagaatctgctgacttctttttctgatactgagatgccaggtttggcacattctgggcaggtggagggcatcctcctctctctgcaatgtcctctactctctgcctatttaaattccacctattcttcaaagcccatttcacatccttcgatgtcctccttgaagccctccctggccttttgcacccatactcaggtttctgacatcttaaaatatttacygcttgctcatagtcacattctcatagaaggcatcatggtgtcataaacagaccctgggctggaaagcaggatacttcagatcttgtcccactgctaaccatctatgtgactttggataagtgtttgtactctctgggctttagcttcttcattttaaaaag

SEQ ID NO: 474183 - DNA, 578 bp, Homo sapiens
acctctaaggatgctacatgtttaacggagacaatttaagatattttagtgagtcccttaagcattcgccatggccgtccttccacacgggaatacctatccttaaacacaaagcgcttttccagtaatgagattttacgctgtggggtttacccttaaagccattttgccttcccaatctgtcctcctcttgctatctgaccaccctgagaagttgccacagaccagatcttatagggacttgacaggaggcaggaatgtttgactttagagagtacaattctttaaaaatagtttgtatttttaaagcaaaatcttgtaacttactttccaaaaaaagacgttactgaagaaaagtttctattctgttaaacaattatttatctgcaaaaaaaaaattatttcaacaaaaatgcagtcatttatttccaatgtgtgaaagagaaagcactgagaactccgaaacagaattwgaaacaggacaaaaaaaaaaagaaaaaagaaagaaagaagaagtatttcttctaagacatcacaggagatggttttaaaagaaacagaaatgctaaagtccaagc

SEQ ID NO: 474184 - DNA, 609 bp, Homo sapiens
taatggcataaaccactcaggctttacactcatgatttactgcatcatcaaaatccctgaaaggattacccttgggtgaatgccactcattatcttcccaataatgcactggtttggcccaacatggaacaaataatcaagattgagttcttagaaaagccctttttaaatatataaatctctggtttgagaaggaggcatgtacctgccaatatccttctcttcaattctggatgttgtagttgaattttgctctggcgtgtacaaaagccaggtgtctctatgtcacacaatagcctactatgacacataacaaagccatgagatgctccattatcgctaaccaagcactaccagagtgccaccaaccaagaagagagagaaaagkctatcagcctcatatcttcccacttcgttgggcacaaatactagttctgcagagctgccttactttcggggcaagggacagggaagaaaataggaaagaggcatttactgctatttgtggggaatgctttttagagaacattaaacaacttgtgctacaataaaaaacataaaacacacagacatttagcttgttaagtgaggcagatccagtattaagga

SEQ ID NO: 474185 - DNA, 609 bp, Homo sapiens
taatggcataaaccactcaggctttacactcatgatttactgcatcatcaaaatccctgaaaggattacccttgggtgaatgccactcattatcttcccaataatgcactggtttggcccaacatggaacaaataatcaagattgagttcttagaaaagccctttttaaatatataaatctctggtttgagaaggaggcatgtacctgccaatatccttctcttcaattctggatgttgtagttgaattttgctctggcgtgtacaaaagccaggtgtctctatgtcacacaatagcctactatgacacataacaaagccatgagatgctccattatcgctaaccaagcactaccagagtgccaccaaccaagaagagagagaaaaggctatcagcctcatatcttcccacttcgttgggcacaaatactagttctgcagagctgccttactttcggggcaagggacagggaagaaaataggaaagaggcatttactgctatttgtggggaatgctttttagagaacattaarcaacttgtgctacaataaaaaacataaaacacacagacatttagcttgttaagtgaggcagatccagtattaagga

SEQ ID NO: 474186 - DNA, 607 bp, Homo sapiens
gcccattgttacaagtgactgttgctmggtccaagaggacaagtcttccagtttttttttttttttttttttttcatgacaagtcagaagccttcattttctggggaaacatccaggtttgtcatgttggcagacaactgtatttttagcataatggtgaagaggaggggattctggaatgagacagtctggatttggatgttagttctgctaacatttgggaagtgttacttcctcttggtctcagttttctcatctgtaaaatggggataataactgccacctacctcatggagttgctttgaagattaaatgaaggaacacatgaatgtgtgtaaaataatcctgacacatagtaagtgttcaatagccattactgttacctaaggctaggtaaggccagccggttgtcagtttctgacctctgctgtaggcagaaatgatctgtggaaggcaggatagaaaaatggccaagggctttggctctgaggcagactgcatgggttcgaatcctgtttcctgtgtttgctggaggctgtccgaacttgtaagtcactgtatgaagtctcagcttccttatctggcaaacagggatagataataaagt

SEQ ID NO: 474187 - DNA, 607 bp, Homo sapiens
gcccattgttacaagtgactgttgctcggtccaagaggacaagtcttccagtttttttttttttttttttttttcatgacaagtcagaagccttcattttctggggaaacatccaggtttgtcatgttggcagacaactgtatttttagcataatggtgaagaggaggggattctggaatgagacagtctggatttggatgttagttctgctaacatttgggaagtgttacttcctcttggtctcagttttctcatctgtaaaatggggataataactgccacctacctcatggagttgctttgaagattaaatgaaggaacacatgaatgtgtgtaaaataatcctgacacatagtaagtgttcaatagccattactgttacctaaggctaggtaaggccagccggttgtcagtttctgacctctgctgtaggcagaaatgatctgtggaaggcagkatagaaaaatggccaagggctttggctctgaggcagactgcatgggttcgaatcctgtttcctgtgtttgctggaggctgtccgaacttgtaagtcactgtatgaagtctcagcttccttatctggcaaacagggatagataataaagt

SEQ ID NO: 474188 - DNA, 607 bp, Homo sapiens
gcccattgttacaagtgactgttgctcggtccaagaggacaagtcttccagtttttttttttttttttttttttcatgacaagtcagaagccttcattttctggggaaacatccaggtttgtcatgttggcagacaactgtatttttagcataatggtgaagaggaggggattctggaatgagacagtctggatttggatgttagttctgctaacatttgggaagtgttacttcctcttggtctcagttttctcatctgtaaaatggggataataactgccacctacctcatggagttgctttgaagattaaatgaaggaacacatgaatgtgtgtaaaataatcctgacacatagtaagtgttcaatagccattactgttacctaaggctaggtaaggccagccggttgtcagtttctgacctctgctgtaggcagaaatgatctgtggaaggcaggatagaaaaatggccaagggctttggctctgaggcagactgcatgggttcgaatyctgtttcctgtgtttgctggaggctgtccgaacttgtaagtcactgtatgaagtctcagcttccttatctggcaaacagggatagataataaagt

SEQ ID NO: 474189 - DNA, 481 bp, Homo sapiens
ctctggatctgggagtcaaggggtcaaaaccaagcacaattgggccctttggttttatctcaggtaaccgcgccccccccacccccatttctggtaattgaacccattccttgtggtcagggttcctgtcactcatattcaatgtctgtcattactgagaaatgcttcatgtcatattacactgacagaaccactacagcaaagctagcaagattcccccagcaccagaggtaagacaatggragcctctttcagaccagtgatgtttaacattttatgtgctgacactgtgtctgtaagcacaatacaatgaaagtctagtaaatgggagataaaaattcatactttccctccttcaggggctgccaagcactatcagaaataaaacaagttggcagctccaacgataccattgcaccagtgccacgcacggcaggcattttctaagtgtagtgagtggatttatacacggatacactca

SEQ ID NO: 474190 - DNA, 633 bp, Homo sapiens
tgtcctagcatctggagcaatgcacctagcgggtgctgaatgaatatctgtggaatgagtgagtcctctgctcggctcctggtcggtggctgctggcctgcctgtgtccgtgctccacagtggaccggcccctcctcgggggcttctctgacaggcgcacactgcaggcctgggaatcacacctkgcatgggctaccgccctgactgcactccccaggcagagtcctaatgtctgctctgcctttggagctgctctgaagttaccctggagcacggaccagatgtccagatacccacggaggccagacagggcacagaaatgagggactcgggccaggccagggaaggtacaggcccagcccgagggacggccactgctcagctctggtcagtgggtaccaggcatggatgtgttttacagtcattaaaagtctttggtttttccagggaaagtggaaatctggattttttaaaaaatggcatggctgggcgccatggctcatgcctgtaatcccaatgcttccggaggctaagacgagagaactgcttgagccaggagtctgaggctagcctgggcggtatactgagaccctgtctctacatatcattttttaaaagttagttgcatgtggc

SEQ ID NO: 474191 - DNA, 609 bp, Homo sapiens
caggaaaactgattagtggctcatataatcactgaaaggccgaaagaactaaggaaggaaaggacaaagatggcaggaaagctgaaccatctccccagtcaagacaaatgaactccaaccataattgctctttgcatccctcagctcaggatggaagctcaaagggagaacagcatttggcttagcctggtaggtgagcccagkgcactttgattgatgatctcaccagattgtgtgtgtccagtgggaaaagtggtcccccctaaacaaaacaaagtgccattgtccaaagaaggtgaaaaacaatccaagcaggcagacaaaggctaacagaaatccactaaaattgggaggagtctagataccatggcaccccaggaatggttaaaggagttgaggctttttagcctggaaataagaacacctatactgggatctttaaattcttgaagagctgctatttacacatattgctaattccttacaacaatgtaaggtagatagagttattatccccattttagtgattagaacactgaaaatcagaaagattgagcagtttgtacaaagtcacagtgcaagaggcaaagctggttcaagcccagattt

SEQ ID NO: 474192 - DNA, 577 bp, Homo sapiens
gagtgagtcctatttgggaggtattcacagtcatcatctttgatcactaattacgtacaacatccttacaactagcaggtataagtaacctcatttttctgaagaacaaatgcagacaaacgtcactgcctaaaggtctggggtaagtgaatggcagagaagcgtcttgggccaggatgtcctgcttccagcccagtgtccttcccttcactccccatcccagcagccctggcctacccgagacaagggctcgggagcgtctgggaccccaatttcatcagaggtgtctagcttaccagtgccacgtgaaatgccacagtggctctacaatcttgctggttcctatgtttcccaaataccaaaagggcacagtcttccatagcaactaacagtctgaaaatgtaatgactttttaaaaatcttgggcaactgggccacttgtgctttgctgctctctagcttatrtaaaaccacataaaatactgcaagtgcactcagaaaccctcagcaggctccagtgaaaataaaatgggcttgagggtgaactgatcaaaaattttggccctgtcactgcgtg

SEQ ID NO: 474193 - DNA, 577 bp, Homo sapiens
gagtgagtcctatttgggaggtattcacagtcatcatctttgatcactaattacgtacaacatccttacaactagcaggtataagtaacctcatttttctgaagaacaaatgcagacaaacgtcactgcctaaaggtctggggtaagtgaatggcagagaagcgtcttgggccaggatgtcctgcttccagcccagtgtccttcccttcactccccatcccagcagccctggcctacccgagacaagggctcgggagcgtctgggaccccaatttcatcagaggtgtctagcttaccagtgccacgtgaaatgccacagtggctctacaatcttgctggttcctatgtttcccaaataccaaaagggcacagtcttccatagcaactaacagtctgaaaatgtaatgactttttaaaaatcttgggcaactgggccacttgtgctttgctgctctctagcttatgtaaaaccacataaaatactgcaagtgcwctcagaaaccctcagcaggctccagtgaaaataaaatgggcttgagggtgaactgatcaaaaattttggccctgtcactgcgtg

SEQ ID NO: 474194 - DNA, 540 bp, Homo sapiens
tggctctgtggagccacctgggccttgcatggtgacaggaactctttgctgacaagcccttagtctgtgggaaggtttatctgccagcgctttaataaactcttcattatagcagctcaaacctggtgacctttaccctctgtgggggcctccatgtgtcacgcactatttattcactgcctcgagacttccagtcaggaaggtcgagacctgctgtaatttgataagcatttgggatgtcaaagtacagaatccagcttcttttctcctttggacaacagaaatagtgtgctgatgtttggtgtttcttcctctcccattcctctgcagtagtgattatactctcatggctttctttcttttggtttgtcacatctgtggatgaaagggagagatgggcttgggtttggcctctggaagcatgtgaagagttagtcctaacgttgtgtcttctgtttgcgtgatgctctgaccttcccaagggcctccacgtctgtgttttgtccttacagcttccyggccaggaaaagcaggacaagg

SEQ ID NO: 474195 - DNA, 627 bp, Homo sapiens
tccactgcccctgtgcacctggccctggtccttctctccggtcacatttctctatgcttcctttgtatagaacatgctgcagccacactgaacttgcccattccttccctccacgatgcctctacttggtctgtttcctcttgctgtgacttccctctctacctctttaagtccagcttctatcaatgtgttaaggcattgattagtttctatctcctccatgaggtcttccttcatctctttatagaaagcctctggattccatgacactttgggaggtattaagagtgtggttaagggtgaagccctaggaaggacatgacttaggatcagacaccagtttcattactgactggctatatggccctggacaatatacttaactcctctgtgccttcgctggctgtcaaatggattataataatataattactttgtaggctgtggcraaggttgaatatttagttacacattaatatccaagaaggcctggtacatgctaagtgtcaacttttattattgttattttaaagtatccaaaaaatggttattgagcatctatatgctacatgtgcccagtctatatgtgtccagtgctatacaaggcattggagatatagcagtgaa

SEQ ID NO: 474196 - DNA, 616 bp, Homo sapiens
tggtgcgccttggcgagactttctatttcatcaccctgttttattttcctcaaagcacatatcaatgtccaaagcttttttttttgtttggagtctcggtctgttgccaggctggagtgcagtggcgcaatattggtgcactgcaacctccacctcctgggttcaagcaatyctcctgcctcagcctcccgagtagctgggactacaggcatgtgccaccacgccaggctaatttttgtatttttagtagagacaagttttcaccatgttggccaggatggtctcaatctcctgacctcaggtgatctgcctgcctcggcctcccaaagtgctgggattataagcgtgagccactgtgcctgggcagttattttatttatctaattatttgtttacagtctttctttccttctagaatgtaaccttcacaagatcagggactgtatacgccctttccattgttagtgctgattgtacctagaatgggactggcatatcatggttacttggtacatattagtcattaaaagtctttgtgatctgtctctagactcccagaggctcatttgggtatctcttggagcttttggaaggtggaattttctgttccaggttg

SEQ ID NO: 474197 - DNA, 606 bp, Homo sapiens
actcactacctggcagtggggtttggagatgtgcttggggagttggggcagacagtccatccttggagcctcacttcttttgttacaaaggggtggtaacccaacaactcaaggattcctaccatcttctgagtttggaagcagatccctcccagatgaactttcagatgagaccccagccctggmtgacacctggactgcagccttgtgagagaccctgtggcagagatgtgccacagctaagctgagccagattcctcacccacagaaacggtgggataataaacgtatgttgctttaagccactaccttcctggtaatttgtagtttagcagtgaataacttgtgtaactgacaaaggtttaacaggttacctgttctggggggtaatgcatgttaacaggcaacagcactttaaccaaagaagtgcgtctctaacatgaggcttggagagggcagattggacacgacgtggggcataaatagggagagactgtggaagcttctagagcttgtttttgatgtttgccaaaagagccctccttcactcagttgtgtggatctgtttctcagttgcttccctctgaagaagttctctccaaatga

SEQ ID NO: 474198 - DNA, 612 bp, Homo sapiens
ggcatgtatttctgatcttttagatatcatggaatttctttttctactacactaacaccctattaatctattttgcagagtgtgacatcttacctggtcccattcctatttatcctatcatgcttttgttaacctagagtagtacttctcaactagaggatacttggcaatgactgaaaacacttttgattgccacaaccagtcrgggagggtaggagttgacactactgggatctagtagtaggggccaaggatgcagctaaacatcctacaatgcacaagatgcttcacctcccccaacaaggaagtatttggtctaaaatgccaatagtgttgaagttgtgaatccttccataggggctaaaatcaagattatattttcaagatattcttgaagctaaagttctacttgtagtcaattgaaaagcagaagtgagatccatgagaccacagttgtaaagtcctcctacaaactcatcacagagatgtttagttctgccaaaaccataattctatttctagtatttggtccttagtttctgagtgttcagtgttagataacaccatcaaggtttctattgaaaatatcccgccttatgttattcttttttt

SEQ ID NO: 474199 - DNA, 568 bp, Homo sapiens
gggcccagggccaaagatgggggtggatccgtggtgcagttttcaccacagtccaaagagaagtgagaaaaatgacaacaaagtcagctctttaaaactaatgtaaaattcggccgggcaaggtggctcacgcctgtaagcctagcactttgggaagccaaggcagttggatcacttgaggtcaggagttcaagaccagcctgaccaacatggtgaaaccccatctctactaaaaataaaagaaattagctgggcatagtggtgcacacatgtaatctcagctacttgggaggctgaggcaggagaattgcttgaaccaaggaggyggagtttgcagtgagtcaagatggcaccattgcaccctaatctgggcaacgagagcgaaactctgtctcaaaaacaaaacaaaacaaaacaaaacacacacacacacacacacacacacaaaaaccactaatgtaaattccatttaaacagttatttttaattttgtattcttatacattgtattattccttctttctttacctgatatgaaactgtcttttgtttaacaagagattttaaa

SEQ ID NO: 474200 - DNA, 591 bp, Homo sapiens
tgagctccatcccccgcaccacacacatacacattagaaaatatgagtggtccatgaaatcccaagcactggccactcatggtctaacgatgtgtcaagatgcccatgttcagatggagaagctgagattctgagayttaaaacaggtccaggaaggcgggtggaaaactgtcatcccacagccttgctgcttttccccagcccccacaacaccgtggtgacttaacagtggggggaggaggcagggagcctgggagcaccctgcagacttctgccggggcatgcctcctccaagtgagtcaccccggcctggcactctgggagtagcataacagaaatgccatcacccatgttagaatcaggctgtggcccctccagctctcttcttccttgacttccacgggattcagatggcatccatatcttcagctcacatttttaaggttcacgctttactgcccaagaagatggaccagagatttgaagttaagcaggcctggcctggccacttaaccagcagaatctcagtgagtttcctaacctctctgattccccagtgcctgatcatttatttgctctacactccactaa

SEQ ID NO: 474201 - DNA, 591 bp, Homo sapiens
tgagctccatcccccgcaccacacacatacacattagaaaatatgagtggtccatgaaatcccaagcactggccactcatggtctaacgatgtgtcaagatgcccatgttcagatggagaagctgagattctgagatttaaaacaggtccaggaaggcgggtggaaaactgtcatcccacagccttgctgcttttccccagcccccacaacaccgtggtgacttaacagtgsggggaggaggcagggagcctgggagcaccctgcagacttctgccggggcatgcctcctccaagtgagtcaccccggcctggcactctgggagtagcataacagaaatgccatcacccatgttagaatcaggctgtggcccctccagctctcttcttccttgacttccacgggattcagatggcatccatatcttcagctcacatttttaaggttcacgctttactgcccaagaagatggaccagagatttgaagttaagcaggcctggcctggccacttaaccagcagaatctcagtgagtttcctaacctctctgattccccagtgcctgatcatttatttgctctacactccactaa

SEQ ID NO: 474202 - DNA, 623 bp, Homo sapiens
ctgtgtagcagaattcatggaaatccagcaaggtccagagctggccctacagaggctcccagagaagctccccaagaaaacaaatcaaagggaaggctttgagcacatccccactctccaccagacccaggctgccttactcaggtgtctttcctaccaggagacactttcacaaagttggtatttgtgtcacacagggagattgtaaaatgctgtatttggaaacatgaatgtgtaatgtctccctggaaatctacaccttctcagtgaaagatacaagtgcagtccaagacagacatgtttaattagtgggcaaacttgacatttccagtgtttggactagacagagggaaagccaagagcaaaccgaggtcttctcttcatcccctcccccaagcttgctgacagagaataatttattgggtttaaagaaaaatgaatgtctttacagcaacaggagagaaaagkccaggagatccaagagtggttattaaataactgtcaccactaaacacgcgtctccctcatcttctccatgcctgcccttcttgggcccctgcttgatcaaatgcatatgctcatgctggcgtttctgtccacccagaagggtatactgaggtatg

SEQ ID NO: 474203 - DNA, 623 bp, Homo sapiens
ctgtgtagcagaattcatggaaatccagcaaggtccagagctggccctacagaggctcccagagaagctccccaagaaaacaaatcaaagggaaggctttgagcacatccccactctccaccagacccaggctgccttactcaggtgtctttcctaccaggagacactttcacaaagttggtatttgtgtcacacagggagattgtaaaatgctgtatttggaaacatgaatgtgtaatgtctccctggaaatctacaccttctcagtgaaagatacaagtgcagtccaagacagacatgtttaattagtgggcaaacttgacatttccagtgtttggactagacagagggaaagccaagagcaaaccgaggtcttctcttcatcccctcccccaagcttgctgacagagaataatttattgggtttaaagaaaaatgaatgtctttacagcaacaggagagaaaaggccaggagatccaagrgtggttattaaataactgtcaccactaaacacgcgtctccctcatcttctccatgcctgcccttcttgggcccctgcttgatcaaatgcatatgctcatgctggcgtttctgtccacccagaagggtatactgaggtatg

SEQ ID NO: 474204 - DNA, 623 bp, Homo sapiens
ctgtgtagcagaattcatggaaatccagcaaggtccagagctggccctacagaggctcccagagaagctccccaagaaaacaaatcaaagggaaggctttgagcacatccccactctccaccagacccaggctgccttactcaggtgtctttcctaccaggagacactttcacaaagttggtatttgtgtcacacagggagattgtaaaatgctgtatttggaaacatgaatgtgtaatgtctccctggaaatctacaccttctcagtgaaagatacaagtgcagtccaagacagacatgtttaattagtgggcaaacttgacatttccagtgtttggactagacagagggaaagccaagagcaaaccgaggtcttctcttcatcccctcccccaagcttgctgacagagaataatttattgggtttaaagaaaaatgaatgtctttacagcaacaggagagaaaaggccaggagatccaagagtggttattaaataactgtcaccactaaacacgcgtctccctcatcttctccatgcctgcccttcttgggcccctgcttgatcaaatgcatatgctcatgctggygtttctgtccacccagaagggtatactgaggtatg

SEQ ID NO: 474205 - DNA, 542 bp, Homo sapiens
aaccttggtatttgcttcctttacttatctggtgagctccctggtagacacgccatgtgccaggaacaagataataagcagacgtaggagcatgwctggctcatgctgatgctatcgtagtatttgattccaaagaagcactggaaagagggtggagccgagtgcatggagcaccctgggatggaaaagtacccacatccctccagacctactgagtgcctggcctgagtgttccttgtacacatcacctcatttccttcctcagtaacacagtcatgtcaggactctcactgtcctttgcacagttcagggaagaggcttgcagagtcttttttaaacgttcacctaagaggtcacactgtctgcatagactttcaaaacagaacttgggcccaggcaatctcactccagagcctgggcacaaaatcactgcactgacaaagacagtctggtggccgggaggcctctactgcccagagtgtgatgaatgctcatgagaggagatcacattgcttcccacaaaccaagcttttaacctgtgg

SEQ ID NO: 474206 - DNA, 527 bp, Homo sapiens
agctggtaactaaattctagtctaaacttgcatctcaggtaggaaaactgaggcccattgaaaagaagggactcaggctgggcgcggtggctcaagcctgtaatcccaacactttaagaggccarggaaggcagatcacctgaggtcaggagtttgagaccagcctggccaacatggtgaaaccctatctctactaaaaatacaatattagccgggcatggtggcatgcacctgtaatctcaggaggctgaggcatgagaatcgcttgaacccaggaggcagaggttccagggagccaagatcatgcccactgcactccaacctgggggacagagtgagactctgtctccaaaagtaaaaataaaaataagtgacttgcctaaagtcacagagtgggtgggtggcacagatgagacttgaagccctgctccattgtccccaccccagtgtctcccagggtccatgatattaaatgcctttaagaacattgattcatttagagagacaataattccctttccagcttt

SEQ ID NO: 474207 - DNA, 527 bp, Homo sapiens
agctggtaactaaattctagtctaaacttgcatctcaggtaggaaaactgaggcccattgaaaagaagggactcaggctgggcgcggtggctcaagcctgtaatcccaacactttaagaggccaaggaaggcagatcacctgaggtcaggagtttgagaccagcctggccaacatggtgaaaccctatctctactaaaaatacaatattagccgggcatggtggcatgcacctgtaatctcaggaggctgaggcatgagaatcgcttgaacccaggaggcagaggttccagggagccaagatcatgcccactgcactccaacctgggggacagagtgagactctgtctccaaaagtaaaaataaaaataagtgacttgcctaaagtcacagagtgggtgggtggcacagatgagacttgaagccctgctccattgtccccaccccagtgtctcccagggtccatgatattaaaygcctttaagaacattgattcatttagagagacaataattccctttccagcttt

SEQ ID NO: 474208 - DNA, 556 bp, Homo sapiens
gcattccaaggaaggaaattctcctaaggccaaaagagatgccgctgtcttagctgaactgactctgtgacatcaacccaggagcggcctaaaagcacctctctgggaagggttcatgtatttggctttgttgcgccctgtcattgtctgtcaagcgtgatgctagagagagccttcttccacctggcaacacttagcttcctaattctgccattttgctcaagtcaggaaacagactctgtggggaagatgttgctgtatgaaaagtgctggtccctggggacgccagggctctagggaccctgcagagggtgaggctgtggccaggctgaacaaggcagtctgcccagtgattcaggcaccacagagcaactcgcaccagggctgtggaaggagattatggctctaatttacatctttgtatgtcaacctgagaacaartctcttgtttaaaaaatgctttgttgtaggcagcccactctatcccatttaaatcataaaatctgggtggctgttgtctcttggcctccagtgtctacggtttgagttttgagca

SEQ ID NO: 474209 - DNA, 565 bp, Homo sapiens
acaagcagctccctttggctgctcctaatttcatcatctgtttcaatggcaatgatgctaattcagtaatgattcctgcctatttccacaagcttgtcagttgttaaattgtgcagaaccgtaggccagatctgtaaagatttgttttcctcctctggtgctttctatggaaacggcacagggcacgytgggagtcttcctagaggtggcttgcagggagccttgtctcaaatgagaaggctgggcctgcaggacacaggaaaagagctctgggggcttgtcttaagttttgaaaagaagctattacatgcttctcttgagccttctaagagtcctgtaattgctggtgtctttgcaactggtcaggttttgatagaatcatttgtttaagattgtgattttcattcttctaactgctccccatgcctatttttttttttaagacacaaggtctctctctgtagcccaggctgggatgcagtggtgtgatcatggcttactgcagatttgaactcttgggctcaagcgatcctcccacctcagcctcccaacccaagtagctgga

SEQ ID NO: 474210 - DNA, 576 bp, Homo sapiens
atcatattttctttatccaatccacccattgatgggcacctgggttgattccgtgtctttgctattgtgaatagtgcygtgatgaacatatccaaaagaaaataaatcgttgtaccaaaaagaaacatgcactcatattttttttattgttaatattcttttgcaggctcacctcctagctttagaatcaggattttagccttcctctgaaaagactgggtaaaccacacagggtagacttccagaaagtctgcccctgtccctccccagcctgggcactggaatcccccatgaagagaccctgccatgtatgacccagcatggggttcctaatggaaaatggccaggctattagagctttgcaaattaagggtcctttcatttattactatgctctgctaaggatgagcattaatttttttctcaaagcaaattcactggaaacagacagtttagaatttatgcttgtaatgatggctacatgggccattaagaccacctctaagtgagcttaatttgtagcagataaatgtatatgtctacatatttttcaacatagtttatggtgcatcttgc

SEQ ID NO: 474211 - DNA, 356 bp, Homo sapiens
gcaggcaaaagcaccatgacagtcaccttctgtgtgctacatgttatgcttctattgtacaggtggagattatttgggtacctctaaataatagccctttcttgccctacccctggataagccatcccacttctgctgagtggtagcacatgctgcctcctcaaatacgttaactcctaagggttctcatcaaatgtgagaccagacagagggctctaaatacacagttcaagcattacccctaagggaccccactcgggaagtgtaacmgaagagtggaaaagggcctgcctttcagaagaggctgggaggtgggagttcctcatcacagggactgctgcagcagaacaccaact

SEQ ID NO: 474212 - DNA, 580 bp, Homo sapiens
ataatttcagcaggctctggggcacaggactgtgggatgattaaggcagagggatagtgacccagagtgtgacagccccataaaggaggtgattgcaggtgtggactctgggttggttggtttgwgtataaagagcacaccctcaggtgaactgcttgcagtctctaggaattggctaaccctggaagaggtagtctcagggtcagcttcagatgtcaaagcatcagaatacagaaaataaaagccataataatacattcaggtcttttcattgactcgtcacaagaagcttgtgggagatgcattgctttattgttattattatttatattttattatttaccagtcttattttactattaattattattattctttggcagttaccatagaggttaagagtggattctggagccagactgcttgggtttgatttggatcattttgacccaattacttaatttgcctgtgcttcactttcttcatctttacattggagataacaacaaatacctcataaaattattatcatgattcatgaagtttataatgtaaagcaataaggcagcatctgacatgt

SEQ ID NO: 474213 - DNA, 548 bp, Homo sapiens
aaaggcatcttaagatcttttggtattagtaaaattccraatacattttaggttgaacattttgtatcctgggagaatgatacctgtgtccagatttcagactcattcatacatattaatagttagaatattgtctgggatgagtcatttggtattaaagacatctcatagaaggggaaaataggttctaaagttcctttgcctcaaaataaagggagttatttgttgtaccagactgacacattttcagaaatgaaaaaagaaagattccacatgggactctttgcagttcttgctctaagtataagctcagtggcttcctctgcctccttcaggtgggggccaacatgattccatatgaagaccaccttgtgctcacatgaaaccagtcactgaaaggtgcctctaggatgctgtttcccaaactggcttcagagagacctgagggttgtgtggatgtggctcaaaagccactgtttaaagcatagtgtctaagggatggagtgtcagcattcctcctactcacctgacctccgcctcacccagag

SEQ ID NO: 474214 - DNA, 625 bp, Homo sapiens
tttcttagaaaaataatttgaaccaatgatgactctgttagaattaactttgaatattatatatggtatctatatcatcacaacctttatgtttacaatattagcaggaacatttttccagatgagagacacagttcaagttttatttgttttaaaattttgaattataaaacatatcatagtttttgttaaaaccagaattagcaatacaataataaaaattttaatttataatattatcactgaaatttcaactgaaatatatattctacttattccaggcattactgtattgtcctgacagaaatgggcacagcttcaaaaaatatcaaattcaggagcacaaagatctgggaaaagctatatcttttttattactacaagattatagggaaaagctctttacctgtttttctaacataatctttgccctcaccaaaatattcatcctcgtactgaaatataaaaattttaaattaaaataaaaaakattctacaaataaaatactttgaaagcttccaggaaagaagaatgacaatgaaattcttcttacaatctaagccctacaattggacaataatatataataattcaacatattctatatcaaaaatagttttgtaa

SEQ ID NO: 474215 - DNA, 496 bp, Homo sapiens
atggcatgttttccatttatttgtgttgtctacagtttttctcactggtgctttgtagttcttacagtgatctttcacctccttggttaaatatattcctgggtattttttttttttttgmagctaatgtacatggaattgccttcttgatttagtcctcagctagattgttattgatatatagatacaatactaacttctgcatattaattttgtatcctgaaacaagatcatatcatcagtgaacagagacaatttgacttcctcttttctaacttgaatgccttttattttttctcttctctgattgttctggtgaggacttctagtactgtgatgaataaaagcagtgaaagtgagcatccttgtcttataatcttagatgctaatatgcataagacatgtaagtttatacacagatatacccacttttttagtactaataaaaataactataagcacaagtctcatcatcaaacaaaaacaatagtgggtt

SEQ ID NO: 474216 - DNA, 496 bp, Homo sapiens
atggcatgttttccatttatttgtgttgtctacagtttttctcactggtgctttgtagttcttacagtgatctttcacctccttggttaaatatattcctgggtattttttttttttttgaagctaatgtacatggaattgccttcttgatttagtcctcagctagattgttattgatatatagatacaatactaacttctgcatattaattttgtatcctgaaacaagatcatatcatcagtgaacagagacaatttgacttcctcttttctaacttgaatgccttttattttttctcttstctgattgttctggtgaggacttctagtactgtgatgaataaaagcagtgaaagtgagcatccttgtcttataatcttagatgctaatatgcataagacatgtaagtttatacacagatatacccacttttttagtactaataaaaataactataagcacaagtctcatcatcaaacaaaaacaatagtgggtt

SEQ ID NO: 474217 - DNA, 510 bp, Homo sapiens
acattatccaccaaagttatgtgttatttggtttaggcaatttagatgtataattctatgtgttattccaaaaattgagggagaatactggtgggtgtgagaatgaaacagaggtgatttttctatctaatgaattgttcttatcttccatgcagtcctccatactattcctgtctagagaaccttttagaaatcactatcaattatttactaaaacttaaaaaggagaatgtgaattgggtggcccacaaaagctaaatacaacagttaaagtcatattgaagaaacaataattattgtttattatgaataaaaaatgacaatccttcagcttatagctttattctatggaattataatcaactcagttttacaaagagtaggtttttgatagttgycacactgtgctaaatgccatgtagacatacggtctaatgattgttaaattttccagaaaaacttgaagatgcttttgttccatgtaaatagttcctgatatgtgtctgtgat

SEQ ID NO: 474218 - DNA, 544 bp, Homo sapiens
cttctctagttactagttcatctccccctgctccaattccttattattattatttttgagacagagtcttgctctgtcgccaagctggagtacagtggtgcaattttggctcaccacaacctctgcctcccgggttcaagcgattcttgtggcttagcctcccaagtagctgggactacaggcacacgacaccatgcccagctactttttatatttttagtagagatagggtttcgccatgtttgccaggctggtcttgaactcctgacctcaggtgatccacccgccttggcctcccaaagtgctgggattataggtctgagccrctgcgcctgtccaattccttattattttaatgcaagaattttaaaaagagaaaagtatatgtaaatttcacagtcaggtggaagtaattggtttgcaaacttgcctaaaaatgtttgggaattttctttttagagaggcggaagagcatagagcattcattaagagtgatggatctaggtgggtcacggtggctcacactgtaatcccagtactttgg

SEQ ID NO: 474219 - DNA, 544 bp, Homo sapiens
cttctctagttactagttcatctccccctgctccaattccttattattattatttttgagacagagtcttgctctgtcgccaagctggagtacagtggtgcaattttggctcaccacaacctctgcctcccgggttcaagcgattcttgtggcttagcctcccaagtagctgggactacaggcacacgacaccatgcccagctactttttatatttttagtagagatagggtttcgccatgtttgccaggctggtcttgaactcctgacctcaggtgatccacccgccttggcctcccaaagtgctgggattataggtctgagccgctgcgcctgtccaattccttattattttaatgcaagaattttaaaaagagaaaagtatatgtaaatttcacagtcaggtggragtaattggtttgcaaacttgcctaaaaatgtttgggaattttctttttagagaggcggaagagcatagagcattcattaagagtgatggatctaggtgggtcacggtggctcacactgtaatcccagtactttgg

SEQ ID NO: 474220 - DNA, 564 bp, Homo sapiens
tgcggttttcaagatacgaacattttagcattactagatattgctaagttgctcttaaatttgtatcaatgttgtgaaaaatttctgttattcaaggtcttcaccaacacttgacrttattatcacatttttgtggaactatgtggtatgaaattttatctcattgtttcaattttcatttctttgattcctaaggttaggcatcttttcatatttttatttggcccaagggtttttccagtctcaggactgcttgtttgtatccgttgcacatttaaaaacttttgttttcttatttaattttataagtttggatgctaatgcttctcccagtttgtggctcatcagttcacattttaaagttttttaataattaattcaaaagttttaattcttaatggagtcaaatatatcaatgtttccctttattgttttggaaattcctaatctgggatagtaaagatattctctttgtaaatttaaatttttgattttcacatttaggaatttcattaatttgtttttgcgtatggtgagaagatgagtccctttcactcttttttt

SEQ ID NO: 474221 - DNA, 341 bp, Homo sapiens
ctaaattaccataaaatacacataattgatgtttattgtctagttccctctctagactataaagtctgagaaggcagagacttttgtctggttcactgctgtatccagagtgcctagtaggaagcctgacacatataagtgctcagcagttactttcatagcatttgttgtttgtgaattgactaatgactcattgaacatctatctccctctctagactataagctccatgaatactgactcccatatctattttgttcaccactgtgtaaccagtgtcaagtacatttcctcacacatagcaggcactcagtraaaattattgtataaataaaggccaa

SEQ ID NO: 474222 - DNA, 296 bp, Homo sapiens
gtctgcgacagtgatgaaaacctgaagaataaagaatctgtggtccagtgtctgcatatcttgtcctccttaaggctcatcatgcaagtggctctgccacaagagcatctttgctggattatcttcaatggtatatgctgatgtattttattttccattgtgtctttcagaaagttacttcaatgctaagtttgacagtagcttgagtaccttgtgatttaaaacatacgcatttcataataggatgaatrtatttttttcaacattcgtgtgacatgtttgtcctcgtaaattgg

SEQ ID NO: 474223 - DNA, 517 bp, Homo sapiens
aatgacctataagagggtaccagtgttcaggtaaaactattataatatagcaatggttattaaacaaatttcagggatcctcagaaacctaactttgttttgttttttaaattaatttatttgtttttaatttttattttaagttctggagtacatgtgcaggacatgcaggtttgttacataagtaaacatgtgccgtggtggtttgctgcacctcctacttataagtgagaatgtggtgtttggttttctgttcctgtgttagtttgctgaggataatggagaagcccagctttaagtagtagcttcctaatctgtttttgttacttttgtatataacactgggattctgatgaaatttcatttgaaaatttggttatattgtcatttttaaaaagtatgtaaaccacggttatagagcactgtattaacttttgccmaggtaagtgaagcacacttgagaagttctgctttataatatttttcatttcttctgggtttgtcagaataagttata

SEQ ID NO: 474224 - DNA, 592 bp, Homo sapiens
tccaatagagaagaaatttggggtcatgactgttrtcatgtcatgaaagttgtatcattgtttttgttttaatactttatcccagacctattgtatacctccactgcagcagagaaagtggggagtgtattctgctactcacttgattactttcctctattgattacatactacttccttagcaggtatattatctgaaaaaaaaattatcactaaattaactttaggacagcagtgttctagaaagagtaatgatatataatttacatttatgaaagaagcaagcatccaataaattagaaaatgcataccatcatccaagtacattgttaaatatcccaagtgctcaccttattgagtatttgacaaatggatttcacatttatatcagtactatttttatgtcatctgctgtgtttgcttaaatgtatgtgttttcactaacgatgttaagtgtacttaactccatttatactgtctaggagggatactcaggaaggatgatcatttgaaaacattgaataggccctgatcatgtgttacttataccgttgctgctgattcttagatttcaatgatactttcattttgt

SEQ ID NO: 474225 - DNA, 649 bp, Homo sapiens
gacatggaagtgactatagcatgtctgtagcttcctgttgcacctaaaataatctaagaaggctgtgtccttaacttgacatacaattccttccatgttgtgaccccttatgttagtcagcgtcccagcaggaaacactggcattctcaggagtgtagccaaagaccccgtagtgaggagacagtttactgcagtgccagcagggtgaggaagccaacagcatttgggcaagcatccaggggttcacatcacggtgaagasattgccacccaaagcctgaagagacaagggaaggaaactcagaaggggagctgcctgacaccagcagtggccacagagggcccaatgccagaagcatgtgacaaagcaggtgtgcaggggaagaagtaccatgacttctctttcttccatctttgcatcccctcacaaaattggcagaaccctctggaagccagaagccatgagaatgcaggtcatggagctcttagaggtcagaagggcagagggcaggacagaggatagagaatggattgcacagacaaataactagcaggtccacgctcacctcccaggctcatctctgcccatctccccaaccccacctcaggggccttctttcaggtaccagaacacaccgagctacatcctc

SEQ ID NO: 474226 - DNA, 496 bp, Homo sapiens
attccctagtgtctagcaaatgtccaacacttcccaagtgctcagtaaaatagtaaaatatgcagaattaagttcacttatctgtgaatgaatcataaactcgacctttcttctttctaatgctacagaggaaatgcctgagactgaagtaggaagattagtgaggaaaagagtcggttggtcctgaagcyggatttcagccacagtgtcactttggggctagtcattgtataaagtataaatgcatactcactagagattggcatggatgatattagaatgcttctagagtttcaagaaccaatctggtctccctgatgatttgctgagcattgttatttccttacttgggtccttgatgatgagcttaggtgccctgaattagtgatttgctttccttaatgtagcacctgtgagaagccagaagttaattttataaaaattgagatataattcacatatgataaaattcactcttgtgacaattcagtgattt

SEQ ID NO: 474227 - DNA, 443 bp, Homo sapiens
atataatataaatatataatataatatataaatatataatcaaatattcaaatatactcaaatgtatatgtttgattatatatatatttgattatgtcatctccccatatcccaaacccttcaccagcttctcattattcacaagaataacgcctacatataactatttggtttgactccattttttcccaagatgttccagaatcactatttctcttgcttttgtaccctgccaggctggcctatgttcaatgttttgtgtacctcatattccatgcttttttctgacatggaacctttgaatgtacctttccctctgcctgcaatgctatgcttcctgctccactcccacttagctcttcctcygttcaactattacttccttagggactttctcacacctctttttctcatcaagttcttttgtcatggaccctcaaggt

SEQ ID NO: 474228 - DNA, 661 bp, Homo sapiens
tggttgctcatagaaggatatttaaattctgttgtaattcttccttataaaatctgtgacattctaatagmtagaaaatgtttaaatcttgtctagtttctgcttcgtttccttctttatgttgatttcttcctatttatctcttttgtgcatcacacatatttcactataaactcgatttttgtgggtgaaaggccacaactaactgtttgcatgtcttatctttgccctagagagtggtaactcacaaatgagctggctgcacctactgtacataaaacagcaacatcactttgatctctcccttaatgtgctaggtttagattactttgtgagcaaagggggtgaaaggtggcaggatactattttaactaactactgggggcagtatttattcgtggtgcagatttttaatgggaaagatggaacatgaaagcctgtcaaatgtatagctcaaagagtctgacaacacagaatattttatagatgaaaggtgaagaatctccaacttcttagtgtaatataaattgtatgggaaaagtaagacatgtaaaaaaaaaaaagccagatagaaaactatctatattctgctatgattgcatagaaccctgtcacaaaaccagaggactattttagagttgcatttattggatataaagta

SEQ ID NO: 474229 - DNA, 641 bp, Homo sapiens
ctcttgctttatatattctgaaactatattactagagccatacaagtttagggttatatatattcttgtttatgacccttttatctctatgacatgtctctttcttgtgctacttcttactttcgatgcaattatgtccaatattaattcagcaatagtatctttcttatgctaagtatttacttggaatgatttttttcagttattttcagattaccttatatttatgtttaaagtatgttttttgaaaataacatataatttgaccttttaaaatatatctaaatcttgtgttttagtaggaatgtttagtcagtttacatgtaatgtaattacgacatagttaggtataagtctaaaatctcgctttttgttttttcatcatcccatctgctcattattccttaatctttttttcctgctctgttgtattagtaaaatakttttgttctttattttatctcctctattagctctttttttgttataacttttagtatcattgttttgtggttactcttgaaattcttaacttattacagtatacattaaattagtatttttacaacatcataaacaatgctgtttctactagttgtactccattaaatatcatcattttgtttgttgtccattttact

SEQ ID NO: 474230 - DNA, 528 bp, Homo sapiens
ggaaaaaaaacctgtgatcagcaatcacacactttatgttaatttgctccccatctcaccttagatactacttcattattaaaagtacattttcagaaaattgggatactgtatctacatatgcagatatgaatatgtttcattttctagttgtttggagcttttgcaagcattttgcatcagttaaatttttaaacttccaaccaaccttcttcaaggaacagggtgaatatactatttttaaacagatgagaaatttcaagtaaaaagatgactttcataaggttataataagtccatagagaccttctagttcttgatccattaatataatctacagaggacagcatttgctgtcttgtgtaacacaagcaagtacataagataaaataaatagtacatcaatgaactctaagtctttatgaaacccatctttttagaatgtataaatgcattaatattarggttcattaaaagatgcactttacccccccaaaaaaaactaggaaaaacctttgttgaaattac

SEQ ID NO: 474231 - DNA, 644 bp, Homo sapiens
ctgaaacctctgtacatggggcctactgcctggtcaaccttacgcaactggccaactagaaggtcatccatgaagattagttcaaatgttgccttttttataaaaccatctcaaaacttttgtccttctcatccctggaaatgcattatttgtatcttacatatttatggcaattattgagctctgcctttactagaacgtgggtatttagaggcctggaaaatttattatcttctccggctttgttcacagcacctaacacaaagtaaacactcaattttccaaactatcaataaattagtaaattaataccttctgctcacatgttgaggatatatttcagttagacattggtacctgaggtgatgttccagggatactgcaggtagcatggcctaaggaaaagattgaggctttggagcaagacaggcctgaatttcaattaatactagctcagcaatgtaccagtccacagcagtctgatcttgtacaagctctctaaagctttccttcctaatctatataccagagataatagaacctactttrtagacttatctagtgattgaataatgaagtatgtaaagcatttaacacaatgcctagcacatagaaaaaattcaataaatatggcagttatcatt

SEQ ID NO: 474232 - DNA, 642 bp, Homo sapiens
agccatgttgtgattgaggggaaaatcccaaatgattccattaaatgttgctggtgtcagtagtgccaaaaacgcatgtatgacatgatacagtaggagttgtctatacagttaagtgactatcactcacccggtcttccgtggccatcaggagttgcccaagggagaattctctgcagagtgctggtcacctgcacatgtcactaagaactaggtttctttggttcattttttttttttttttggtcggtttttagttagttagttcaagatttasagatagaataaccagattgtttgggcaataagcttttggaaaaactattccagaactcactttattctttcaatcatcatctctctaaaaaggccctgtcattgcttgacaccctgtgaatgtctgtttttgtatgttaggaatgattcagatgtgtgcataaatgatgtcactgcagtgatattgatgaatgcattcagcatttccagggactgtggccataccttatgtgctctctgagcccaaagccatataggaaatacatgctcagtaggctgctacacactacagcagagcttttgctttcttcacttgggtgtcagagacttttcctcctgtttaaggagctcttcatggaggagaag

SEQ ID NO: 474233 - DNA, 653 bp, Homo sapiens
cattttgattcctattaaaatgttgagaaatacttgtacatgtaagtaaattgaggatcagaggtcacatgattttcccaaagtcacatagctaaggagtggcagagctgggtgtagacatttacatcyagctccgtttgtgtccagtgtgctttttgcctcaatacatggagtataagagtacaactagactaatgggatccaaatgtagcaatgtcaatggggataaattcatagacaagaggacaagtcacactatagaaatgtgcagaccctgctacttgagttttaaaactacgtgttaagaaatggtccagcatctggggtggagctggaggtgtggaggctggttagcccagactgtgactggctatttcagtgtaacatttttctgtgattagcaaaaatagaaggaagaaaggaaggaaaggagagagggaaagaaagataaaggggggagaaagctttcttgtatctttctatacttataattcctgttatcacacacacacacacacacacacaaacacacacacacacacacaaacacacacacaccctctcttttcagttaggaactcagaacctatctcctcaaactgtgaggaaagaacatgtttctttgaattacaaaggccataactacctacaga

SEQ ID NO: 474234 - DNA, 549 bp, Homo sapiens
ctggctgcaggtcaggcaggcgatacctggtaaatattaaaatctttgytgtagaaggggatgagttttaccctgcatccttgattactccaaagtaaacttccagcctttatccttagtggcacaggccagtatcctcatgaacacccctaccaccattacctcctacttttctccctgtctccaaagactcacttttggaaaatggttgtgtaaaccagcagttctcaaacattagcatgcgtgaggctttgttaaaaccagattgctgggttctgcccacagttgccaattcagtagttctggagagatgcctgagaatgtgcatgtcaaatgatgcccatgctgccggtcttggggccacactttgaccttcactggtctaaacccctcaacctcattctatatcagtgaaggaatctacaaacatgcacaagtgcaacagccttacaaggtcaaggatcccagcacctgggagtgactttatgtgacttccctttcccatgaagccagattgaggctgtgaaggaggagtggagttctcagggc

SEQ ID NO: 474235 - DNA, 594 bp, Homo sapiens
aatgtttggtaagtgagtgataaatgaatgtattgcctttcttacatttggacacagtagtctcatttggggcacatgatttaaaaagtattcctatctctagtatgtacaatgttggcacttgttggcttttgttcaactgcttcctgggattgttcrgacaatactgggacaggctgtttgttatgttgtggccagtggtttctgattcttgtgttcatccttgtgcaggtggggaagtggaaagacaagtccctgcagatgaagtactatgtgtggccccgaatgtgtccagagactgaagagcaggaggatgaccatctgagcattgtgaccctggaggaggcaccatttgtcattgtggaaagtgtggaccctctgagtggaacctgcatgaggaacacagtcccctgccaaaaacgcatagtcactgagtatggcatcctctcaatgactttgggtggcatgggagagtcagctttgatgcacctgttagcacttggctggcctgagacctgaggcatgagaattgggcactgtgtctgatttctagttgcttttgagctgtgggattactggcagccctctggtctg

SEQ ID NO: 474236 - DNA, 583 bp, Homo sapiens
attcacctcgagttactaaatatctaactttcccataactaccatctgtttgtctcttgtggatctgtttgcctaatatttaaatgacccattcttccccacttttacgaaaatagcattaattcccctttcactattcacacttccttcatcgtcacagtttgaccagcggtccagggtttatgatctcaagcatggccatatatatctatttcacttaagactctggaaagagcataaaatcagatgtaactgtttcctatttcatataatagggaattccatctctaaagttatgacatttggcctttcagtgggtttttgtggtttttactatggctgtgcttagattcctttttgaacacttttccagtggttccacttgaacacaatctttgagtcacataggagaggtgacatgatagagtgtaaagccagaaagagcacgatttggatctcagctcaactgatagggatccgtagcaagatacttcacctctctsagcctcagtttcctcatctgtgcaatgggaatcgtaacgcctgcctctcaatgttgttaagattaaatatgttggccggg

SEQ ID NO: 474237 - DNA, 517 bp, Homo sapiens
aaccaggtctgtataatttcagagcacataatctttcaaagtaacctaacaaaatcacagcaacttttaggttcacagagaacaggccaaaaaaacaaacaaacaaaaagaaagaaattatagtaatttccaggtatgaaccagtaatccaaactaaacatattttgttgaatgaatatcctggattctactatgtttctccaagtccccactgtcttaaaacatagcatttggggttcagtagttactgataaaccttttgcatatctatgcactgttagttctttaccctacacattattttattgtagtaaagccaattttctgacatttatctgaaagcaaactgtgaagtacttccattctacttcctggtgatttttagtgacctggtgccatttgaacgtatgtgtcctccaaaattcrtatgttgaaacttaaaccccaaagcaatggtattagaaggtggggcatttggaaggtgattaggtcatgaggccgccaccctcatgtgaat

SEQ ID NO: 474238 - DNA, 598 bp, Homo sapiens
gtataagcaagagggaaaaaaagaattcacaacacagtcagattttatagtcattacatttcactggaaagcaaaatgtctcttctttgcctattaccttccacaggctcaatattggcattggaaaacraagtgctgagtatggcacttcctgccttatttccatgatgtatgggctaaatcatcagggcagataatttgagttcatcagcaatattgaatttgtgttttaatgtgaacaccttaccaagtcctggcttacgaacttcgcaaatgatgtgtgtctctatgttagtgtgctttgacttctggcccttgaaagcaaacagcacatatagtgtcccacattccaaagcctcaagagatggagagactgaagggcagagcactgcaggtggagggaacagcatggaaaaaggcatggggttgggaaagtatgttcagcgaactacaatgtatctgtagcttgtttagaaaaatagggtttatgttggaaagtaatggcctataaacttatggtggatttttaatgccaaactcctgaaaagtaaacttattctgtctagatcaggagtaggcaaactatggcccttgggtc

SEQ ID NO: 474239 - DNA, 466 bp, Homo sapiens
tcctgtatcctagtctgatgatcttcctgccataaggaagggtttaccttgacggttgcacatattccttaaacatactacatagggcatttgaactgtatgtgagaagaacattattgtaaccacagaagccatataataacacttttcttatgatgctatggtagtcataatcaaaacaatagcagctttattaaggagacaaactaatgtgtctcattatgtgccaacacccttctacccartgtattctttcctgtttatatcatgccacctgagatgttttgagtggtagctacctagcaaaagagaaatgtcaaggtctcttactgatcacttctaatatgagtcatatcaaaggttgtgtaacagcacctacatgttcaggacactcccagtgggaaagaacagtaagcaccgtctgaaggatactttgcgtcttgaatacattccttctatgccaaca

SEQ ID NO: 474240 - DNA, 566 bp, Homo sapiens
ctgggcctggaatgcactcccaacagatattcacatggaacactccctcctttccttctggtttttcttgaaatgccactttcatagtgaagccttccagccaatccaaaattacaaaattacaacctcctttcccattctctcccgtttgatttttttttccataacacccatctgcaactgaaacacaaggtgttttacgtagttgggtgcatagtatctggctgctcccatgagatcaaagaaatgtttctgtcttgttcgctgctggaatgaactgcttgggatgtagtgatcccttaataaatatttcttgaacgaagtaatcagttgcctcatatgagtgatttcacacagtggacctcatcgacagaggaggctcactagttatggtttccagcagtctcagaggaaccaaagattcctggtgcaaacagaatgggagagatgcttataaagctagcaggaacttccattatggcagagggaartggaagtccctacagaactacgaaattacagaggtgaatggcagatctatgagttaactgagattcaatttctat

SEQ ID NO: 474241 - DNA, 526 bp, Homo sapiens
tgtcttcaaatagatttttcatccagctttatttgatgtagaagactttactggggactcatggggattacagattagggggaagggaggtgagaataccctcaaagaaatggtcagctatagccagcactgaacttgcaatttctagtttcaatggatactggagagatcctcccctttctactccctgtcttcatggagtagaatgacctcccagagaccatgttcagaaagactgttccagaagcacaaaaagaacctgggttccatggacatggctgcacctgctgccacrgagataaacaagatgctctggcaggtcagccagaagagacaaaaaaaaagctgggctgtcacatttgtgctatgacagatgtctgcattcatataatgtgagagtgaatctttgggcctggaagaggcagagaaatgccacattcttataattttttgatgcaaaggttattgcaatattgtcatgtaaaagttgttgctttgtgaaaatacagaattgctccttttggga

SEQ ID NO: 474242 - DNA, 582 bp, Homo sapiens
ctgttgggagagggggagtcgggcagggagagggtagctcctggcctcctgccaagccctagtcgagtccccagtgtccacctctcagttgtgtctttctgttgctgattctatcactgcgctcttttttatctttgtgtgtgcgtctctttttctcttcctctttttctcttctcttcttctctcatctctctttggacaatggaaaacaaactagcttttgcatggaccttttagagcagctaattcatttatggcaggagaagggaccaaagagcacctacttgtgaatgtcccctaaactgcrgtcactggtaagatgccctgtgataatgggaagaaagcctagattcagccagactcgcattcctaccctgactccacctttactggtcacgagactctggccacacacttcaacttctccaagcctcagtttcctcctgtgttatgctggggtaacaatgcctgcctgaggatgttgtcgtgaagatgaaatgtgaaaccttccagaaaaaccctttgctcagggattgacccgggcagagtccctacctgccttccttggcagccactatcatt

SEQ ID NO: 474243 - DNA, 581 bp, Homo sapiens
tcccaaactatccttaaattgttcatttctagactcttgcctggggtggatgatattcctcagtgccaggtcactgggcagagatttttcactgtattggatctcttctgctttgtctactttcttatttgtgaaaatatgtgtgcatacacacagagacatacacacatgtgcacacacacatgcatgtgcacacacacacacacacacgagctgactcccttaaaccaggtagctgacctccatgggtccacactctgggtccaaactcaactgaaggaaagtgaactgaaggagacatttgtgaatttgattctccaacctaaggactttgcttttcaaaccaagagtgttcagaagggcacagactgcagaacatgaagacttctgttaccattaacatagttccccggctccatgagacatgaacagcctctctgagaatgcaccgacaactcagcatgccttgtaaacagaccacaattatagagcttggttttgactttttttccagggccttaaagttgatatatttttacatttcctggattggagggtagggagcatggctttgrgtttag

SEQ ID NO: 474244 - DNA, 521 bp, Homo sapiens
agctgcctttgcactgttggctacttgactataatcctgatcttctattgggatggatgtttgagaagtctctttccaagacttggggctaatgaattaaaagcataggataccaaagatcaagagcttaggtataagaygagcgcagtggctcatgcctgtcatcccagcactttgggaagcagaggcaggtggatcacctgaggtcaggagtttgagatcagtctggccaacatggtgaaactccatctctactaaaaatacaaaaattagccaggaatggtggcaggcacctgtaatcccagctacttgggaggctgaggcacgagaattgcttgagcctgggagacacagcttgcactgagctgagattgtgtcactactccagcctggccaacagaatgagagtctgtctcaaaaataaataaataaagatcttagctataatgtctaaacattctaaacatttactcaatggggaaccatcaataagatccatcaaaaaaatcactcaatgttta

SEQ ID NO: 474245 - DNA, 521 bp, Homo sapiens
agctgcctttgcactgttggctacttgactataatcctgatcttctattgggatggatgtttgagaagtctctttccaagacttggggctaatgaattaaaagcataggataccaaagatcaagagcttaggtataagacgagcgcagtggctcatgcctgtcatcccagcactttgggaagcagaggcaggtggatcacctgaggtcaggagtttgagatcagtctggccaacatggtgaaactccayctctactaaaaatacaaaaattagccaggaatggtggcaggcacctgtaatcccagctacttgggaggctgaggcacgagaattgcttgagcctgggagacacagcttgcactgagctgagattgtgtcactactccagcctggccaacagaatgagagtctgtctcaaaaataaataaataaagatcttagctataatgtctaaacattctaaacatttactcaatggggaaccatcaataagatccatcaaaaaaatcactcaatgttta

SEQ ID NO: 474246 - DNA, 394 bp, Homo sapiens
aagattcaggctgtctggtaggcacagcacccctgcagtcagaagggagacagagaatgaaaggaaaacagattgttatttttcagttaaccgagggaagggtgcaacatcttgcacaacctcaaaccacgccagagctggtactgcaaagaaarccaatgtaggaaccaacgctctggactccttttagaaatggatgcccagctatttgcaaaggtctcttcaaagtcctgactactgattttaacaagcatgtgggcattcgtctgtacatacacatttccaaagaacacaaaacagaatcctctcctcgggcctggaagggttgctatccactcctagatgtgacttcttgtgactctggtggtcaggtcactccctttgttctccccac

SEQ ID NO: 474247 - DNA, 317 bp, Homo sapiens
gagtttgagtggacctaaaggaaataatttccctggagagcaaatgaacataagccaggatccacagtgggctggagggtcacggtctccctgaaaytctgttactttgagtgtgttgtgcatttgtctaaggggggagttcattcaaattctccaaagggtttatgggtcctaaaaaagggcaaactaatgcctttgattgtccacattcccatttattcaaggtttctctgctctgggactggcctggcggcaaggtggggtagagcaagagggacaagataccggcactgccagagcttgataccatcctgcag

SEQ ID NO: 474248 - DNA, 383 bp, Homo sapiens
tggatgaaatcagtggttactgaaaactggastgaagactggtttgagagctgatgtcactctagcagcttgttaaaaatatagatttctgggctccctgaggggctactgctgaggtcatcgggggtgggggactacactggcattcagcaagctcccccaggtgattctaattagtagccaggtgttgggtctgcctgattaagcagactccaaagacttcagcagtgcttacagcctgttctcaatcttggccccatctgagaatcacctgggaagctttgaaagatgcctttttccaggttctactcccagaggctgatttgatgagtctgtgatgggtcccaggcacaggaagtttaagtgagtccccaggtgattct

SEQ ID NO: 474249 - DNA, 383 bp, Homo sapiens
tggatgaaatcagtggttactgaaaactggagtgaagactggtttgagagctgatgtcactctagcagcttgttaaaaatatagatttctgggctccctgaggggctactgctgaggtcatcgggggtgggggactacactggcattcagcaagctcccccaggtgattctaattagtagccaggtgttgggtctgcctgattaagcagactccaaagacttcagcagtgcttacagcctgttctcaatcttggccccatctgagaatcacctgggaagctttgaaagatgcctttttccaggttcyactcccagaggctgatttgatgagtctgtgatgggtcccaggcacaggaagtttaagtgagtccccaggtgattct

SEQ ID NO: 474250 - DNA, 446 bp, Homo sapiens
ttccctctctggaactcactgcatgagctgccatgtgagaagcagccccatctgtcccttgtgactttccatgtgagacttgcatttataactgctgtttgttttctctgtccatgacggttcaccacacaaggtatctccctgactgctgggcccacatgtctctcactgtacctcagtttcaggagttaggggggatagctgcctatctctgagtcgcctcctagggtccccagaatgacttttgtgtatcttaaacatatcctaaaagtttgatgaagtctgtctgggcttgtcctgtgcaggaacagacagacaagcagagaactaattttaaccacgatggaagaaggacttgaaggacagatactaaatataaatgatggttacacggtgatggcattatttcctttctggaatgggcctrtttttcctctcttttccat

SEQ ID NO: 474251 - DNA, 579 bp, Homo sapiens
ttttttaatattcttttaaattctgttgttttaaatttcattaatttctttctaataactagatttattaatttatcagacttaataaatttattaattaataaaataattacacattattttagctattcttttagtgtttactctagaaattaccagaagcacattggttaatgtctaaagttaatcaataattttgtctatttattagataattcaaggcccttgaaacgcaaactctaattacctttcttctgatttatatattctaattctggtcatttctctgtttttgtttttaaaaaccaaaatatattattcttgttttataaggccagtattcatttacccacatatctactatttacaatgttctttattcttcctagcatctcagctcttccattggggaacatttttcttttatctcagatgtatcttttagaattctctatagaaaaagactggtgatggtaaactctcttaggtttgtttgaagatastggccttgtttacactggatatagaattctaggttgacagtgattttctctgagcctgttggggatgtagttatag

SEQ ID NO: 474252 - DNA, 670 bp, Homo sapiens
tgttactttttcagatcttgctttgccttgctttattttctctttttggaaatacatttgtagccggccaccgtggcttatgcctgtaatcccagcactttgggargccgaggcaggcaaatcacctgaggttggaagttcgagatcagcctgaccaacatggagaaaccccctctctactaaaaatacaaaaaatttgtcgggtgtggtggcacatgcctgtaatcccagctactcaggaggctgaggcaggagaattgcttgaacccgggaggcagaggttatggtgagctgagattgcgccattgcactccagcctgggcagcaagagtgaaactccgtctcaaaaaaaaaatacatttgtacgtgtgttagacatttttactgcactcttttattttcttcatattttccatctctttggttctctgtacttcatttttaaaaatgtctttttatcagctattctataaatgttatttttaactgtatctgttaagtttggatttcaattattatatttttcatatatggagattttctttggttctttttcaaatctgccatttcttattccttgctttttttactttaaacatgttgattaaattatatgggctctgccttcaaaatgtatccaagttcggaccatctcatgcttccacattaa

SEQ ID NO: 474253 - DNA, 670 bp, Homo sapiens
tgttactttttcagatcttgctttgccttgctttattttctctttttggaaatacatttgtagccggccaccgtggcttatgcctgtaatcccagcactttgggaggccgaggcaggcaaatcacctgaggttggaagttcgagatcagcctgaccaacatggagaaaccccctctctactaaaaatacaaaaaatttgtcgggtgtggtggcacatgcctgtaatcccagctactcaggaggctgaggcaggagaattgcttgaacccgggaggcagaggttatggtgagctgagattgcgccattgcactccagcctgggcagcaagagtgaaactccgtctcaaaaaaaaaatacatttgtacgtgtgttagacatttttactgcactcttttattttcttcatattttccatctctttggttctctgtacttcatttttaaaaatgtctttttatcagctattctataaatgttatttttaactgtatctgttaagtttggatttcaattattatatttttcatatatggagattttctttggttctttttcaaatctgccatttcttattccttgctttttttactttaaacatgttgattaaattatatkggctctgccttcaaaatgtatccaagttcggaccatctcatgcttccacattaa

SEQ ID NO: 474254 - DNA, 584 bp, Homo sapiens
atggtgggatgtctttaacatcctcataaaaatatagcaccttgactcttcaagctgtacagatggtgctcctaaagaggaagaagtgtcagacctgactagtgcacttatgtcactaataactacagttgtaaaaaatcaacaagacttatttggtgaaatgatggtatcggaatgtgtaaagcgaacaaaatgatctagaccaagcagctttttagaacaatctgtccagtagaactttctgcaatgatggaaatgttctgtagctatactgttcagtatggtagcyagccaccagctatacatgtggctgttgaggacttgaaatgtggcaagtgtgactaaggaactgatttttaaatttaactaacttaaatttaaatggctacatgtgccttttggttaccatattagatagtgcacttctagaatttgcatttccctgcttcttaatcactcctcttcacaagtaagagataattgctattctgaaagaccatgtggcctgtgaaaaaggcagacaaatacttaaccttgagatcaaaaacataaaagaagcaaaataggaaataagatacgtccag

SEQ ID NO: 474255 - DNA, 584 bp, Homo sapiens
atggtgggatgtctttaacatcctcataaaaatatagcaccttgactcttcaagctgtacagatggtgctcctaaagaggaagaagtgtcagacctgactagtgcacttatgtcactaataactacagttgtaaaaaatcaacaagacttatttggtgaaatgatggtatcggaatgtgtaaagcgaacaaaatgatctagaccaagcagctttttagaacaatctgtccagtagaactttctgcaatgatggaaatgttctgtagctatactgttcagtatggtagccagccaccagctatacatgtggctgttgaggacttgaaatgtggcaagtgtgactaaggaactgatttttaaatttaactaacttaaatttaaatggctacatgtgccttttggttaccatattagatagtgcacttctagaatttgcatttccctgcttcttaatcactcctcttcacaagtaagagataattgctattctgaaagaccatgtggcctgtgaaaaaggcagacaaatacttaaccttgagatcaraaacataaaagaagcaaaataggaaataagatacgtccag

SEQ ID NO: 474256 - DNA, 250 bp, Homo sapiens
ttccttttcctaagtgcaaatgacacactttggttagtctggaccccaaatcattttatttcaggaaaaagtgtgcaataaatctatgcataatagagtttttatattcggataactcaggagttgctggacaaacacccyccagctgtacacatgagttgctcagatcattctagaatatcctagagatcagaggtgggtgatcttgaggagccaggattcttgctgctactcagtggagttaaatgca

SEQ ID NO: 474257 - DNA, 619 bp, Homo sapiens
tcacctgtgctggatcccacagagagtgctgggggcatgaacagcaccatggtactgtctcactctgaaaaaggctggatttttgtaccccacaattagtcagtcattagctgtgggctkccctcagcaggagaacgcaacctcttaggcattttctatcgaggcagctctgtgcagtggaaggcaactatcaagagataggtactgctgtgctgttagcagcaactgggaaaagtgtgtcccaggctggcaaagtgtatctaaagggcaccaacagcactttctacagtgtttaattcattagccaaaactgatgcagcttctaaatgacagagccaggatgcaaaccctaatctgcttaagtgttgtccacaggtacagattagcctacttatcctactatttgaagctttatacaattagcgtggttttttttttcaatacctattttatgccagatatggtgctcaaagctggaaaggaaagtgtactgaccaggagtggaacgtggctctacctttttgcatgcttaactagcagagtcctgggtcatcctaacagtgaactgaaaaattaatgcttgtttttggcttttttctctaaaggctgacgagatgca

SEQ ID NO: 474258 - DNA, 154 bp, Homo sapiens
aattttgttgttgctgatattaacaacccaacaagaaggggagttaaagggcagtgcttacaaaaggtcacaatatactgcctaaatatgctgtgagcttygtaagtaggctgcactcttgttagctatcatcaggatttaattaactggtgtc

SEQ ID NO: 474259 - DNA, 656 bp, Homo sapiens
tgctgacatttccatatagctactatattatattttgcattgactaactcagsatctgaggttcattctttatattttagccactaacttaggaaagtagagccatgactttcaacaagtttgggtcatgatacctatctcaattgttgtttggtagatttttatggttatttgttgtttgtttagtttttacagtaatatacttcattttccattttctgatctagtagtttgagtggcagaggttataatttgtaaaaatttgaagttacagtgatagccttatttttagggtgagagtttaaggcccatgtagtctcatatactgacatattgtttactcctattttacttaatagcatgagatacaaaatctgtggattcttctatacaagatgatacagcattcaaccatacccaaatattacataaaatgaaaattcttaattatttgagtcaaaagtcattttcctggaatttcctattttttttaaagtttccttaatctatcatttatttttctgttcctaaatatgttcctacggcaaataggatcttgtcattacaaaaattttttactgcctcttctcatgaaggttctattatgcatttatctgactcagtgtcttcttttgaaggctgttgtagtcaccaac

SEQ ID NO: 474260 - DNA, 621 bp, Homo sapiens
atctcagcttaggaatacagcatcaaattaaggagctgagaatgcatcctaagcaaataaatggaagtttcacatttgcatttcagcagggaatttctgtagataataatcaccttaacatgtcttgagtccttactaggtgtcaggcactgtgttaagaaccactttaggaacataagagaacaaagctaaggatgggcacttctgtggagacattttatggtaaggatcctgttgtgttcctcaaattatcrcccaggttttagccagcttctttaattgagccagcctgttgtgtgtttcttctctaatataatcacagcctgccttttcgttctcactgttgccaaattcaaatgtttgcacagggtagtagtcgaggctgatttgaatctcaaagtaattattcctagagatcaaagatcctagtagcaaaggaataataagccctgatgaaatgccacattgccacgctcactctttgttaaaagagaagtaagttttctcaggtgaagaatttaccagaatactctcacatgcacacgatgattgaagtggcacttttgtttctgctgttattgccgaggctgctgtttagatcaaggtgaggtcaaggagtag

SEQ ID NO: 474261 - DNA, 621 bp, Homo sapiens
atctcagcttaggaatacagcatcaaattaaggagctgagaatgcatcctaagcaaataaatggaagtttcacatttgcatttcagcagggaatttctgtagataataatcaccttaacatgtcttgagtccttactaggtgtcaggcactgtgttaagaaccactttaggaacataagagaacaaagctaaggatgggcacttctgtggagacattttatggtaaggatcctgttgtgttcctcaaattatcacccaggttttagccagcttctttaattgagccagcctgttgtgtgtttcttctctaatataatcacagcctgccttttcgttctcactgttgccaaattcaaatgtttgcacagggtagtagtcgaggctgatttgaatctcaaagtaattattcctagagatcaaagatcctagtagcaaaggaataataagccctgatgaaatgccacattgccacgctcactctttgttaaaagagaagtaagttttctcwggtgaagaatttaccagaatactctcacatgcacacgatgattgaagtggcacttttgtttctgctgttattgccgaggctgctgtttagatcaaggtgaggtcaaggagtag

SEQ ID NO: 474262 - DNA, 621 bp, Homo sapiens
atctcagcttaggaatacagcatcaaattaaggagctgagaatgcatcctaagcaaataaatggaagtttcacatttgcatttcagcagggaatttctgtagataataatcaccttaacatgtcttgagtccttactaggtgtcaggcactgtgttaagaaccactttaggaacataagagaacaaagctaaggatgggcacttctgtggagacattttatggtaaggatcctgttgtgttcctcaaattatcacccaggttttagccagcttctttaattgagccagcctgttgtgtgtttcttctctaatataatcacagcctgccttttcgttctcactgttgccaaattcaaatgtttgcacagggtagtagtcgaggctgatttgaatctcaaagtaattattcctagagatcaaagatcctagtagcaaaggaataataagccctgatgaaatgccacattgccacgctcactctttgttaaaagagaagtaagttttctcaggtgaagaatttaccagratactctcacatgcacacgatgattgaagtggcacttttgtttctgctgttattgccgaggctgctgtttagatcaaggtgaggtcaaggagtag

SEQ ID NO: 474263 - DNA, 425 bp, Homo sapiens
gtcatttccatttatttatttatttattttatttattttttatttttgtttttttgagagcttgtctcactctgttgcccaggctggagtgcagtggcacaaactcggctcactgcacctctgcctcctgggttcaagcaattctcctacctcagcctcctgagtagctgagattacaggcacctgccaccatgcctggctaattttctttgtattttagtagagacagggtttcactatgttcgtcaggctggtcttgaactcctgacttcaaatgatctgcctgccttggcctcccaaagtgctgggattacacrcgtgagccactgttcccggtggtcattttcatttctataattagatattatatgcttctaagtgacaagagactaaagacatttccgtactgacctttgtatgtaatc

SEQ ID NO: 474264 - DNA, 425 bp, Homo sapiens
gtcatttccatttatttatttatttattttatttattttttatttttgtttttttgagagcttgtctcactctgttgcccaggctggagtgcagtggcacaaactcggctcactgcacctctgcctcctgggttcaagcaattctcctacctcagcctcctgagtagctgagattacaggcacctgccaccatgcctggctaattttctttgtattttagtagagacagggtttcactatgttcgtcaggctggtcttgaactcctgacttcaaatgatctgcctgccttggcctcccaaagtgctgggattacacgcgtgagccactgttcccggtggtcattttcatttctataattagatattatatgcttctaagtgacaagagactaaagacatttcygtactgacctttgtatgtaatc

SEQ ID NO: 474265 - DNA, 621 bp, Homo sapiens
tgaattttctctattctaagaatccttttggaaaataactgctctgccaataatggattttcttctctataactacagtgatgccttcctttaagaaaacaatggttagttagctacttactacaactgagtcctgttagcaaaagtctttccttagaataattcttttatagaatagtgaaagagaaggaagtggaagaaaatgctgatggctctcatttctttatgcaagggtgtttcaaaatcttgttttgaaaaaaatgctggctcatcttttgctgttgtacrgtagtacttgtcactagtctggccatgggtccaccaagttagcaacttctttgactcaagaataagttaatactaaatgtttcttagtgcggatagttgccatgttttagtggatgttatataaaagctaagaatgcagacaaaggtgtagtgtccttaatatataaagaattgctacaagtcaaaaaaggtaaaggtcaacaacccaaaacaaatatttcatagaaaaatacagaaatctcttgaacagatgaaaacttcagcaacctcacttacggtaaaaaaaaaatgcaaaataaaactacaatatacaattttcactagtaataatgg

SEQ ID NO: 474266 - DNA, 659 bp, Homo sapiens
gtactgagagtggcttttattatgttggccaagctggtctcaaactcctraccgtaaatgatccgcctgcctcgccctcccccgcaaagtgctgggattacgggcatcagccaccgtgactggccaataattttaaatcaaaattttacccacagtgttataattctcttttatcttatccttaaacagtagaggttgaaacagtatctccagaaaacacaatcaggaagctcaatcttaaaacatagttggacataaatggcatgcacatatgagaagagaagatagttcactgtctcatgctactagtatgtagtagcaatagtatgactaatagtcacagggtctctctcaagcacagcaatcccaattatatatacaaatgctcaggctgctaaagaaagtaaactgatccaaacttctgaaggtgactgtttatcagatgtttctgtctgaagacacttaagttacctctgtcataacagagctatatacgtaaacaaggggtataaaaatttttgacatttcccacaatgtccccattctgatgttccatctgagccaaagtgttatttctggtatttttattcattttgtttacagacttcttattaggctaagttgaccacaatgctgcgtaagatacaaaggtaagtatg

SEQ ID NO: 474267 - DNA, 659 bp, Homo sapiens
gtactgagagtggcttttattatgttggccaagctggtctcaaactcctaaccgtaaatgatccgcctgcctcgccctcccccgcaaagtgctgggattacgggcatcagccaccgtgactggccaataattttaaatcaaaattttacccacagtgttataattctcttttatcttatccttaaacagtagaggttgaaacagtatctccagaaaacacaatcaggaagctcaatcttaaaacatagttggacataaatggcatgcacatatgagaagagaagatagttcactgtctcatgctactagtatgtagtagcaatagtatgactaatagtcacagggtctctctcaagcacagcaatcccaattatatatacaaatgctcaggctgctaaagaaagtaaactgatccaaacttctgaagktgactgtttatcagatgtttctgtctgaagacacttaagttacctctgtcataacagagctatatacgtaaacaaggggtataaaaatttttgacatttcccacaatgtccccattctgatgttccatctgagccaaagtgttatttctggtatttttattcattttgtttacagacttcttattaggctaagttgaccacaatgctgcgtaagatacaaaggtaagtatg

SEQ ID NO: 474268 - DNA, 659 bp, Homo sapiens
gtactgagagtggcttttattatgttggccaagctggtctcaaactcctaaccgtaaatgatccgcctgcctcgccctcccccgcaaagtgctgggattacgggcatcagccaccgtgactggccaataattttaaatcaaaattttacccacagtgttataattctcttttatcttatccttaaacagtagaggttgaaacagtatctccagaaaacacaatcaggaagctcaatcttaaaacatagttggacataaatggcatgcacatatgagaagagaagatagttcactgtctcatgctactagtatgtagtagcaatagtatgactaatagtcacagggtctctctcaagcacagcaatcccaattatatatacaaatgctcaggctgctaaagaaagtaaactgatccaaacttctgaaggtgactgtttatcagatgtytctgtctgaagacacttaagttacctctgtcataacagagctatatacgtaaacaaggggtataaaaatttttgacatttcccacaatgtccccattctgatgttccatctgagccaaagtgttatttctggtatttttattcattttgtttacagacttcttattaggctaagttgaccacaatgctgcgtaagatacaaaggtaagtatg

SEQ ID NO: 474269 - DNA, 659 bp, Homo sapiens
gtactgagagtggcttttattatgttggccaagctggtctcaaactcctaaccgtaaatgatccgcctgcctcgccctcccccgcaaagtgctgggattacgggcatcagccaccgtgactggccaataattttaaatcaaaattttacccacagtgttataattctcttttatcttatccttaaacagtagaggttgaaacagtatctccagaaaacacaatcaggaagctcaatcttaaaacatagttggacataaatggcatgcacatatgagaagagaagatagttcactgtctcatgctactagtatgtagtagcaatagtatgactaatagtcacagggtctctctcaagcacagcaatcccaattatatatacaaatgctcaggctgctaaagaaagtaaactgatccaaacttctgaaggtgactgtttatcagatgtttctgtctgaagacacttaagttacctctgtyataacagagctatatacgtaaacaaggggtataaaaatttttgacatttcccacaatgtccccattctgatgttccatctgagccaaagtgttatttctggtatttttattcattttgtttacagacttcttattaggctaagttgaccacaatgctgcgtaagatacaaaggtaagtatg

SEQ ID NO: 474270 - DNA, 638 bp, Homo sapiens
acttgtaactagcacagcatgttagccacttatttacttattctcaagctattggagaataaaactggccaacagagcttctgcagagactctcaaagtctctaactcaaaggattggcatgcagccatctttacaggtttccagcataygaaaccacaatcctacccaaggcgcagagtcacgaacattcaacttgttccacatgcagctaaaatttgttaattctgccaagttccatgagttttaacacctgcagtcaaattaggtttgatttgtgttctgctgtaaagtaaaaatatttgggtagcctgcaatacattaagccttggaaactttaggctaataggctagaagggctgttggctggatgataaaaataaataatgggggtaaagcaaaagataggagcataggaagattagagggaaaaccttagtatgcaataccttaagccgataattcagaattaattaataacattaacacttaaacataatgtggaaacaattgaggcatagaggtgtcaggtaaactcaaggttggacagactatagaggtgagatttgaactgatgtggtctggctccaagtccaatactcttttaactgctaagcaacctatgccacctctgacattt

SEQ ID NO: 474271 - DNA, 627 bp, Homo sapiens
ttgccatgcaagccttggaagcacagccaggcctgcatgagtacactcagacagttgcaaagcagttccactcttcccaccttggagttcacttccattcccattacgtcccatgtcagcaggaagaagcgagagcgatcgataggcttttctcatctttgtagcctacactttaagattaaggtatagattaaggtgtagattaagattaagattataaaacccaaagggatggtttgaaactgtctttgcaaaattataactgaggaaattatgacagtgaaagaaatcaaacctaaccgactctatcttgcttctaacacttaagctgtccttgttcatttctgggcacaggctgaactaactttgggaaggaatttagttcatggtttgactctgaaacaaaattgataatagccctttcccaaaaagactcccttcttgcctggggtccagtctgcctttgcaggrctaacaaattagctataagatcagaaattacaatttaggggtaatgcagcctctggctccaagaatctgaacctccccaaattgctctgggggataacgtcactattgtaaaacctaagatcagtgcttgagatattctgcagaccctgcactcag

SEQ ID NO: 474272 - DNA, 516 bp, Homo sapiens
agctttagcactacattttcatggtygtttcccaagaatggccataaattacatccttcaagtcagtcccaactagtgggaattcatatgaaaaattacttgctggttctcaagcttcttgcacgtccctcttgacattttgtcataggaaaactgggggtggatggattgtaaaatatttctcaacattacaaaacattttaaagctgataccagacctacactcatatctgctgattacaaataattctaagctattctggtatgccctgagcatctgtcttatatgcaaaataagtggcctcttctgttttcccctgtcttcttgaactgtctgtctcttttcaaaaactgtgtattcttcaaaattcctgcaatgccgaatgaaaaacggaggccatccactacagtggaaaatgtagagcaactccaagaaaagaggctggaagaaaagacaggcttagagatgtctgacagacttgaagatggtttccattttcccattttgcaagaggg

SEQ ID NO: 474273 - DNA, 647 bp, Homo sapiens
gctgccatgtaaacagtccaactttctggagtcaatcatgctgtgagggtgcccacactaattcacaaggagaaaccacacagaaagccctgagactacacaggaagggagatgtttggccagccccggctgctccaagcctttgctatttcaactccagccaccatgtgagagatcatgagacagatctgttcagcctagttcttcctgaattcctgacccacagaaacgtgaaagatactaaaattattgctgttgctgcttaagacmaaaggatgacctgtcactaagaagtaaaaaactgaaagaagagctaaaaacacttcaatctccccctcctaacttatgcaatgtcattttccagtattttagttgtctttcgttttgatcacacaaatcatctgcaaaaataatgtatgataataattattgttttatacagataaaattgtttagatttattgatatgtttagcaattcatttgcatcccaggttttttttctggagtaacatactctttttctgaggtatattcttcagattttctctcaatgaaggatctttggaggtaaaaaatctgtgtctgtttttcagaaaacattttctattgaaacaactattgaagaaatagattgcagaatataca

SEQ ID NO: 474274 - DNA, 615 bp, Homo sapiens
acagggttgggtgcatgcggcacttactctaagtgaaaaggagaagaatctgccctcccttacagatcctcaagaataaatccaactccaaaagcacagcaagacatttgaatttgactagaagttgcaatggagggtgtggggccactgcacaacagaaacttcacaaaatcttccagtggatgcctgtttctctcctggacatatttctaacattttctctaaccagccccgtcaagcccaccctctctcactcttrtctctgtcctatccacagcaaagtatccctctattagactcttcaattttgattcccctcataatcatttaacaccatgctcagatatgagaaaacccacccaagaaaatatttctgttatacatgaattcgtatctttatgaataaaattctgttcgtctgttaatggcatcacagaaaaacagggaagtgggtatctatcacatctggagagtgtgtttcagtggtctgaagtttaaaacatatgtttggagagatgcaatgaattcacttctggaggcttgagcaggagcataggggtgggcaggtccatccactcagagagaggcagtagttgggcagtcatcgtaagaaca

SEQ ID NO: 474275 - DNA, 309 bp, Homo sapiens
aacaggcatgcactgctgtgcccagcatatttaatatttgaacacatctactatgtgctgagaactgtattggatattttactcctattatcacattaatcctagaagtacccttatgaagaggacattttaattctcattttacaaatgrgaagatttaatcttaaaatgctaaaaaaatccaagagtcaaaacaaccagaagtgtcagaattagaatgtgaacacattatgtctaatttagtctcattagctttccaaaacatagccaggtgtcctttgggaatagtgacaaaggaatgccagcact

SEQ ID NO: 474276 - DNA, 381 bp, Homo sapiens
atctgcagtaccataactctaaacttaactaaagcacttcgaacaatacaaaagtgtatacgaacagaagtgaaaatkatatgtagaatcaaaagtgaaagtgcccttcccagaagtgtatatccttccagatttcagatagaaagatgaatattatgaaaggaaagatagaaagatgatagacagatagtagttaagagcacagacttttaatctagactgtcaaggtttgcgtcccagctctaccattaatacttctacatgtatgacctcagttttctcatctataaaagtgagaatgacaacagcacacaggacatatccctaatccgaaactccaaaatcctaaatactccaaaatttgaaactttttgagcaccc

SEQ ID NO: 474277 - DNA, 182 bp, Homo sapiens
tttaaacacacagagttttgttatatgtatgttggcagacagagggcagtatcattwttatttatttgttaataattcctgaagtaggattattagatcaaagtatttgaacattttgtggctcttggcacatactggcaaattgttcctttcttttctttcccttttcctttttctttttt

SEQ ID NO: 474278 - DNA, 619 bp, Homo sapiens
tcagctgttgacttattcttctgtttctttattgacatctcagtgtccaactagtgtaaaacactcatactcttcctaagtgtaagcaggtgatttcttatactgctgctttatacacatttgtttggtcgctgcagttttcaggttgagtattcctttctggaacagttcacagcatcttactgtgctgcactgcgtttttctcatgccttttatttttggatttctggttttctaaggtattgtctttcaaaacaaacttttwaaattgacaccttaagtaagaactacacacacacacacacacacacacacacacacacacacacacaaaacataacctactagtcaatctgcctgcattgcatcagggtctataaaagctatgggtccacaattgtactcaaaaggggaagagttaatgttaatgcatacaaaagagttgtcatacaaaagagaaaaagccaaatatgatatatgtggcttgtttcttctattgaatgtgtatttacttatatagcatcaatttgtattcatctctattttctaagtagataagattaaatgtaaatgtagagaattaagtcaaaccatgccaagaacacaaagtgctaatcaa

SEQ ID NO: 474279 - DNA, 601 bp, Homo sapiens
ctttgatctagacatttgctttatgggaattgacccaatagatatactagcctatgtacaaaatgatacaaatgtataagatgtacagatgaatgtaatagcaaaagagtagaaacaacataaatagctatcaaagagactaatgaatttaattatgctggacctatataaaggaatattatacagccataaaaaagctgcttatgtgatgatttgraaaaattgtcaagatacatttatattaatttaaagaaaaaagagcaaggagcattattatgtgtacagttataccactatttgtatttttaagggaaaaatatgtcaatgtatcagtgcatataccaggttggttcactcaacatccatcttaaactccaaatatgcttttctatattgaagaaattatgaagataaaaatgacacttcccaaatgtccttgcaactattgtcctggatgggattttaggtattataaattcagtgcattcatgcaagacttggaggtggaactgggttaagcggtgagggagacaggtgattcaaggcatctcttcggctggtgtgattctggcagaagaagtgtggtttttaagcctacagc

SEQ ID NO: 474280 - DNA, 530 bp, Homo sapiens
aaagcatatggaagatgcaaaacaccctgattttaagatgcatacaccttatttggaatgatagcatactgatatgaaaagtttagaatatgtttgccaagtcacctaaggttagttcagcaaacatttatgaaatgcctgattgtaagactattaaaattaatatatagggagtatatcccaactattaaagtactgtgagaacacagagcaagatacaattggaaattagcatcaattcacaaattctttttgaggaackattatgtgcaaactatttccaggcttgaggaggtgagaatatacagaaatcaatataaccaggtccctgtcacagaggagcttaatcaatgtacgagtatggccataggtacccagatgtcattcctaatgagcccagccacccagtagctctgtcgtaagaaagtgtggcagtcagtctgatgtcccaaaccattgaaaataatctaaatctttcctgtctcttataggaacatcccagggggaatcctttagaatacacagaaaag

SEQ ID NO: 474281 - DNA, 615 bp, Homo sapiens
tttattctggttcacctggacgttaatcactgtttagcttgtgaggagggagagaattgtctcagagaaactatttttgaaggctgactaacaatggtctgagtgactcacgatgcaggaaggtatgcgttaagcagattgttgaaagagaaaaaaaaagttgtttgatatatttcctcccctctgccaaagtgtagacaagaaaagggattcttgagtgctagtaaaattctgtttttttatctgagtgctggttattaagtgatttcaattctaataaattcattgagccatgcactcaggatttgtgcaattctctgcacatgttctacttcagtactttttaaaaactatagcactccctcttcacctggaggatgaatagacctatgtgtgtatatacacacatgcacacatacatgcttccccttcatgcaaaggttttatatttctaaaagcacctttctgttttaatatatattttttagttttaatagaacaagktctcgctatgttgcccaggcttgtctcaaactcctggactcaagcaatcctcctgcctcagcttcccaaagtgctgggattagtcatgagccaccgtgcctagacttatct

SEQ ID NO: 474282 - DNA, 594 bp, Homo sapiens
acctcctgcaatccctgcttagcttctacatccctgccctgygatacacccacagccttttactgtggggtcccctagttccagaaggctgccctcttgagtgggattccttcaagatgctcagagctggtgtcccttctgtggcatcctatcccaccaaacaccgagtgtgcaggttgcccacaccactgccttctatccttgccttgggcagccttccaccttcagaattctgcaggcaggaagcacacactccatgttcacatacagccccaacctcaagagataaaaaatccttcttcccaacatctctgcccacacctgatggccccagatgaagctgacaagtgattacagtctttccctgttgccagcactctggtctctactgtgctaccctctagagccctcagttttgcaaagagaacactcttctccatcacccccaacccaaggagagagaagagaagaacaaaaagccatagcactccactcccaacaaattcccttgttaaatgagctctcatttgcttgcataggatgtgtggggtggcaggaatgagtgaggtgggagagcaagtatgccattttttg

SEQ ID NO: 474283 - DNA, 648 bp, Homo sapiens
acattggttaccattattatccttgttttagagatgaggacactgatacataggaaaatttagcagaatgtgcaaggtctcacagcttgataaaagtagaaggcaggagtcaaatatgggtctgcttaactctacacttctaactagactacactcagtaggtgttttactagaatagtgggagcagacactgcagggagttgaggagtaaataaggggtgagaaagtaggggtgagaaagtgaaggttgaaagtgtagattagtctttaagaagattcgagagggtaagaaaacagctagagagagacacagtcatgggagggtgttaggatattagcggtcaagggaggctgttagtgttatgggatctttggggtatcggttttctggcctgaaacctcaggctagtggtgcctttgcccaagttttgctcaggcccactgagcttgttctgcccaatggcaggctgcrcttggctcacgctactgacctggatcccatgcctgccaagggcaagtcaggtgtggagcagcaaggattgtgtgagcaagcatggggtctggccactggcagtcagacatgctggctgttgcagtgtggcaggcagctctaggtgctggcatgggcgccagctctctgcaaggctg

SEQ ID NO: 474284 - DNA, 648 bp, Homo sapiens
acattggttaccattattatccttgttttagagatgaggacactgatacataggaaaatttagcagaatgtgcaaggtctcacagcttgataaaagtagaaggcaggagtcaaatatgggtctgcttaactctacacttctaactagactacactcagtaggtgttttactagaatagtgggagcagacactgcagggagttgaggagtaaataaggggtgagaaagtaggggtgagaaagtgaaggttgaaagtgtagattagtctttaagaagattcgagagggtaagaaaacagctagagagagacacagtcatgggagggtgttaggatattagcggtcaagggaggctgttagtgttatgggatctttggggtatcggttttctggcctgaaacctcaggctagtggtgcctttgcccaagttttgctcaggcccactgagcttgttctgcccaatggcaggctgcacttggctcacgctactgacctggatcccatgcctgccaagggcaagtcaggtgtggagcagcaaggattgtgtgagcaagcatggggtctggccactggcagtcagacatgctggctgytgcagtgtggcaggcagctctaggtgctggcatgggcgccagctctctgcaaggctg

SEQ ID NO: 474285 - DNA, 602 bp, Homo sapiens
ctgttggttgttggctgggggctgagaacagacttgggccatggtctggaacataacttgtgacctctctctgtggctggttgggcctcctcacaacatggtagtagggtttcaagagtgagcctcacaagagaacgaagtagatgctctatcaccatccatgccctagccttaaaatcacataatgactcttcctcagtagtgcagaatccactctgattcaaggttggacgtagactctactccttcactggagggcttgaagtcaacttttaagaagggaatgtggtttgggaactattgttgcagccatttggggaaaatgccatctaccatgacatccaataaaactaggtattttcctcctctgakcagaggctgttcttaggaacctgcttaggcaattttttagtgtgtttagacccacacggtagaggataaactaggtggattctcaaagcaacctttgaaataatctatgcagtttttctgggtactggatgggacttgcttgcatgtaccctattgatgtggaagagcttccacttcactttttttagcatgtaaaatcctagaggatggtgctaggctatttaatatcc

SEQ ID NO: 474286 - DNA, 614 bp, Homo sapiens
gcaaaagcacacaaaaattgcagagcagatgaaaaggtgagacaggaatgttcacatgaataaatgcattttgtccattaagaccagcctaccacaaataattctccttgctggtctactttatggactccatatgggattgcatagaaaagagaatggtttggcctccaaactgcagtatcagaaacatgaaatccttaaagataactctaaaattgaccagagtatgaaagccttctgccatacaatatgaatgccactggcaaaaaaaaatgagtaatagacttgcactgaggaaaggaccagataaataaatctagttcattttccttcactttggggtttctaggtaaaggatacatttaatcaaaagcagagctttaaatatgaaaactgtttgataattctaccataaatatataataaaacttgtgagactaaatctgtacatacatggtgttgtggtatattcattcacaatctcaactactgarcgatccataagacactaccaatgttttgatgtttttaaaaaccaattaatttcccttgtaacatagaatatattatccaccctttaaagaaacaaatccataaagaaaatttttttatcc

SEQ ID NO: 474287 - DNA, 564 bp, Homo sapiens
ttatatgaatcctaaacattttatttgaatagcaaatgctataaggaatcaagagaatattaaatattttatggtaaataacatctgtttcaatgatttcttcaaacctgtttcattttattctttcctgaaactttaaagccaatcaaaaaaaacagatacactgagtatatatattgttgccttataaaagaaacaygattcttatttttaatgtttcttctatataaaacaatactttgaatgtttcatttctgaacaggtgctcaaaggaaacaaaaaaattaatgatattatggtattttgtaagttgtaattttatccctgacttcctatttccatcaaattattatagatattcatatatcaaaaagcacagtttccccaaataattaattttttaaattaaataaaatatatcaaaagtagcaataagggtaaaatctcattggtgaatttctgattgtacgaattaatattaataactgacctttaagaagacaaatatatgtgagagtaaatctggtttgcacttctgtctgactttcttctctatctttctgc

SEQ ID NO: 474288 - DNA, 564 bp, Homo sapiens
ttatatgaatcctaaacattttatttgaatagcaaatgctataaggaatcaagagaatattaaatattttatggtaaataacatctgtttcaatgatttcttcaaacctgtttcattttattctttcctgaaactttaaagccaatcaaaaaaaacagatacactgagtatatatattgttgccttataaaagaaacatgattcttatttttaatgtttcttctatataaaacaatactttgaatgtttcatttctgaacaggtgctcaaaggaaacaaaaaaattaatgatattatggtattttgtaagttgtaattwtatccctgacttcctatttccatcaaattattatagatattcatatatcaaaaagcacagtttccccaaataattaattttttaaattaaataaaatatatcaaaagtagcaataagggtaaaatctcattggtgaatttctgattgtacgaattaatattaataactgacctttaagaagacaaatatatgtgagagtaaatctggtttgcacttctgtctgactttcttctctatctttctgc

SEQ ID NO: 474289 - DNA, 509 bp, Homo sapiens
aatctttgacgagatgactgaaaggggacttccctctctgggtttaactagtgctacacatctttcctcagccttttctgctggttttgtatccttccttccctgggacggtgccactggattgcttaagatcttcctgrgagggaatttgaacaatacttagagggctactctcaatagagtgtcttcagacaagccagtgcatacacacacactctttagtagagcttttcccctgctggaacactttttgcagtgttgtggagctaaagtatccttggccttccaatctgtttaagaattttctgcactggggctgtttgtctcatagtctaccttgactcctctctgggggtcctatgaggtctttattatgcaaacagaactccctagtgcccctcccacacatacaccaagacaaaccctgatttgtctggattccaggacatgggacagaatggatttcattctgagaccttggccattaatcatctgtttggaattgagaa

SEQ ID NO: 474290 - DNA, 559 bp, Homo sapiens
gctcctcgatggacttgccctcagccaggatgctgcctcactctaggctacgagggcaatcaaggccaaggtcaggctgatgtggtgagccaatggcttgatcttcatgtcagtttgggacaactcggaaggatcattcccagcttcagagtgtcctatgggattgattgaggcctccatggcaattgcaccacaattcagcccttctttttgccctatcctcccttcctcccatctttacagctacatgcatagctttccagaacatttgygaagtcttacaaaactaatgcttaacttcataaagggacatatccaagcatctttctctgaatgagagggtgaaaagaaagtcacacacttctataatctgtacactaactgagtagaaagggtgtaggttagcaatggcacaggaagttgacttttcaccagcaaggggaaaaaagttttgttgcctaggagtctctgcattatgagtgcagttaagctacctggccttgaggatcaccgtgtctggagtcagatggcacctgagcatcctcgactccctgtgaac

SEQ ID NO: 474291 - DNA, 657 bp, Homo sapiens
gcaatggcacaggaagttgacttttcaccagcaaggggaaaaaagttttgytgcctaggagtctctgcattatgagtgcagttaagctacctggccttgaggatcaccgtgtctggagtcagatggcacctgagcatcctcgactccctgtgaactgcttctgcggggaagaacactgtctagtgcccagccttcacagaatctccccagtcagctttgcaaaagaaaccactggattgtgaaatttcagaaacagatgagagcttagaggtcattccatctcgtcatttccaacatggaatctccagacttaaaaagcagaattggagttcttcaagttattttcaatactttaaaaagccaaattgaaatgatgtgtttaccatttaatagcaggagctaacaggctcatcaataccagtaagtcagtttaatctttagttcaacaaattaacaaattaattaatcacgtacttgatgctagacctggaagatacagagatgaataggcagatgaattcctggcccatatagaggttgactttctagaggtccagatagacaaaaccaagtaaacaggtagacttatttaaaaagatatgatggctaggatgaagaaagaaaagtaatcaataatgtgacacagaaaaacagaca

SEQ ID NO: 474292 - DNA, 611 bp, Homo sapiens
gactccccttgattccaaaacccttgtgtattttcagggaaattgtatccatatgtttctgattcattaacacttaactcatcaacatgttatgtgatgagagttatttgaagtccaacacgcctgtttaatgagactaaagagctttattactcttattttttgagaaaggatgggatttttattttcctcttttctctccagaaaagcaagcagtcacatcctgtacagtgattcaggcctacgaaactgacatctttggaaagactacaagacaaaaaggcaaaagtccatgtattggacttagatctgccttgaccgaggtgatcttctcttgaccacttatcttcttgagcttctgcacacatccaaactcctcaagtgacatagaaagatgcttacrgccaaaggattcgcatggcatcgaagttcctgaagtccctaacttatctgtttatcgttgtcacctcctcatcatctatgccttgcccagactttagttacataaattctgttcttaatgaaaaccttcaagatgaagtctgaggaagtatgagtgtggcaggggccaaaagcaattctttaatggctatgaagatttagtctccaga

SEQ ID NO: 474293 - DNA, 608 bp, Homo sapiens
caccaatcttcctgtttttactatttgtaatatagtagctgaagcatatgagttgttgacctaagtttttcaagaagaggaaatttctctgtctggaccaactcttgaaagcctctcccttttttcagacaggctcatggcatgcaccaccccaaataaactaatctgacctaatacaggcctacacatctccaactcagggcagctctgcactgggtacccgaatttggcttgagctagtgatttctgactgagaaaagtattcatccagcctctgaggaaatataatgaatgaagatgggattgggaatttgtgttctacaggcatctaggaagagtcttgaataatttgtcagtttttcttcctgttgttgcattggttcttggtacatacttacagggttattccacaacaaatatttatttttgaaacatactgtattaattaggaatgctttcagttgcaagtagcagcacattcaaccatagtggcttaaataagaagagttttgtttttctcrtgttaaattcttggaatttgttttaaaaacttcacagtgcacaaatctcaatgattttcttctccatttcctcacagtcattggatg

SEQ ID NO: 474294 - DNA, 608 bp, Homo sapiens
aatagcaaaacagagatatcagaaagcactattgcttttatcgtttttctgcaaattcatcatttggtcatgtctacagacaacacctagctttgttgttttcaacaagctgacagaggtctggggctgactagtatttgaaatgctctgtcttttgtgaggttggcaaatcacttatctctttgaaacttaggtttcggtaaaaaggtaaaaagtgaagataatgataataccactccagcctgcctcaaaggattgtaaggaaggtcaagtgagatcctatatgagaagggactttgaaaaccatgtaattggccaacaggtttttcctgcctgctgcacagaaaaaatcaatccactgaaacctcagcattgcgatggagagtttaactaatgygagatcggtccatgttggagaactggagttatcactcaaatcagtatccctgaaagcttggaggtttggctttttatgggcaatttggtgggcaggggtctagggtataggtgccactgattggttagggatgaaaccataaaggtgtggaaaatggtcctcaggcactgagtccgtctctgggtgaggctacgggatccgttgaatcatg

SEQ ID NO: 474295 - DNA, 604 bp, Homo sapiens
tggaaaaatagttaaaacaaaactgtctaattagttttaaaatattttggttaaaaagtgcagtaattwaataatacaattctgagaggataaaaagaaagaagtgactattctgggaagacatggtattgcattctcagacattttcagtggagacgttagggacttacaaaggcatcataattatttcttctttaatttttaattatgaaactattcaaactatcaaaactaccagaaattatgtttcaagaacaccttttctctaccactaagattaaacagacatcaacgtgttgccttattcacagagttattgctaaaaccaaaattatattcaattattatgttagctggtcctcaatctagtattgatcccagttggttgtgtagctatttttctgtaactagcaatccaatacaataagtcaaaactttggagtaaatgttgaattctgaattgtaattaaaaatcctttctgtatactgaatctaagagactcactaaatgtctggcatctttgattgaattcgtttttttaattgactaaagcaaggccaacccttctttaggtgatgtgattctacctactcagtaatatct

SEQ ID NO: 474296 - DNA, 508 bp, Homo sapiens
aattatgtttcaagaacaccttttctctaccactaagattaaacagacatcaacgtgttgccttattcacagagttattgctaaaaccaaaattatattcaattattatgttagctggtcctcaatctagtattgatcccagttggttgtgtagctatttttctgtaactagcaatccaatacaataagtcaaaactttggagtaaatgttgaattctgaattgtaattaaaaatcctttctgtatactgaatctaagagactcactaaatgtctggcatctttgattgaattcgtttttttaattgactaaagcaaggccaaccctyctttaggtgatgtgattctacctactcagtaatatcttccccatcaactagaattctaatcacaactcactcctatgaggtttatgttagcctgagttttccagagaaacagaaaagagagagagagagagagaagtacttactctaaaaaattggcttacacaatcatggaggttgaga

SEQ ID NO: 474297 - DNA, 616 bp, Homo sapiens
tttgttttgcattttttaggtrttgagatatttacttacctgatctttacaagctggaaccagttctctctcatggcccttgtatatcagtcaaggtccaattatagcagaaaaacacacagtagcttgaccagggaaggttggatataaataattattatttataagaggacactggagcaacagattagctagtaaaaaagagttctaaagaatataagaatatcagaaataagaaacaaccactacccttagggctcagtttgagtgtccaaggaagagctgtccacacccacccaccattccccgggactgagatccatacctgattggaaaggaaagagctatgattcactgagtggcagagaagtcattgtggtgccatactggtagaacttgctagaaatctgcctttcagaacttgctgaaattctgcccttgtgtaacaagaaaagctgttcacaagaaggtgtctgatcttctgccatgtttctgcaacacgttttactgacaaagcttgacatcatcctagctaacaacaacaacaacaacaacaaagcatttaaaatgcccagctcaatttctgcagagcaggcaatgaagtataagtttgcag

SEQ ID NO: 474298 - DNA, 588 bp, Homo sapiens
cttagtgccatacgatgtgacaagaagatgatacgtaaggcctaagcaactcrttatttttggaaacatgacctctttcaacctagttcttgtatccagactctcacaacagcttctccatctctgagagctaaaatacctgccgggtggataagcagtcatacccaggccagccagcagctctcctaaatttggagggagaaatccattcaggagtgcgatgatagagtcaggcttgcaacttcctaaatttcagggatacctgcatttcaagggaatttcatgatcattaatttaaaaaaaaaactggttcttccttataggccttaaaaacatgtaaaatgtccctaagtcaatgatttgagaacaagaagattaaaaatgaaacagtgaattgaattggaattgaacagaatgctgctgaagtcaaacacaagcagctcgtcagtctaagataaaaatgctagaaagacctctatctttatgatcagggagtcggggtcatattaccttaattgcctggtaaacctagcctgcacaagcatgcacactgaagatatggtgatatctgactttattcattctctc

SEQ ID NO: 474299 - DNA, 588 bp, Homo sapiens
cttagtgccatacgatgtgacaagaagatgatacgtaaggcctaagcaactcgttatttttggaaacatgacctctttcaacctagttcttgtatccagactctcacaacagcttctccatctctgagagctaaaatacctgccgggtggataagcagtcatacccaggccagccagcagctctcctaaatttggagggagaaatccattcaggagtgcgatgatagagtcaggcttgcaacttcctaaatttcagggatacctgcatttcaagggaatttcatgatcattaatttaaaaaaaaaactggttcttccttataggccttaaaaacatgtaaaatgtccctaagtcaatgatttgagaacaagaagattaaaaatgaaacagtgaattgaattggaattgaacagaatgctgctgaagtcaaacacaagcagctcgtcagtctaagataaaaatrctagaaagacctctatctttatgatcagggagtcggggtcatattaccttaattgcctggtaaacctagcctgcacaagcatgcacactgaagatatggtgatatctgactttattcattctctc

SEQ ID NO: 474300 - DNA, 597 bp, Homo sapiens
ggctcacgcctgtagtcccagctactcaggaagctgaggcaggagaatcacttgaacctgggaggcagaggttgcagtgagccaagatcgagccactgcaatccagcctagatgacagaataagactccatctcaaaaaaattaaaaaaaaawattttttaagttctctatataagatggagtagtatttggatataacctatgcacatctgcacatcttctgatatactttaaatcatctctagattatttataatacctaatagaaggtcaatgctatgtaaattattattacactgtattagttttttatttgtattatttttgttacattattattgtttattttttatttttttcaaatatttttgatccatggttggttgaattggcagatgtggaatccacagattcagagggctcactgcacttacagaagtgctcccatggatgtgtgcctgtatgtataatggatggatgggtgtgagcacgtgcatcaatgcatctccacaatgtattctacgaaatatgatcagatgcacaaaatctaaaacaagtcgaaaccaaacgtttcagagggccataattttcttccag

SEQ ID NO: 474301 - DNA, 597 bp, Homo sapiens
ggctcacgcctgtagtcccagctactcaggaagctgaggcaggagaatcacttgaacctgggaggcagaggttgcagtgagccaagatcgagccactgcaatccagcctagatgacagaataagactccatctcaaaaaaattaaaaaaaaaawttttttaagttctctatataagatggagtagtatttggatataacctatgcacatctgcacatcttctgatatactttaaatcatctctagattatttataatacctaatagaaggtcaatgctatgtaaattattattacactgtattagttttttatttgtattatttttgttacattattattgtttattttttatttttttcaaatatttttgatccatggttggttgaattggcagatgtggaatccacagattcagagggctcactgcacttacagaagtgctcccatggatgtgtgcctgtatgtataatggatggatgggtgtgagcacgtgcatcaatgcatctccacaatgtattctacgaaatatgatcagatgcacaaaatctaaaacaagtcgaaaccaaacgtttcagagggccataattttcttccag

SEQ ID NO: 474302 - DNA, 357 bp, Homo sapiens
tgtttcaattcataacagcatatataagataaggtgcaatcattaacttttaagcaaatcataaatatttatcttaagtcctacgtttctgtatacagtcaagatttttttaaagttcgtatttgtattttatctcattaaggaaaaggtcctgttgcagaggtcgcatctgctcttgcgtcccattaaatctgaactataagcaggtaataaccaaactgccaaaatgcataatgaggcaaaatatcagaattartagacctaactttgggaatgcataaaatgtaatacatgatattttccgagctataatttctagattctaatgatggggaaaaatgattaagcctttgtaat

SEQ ID NO: 474303 - DNA, 618 bp, Homo sapiens
tagtgatttgtctaagcagcagcatcagtcagggaacttttaaaacacagattccccagctccaggccattcatcagaaactctaaaggtgaagcctagaaacctggatctttcaacatttcccagatgattctgatgcacctggccccaaaaccaaaatttagaaattgttagtacaaattagaggttggcaaatcacaaccacaggccaaatctggtttgttttttgtaaataaagctttattggaatacaaccacagccacctgtttatgtgctgactgcttttgcaatacaccagcagttgagtactgacaactgaaagcgcctggcccacaaagcctatatgatatttgttatctggccctttagtttcccagtccctgatctagacagtacagactttggggttcacaaaagagggaaaacaggtaggtgggggtcacctggaaagacttcaaaaaagaaaactatcttgaactgggccctacaagtttgatagcaataacatctattttctccccccatgcaactccctaattggactggtgtgcascaagtgattaaataacagaagaacctttggcaaaacaacttaaaggaccagatattcttttagt

SEQ ID NO: 474304 - DNA, 607 bp, Homo sapiens
ctaatgtatcttaaatcatggtgtttatctggacacgtggcttgtcctggtctctggactgaggcctttggcatgcttatgcagatgggagggtctgctacaggttgctctggccatgctgtgacaacgtgccctggaaaggtcctgaatatggctaattttggcagacaccagagcgcatccactgaagaagaaccgaaagatgaaaagccggsatttcaaccttgcattgatttcaaaacatgcaaaatgaattcaataaataggaaatcatttatgacacttgattttatttatcaaaacttaacattagctctacaatgagtaaaaatcaggatggagagtatggtaactaaaataagaaaaaaagagctccctttcttgattccataacagtaaatgtacattccagaacagagattatgacatggttatatttccagtatttagatccaatttattcaaataattgcaacctaattgtgtggagctattttaaatactgatttgctttgcttcccatttaaattaaaacctcatcacctgtgactattataccaaatatgttccttataatttagacaatgaaatattaattataattttg

SEQ ID NO: 474305 - DNA, 625 bp, Homo sapiens
agagaggtctgattaacaagcgaagccttatagatggcaatttgtttgctgaaaaaacaagactcccrgtaaaaacaagctgtgaccagcaagtttactgtaagcagcaagttgtaagtgtgactagggaaggagagagtccctcacaagcaggaaatgagagaagagctaggaaccccaggcaagttggaggtaataaagggattaggcagtgaaattgcatctatagccccaggggcactgcagtggtgagaggcagcaggcggtattttccaacatggcgcaacaatggttcccaccacacatcctcttctgctgagtgacattgccactttccaatcaggaggtagagtccttttctcccctctcttacacatgggcaggcctgtggctgctctgaccaatagagcagggtagaccatcatgccaggtccaggaaggccctcgcctggtccagtagctactacttcctgcctcttggaagacagctactgtgttggaactgaggctatccaaaaaccaccatgctgggagaagcctacaccacatggagatgccctgaagcatgagacaccgaggtgagcggcagaggaggggaaatagatcaaacagtaccagggcacca

SEQ ID NO: 474306 - DNA, 625 bp, Homo sapiens
agagaggtctgattaacaagcgaagccttatagatggcaatttgtttgctgaaaaaacaagactcccagtaaaaacaagctgtgaccagcaagtttactgtaagcagcaagttgtaagtgtgactagggaaggagagagtccctcacaagcaggaaatgagagaagagctaggaaccccaggcaagttggaggtaataaagggattaggcagtgaaattgcatctatagccccaggggcactgcagtggtgagaggcagcaggyggtattttccaacatggcgcaacaatggttcccaccacacatcctcttctgctgagtgacattgccactttccaatcaggaggtagagtccttttctcccctctcttacacatgggcaggcctgtggctgctctgaccaatagagcagggtagaccatcatgccaggtccaggaaggccctcgcctggtccagtagctactacttcctgcctcttggaagacagctactgtgttggaactgaggctatccaaaaaccaccatgctgggagaagcctacaccacatggagatgccctgaagcatgagacaccgaggtgagcggcagaggaggggaaatagatcaaacagtaccagggcacca

SEQ ID NO: 474307 - DNA, 325 bp, Homo sapiens
attttgttttcaatggggaaaacttgaagaggaagttccaggactctgttttagtgggtgggtgtgttggtgagtgtgagatgggctagggagagtggaatggkccaaacctctagaagaatgcaggtcaggaagggatcttaccacccacacgagttccgctttcaacctttgtgctcccatgaccctgtttccttctaggcccccatgtggattcagtctcaggtcagcctgactacaaatactgactctcaaataactgtattagggccagggtggatccccagtctgcattcaagttctttgggtgtggctgggacactgt

SEQ ID NO: 474308 - DNA, 689 bp, Homo sapiens
cagctgcacggatcgctctgctctctcggaagcacttgaacagtttttggtactgtattctgaaaccacagtaaagacatttatttgaggtaggttggggacagggctatctgagtcagggattttcagagcaacacagcaatagatcttattggttatagatattgatttctatacacgtaatttataaaaggaggtttatggtgaggaattagctcttgtgattatggaggacttctgccatctgtaagctggggacccgggaaagccagcggtgtgatgcggtcggagtctgaaggcctgacagccaggggaaccgatggtgtaaatcccgttctgagggcaggagaaggtgagaggagctgtctcagctcaagaagaggcaggaaaaaacagagtaaattcctccttcctcagccttttattctattcagaccttcaagggactrgacgaggccaattcacgttggaaagggcaatctattttaacagagtccgctgattcagatgctaacctcatctggaaacatccacagatatactcagaaacagtgtttcatctgggcaccccgtggcccactcccattgacccccacaagggccttggatattccagtgggttcctggccacaagggagttttccatcataggagaccatcaagcaagacaggaagatgcctccctcagg

SEQ ID NO: 474309 - DNA, 618 bp, Homo sapiens
cttccactgcccaaattttctgattctactgagaattggtggctttttctttctgttttcagkaaaaagatagagattagaaatagcatgacttaaacatttccccaaagtgagtgtgtgtatgtgtgtgatacatgttaaccataaactaatagtgtgaggtttagtgtgaggttggcccctccccttgaagaccttgagacaccccctccctttttttttttttttttgagacagtgtctcactctgttgcccaggctggagtacagtggtgtgaccacagctcattgaagcctcgacttcctgggctcaagtgagcctcctgcctcagcctcccaagtagctggggccataggcgtgccaccatgcccaactaattttttgatttttttggtagagatgggtctcactatgtcacccagactagtcttgaattcctggtctcaatcatcattctgccttggcctcccaaaatgctaggattacaggcttgaaccaccacgcccagccccttaagcccttcttgaccctctatatcagcatagtgaggaggccttggcaatgaaaggtagaatacacattgtcagtacaggccctggtagtaattgaccacaccca

SEQ ID NO: 474310 - DNA, 520 bp, Homo sapiens
atttccccaaagtgagtgtgtgtatgtgtgtgatacatgttaaccataaactaayagtgtgaggtttagtgtgaggttggcccctccccttgaagaccttgagacaccccctccctttttttttttttttttgagacagtgtctcactctgttgcccaggctggagtacagtggtgtgaccacagctcattgaagcctcgacttcctgggctcaagtgagcctcctgcctcagcctcccaagtagctggggccataggcgtgccaccatgcccaactaattttttgatttttttggtagagatgggtctcactatgtcacccagactagtcttgaattcctggtctcaatcatcattctgccttggcctcccaaaatgctaggattacaggcttgaaccaccacgcccagccccttaagcccttcttgaccctctatatcagcatagtgaggaggccttggcaatgaaaggtagaatacacattgtcagtacaggccctggtagtaattgaccacaccca

SEQ ID NO: 474311 - DNA, 618 bp, Homo sapiens
cttccactgcccaaattttctgattctactgagaattggtggctttttctttctgttttcaggaaaaagatagagattagaaatagcatgacttaaacatttccccaaagtgagtgtgtgtatgtgtgtgatacatgttaaccataaactaatagtgtgaggtttagtgtgaggttggcccctccccttgaagaccttgagacaccccctccctttttttttttttttttgagacagtgtctcactctgttgcccaggctggagtacagtggtgtgaccacagctcaytgaagcctcgacttcctgggctcaagtgagcctcctgcctcagcctcccaagtagctggggccataggcgtgccaccatgcccaactaattttttgatttttttggtagagatgggtctcactatgtcacccagactagtcttgaattcctggtctcaatcatcattctgccttggcctcccaaaatgctaggattacaggcttgaaccaccacgcccagccccttaagcccttcttgaccctctatatcagcatagtgaggaggccttggcaatgaaaggtagaatacacattgtcagtacaggccctggtagtaattgaccacaccca

SEQ ID NO: 474312 - DNA, 218 bp, Homo sapiens
taggcccacatcacaaaaccatccagagtattcatacactcatgagcaataaaaatcagtgactgttttaaatcactgtgttttaagattgtttgttatgcattattattatggcaatggataactgatacaggtatcttggacagaattcacttgcagatctaaaagaracaaacagaagctggaaattgtacatagagttgataggaaaaccacct

SEQ ID NO: 474313 - DNA, 569 bp, Homo sapiens
agatcagtcaagttaggcccacatcacaaaaccatccagagtattcatacactcatgagcaataaaaatcagtgactgttttaaatcactgtgttttaagattgtttgttatgcattattattatggcaatggataactgatacaggtatcttggacagaattcacttgcagatctaaaagagacaaacagaagctggaaattgtacatagagttgataggaaaaccacctgattacaaaycacttatcggaaatgctatgtggagaagaattagaagacatggtcactgagcaggaagagacatgactctgccaaggtattattggaaaggttggaggtgatctactatatggaagcatctctgaagtctagacataaatcatcacagttctagaaaaagtggaagagaaaacacacctttgtaaaaggactggaacataggaaagtgattgagtttgaaacaccaacaaaaccatatagggtgacggacagaaaccagattataaggtgttaaggagggaggaagaaaagacaaatcaaggttagtatgatttcctatgcattctag

SEQ ID NO: 474314 - DNA, 535 bp, Homo sapiens
gtcaagttaggcccacatcacaaaaccatccagagtattcatacactcatgagcaataaaaatcagtgactgttttaaatcactgtgttttaagattgtttgttatgcattattattatggcaatggataactgatacaggtatcttggacagaattcacttgcagatctaaaagagacaaacagaagctggaaattgtacatagagttgataggaaaaccacctgattacaaatcacttatcggaaatgctatgtggagaagaattagaagacatggtcactgagcaggaaragacatgactctgccaaggtattattggaaaggttggaggtgatctactatatggaagcatctctgaagtctagacataaatcatcacagttctagaaaaagtggaagagaaaacacacctttgtaaaaggactggaacataggaaagtgattgagtttgaaacaccaacaaaaccatatagggtgacggacagaaaccagattataaggtgttaaggagggaggaagaaaagacaaatcaa

SEQ ID NO: 474315 - DNA, 593 bp, Homo sapiens
tttctccaatcccctccacatcttcttttgccctgggcttcctggtttccatgttgattctggttgcttacaaggttgctttgcattccatctcatctatacagcaaggagcaagcacagcttttgtttcctttctttggggatcagtttcaaagttccctccacagcccaaagtgtgttgctggtgtctttgttgtaggcctctgctagccccagcctgctcctctctcccacccccacgatctcctgcccttttcatcctttatttgcagtccccagtccgcttcttccccgccatgcctctgcggccttgcctctctttcaagtccacgttcagatcttttcatcacgttgactcagcctgaaaggacgcctattttttccctctcctcgcttagatttatagcccttgtcaggccgtcctgccrtggcctctgacagcccctgcctttcctaacatcagattcattgctgttcctaaggtcctttaagattttaatgctaagtctataaatttagttttctttctgctttaacctttcttcagaccttcccattgtctgatgggatgtcccccaggcgttgatttgcag

SEQ ID NO: 474316 - DNA, 575 bp, Homo sapiens
caccatacccggctaatttttgtatttttagtagagatggggtttcaccatattggccaggttgatcttgaactcctggcctcaagcgatccccccgccttggcctcccaaagtgctgacgttacaggcatgagccattgtgcccagccaacccttatgttttctcaaaaagttttacagttctatctcttacatgttggtttttgattcattttgaggtaatttttgtatgtaataagaggcaagggcctaagttgttttttgttgttgttgttgttgcatgtaaatatttagttgtcccaacaaaagccattgagttttgaggttgccacacagctttgttgtggcaatagataaytgacgcaaagcttaccttttctacttcacatctcatgtactctcactgctgatatataccatgttctgagatgctatgctgagtcagcattttggaggctcattttaaatgagtaagtaggatgtggttgtcttgagaaaacctcacattcctcctgattcatgttattaattggtcctggagaagagctgactcccaaccatttttcactgtgatc

SEQ ID NO: 474317 - DNA, 579 bp, Homo sapiens
ccgggacagtacctggaacatatttaacgagagtaacttctcaaaagtgaggtgtgaatcacttgcattaaattatccaggccctattacctttactttgttaaaacacagattcctgaaccccaaccccatacccaatgaatttgactatctgggattaggaatctccatttttaaaagacttccttggtaattctgatgcagataaagttttgagaatcacttgttttgagaaaaacagaaatgcaaattaaagataactatagggtggctcactcctgtaatcccagcactttcggaggccgaggtgggcggatcacctgaggtcaggaattccagaccagcctggccaacatggtgaaaccccgtctctactaaaaatacaaaaattagccaggcatgggttggcaggtgcctgtaatcccagctacttgggaggctggggcaggagaatcgtttgaacctgggaggtggaggttgtagtgagccgagattgtgccattgcactccaggctgggtgacaagagcgagacttagtcccccccccmaaaaaaatctaaatataaaatagtaagaaca

SEQ ID NO: 474318 - DNA, 472 bp, Homo sapiens
acttctgggaagaggagagccatccaggaggccaaagtagaaataagtcagaaataaggaggctgtggtttgtgaactccactattaagcatttaacagggcagggtgcggtggctcacgcctgtaatcccagcactttgggaggccaaggcaggcggatcgcaaggtcaagaaatcaagaccatcctggccaacatggtgaaaccccgtctctactaaaaatamaaaaattagctgggtaaggtggcacatgcctgtagtcccagctactcgggaggctgatgcaggagaatcacttgaacctcggaggcggaggttgcagtgagccgagatggcgccaatgcactccagcctggtgacagaacgagactctgtctcaaaaaaaaaaaaaagaattcaaacaggagagtatacctcctcgactctgaccaccttgcaaggccatctgccaaccatagtcaccactcagcag

SEQ ID NO: 474319 - DNA, 542 bp, Homo sapiens
ctagatttccctcatcaactgcaagtgggctctggaattagacctgcctggtcaggtctcaactgtaccactccaattgtaactaggtgagtttgggtacaagcttaatctstttttgcttgatctcctaatctgtaaaatggaaagaacagtttgtctcttccttccccgacaggattattgtaaaaattaaatgaggctacccacgtaaagttcttggcacacggaaggtgccgcagaagtatgagttagtttcttcctcctgagaaagtctatacccacccactccaacctcattccagtcctcctttcatgggtccagtgtaaaaatgaggggcttcagactgggcgcaatcgctcacacctggaatcccagctactcagagcctgagttgggaggattacttgagctcaagagttcaaggctgcagtgagctgtgatcgcaccactgccctgtagcctgggcaacagactgagagtgattgatgcgtaccaggcatgtgtcccaactgttcaaacctgtgtccacccccagccaggc

SEQ ID NO: 474320 - DNA, 575 bp, Homo sapiens
cttcatacatggcacttctctcagctcgcttggctgaagacaccctggtctgtctttgtgtgtctagatactttccaatacagccataggcttcccacccactggacctgctgcctgtgctgtctttcccgtgtaccccagcctgtctgggccttgtctcatccctttccaaggtaccatcttcagcatcaaggacccttggagtcttagtccagcacacccacacaccagcccagtcttactcattctaaaggcttagagtgagagttaggatttggaatttttctayggggattcagtacttaattaatacaaacccatgtagcctgcatctcttacagccagagattgctctgcaaatgcaggcagtggatggttcattagcatattaatgatctgggttttttttccccctgataatgaccctagggagtagtgagccttgggtgcagatgaagaagatccagagaaataatgccaaaaggaccctttcatgaggaagcagaagtgagatgatgattccctcagtgagtagttctcaagggaggtgggaatcagaattacctagggaattt

SEQ ID NO: 474321 - DNA, 606 bp, Homo sapiens
ctgaataactgatacaactgaactgacttccaacagaaacacactctgcaaaagagagacaattggaaacttgtggaaaattgatgaagaaagaaacatgcccacaatttcatcatgggcagaatttgggtatatttcttccagtttctttccccttatgtttcttttaaaatacatatacttattatcatgcagttcaarctttcctgggtcctgtgatgtcttctttttcttaacactataccacaagcatttttccatgttccacacatttttatccatctagctttcttatacaatgaaacccaattggaggattgattgtttttgtttctcttttttaatttttattattttatttttccataagttattgggatacaggtagtatttggttacatgagtaagttctttagtggtgatttgtgagattttggtgcacccatcaccgaagcagtgtacactgcaccatacttgttgtcttttatccctcactcccctccgattcttcccctcaagtccccagaatccattgtatcattcttagcccttgcatcctcatagcttagttcccacatatcactgagaacatatgatgtttggttt

SEQ ID NO: 474322 - DNA, 606 bp, Homo sapiens
ctgaataactgatacaactgaactgacttccaacagaaacacactctgcaaaagagagacaattggaaacttgtggaaaattgatgaagaaagaaacatgcccacaatttcatcatgggcagaatttgggtatatttcttccagtttctttccccttatgtttcttttaaaatacatatacttattatcatgcagttcaaactttcctgggtcctgtgatgtcttctttttcttaacactataccacaagcatttttccatgttccacacatttttatccatctagctttcttatacratgaaacccaattggaggattgattgtttttgtttctcttttttaatttttattattttatttttccataagttattgggatacaggtagtatttggttacatgagtaagttctttagtggtgatttgtgagattttggtgcacccatcaccgaagcagtgtacactgcaccatacttgttgtcttttatccctcactcccctccgattcttcccctcaagtccccagaatccattgtatcattcttagcccttgcatcctcatagcttagttcccacatatcactgagaacatatgatgtttggttt

SEQ ID NO: 474323 - DNA, 684 bp, Homo sapiens
gggaaatgataagggaatcaatgacttaaaagactccttaggggagtgataattttaaaaagttgagaaacactgctctaatagaggagggaaacagggatagagggaagttgtcatttttagtgctatcatagttagtgttattattgattaccaccatcgttattatcataattagaaacatttcatacccatgccctaagttaatcctgctgaccatctgaaggtgtagatactattattctcatttaagatgttgaaactgagttttagaggtattgtccaaggtcacacagctagtagttggcaaagacatgatttcaacccaattctgtccgactccaaagctcatggtctcagccatcctagaatattgactgtaaaagggagagtagcaacagaacagcacatccctaaatcctaccatctactctaccaatctaagtctagctttcagaccatggaaagcagtcgggttgtaagaaaggagacagtcatatcctggaaaaactctaggttgggttgagcatggggtggaaggaagatgatcctgctctttcctgagtgtgccccttcttcctgccctaggaagcaccagcctttgggaccaggagcctggaacccagggcagagagagaaataagaagtccctggtgtgtkttcagctactgctgccgaaacccc

SEQ ID NO: 474324 - DNA, 625 bp, Homo sapiens
tggggaaaagaggatttacaagaaacttttctgtgtattctaaaggattccccctgggatgttcctataagagacaggaaagatttagattattttcaatggtttgggacatcagactgactgccacactttcttacgacagagctactgggtggctgggctcattaggaatgacatctgggtacctatggccatactcgtacattgattaagctcctctgtgacagggacctggttatattgatttctgtatattctcacctcctcaagcctggaaatagtttgcacataatmgttcctcaaaaagaatttgtgaattgatgctaatttccaattgtatcttgctctgtgttctcacagtactttaatagttgggatatactccctatatattaattttaatagtcttacaatcaggcatttcataaatgtttgctgaactaaccttaggtgacttggcaaacatattctaaacttttcatatcagtatgctatcattccaaataaggtgtatgcatcttaaaatcagggtgttttgcatcttccatatgctttagaacacctgacaggctctgaacactcccgttaactgtgaatgacagattaaaataactcagccattcac

SEQ ID NO: 474325 - DNA, 572 bp, Homo sapiens
tacctaacaatagcaatacataatgaccaacatcaagacatattctagaaaaattacgtggctttaaagaaaaaaaaaattcctttgaataacctaggaataaaaaactagtgacttaaaagggtttcaaaagctatgaaatcacgtcacacatttgagaccaaagataatagggtaacacttaagctccttaaaggaaatgtaagcctgctactaaattacattgaaagagaacttgtactctcaaagaaaagaatcaaaaatcagaagatacatacttatgaaaacaatattaacatgtgctcatttattataaaaatttggaaaataaaacaatagaggatttttaggtaaatgatggcattgaataatgaaatacatccagtcattaaaaattatggttatgaagactaataatatgaggatacccagggtagatcactaatgagaacaggcagaaaacatgattggacaaacagaatgagtataactatatggacagaagacagagctatacatagaaacactgttagaaaacawctttcaaatagctttctactgaagaaaattta

SEQ ID NO: 474326 - DNA, 624 bp, Homo sapiens
tctagcaagatacaataagcataaaaattgaagyataagaatatacatagtagtatctggtctaatttttatggtattgaaaagtcagtccaaaatttataaatttgtcatgcttctaacacacacaaaaaaagaaagttactctatgtccttaaaaaagatatttgaacattaatgatttttttcacaatagttccaaagtttataggcttagactttatgtctctctttatcaaaatataaataaaaaagaaatcaccaaaacaaaatataataagttcctgcttttatgacaatattagcacattctaaagagcatccctttggcaaatcatttatcttcatccataaaatgcagaaagcgagattacctctaaaggctatttttaatgttcaaggattctatgattctgacattcaactaattaaaaactctgattaatttccctaaatacctcccaaaacaagtcttttgtgtgacattcagtcttacatcaatactatattcatatttacccttttccaatcttttctcacattggtcctatataaagcccatgcaattttctttctccttatttttgttaatgtgatttcctccatgtaaaacatccctctcccagc

SEQ ID NO: 474327 - DNA, 500 bp, Homo sapiens
caagagggcagccttctggaacyaggggaccccacagtaaaaggctgtgggtgtatcacagggcagggatgtagaagctgagcagggattgcaggaggtcagctggaagtgcactgttcctttcaggagacatgcccacgtcccagcatagttccggatggacccaaagattctccctggctctcccaggaccattggttggggggcacctaggactgcgatgaagaccagggaggggccatgggagggatccacatctgggggccactcagagggcacaagcaagctctaagggcataagtcatgtgagacttttacccttatctcatgtggcttgtgtcctcctgggcctcacaaatgcgaaaaaaaaaatctttgaattggatgtaagattgaaattttgatttatactggagtagacctcataatacttggaagtaaacctaactcccaaaatgggacttgtccatatattgaaagtgactggaaaacattatggg

SEQ ID NO: 474328 - DNA, 612 bp, Homo sapiens
tctcatctattttccctccaggctcttcctttttccattggccttctccatgagtctccccaagaaattaatttccctttaccttgtcctataaaacaatttagaaaccacctcccacttgctcagggcttctacgtatctatacataaggtgctctgtcaataatgaccattttgtccgaagcttcacccttgagcagcactaagaactgttagaagctttgcaacttcagcttctttctcctttctctgctaccagtctctaaaatccctcagctgaagcaaaacattcagagataatggaaaaataatggataagccgctcctgtccttcatcctccctagcttcctggagaggttggtgaggggacacggtgtccccattatgcttagaatgggtctttaggagacctcaaaggggaaggggaacaatatatttgtttacccactagataaactaacttttccactcccacacttttgaaagcagacmatgctaagacaattttggttttaagtaacacgtttttgtcctctttatttcacatttgccatttgaactattccacatacatttaatcaagaagtctatgctaatcattaattatgatac

SEQ ID NO: 474329 - DNA, 571 bp, Homo sapiens
gggtataaagaaaagcatgaagttgctggrtgcggtgactcacgtctgtaatcccagcactttggaaggccgaggcgggtgtgggtcaggagtttgagaccagcctgaccaatatggtgaaacctcatctctgctaaatacaaaaaattagctgggcgtggtggtgcatgcttgtaatctcagctacttgggaggctgagacaggagaatcacttggacccaggaggtggaggtagcagtgagccaagattgaggcattgcactccagcctgggccacaagagcaaaactccatctaaaacaaacaaacagataaaaatgaaaaagtacaaatgccaaggctaccccaaaatgtagctgtgcagagagtcccatagacccaggtttaaatcccagccctgacactgtgtgacaatggggaacaatatcccccaaaagcagagggagggatttgttttttttcaagacagagtctagctctgtcgcccaggctggagcacagtggtgtgatctcggctcacacaacttccgactcccgggttcaagcaattctcatgcctcagcctcccggg

SEQ ID NO: 474330 - DNA, 233 bp, Homo sapiens
ctgggccataagacgtcccaggtctctgcacaccygtggaattcctcccttccccagtgggtttttgagcatagggtgcccttgggtgtgttgtgtgtctgcctgctggcttgcttaagttattaattataacacgggtcaaggtgttcccaggcctctatggagtggaatccttcaagctggggacctctggatcccatggttggatggctggggggtggagcgtgtctgaa

SEQ ID NO: 474331 - DNA, 510 bp, Homo sapiens
tgctgcaggaaaagatattcctatattttagatttattttaaggtatgttttttttttcctttagcatgggcatggagaaaaatacaagattttagtagataaaataatttttctgtataaataaaattaataatctgttggtaaaggaagaatggtaaacctgattgagttaaatcagtttttttcagtcaaattttaaagtggttttgctttctgttgcttcaggctctgagttcsttggatgaagacgatcccaatatacttcttgcaatacagttatcactgcaagagtctgggctggccctcgatgaagaaactagagacttcctcagtaatgaagcatccttaggtgcgataggcacttctttaccttccaggctggactctgtccccagaaatacagatagccctcgggctgcattgagcagctctgagcttttggaacttggtgacagcctcatgagactaggagcagagaatgacccattttcaactgacaccctgagctc

SEQ ID NO: 474332 - DNA, 611 bp, Homo sapiens
ttggtcttggactccctaccttccaaaactgtgagaaataagtttctattgtttaagccacccagtcaatagcactttgctacagcagcctgagtgaattaaggcagtccaaaagctttgtcatacgctgcaagctgcacaagtctagcaggcctagaacaatgggtgtctgtgggggagcccaggagtcgatggcagrgagcagataaaagcaagccatgccaactgctgtgggctgtaggagcctctgatgggcattaagcatgagatgatccaatttttatttagaaaggtttcttcgatggctgtgtgggggacagatttgagaagttgctacggagactagctgtggtagctcaggtaagaaattatgcaggcttcaaggcaggcagtgggggtggcgaggagacaatgactgtgggatttacttaagaggcagtgtcaacacaatttaggaggagtgggaggaattttgagatatcacatccaatccgttattttacggatgacgaaactttgggctagacagattaattttcttgtttaagaatcgaaatttaactactggcaagactaaaattatttgagtctcctgatttccagggctcttt

SEQ ID NO: 474333 - DNA, 522 bp, Homo sapiens
cctgctaatgcatattcatgaggactgctaaccagaaataaagacaaaagctgtcttttcttgtaacattaaagtgaaaacaaataagatacggagaaggcagcacgacagccagaacgatacttccatttcagggatgagrgaatttgatataacttatgacaagggcttggtaacacacaacccctgggaattctaatgaacacaacccctgcagacttcaacggagttccatcttgaacatccaagggcagtcatctggctcatggcgaatagatctaactcttggctacttagccaaagaagattgagaaatttgaataaaaattaagaacaagagcttttaaaatgtttctttttaataaagtacagtcccatacttcattaacttcagtttatgctgaagacaattatacatcttccttgagccaagaacctggggaaatataagaaataaaaactggaatttcttcatggttttatgttgggggtgtgtgcttggtttttttcttctgactctca

SEQ ID NO: 474334 - DNA, 522 bp, Homo sapiens
cctgctaatgcatattcatgaggactgctaaccagaaataaagacaaaagctgtcttttcttgtaacattaaagtgaaaacaaataagatacggagaaggcagcacgacagccagaacgatacttccatttcagggatgagggaatttgatataacttatgacaagggcttggtaacacacaacccctgggaattctaatgaacacaacccctgcagacttcaacggagttccatcttgaacatccaagggcagtcatytggctcatggcgaatagatctaactcttggctacttagccaaagaagattgagaaatttgaataaaaattaagaacaagagcttttaaaatgtttctttttaataaagtacagtcccatacttcattaacttcagtttatgctgaagacaattatacatcttccttgagccaagaacctggggaaatataagaaataaaaactggaatttcttcatggttttatgttgggggtgtgtgcttggtttttttcttctgactctca

SEQ ID NO: 474335 - DNA, 522 bp, Homo sapiens
cctgctaatgcatattcatgaggactgctaaccagaaataaagacaaaagctgtcttttcttgtaacattaaagtgaaaacaaataagatacggagaaggcagcacgacagccagaacgatacttccatttcagggatgagggaatttgatataacttatgacaagggcttggtaacacacaacccctgggaattctaatgaacacaacccctgcagacttcaacggagttccatcttgaacatccaagggcagtcatctggctcatggcgaatagatctaactcttggctacttagccaaagaagattgagaaatttgaataaaaattaagaacaagagcttttaaaatgtttctttttaatraagtacagtcccatacttcattaacttcagtttatgctgaagacaattatacatcttccttgagccaagaacctggggaaatataagaaataaaaactggaatttcttcatggttttatgttgggggtgtgtgcttggtttttttcttctgactctca

SEQ ID NO: 474336 - DNA, 612 bp, Homo sapiens
ctctaactctacttccctgacagtaacttctctggggtgggggcagaggtgagattagagttatacagtgaaatctttttttaagcaaaagtgaacaaaatatgttttataaaaagttggcgtgacttttcctaatatctgagtccctaactgttaagtacacatacacatatatcttagaaaatcattaaggaagcttctaaaattgttaacatgggttgcatctacacacaacattcagaaactaaatacgtggagascatctaacaatgagctgggtcctgtgctaggcactgggcatgccagagtcccagccctgtctgagctcatcatccagttgaagaatcaggcagcaaatggccagctgacagtaactgggtgtgatgatgacactatttatttaatgctgcaacctgcccctcacaagcctcccaagcccagttcctccacctcctctacaattcttttctgaattaattatcaccttctggcatactacatatctactcatcatacatatgacttattgcctatttcctgcactagaatttaagctccaggacggtgaacactttcatctgttttgtccactggaacagtgcctggcccttc

SEQ ID NO: 474337 - DNA, 641 bp, Homo sapiens
attaccaggcatcagtttcccatctataaaatgtattggttggactgggttatctctaatatctctcccaactctaaaatgctttgcagtgatctaaaatgctatgcaagatccaaatggcatgaattctcatgactgaactctgccaagtttggaaaaccattttagactattttataaactgttacaragacagcagagatcttggaagtcatcaaattcaatctctttatagatgaggaaattaaagcccagagaaaagggatttgcctgtgccttatggccattagtatcaaaatcagaatcaaaaggctctttccataactcctcacaatttataagcattttgcagaaaagcatgggcacagaaatgcaataatctgggttttcaagaagaaaaaatgggctctaattaagcagagagacaaaacaatacacctacaggtgagactttagggatatgcaggacccaagaagttaccttcagtatctttgaagggctgaaatgggctgggatagatgaaccaaagggcaatctagtgagtcacagtgagaaatatccaactgaaaaaggaagtgctctacatagtctgccttgtttgatggaaattcccaaacatatttctctattcagagagatt

SEQ ID NO: 474338 - DNA, 641 bp, Homo sapiens
attaccaggcatcagtttcccatctataaaatgtattggttggactgggttatctctaatatctctcccaactctaaaatgctttgcagtgatctaaaatgctatgcaagatccaaatggcatgaattctcatgactgaactctgccaagtttggaaaaccattttagactattttataaactgttacaaagacagcagagatcttggaagtcatcaaattcaatctctttatagatgaggaaattaaagcccagagaaaagggatttgcctgtgccttatggccattagtatcaaaatcagaatcaaaaggctctttccataactcctcacaatttataagcattttgcagaaaagcatgggcacagaaatgcaataatctgggttttcaagaagaaaaaatgggctctaattaagcagagagacaaaacaatacacctacaggtgagactttagggatatgcaggacccaagaagttaccttcagtatctttgaagggctgaaatgggctgggatagatgaaccaaagggcaatctagtgagtcacagtgagaaatatccaactraaaaaggaagtgctctacatagtctgccttgtttgatggaaattcccaaacatatttctctattcagagagatt

SEQ ID NO: 474339 - DNA, 421 bp, Homo sapiens
gaaaagttctgtagatagatggtggtgatgctggcacaaggtgaatacacttaatgctacagaactatacacttaagtgttccagctctttcagaatttgtctagcaggttttctggttttcattagaaaaccccccacacaaagaaaaattaaaaataaataaaaatgagagctatacttaaaaatggttaaaacgataaattatgtatattatgttatgcatattttaccacaataaagatcaaacagctaccagcaagaagtggacttttaaaaattacggtttccaaatgtaacataaaacatatacttaaagatttacatctccacacttycagtaacaggcaaatatgctagaaaagaggctcttaaaaggaaaaaatagtcttctgctaggacacgatggatgatattcattca

SEQ ID NO: 474340 - DNA, 603 bp, Homo sapiens
gtaaaataatatgtccaagtttctgttggcactagatgcttattctggtccttttatgtagcacatttctttacttgtgaaaaaacggtttagatattttaatttccagtgttagaatactgaaacaatatcaaagtcagaaaggataacctgaaaacatggatgcaattgaagttttagagacttgcttactaactcaggagtatgttttatccacaaaagtttgtgttgttaaatatgtcacacagagttaagtaaaaaatcatcaaaccagtagagacagcagtttcaatttttgagaggcaatgcttcctagtggtcaagaatacacactggaaccagtctgaccttggttcaaagcccagctcctcacttactaactgaccttatgcaagttacttaaggtctgtatgcctcaatttcctcatctgtaaaaatggggatcacggctcctatctcatagggttattaygaagtttaagtgagtcagtggaaagtgcttagaatggtggctgacacagagaaagcattaggaaaaaattagctgttgttattttaactggcgtaaaacagctgagtgttaaaagcacaaatgaatagcta

SEQ ID NO: 474341 - DNA, 597 bp, Homo sapiens
gggataataattttgtgagatttccaactggtttaatggaattgaggggtaaaacggaaagatggcctggaatgaagggcattcccctagctatacttcactcaggataatcgttaaatccttataaaagtggattggaatacccagcactaccccaccacacgtttatttgcagttgtcaagtaacatgatattggaataaaaagtctcattccacagtgtaggttctctaattctcacctaattcttttgataattcatgaaagctttataacagttacctatctaaactrgagaacaaaactgagtaataacgtttgacctttaacaaccttcatattatgtctccatgtgttattatatattatgttggatatttagcctgcataaatcttaaacctcagacaaaacactaaatgttggctctttgatggccttttatacaacagaataaaagtgcagttgaggccatgctctgtattctccaaatgccgtttgatcacacaggaagatggcatttcccaggtcaccagatagttcagttggggacatgtaactagttctgggtacttggctacaaacaaagtgacatatatt

SEQ ID NO: 474342 - DNA, 597 bp, Homo sapiens
gggataataattttgtgagatttccaactggtttaatggaattgaggggtaaaacggaaagatggcctggaatgaagggcattcccctagctatacttcactcaggataatcgttaaatccttataaaagtggattggaatacccagcactaccccaccacacgtttatttgcagttgtcaagtaacatgatattggaataaaaagtctcattccacagtgtaggttctctaattctcacctaattcttttgataattcatgaaagctttataacagttacctatctaaactagagaacaaaactgagtaataacgtttgacctttaacaaccttcatattatgtctccatgtgttattatatattatgttggatatttagcctgcataaatcttaaacctcagacaaaacactaaatgttggctctttgatggccttttatacaacagaataaaagtgcagttgaggccatgctctgtattctccaaatgccgtttgatcacacaggaagatggcatttcccaggtcaccagatagttcagttggggwcatgtaactagttctgggtacttggctacaaacaaagtgacatatatt

SEQ ID NO: 474343 - DNA, 515 bp, Homo sapiens
gcttgggagcctgaggtgggaggacctcttggacctggaagatcaaggctgcattgagccgtgatcgtgccactgtactacagcctggttaacagagtgagaccaatcctgtctctaaataaataaataaataaaattattgactcacagtttttccttgagtaactaaataccttattccattttcttttggcataggtgttgctgtcamagtcagattataatctaatttcctttcctttataaatcatatgctctttttgcctaaatgttcataagattttttttcttcaaatatagttaattttactagaagattgttggtcattctgagttggtatctctagataccatgatatgctctttcaatatatagtttccagtcttttttttttttcttgcattacagtttttaattttttttttcctgttcctttgctttggttttctttatcagaagctcctgttatccatatgctttgtcttctttacttctctttagtcattgtcagttt

SEQ ID NO: 474344 - DNA, 367 bp, Homo sapiens
cctaatatagttttttttggcgggtgggaaggcatttgacaaagactggaaaacctgctagacaatttttaaaagagctttaatgctttctaatatagtttttgccctgaaatraaaatggaagtgatgttttggttcctctcaggcattcagcagggagggcttcgtcttaattccattttgtacagattgcatctgggccatttgccagaggatattataaccctggcagatcggaacccaacactcggttcttggttttcccgaactcggtgccactctgcacgtcatggttcatttgggaatgccctgatgccctacatgcaggcctttgtgggcgtctgtaggacgctgtactggtctgcag

SEQ ID NO: 474345 - DNA, 508 bp, Homo sapiens
aacattgttccttatctgcagggtagtaatcaaacacaaatgcaaaaaatggctaatttggacaatgggattgcataattgttccttccagagtctgggagttggaaagatattgcaaaatgatagtcttaattgtctccagctatagaatagtccaaatttttaagtttaaaggacgcttctcccttctctcaaatcagtttattcttctgtagaaatcaacaaaaataccctatctaatccatttttgcttccattataaattttcctaatatagttttttttggcgggtgggaaggcatttgacaaagactggaaaacctgctagacaatttttaaaagagctttaatgctttctaatatagtttttgccctgaaataaaaatggaagtgatgttttggttcctctcaggcattcagcaggsagggcttcgtcttaattccattttgtacagattgcatctgggccatttgccagaggatattataaccctggcagatcggaacc

SEQ ID NO: 474346 - DNA, 412 bp, Homo sapiens
ttaaagatgcaacaggtggccgggcatggtggctcacacttgtaatcccagcactttgggaggccgaggtgggtggatcatttgaggtcaggagtttgagaccagcctggccaacatggtgaaactctgtctctactaaaaatacaaaaataaataaataaataaataaataaatgcgcagggcgaaaagcaacargttctctcatcagctcagtgtcttagtttctgccacccaaactggacctcaacaaaatcacataccttgacaaaagatggacatttgggtcttcagtcggtgttgaaactacacatagtaagtctgagaagtcctcatttgccacactctgaggcccttcctgagatgtggttgttctttggctgcatctcttttcaagagttgggcaatgatagt

SEQ ID NO: 474347 - DNA, 681 bp, Homo sapiens
gggttttcctttatgggggcctgggagttggggaagccagggaccacgcaggcagagcagatacacagtgatgaagaaagggcttctgggtccctgtagctccccgagtccatgcctaaggtccagctttatttctgatcttaaattccacaaaatatcccaggactcctattgccaggcccctggcctcctcaaacaacaccaaggtctctcccctaaagaccccttcccaggggtctttgaggccaggtgattgaggatgtctgccagaggcatggattccttcagccactaccctctggggaagaatcacggagtctggagtacatttctaacatttgtttgccctctggccttccaggtctgggaccagcagcgctggctacccccagcccaagcagacccagtgagctggggagcccctgttttcttccactctggaggaatggcttcatgctgcagtctccagcccagaaactggttcctagtgccrcccagattggcagcgaaaatctggggccgaaagtgaactccccagagctctgttcccatttgagaaagggaattgaatcctggctggagcaggcccacagtggaccatttcccctttggatgattcaaatcagcaagctgtagcccgtgagcccccctagcagcaggggaacgggggagggcaggcag

SEQ ID NO: 474348 - DNA, 544 bp, Homo sapiens
ccacaagcatttcctgacggcattcttgagccggagcccagtgtcacggtctgcctgttcatttatgggaactctgggctgtcatttggataattgatttcagggccctgggtcttcccmagcagctgagttctgcagacatcaaaggcagaacgtggaaggttccttccctgcgcagctgagttgaattctatttatcttttcaattctggtgaaaggagttttcctatgagtgccttactttttctttgtggtctagtcctgctgcctctgcttgggaatggcactgcacctctctgagcctctgttttatttgtggaaaatgcaagggaatgagctcccctcaaaaaagaactggtagaaagataatacggtctttccctgccttgtcagccttctgagaaaaaattacttggtgtagggtagcacagaggcctcaagctggtagcctgcaggcccagttcaactgcagatgtgttttgtttgccttgtggtgggttgatgacagttttgttttgttttaattagtttaccgtcctttaaa

SEQ ID NO: 474349 - DNA, 544 bp, Homo sapiens
ccacaagcatttcctgacggcattcttgagccggagcccagtgtcacggtctgcctgttcatttatgggaactctgggctgtcatttggataattgatttcagggccctgggtcttcccaagcagctgagttctgcagacatcaaaggcagaacgtggaaggttccttccctgcgcagctgagttgaattctatttatcttttcaattctggtgaaaggagttttcctatgagtgccttactttttctttgtggtctagtcctgctgcctctgcttgggaatggcactgcacctctctgagcctctgttttatttgtggaaaatgcaagggaatgagctcccctcaaaaaagaactggtagaaagrtaatacggtctttccctgccttgtcagccttctgagaaaaaattacttggtgtagggtagcacagaggcctcaagctggtagcctgcaggcccagttcaactgcagatgtgttttgtttgccttgtggtgggttgatgacagttttgttttgttttaattagtttaccgtcctttaaa

SEQ ID NO: 474350 - DNA, 602 bp, Homo sapiens
gctcatggctgccctggtctgctctccagggatcaggtgtggaacaaggagctggggattctcctccaacccacatgtcctctgccattacagaccggtgaggcactgggctttgggactcctgggcttgcttgtccagcacaagatctggattgaggatgtgactctgtgtgggcctccttatgagcaataagaaataagaaatggccacctgcttcgtggagtggatgtagtggggttrcagaatgaacactggccttggtgttgctccaggatccattctgtccctgccttgttacgagattccagataagtcacatcgcctttctgattctctgaaaagtggagtgtggaataaataacttcccaagttcctttctaatataacactccatggttcctttaataatattgacatgttatgttagtataccattatagagcaataataataatcacttacataatgtcttgtattgttcttagttgtttgcatatattaattcaatgaatccttgcaacaaccctacttttgttgtggaggaccctgaggcaagagagatggagaagcttgtctgaaccacagagctaatctgaagtgg

SEQ ID NO: 474351 - DNA, 564 bp, Homo sapiens
cagcccccagaaggcctgtgggaactggatgttctcccagtcatattgacattgacggtaaacagagacattccaaacctgcaggaattggaayaatgcagccagggcctgaaggctactgaggtgaccctggggaaggccaatgggctggggctccctccaggccagctgaggaggaccctgcatgtgcttagcaaatactctaagtgcctactgtgtgcaacacgggggtgaggcattcctgggaccccacccagatatcgagggggctgggtcagcccactcttgatggagtggagtttcgatgtcactctcctctcggctccttgagggccagggaggggcagggtggggcaatctgagatgccagctccctgaatgctgggctgggatggtatcaccaccccacccctgtcaacagcctgacgtctggcagatggaagccagctgtccccaggctgggtgcagagagttgcaaggtcctctgacactgccttcatgtcatgagcacgcattcctcctggactggaatctgcactagaaggtacgaggcaaacatctcga

SEQ ID NO: 474352 - DNA, 564 bp, Homo sapiens
cagcccccagaaggcctgtgggaactggatgttctcccagtcatattgacattgacggtaaacagagacattccaaacctgcaggaattggaacaatgcagccagggcctgaaggctactgaggtgaccctggggaaggccaatgggctgsggctccctccaggccagctgaggaggaccctgcatgtgcttagcaaatactctaagtgcctactgtgtgcaacacgggggtgaggcattcctgggaccccacccagatatcgagggggctgggtcagcccactcttgatggagtggagtttcgatgtcactctcctctcggctccttgagggccagggaggggcagggtggggcaatctgagatgccagctccctgaatgctgggctgggatggtatcaccaccccacccctgtcaacagcctgacgtctggcagatggaagccagctgtccccaggctgggtgcagagagttgcaaggtcctctgacactgccttcatgtcatgagcacgcattcctcctggactggaatctgcactagaaggtacgaggcaaacatctcga

SEQ ID NO: 474353 - DNA, 564 bp, Homo sapiens
cagcccccagaaggcctgtgggaactggatgttctcccagtcatattgacattgacggtaaacagagacattccaaacctgcaggaattggaacaatgcagccagggcctgaaggctactgaggtgaccctggggaaggccaatgggctggggctccctccaggccagctgaggaggaccctgcatgtgcttagcaaatactctaagtgcctactgtgtgcaacacgggggtgaggcattcctgggaccccacccagatatcgagggggctgggtcagcccactcttgatggagtggagtttcgatstcactctcctctcggctccttgagggccagggaggggcagggtggggcaatctgagatgccagctccctgaatgctgggctgggatggtatcaccaccccacccctgtcaacagcctgacgtctggcagatggaagccagctgtccccaggctgggtgcagagagttgcaaggtcctctgacactgccttcatgtcatgagcacgcattcctcctggactggaatctgcactagaaggtacgaggcaaacatctcga

SEQ ID NO: 474354 - DNA, 564 bp, Homo sapiens
cagcccccagaaggcctgtgggaactggatgttctcccagtcatattgacattgacggtaaacagagacattccaaacctgcaggaattggaacaatgcagccagggcctgaaggctactgaggtgaccctggggaaggccaatgggctggggctccctccaggccagctgaggaggaccctgcatgtgcttagcaaatactctaagtgcctactgtgtgcaacacgggggtgaggcattcctgggaccccacccagatatcgagggggctgggtcagcccactcttgatggagtggagtttcgatgtcactctcctctcggctccttgagggccrgggaggggcagggtggggcaatctgagatgccagctccctgaatgctgggctgggatggtatcaccaccccacccctgtcaacagcctgacgtctggcagatggaagccagctgtccccaggctgggtgcagagagttgcaaggtcctctgacactgccttcatgtcatgagcacgcattcctcctggactggaatctgcactagaaggtacgaggcaaacatctcga

SEQ ID NO: 474355 - DNA, 559 bp, Homo sapiens
gacaaatctggcccgccatctgtttttgtaaataaagttttattgagatgaagccacatggatttttacatatctgcgactgctctcgtgcacagttgagtagttgcaacagagaccatatgacccacaaagcctaaattatttatcatgtaaccctttacggtaagtgcttacccatccttcttctaaaggacarcaggggccaggtgtggtggcttatgcctgtaatctcaaccctttgggaaactgaggcagggggatcacttgagcctaggagttcaagaccagcctgcgcaacacagcaagaccatgtctacaaaaatatttaaaaagttagtcgggcttggtggcccatgcctgtagccctagctactcaggaggctgaggtgggaagagtgcttgagcctgggaggtcaaggctgcagtgagccatgactgcaccactgcactccaacctgggtgacagagtgagactctgtctggaaacaaaaaaaaaagaataaaggacaaatctgtttggattggggggagcctctgggtatgtggtgggacatggagg

SEQ ID NO: 474356 - DNA, 559 bp, Homo sapiens
gacaaatctggcccgccatctgtttttgtaaataaagttttattgagatgaagccacatggatttttacatatctgcgactgctctcgtgcacagttgagtagttgcaacagagaccatatgacccacaaagcctaaattatttatcatgtaaccctttacggtaagtgcttacccatccttcttctaaaggacagcaggggccaggtgtggtggcttatgcctgtaatctcaaccctttgggaaactgaggcagggggatcacttgagcctaggagttcaagaccagcctgcgcaacacagcaagrccatgtctacaaaaatatttaaaaagttagtcgggcttggtggcccatgcctgtagccctagctactcaggaggctgaggtgggaagagtgcttgagcctgggaggtcaaggctgcagtgagccatgactgcaccactgcactccaacctgggtgacagagtgagactctgtctggaaacaaaaaaaaaagaataaaggacaaatctgtttggattggggggagcctctgggtatgtggtgggacatggagg

SEQ ID NO: 474357 - DNA, 681 bp, Homo sapiens
ctgggatagtgacagcttcatgcattttctttttatttttttgttgggggggacagggtcttactctgttgcccaggctggagtgcagtagcgtgatctcggctcgctgcaatctctgactcccagttcaagtgattctcctgcctcagccttccgagtagctgggattacaggcgtgtgccaccacacccggctaatttttatatttttagtagagacgggatttcaccatgttggccaggctggtctcaaattcctggcctcaagtgatccgcccgcctcgggctcccaaagtgctgggattacagccatgagccatcacattcagcacttcatacattttctaatcccagacgatctcaacacccttccgagtattccatctattcccgtttacaaccctgaccaacacataatgacaccactccatttgtctctttcatcctcctgctgctgctgcttcttttgagacagggtcttgttgtgttgcccaggctggagtgcagtggtgcgatcatggctcactgcagtcccggactcctgggctcaagcgatcctcccacctccgcctcccaagtagctgggaccacaggcatgcaccaccacaygtaggtacttttttttttgacattttttatagagatgtgggtttcaccacattgcccagtgtggtcttgaact

SEQ ID NO: 474358 - DNA, 607 bp, Homo sapiens
cctgcaggtgttcgcctcccccacaygcagaactgtgccgccatgaaggctaattataagtgccgggtatttatagtgagtttctccacccagtgcttccagcacctcgagggaactatttacagaatcctcccagcacctcggagagaaaggcagagccgagcaggggaaactgaggtgaagcgacggggcgacatctcccttgttaaggaccctcagccaaggaaggcttgcagggcgtcctcacagcaagcactgggatttgattagacagctgtcagagagagtaagaggaaacccatgaacgcacacttcccagatgtctggcagccacagactgggccatttccaagcaccagctcatttcatctctgtgcctcgattttccaatctgcaaaatggggctgtgaggctatgcctcatagacttgtgagatttaaatgagtttaaacaggtcaaggagagagcctggaaggagtaagcttcaaaaaatgctattaactatttattattttttttatcgcctttacatctaatctaataaagtaggcaaacattatccattgggcttgttgaaaaatgaaaataataattacatttttaatca

SEQ ID NO: 474359 - DNA, 607 bp, Homo sapiens
cctgcaggtgttcgcctcccccacatgcagaactgtgccgccatgaaggctaattataagtgccgggtatttatagtgagtttctccacccagtgcttccagcacctcgagggaactatttacagaatcctcccagcacctcggagagaaaggcagagccgagcaggggaaactgaggtgaagcgacggggcgacatctcccttgttaaggaccctcagccaaggaaggcttgcagggcgtcctcacagcaagcactgggatttgattagacagctgtcagagaragtaagaggaaacccatgaacgcacacttcccagatgtctggcagccacagactgggccatttccaagcaccagctcatttcatctctgtgcctcgattttccaatctgcaaaatggggctgtgaggctatgcctcatagacttgtgagatttaaatgagtttaaacaggtcaaggagagagcctggaaggagtaagcttcaaaaaatgctattaactatttattattttttttatcgcctttacatctaatctaataaagtaggcaaacattatccattgggcttgttgaaaaatgaaaataataattacatttttaatca

SEQ ID NO: 474360 - DNA, 567 bp, Homo sapiens
ctgtaatcccagctaccgggaaggctgaggcaagagaattgcttgaacctgggaggcaggggttgcagtgggccaagatcgagccactgcactccaccctgggcaacagagcaagactctgatttaaaaaaaaaatgttttaaattaatgaagcccccgtgaaactcagatcccagaaatgtgtcctgtcatcgtccttgccttctgagtcactcacttttgctttaccattctgggaaagggctacattttccaaagtatatttgtatatttttaaaatttttttattttttakttttgtctctttactttttttctaaagcacatctgtagggctctagtcctagggatctgtgtagtgcagtggtccatagagcttggaaaacactgggtgaaactcagctaagctgacttctgtaattaacaagtttactcatgtaaatattcagttaatttattcatttattgtagggtccagtcctacggggcttattgggtgttctccccgtgtgtggagacgagagatgataagaaataaagacaccagacaaagaagtaaagagaaaa

SEQ ID NO: 474361 - DNA, 613 bp, Homo sapiens
tgttcaggttcaaatcccggtcccgtcatttattagctctgtgacttcaggcaggttgyttaacctctttgagcctctgtttcttcacaccaaggataacacaaccaacagaaaggcagggagtcttattccaaatacgcaggtatccaccttttgattgggttccccagtgattccaggcatcttttggctaaggtttctggaaccttctgtttggagcagaaattggagcatcatactggctactgccatttgctgtgcggataagtttgcagaggccctcagccatcatgctcgctctctctcattacactgcattttctcctttgtaacatctactatgatccagaattacctagtaaatttatttactcatttattatccatatctctcccctggatttaagctccatgaaatcacagaccccatctagctcatgactatcgattcccatagcatagcatcaggcacacagcaggtgctcaatacacctgtggctaaacgaacaaatgaatggatgaacgaatgaattgcccttatctagatgcttctcacctcagccttcccaaagtttctccgtatccctgctttgcaaaaaaggaaactgaaccc

SEQ ID NO: 474362 - DNA, 613 bp, Homo sapiens
tgttcaggttcaaatcccggtcccgtcatttattagctctgtgacttcaggcaggttgtttaacctctttgagcctctgtttcttcacaccaaggataacacaaccaacagaaaggcagggagtcttattccaaatacgcaggtatccaccttttgattgggttccccagtgattccaggcatcttttggctaaggtttctggaaccttctgtttggagcagaaattggagcatcatactggctactgccatttgctgtgcggataagtttgcagaggccctcagccatcatgctcgctctctctcattacactgcattttctcctttgtaacatctactatgatccagaattacctagtaaatttatttactcatttattatccatatctctcccctggatttaagctccatgaaatcacagaccccatctagctcatgactatcgattcccatagcatagcatcaggcacacagcaggtgctcaatacacctgtggctaaacgaacaaatgaayggatgaacgaatgaattgcccttatctagatgcttctcacctcagccttcccaaagtttctccgtatccctgctttgcaaaaaaggaaactgaaccc

SEQ ID NO: 474363 - DNA, 694 bp, Homo sapiens
gctcgcctaaaacctcttcaaaggtttctcgttgcccttagcataaaatccaggctctgcacgatgtttacaagtccctggcgatgctctgatctcatgttgggttacgcttcccttggttcagaaatcccagccaccctggctttctttaatattaaatttcattttaaataattaaaatataaagagtaaattatttaatgtactaaattaaattttcatttaaaatttaatgtctaatacctaaattaaataatttcctttaaaatgtaatgtctaatacctaaataatttcatttaaaatttaatatcgaatacatcaagcttgcttccacatcaggactagtgcggtgccaccccctccacttggaatgcagagcactgccttctgtccatcaaccacgtgcctcaggttttctctccttcccatccttcaggtctcagcttcaatgccacctcctcaggccttcccttaccacaagggaggagatactgtcaatgtcccactcagatccttgtcaccaggccagtggacccacccccaactgctgtaggtatcagctacttagggctcatacctgaaaccttctctaaaggattaactacctggcttctctgactttcctttcactgagagcagcccctcaawaaatcactggcacaacagttgccatctcagactgcctctagggaa

SEQ ID NO: 474364 - DNA, 587 bp, Homo sapiens
ctgcttctccaggacggttgcgatttggcccagttcaaacaggttaaatcccatctggtcgtgtgcgtgatgcatgactaggggccagcttcccctgccctcctggctcctttgtagagatctctgacataatcatctccatttctgatttgttttcatagcagccacgctcatatgtgccaggaattgtgcgagacacaataaagtgtagagctctccccacccccattcccacctccaaccctctccaggtttctcgggtctccacctgcagagccagtcataggaaatcttttctaaggcaactcgaggagtagaaaaggaggcgacacattcagcataatgaagcccrggtgttgggaggtgcccacatctggcctcctgaaaggtctcactgttgttcagatgctttcccaggaaatgggatggaggcttcttttcttcacggtccgaggggtcccaactcccctccacatctatccgggtagccagatgccatgaaagcagtgaaaactggcctaaggctgagaacatatggtcacaggtaggtctggggagcagagcgggcagaggaaagactgctggat

SEQ ID NO: 474365 - DNA, 587 bp, Homo sapiens
ctgcttctccaggacggttgcgatttggcccagttcaaacaggttaaatcccatctggtcgtgtgcgtgatgcatgactaggggccagcttcccctgccctcctggctcctttgtagagatctctgacataatcatctccatttctgatttgttttcatagcagccacgctcatatgtgccaggaattgtgcgagacacaataaagtgtagagctctccccacccccattcccacctccaaccctctccaggtttctcgggtctccacctgcagagccagtcataggaaatcttttctaaggcaactcgaggagtagaaaaggaggcgacacattcagcataatgaagcccgggtgttgggaggtgcccacatctggcctcctgaaaggtctcactgttgttcagatgctttcccaggaaatgggatggaggcttcttttcttcacggtccgaggggtcccaactcccctccacatctatccgggtagccagatgccatgaaagcagtgaaaactggccyaaggctgagaacatatggtcacaggtaggtctggggagcagagcgggcagaggaaagactgctggat

SEQ ID NO: 474366 - DNA, 527 bp, Homo sapiens
tgtgcaaaaaagactgtgcatctgtagatggatggagagccttaacagcttcaccttgggctctgcactgcacgtggagaaacctcakgcccattgggaagtggcagccacgttccatctgtgagcccagagggaccttagttggcattttgtagcatatctgccccgagctgaccaccatctgcttggcattatttaaaacctcttaaatgcatttcggcgggggacaggtctccataacactgggacagggaggcagaagccttctggagaaaccagacggaaaccttgcctggttgcagaggaggaagaagcatcaaacgcgagccctatgcagacactgagtggtctcgcttctgtggctgcctgagaagttgcagctctttgattaaagatcagtagttatttgagggttttgtatttattatgtacattttgttgttagacagctatcactggtcctgtttctagagggagaaaggaagtatttatactcttggtgttggctgcaaggttgtcccagccaa

SEQ ID NO: 474367 - DNA, 599 bp, Homo sapiens
ctgtggcttcgctctgggtgctgggctcgatctcttgccataggtctagtccccagcgagctctcagtcctggccctgcagcctgggctggaccctgcttccatggtcagcttcactttccgccattcactcttggacattgcctcttttttcctgaaggatagagacgtgcctttcattttgggatgtgacttgccttttcaagtacctctacagtttagtcttcatccaattgtatctggggagaagagggaggattggaggtgtgttgtcttcacagtgccaaccagragtcccacttaacttgaaaaatagcatttaatttttctgttaccaaagtctgttcagtagaagaaagaaatctggaaatcttgaaagaagataaacaaaataaaaatctatcaccattcagaaatagcagccactgttaatgttttaatttgtatcccagtcttatttctggggatttcattatacacacacacacacacacgtgactggagtcatacttatcaatatatcataagcagtgtcttaattccatgatttcagaataaacaagggtccagcttctattcctcactgcctcccccaaaccc

SEQ ID NO: 474368 - DNA, 614 bp, Homo sapiens
agcattgccctttctgggtttaactggccttctaactcatctacacaattcaaagctccttcctgtatccttcgccgtgactgggaattgttggctgggacaaccttgcagccaacaccaagagtataaatacttcctttctccctctagaaacaggaccagtgatagctgtctaacaacaaaatgtacataataaatacaaaaccctcaaataactactgatctttaatcaaagagctgcaacttctcaggcagccacagaagcragaccactcagtgtctgcatagggctcgcgtttgatgcttcttcctcctctgcaaccaggcaaggtttccgtctggtttctccagaagacttctgcctccctgtcccagtgttatggagacctgtcccccgccgaaatgcatttaagaggttttaaataatgccaagcagatggtggtcagctcggggcagatatgctacaaaatgccaactaaggtccctctgggctcacagatggaacgtggctgccacttcccaatgggcctgaggtttctccacgtgcagtgcagagcccaaggtgaagctgttaaggctctccatccatctacagatgcacagtcttttttgc

SEQ ID NO: 474369 - DNA, 641 bp, Homo sapiens
cattctcccacctttgggagtcccacatcattaatcccaaaagaaaaacgagctgagaaatcattcatgccaaggataccttcaccttccacagccacagatgcaggagccaagcagtgatgaatggtagtagaactagctccatttctgatgagcaggccctcccacctcagcctgccgccaagaacttgggccatgaaaacattcatatctcttggctgggtgcagtggctcacacctgtaatctcagcactttgggaggccaaggcgggtggatcacttgaggtcaagagttcgagaccarcctggccaacatggcaaaaccccatctctattaaaaatacaaaaattagctgggcatgatggtgcgtgcctataatcccagctactcgggaggctgaggcaggagaatcacttgaacctggaaggtgggggttgcagtgagctgagattgtgccactgcactctagcctgggcaagagggaaacactctgccttcaaaaagaaaaaaaaaaaaaatcatatactttgccctgagatcccacttggggaaatacacattaaggaaagaaacggacagagaaatacacacagatactgagatagtcactgcagcctttatctataagctcacactggaa

SEQ ID NO: 474370 - DNA, 329 bp, Homo sapiens
cagtggtctgtacgcatcttcagtcagtgggaagcggtggtaatatacccataactgtaaaatgagagagaccgacttccttgatcttcagtggggatttttgaaaatggttgattgcactcaaagcagaatttgtattttgcttcattgggtcaccttgggcaacaatttcatttctgtagaaaattaattttggaggaagctgcatgtgccaggggagccctgggtccatccttttgatggtgaggggaagtccagttcctcactcgcccatccctgctttyggttccctgttggtgattttcttttgtattcatgcacgtgccaat

SEQ ID NO: 474371 - DNA, 590 bp, Homo sapiens
tgggtggttcttctgctccatgtgatattccctggactacatggcttcactgggctggaatattctagatggtgcatacacattgctagcatttggcactagctgggagctaagttggagctgccaaccagagcatcttgggatgtttccatatagcctttctatggtgcttgggcttctcacagcatggcggctgagttccaagaacatgtcccaagcagacaagccccagtgatgtacaagtagctcttccagtcactgcttgcatcattcttgctattgtcccagtggccaaaacaagtgttgaggtaaaacccaccgtccatatgggaggggattacacacaggtgtgagttcattgggggccacagcgcaacagtctaccttaatcaggtgggtgtcaatttgggagaatcctcattaggcaactgattttggaaagggggggtgcaccagagttctctctgatactcttagagttcttgktcatgccattgagagcaaagaaagtagcaggggagcagcagccagtagagatgaaatccatcaagaactggagagagaacttcctatcagcatgttggggacac

SEQ ID NO: 474372 - DNA, 466 bp, Homo sapiens
tgctgagggcctggcagggtcagaagtgagactgcargggagactgagactcagaagaccatgatctagctcagttcaggaagcagtcaatgctacctcctgctggcccagtgctgtggggacttcaggcacaggcacaaatttgggtccacttccattacactccatccaaggcttaaggcagaatcacagtgtctttggtacatgacagagtccagtgaattcataccagcgggacaggctatagggaggtaaggaaatggggtgatcagccccctgatagaagacaagccagtgcatggaggtgaatttgagatgagccttggaggatagttaggattatgctaggcagacgtggagtggactgcatgcactggggggagaagcgggacaacacaggcaaatgcaaggaagtggtttgtttatggaccaatttatggtttgttcagagtacaccttgggagtc

SEQ ID NO: 474373 - DNA, 518 bp, Homo sapiens
tctaaatagtcccttttgctgtgatttaacagaagaaagggagaagtagatgtacgctgtaccctaaatcaggcatttttaytgtggctccccaggatccagacaccaatgtttctgtccacaaggaatgtcctgacagggactgaaccacgctggcgggcagcaattagctgttatctagcaagaggcgtcaggctgcacggcgaggcggccccgaagtgcactccgcaaaccatgactactcagcaagctgcctgcgagcgttcgtccctgtgcttcccccctttccgatgtttattcgggttgctgtccacagccagcctcccaacagacatttccaagcaaagctcttgcctgagtccatgcctcccgctactgccctgagaatcctgagctgcacacaatgcttccctctccggagcaggcttcatttgtctatttgtctttgaccaacaccggccattgattctagaggccgttctgtaagccaactgcttttcctaacccttgctgccttt

SEQ ID NO: 474374 - DNA, 572 bp, Homo sapiens
tccctgtactgagagtctgaatcacgcaagcaatttgaagagtctctttgccctggaagctggcacatatgaccactcacacaggcacacacatgcacacacacatatgcattcatgcacacgtgtacacactctcgcatgcatccacatgcacacactagtacacacagactcacacacatgcacacacatacccgacaggtacccacacagactcagacacacgcacagtcatgcatgcacacttatgtgcacatacaggcacacagactcacacacatgcacaactattatagggcatatgccctcccacacagccgcttccctgagcctggccaggaagccccttgagaagggcaactgttttctggtgggrtggggaggacggattcgaggagagatccaaaagcccccttcaaacctggtgtctctaaaaagggcagggttgccccagcaaatgacaggctaaagcctgaacaacaagctcttccttacctgagatttcctcctcacctctctcctgggagtagagcccatttcaaaggaaaagaaactgaggcttaccaataaca

SEQ ID NO: 474375 - DNA, 562 bp, Homo sapiens
cctgtaacctcagaacgcctctatttattacatctcaattatttccatggaaacacgcgcagtgttcccaagtccctagaccaccaaatttataagatggacttagaggagctacacgctggcagaagaggaagacaaagaaggggaagggagtgccgagaggtcactgggggtactttgggacgttggggtgggcgggtgtatggacatagcctgagcgctaattaatattaagaactgtaattaacaggcagttgctagagagagaaaattgacagtattaaaattattcaaaagttttaagctaaggcaagggaaaagatgtatcaattttctctataaatgaagaggctgttgcatggatctgagaaagccatggggtgaaaggggacaggcctccytaatgttgagtgacagagagaactgcagtggtaatcgttaaccaaaccacctgatatcatcggccgaaataacatcagtgagcatgatgagaacagcccgggaaaatgaggccaaaattatcaaagagaacaaatcactgcaaccaccacaccataccaca

SEQ ID NO: 474376 - DNA, 616 bp, Homo sapiens
tgaatcgagaaacctgtaacctcagaacgcctctatttattacatctcaattatttccatggaaacacgcgcagtgttcccaagtccctagaccaccaaatttataagatggacttagaggagctacacgctggcagaagaggaagacaaagaaggggaagggagtgccgagaggtcactgggggtactttgggacgttggggtgggcgggtgtatggacatagcctgagcgctaattaatattaagaactgtaattaacaggcagttgctagagagagaaaattgacagtattaaaattattcaaaagttttaagctaaggcaagggaaaagatgtatcaattttctctataaatgaagaggctgttgcatggatctgagaaagccatggggtgaaaggggacaggcctccttaatgttgagtgacagagagaactgcagtggtaatcgttaaccaaaccacctgatatcatcggccgaaataacatcagtgagcatgatgagaacagcccgggaaaatgaggccaaaattatcaaagagaacaaatcactgcaaccaccacaccataccacaccaccaggaaacaaaamaggggagaaaggtgtagggagggaa

SEQ ID NO: 474377 - DNA, 488 bp, Homo sapiens
gctaatatcttccagatagttctgtcctgaaggccacctctggccrcattaatttattctgcaaatgtagctgactatgctgtgcagccctgaccagacgttggggacataaaggtggatccaacttcccaccctgcgggatgcccggtctaaggagagagatgaacacaaaacagatccacacagggaagaaaaggccacaagaggcaggcacacaagaagcttccagggcatagaggagctggggaaagcttcacagaggaggaggtgtcatttttgcagggttttgcagaatgtataggagtttgccagagaagaagaagagcatcatgtgcgtatcagttatcgcttgctgtgtaacaaatgactccaaaatttagcagcttaaaacaacaattttattaagttcacagactctgtgggttaggaattttggtagggcagagaggagacagcttgcctgtagtcctcaatgcctggggcctcag

SEQ ID NO: 474378 - DNA, 581 bp, Homo sapiens
tggtgggcaagggagctgcgcgctgaggcgtggcctctgaccctggctcacctttgactgctgacccctgctaaccccgaccagcacgtggacagtgttcagttactggcagcccaagaagaaataagaaagggaaaataagccragcacagtggctcacacctataatcccaacactgggaggccaaggcgggatgatcacttgagcccaggagttcaagaccagccttggcagcgtagtgagacctcatctctataaaaaaatgaataaattagccgggtgtggtggcgtccacctgtagtcttacctcaggaggctgaggtgggagaatcacttaaccccaggagttggaagctgcagtgagttgtagtcactctcctgaactccagcctgggggacagagcaagcccctgtgtctaaaaatagtaataataatttggccaggcacagtggcgcaacctgtaatcccagcatttcgggaggccaaggtgggtggatcacctgaggtgaggagttcgagacaatcctggccaacatggtgaaaccctgtctctactaaaaaatacaaaaattagctggg

SEQ ID NO: 474379 - DNA, 661 bp, Homo sapiens
ctgctgtttgtgcccaggtggcagcaccatggatagctccgcaggaagcaaggctaggcgtgaggctggggaggacgaggagggattcctttccaaacttaagaaaatgtttacctcatgatatcccagccgaggtaggaaaaccctggaggttttttttccctttgttttcctctgtgaactaatcctggttttctcccactttaaccaatattgtgcccccacccccaggagttggaacaggtgccagtccaaggtgtggtaaacctagctccactaggagctggcctctcagcctagggaatagatgacgtggcaatcagcctgtagtgcaggactggctgggctgccgcggccagcctctggctgtgtcttcttcctggggaggtggcgatgctggggctgttgtacagcccccctgcagtggtgggtccggcttgcccatggtcacagagggcgagtcaggcagagccaggcctagaactcagatctcctcacgtcctgcctgcttggaagctgccctcctgcgtggacagygcagggctgtgcaagcctgggggctgctccaggggtagcgcttgctcgccgtgtcatcttgggacccactttggtttattatgctcatctcagcaagtggggttctcgcccctctcttggcaca

SEQ ID NO: 474380 - DNA, 679 bp, Homo sapiens
ctgtgtggggagtggacatcgtccatcatggctcccagcagccacctcctgctctgggtctactctccagcacctctagtctccaaagcaaagtcactctaaccgtcttgcaaagatctttaaagtgtatccagcactgctattttttagctcagaaataccttagaggtttcctacttaaaaggtttttttaaaawatatatatatatttaaaaataagggttttaaaaaagcacatatttgtatttaaacaattcattctctaaaagagaaacatgaacttaaataattttattaataggaatctactacctgtaaaagttttatttcaaaaagggttaaaaagtagggaaactctttaaactactgaccaagactgccaccttcataattcagatgagttagtgcagagatggccagggccagaggtcgcccagaacctgcgtgtgcagactgcgctctgttagtcttctgcctgtcagcctcagcccagtctgtgttgcttaagggtgcgcctccccagggctggatgatgctgtgctcaagcctgcgggtaggagggctccagcttgcagatcccatgcgtggatgccatatatagatggttgaaaccagcatcagaggaaggaaggtgaccttacagccactgccgagaccaacgtgtgccctggcccagtca

SEQ ID NO: 474381 - DNA, 679 bp, Homo sapiens
ctgtgtggggagtggacatcgtccatcatggctcccagcagccacctcctgctctgggtctactctccagcacctctagtctccaaagcaaagtcactctaaccgtcttgcaaagatctttaaagtgtatccagcactgctattttttagctcagaaataccttagaggtttcctacttaaaaggtttttttaaaatatatatatatatttaaaaataagggttttaaaaaagcacatatttgtatttaaacaattcattctctaaaagagaaacatgaacttaaataattttattaataggaatctactacctgtaaaagttttatttcaaaaagggttaaaaagtagggaaactctttaaactactgaccaagactgccaccttcataattcagatgagttagtgcagagatggccagggccagaggtcgcccagaacctgcgtgtgcagactgcgctctgttagtcttctgcctgtcagcctcagcccagtctgtsttgcttaagggtgcgcctccccagggctggatgatgctgtgctcaagcctgcgggtaggagggctccagcttgcagatcccatgcgtggatgccatatatagatggttgaaaccagcatcagaggaaggaaggtgaccttacagccactgccgagaccaacgtgtgccctggcccagtca

SEQ ID NO: 474382 - DNA, 619 bp, Homo sapiens
acctgagagttctgagggccagagttggcagttttacttccagccaccatgccccacctctagcaccccagaggcgcaaagtacccagaaacaaacccaggctttgtgaccctgtcctacgtgggcccacctgactccagacaacttacccattctcggcccagcaggtcagaaacgcctgtggccacaggcctggggactaactggctaactgctctggctgctgttggtcccagggggaaagagtctggactgaacctgtaccttgtttggaaacagaggcatcaggaccccagcaggagacccctcccagcttatcttcccgatcacacacaccaagcagaccaacaacacacaagctcattgycagccccctgccacccactgacccttggccttaaatcccaacagaatttttgccagaagagtcagcggctcaggtagggcagggtgaagaggacaggacttctaggggatggtggcacggctcccagccccaagtgggagcgggaaagtgaccactgagcacagggagcaaagcacagggggccagactgacaggcgggggagtcccgagtcccagctccgttagcacaggcgcttgtacgtgtagatgtag

SEQ ID NO: 474383 - DNA, 619 bp, Homo sapiens
acctgagagttctgagggccagagttggcagttttacttccagccaccatgccccacctctagcaccccagaggcgcaaagtacccagaaacaaacccaggctttgtgaccctgtcctacgtgggcccacctgactccagacaacttacccattctcggcccagcaggtcagaaacgcctgtggccacaggcctggggactaactggctaactgctctggctgctgttggtcccagggggaaagagtctggactgaacctgtaccttgtttggaaacagaggcatcaggaccccagcaggagacccctcccagcttatcttcccgatcacacacaccaagcagaccaacaacacacaagctcattgtcagccccctgccacccactgacccttggccttaaatcccaacagaatttttgccagaagagtcagcggctcaggtagggcagggtgaagaggacaggacttctaggggatggtggcacrgctcccagccccaagtgggagcgggaaagtgaccactgagcacagggagcaaagcacagggggccagactgacaggcgggggagtcccgagtcccagctccgttagcacaggcgcttgtacgtgtagatgtag

SEQ ID NO: 474384 - DNA, 619 bp, Homo sapiens
acctgagagttctgagggccagagttggcagttttacttccagccaccatgccccacctctagcaccccagaggcgcaaagtacccagaaacaaacccaggctttgtgaccctgtcctacgtgggcccacctgactccagacaacttacccattctcggcccagcaggtcagaaacgcctgtggccacaggcctggggactaactggctaactgctctggctgctgttggtcccagggggaaagagtctggactgaacctgtaccttgtttggaaacagaggcatcaggaccccagcaggagacccctcccagcttatcttcccgatcacacacaccaagcagaccaacaacacacaagctcattgtcagccccctgccacccactgacccttggccttaaatcccaacagaatttttgccagaagagtcagcggctcaggtagggcagggtgaagaggacaggacttctaggggatggtggcacggctcccagccccaagtgggagcgggaaagtgaccactgagcrcagggagcaaagcacagggggccagactgacaggcgggggagtcccgagtcccagctccgttagcacaggcgcttgtacgtgtagatgtag

SEQ ID NO: 474385 - DNA, 612 bp, Homo sapiens
tggggcctgctgcagtgatctctggcagggccgccagggaccacaatgtaaatggtgtcccctagagttgtgcagtagacaacctgcacaaccatatcctgcaggcctgtgtcctgtggggttcctgtcactcaaagaatcttgcctccacacagcactggcttcaaggacgtgtaatacatgcagtcacacaggttcctgaatttagaaaagcccagcatatggttttataccctactgtcactgtctagattttttttttcttcagacgaagtctcactcttgtccccccggctggagtgcagtggtgtgatctcagcttgctgcgacctccrcctcccgggttcaagtgattctcctgcctcagcctccagagtagctgggattacaggcgcccgccaccacgcccagctaatttttgtgtttttagtagagacgcggtttcaccatgttggccaggctggtctcgaactcctgatctcaggtgatccgcccacctcggcctcccaaagtcctgggattatgggtgtaagccaccatgcccggcctagaaattcttaataattttctgacatacagcccacattttcatttggcatcaggtcccacaaa

SEQ ID NO: 474386 - DNA, 463 bp, Homo sapiens
ccagctttttcttggcttcaacagagcagcaagccccttctagacactgctccaaacaaagagagaactccaactcagccttctaaaagagaaccaagcccatcccacctccttccattccccagaacagaccctcaggcccccttctgagygacagcagacactccctcgggagaattaaaatactatttttcaataaatgaagccccggccctgcaccagccctggaagactgtgagctgggcgaggtggcttcctgcatgtgcctcacttattaagacattgccactctgaagagtggagtcattcccaaggcccccgttgtcactggcaggcagcggttgactgacaagtgtcagttgcagcttgctgagcagcagaggccaatagactgtgaaacaaggagcagatgtgctaatgacaaaactttccaaactgaaaacacaaggagcagattcccggg

SEQ ID NO: 474387 - DNA, 389 bp, Homo sapiens
ctccaaccaaacagtgggcacattgtcactgcccagatacctgccccacaatgatcaagtgggtctgccctgtgccccccacttctatcaccaggcagaagtcactggttttcataatgcaaaccaagaattatctatatcsccagtctgtcccatcccactcatctcaccagaggggtgtgtgctttcgtgtgtgtgtgtatgtgtgtgtaggtatatgcacagttttaaagtaaggagagggataggtaagagtgaagtgtgaaattaagagcacacgaagaaggcatccgaaaagctgtgtggttcttgacacgtacctcacactcaatactggagggtgatgatggtgaaagaacgtgtagctggatggatagggagatggatgg

SEQ ID NO: 474388 - DNA, 389 bp, Homo sapiens
ctccaaccaaacagtgggcacattgtcactgcccagatacctgccccacaatgatcaagtgggtctgccctgtgccccccacttctatcaccaggcagaagtcactggttttcataatgcaaaccaagaattatctatatcgccagtctgtcccatcccactcatctcaccagaggggtgtgtgctttcgtgtgtgtgtgtatgtgtgtgtaggtatatgcacagttttaaagtaaggagagggataggtaaragtgaagtgtgaaattaagagcacacgaagaaggcatccgaaaagctgtgtggttcttgacacgtacctcacactcaatactggagggtgatgatggtgaaagaacgtgtagctggatggatagggagatggatgg

SEQ ID NO: 474389 - DNA, 389 bp, Homo sapiens
ctccaaccaaacagtgggcacattgtcactgcccagatacctgccccacaatgatcaagtgggtctgccctgtgccccccacttctatcaccaggcagaagtcactggttttcataatgcaaaccaagaattatctatatcgccagtctgtcccatcccactcatctcaccagaggggtgtgtgctttcgtgtgtgtgtgtatgtgtgtgtaggtatatgcacagttttaaagtaaggagagggataggtaagagtgaagtgtgaaattaagagcacacgaagaaggcatccraaaagctgtgtggttcttgacacgtacctcacactcaatactggagggtgatgatggtgaaagaacgtgtagctggatggatagggagatggatgg

SEQ ID NO: 474390 - DNA, 389 bp, Homo sapiens
ctccaaccaaacagtgggcacattgtcactgcccagatacctgccccacaatgatcaagtgggtctgccctgtgccccccacttctatcaccaggcagaagtcactggttttcataatgcaaaccaagaattatctatatcgccagtctgtcccatcccactcatctcaccagaggggtgtgtgctttcgtgtgtgtgtgtatgtgtgtgtaggtatatgcacagttttaaagtaaggagagggataggtaagagtgaagtgtgaaattaagagcacacgaagaaggcatccgaaaagctgtgtggttcttgacaygtacctcacactcaatactggagggtgatgatggtgaaagaacgtgtagctggatggatagggagatggatgg

SEQ ID NO: 474391 - DNA, 413 bp, Homo sapiens
agctgcctgtgggagctgagggcagaaaaactgagatgagaagcttcaaagcttcttgaagagttgttccaaagagtgaacctcactcacacaactaatcccagatggttctgaaacaccccagggacagaggtggtgttgcccatctgagggaaggactgtggctgtggggttttttgaagaaagaggggtggtattggaatcacaatatccaagttttttgaagaccactttggttcctgggatgagagggcttctcttacttctggaaaagggagcaggacttcacacttcttggccaaggtcccaggcccaaccctcaactatgcagccagatgaaccaccaggkagcttaaccatctcagctcctacttccctctttatcattctgaaatgttatgatgagctcttgc

SEQ ID NO: 474392 - DNA, 387 bp, Homo sapiens
tccgaggctggagatgggagcagggactggctgcacaggtgacagggatccttctgacatgakggaaatggtctaaaactagactgtgggtgaagactgcacagctctgtaaacttaccaaagactggctgagttgctcacttcaaacaagtgaattttatggtatgcaaattatacttcaataaagttgttaaacaaaagcactattttgccaataataagaattagtactaattagtgccacaagtgctaacaatattaacagctccatttattgagaatgtcccacgtgccagcactgtgctaagtatgtctattatcgcaattaatttctattcatcctcacaacaaccatatctggctgtctgcagtaacattcccatttct

SEQ ID NO: 474393 - DNA, 516 bp, Homo sapiens
ctgtccgaggctggagatgggagcagggactggctgcacaggtgacagggatccttctgacatgagggaaatggtctaaaaytagactgtgggtgaagactgcacagctctgtaaacttaccaaagactggctgagttgctcacttcaaacaagtgaattttatggtatgcaaattatacttcaataaagttgttaaacaaaagcactattttgccaataataagaattagtactaattagtgccacaagtgctaacaatattaacagctccatttattgagaatgtcccacgtgccagcactgtgctaagtatgtctattatcgcaattaatttctattcatcctcacaacaaccatatctggctgtctgcagtaacattcccatttctgagatgaggaagtggggttcagggaggtgaggaactggcccccagtaccaagccagatgccccatttagtgtctggccaaacttcatcctgtaggagtacagaacctggtcccgaggccccacatc

SEQ ID NO: 474394 - DNA, 602 bp, Homo sapiens
gacgcttagagaggcagggcccctaacagggatgtggcagggcagagcagggcagagcggggcagcagcagccctgctgttcacccccagcagccctctctggctttagaaaattcaagaaacagccacaagacctaaaacctgggacccagcaagccacccctgctccctgatcacccaaaaaaatcctggtcagaaggaagacagagccgccctccgcatctccatgtttgagcctggggggtcccctcgccagcacaagcgccggttggcagcagggctggggctttccctgaggaaggggaggaggtagccctgcatgtgacagcgtgggacagtccaggctgcacctcctctctccaagagtgtgtctgcaggtggaagcaaggcagggaatacacaggctgcttggccaagctgcggcccctccactaccagccccagaaataaatgccccagactgacattccacagcaccagggacagcctgcggcctgcgcatctagtatcaggtcaagtcctgaggtcctggggctcagacacacacactgtaaatgggcgcggtamatggtccttggagagaggaagcatgggagcaaagg

SEQ ID NO: 474395 - DNA, 550 bp, Homo sapiens
actgcctacgcttagggcatcctgtactttgtccaaaaactgtgtttttcaagctttaagggggctgctgaactttggttttctgggacttttccaacagcccataccacagcctccccgagcctcctagagctataggaattgtctgtactcatacgctggggctgccataatgaagaaccacatgaagactaggtgacctaagcaacagaaatttatcttctcacagttctggaggctggaagtccaagatcaaggtggcagtgtcaacagagctagcttcctctggggcctccctgcttggcttgtaggtggccaccccctcgctgtgtcctcccatgatctgtcctctgagcacatgcatccytgatgtctctctgtccaattttcctcttcttatgaggacaccagtgagattgtattagggcccaactgagggcctcattttgattaaattacctatgtaacaatatgtaatttattgttcaatattgctacatattgcttcaatatgtagaatgcaccgggaacataattcagcccagaacag

SEQ ID NO: 474396 - DNA, 643 bp, Homo sapiens
ggccagccgtgtactttatgtgccctgtacctctctcagaattgttcatgaagccaggtgtggtggtgcacgcctgtagtcccaggttctcagcaggctgaggcaggaaaatcacttgaacccagaagttggaggctacagcgagctaggatcataccactgcactgcagcctgggtgacagaccctgtcccaaacaagaaaaaagtaattgtccatgagttgtcatcaaaggtatacrtgtgaggccaggcacggtggctcatgcctgtattcccagcactttgggaagccaaggtgggcggatcgcttgagcccaggagttcaagaccagcctggacattgtggcaaatcccgtctctacaaaaaatacaacaaattagccaggcattgtggcacaagcctgtggtcccagctactccagaggctgaagtgggaggatcacttgagcccaggagtttaaggctgcagagagctgtgattgtaccactgcgctccagcctgggtgatggagtgagaccctgtttcaaaaaacaaaaaatgtatacatgtgagctgcccacactagcctctgaattagcagtgcctggcacttcgctgaattaatgtccctggtgtgtccactccctcctcgtggttactgtc

SEQ ID NO: 474397 - DNA, 292 bp, Homo sapiens
ctttcctgaagttctcttattgtaacaaaaactgtcctctgagattaagtcacctatcaatttcctaaaaatggctgaatcgtttttaaaatccccatttactcacaactctccagccccaccaagattccatttagagaaatgatttttaaaattttctcagtagtatttattctactattttccctcaattctgttctcttaaaaatatccattagagtcaagaraaacagcagtcaggggaatacacttcttcctccccaggagaaatgcagttccacaaagggacagc

SEQ ID NO: 474398 - DNA, 527 bp, Homo sapiens
aacatttctatggagagtggctcatggggctgttttgtaggcctgggatatgggtrtggggatccttatttgggctgagggcatgtctgcctggtcatggtccacagggctatttctcaggtctgggttgtgggctcttggaggtttggtaggcctgggggtgtgcccaccagaggtggcctgtgggactgtttcttaggcccttattgggggcacagggtatatctgtggggcttaatggtgctgtagagctgtttctcaggtcctgggcatggatgtataaccattccactggcctggggtcatgtaagctgctcagagacccagcagcctcttctgcttgggggagggtgtgcagcagtttggctggctcagaggcaggttcgccctgggcaggactggcagtctgttcctctggctggaagtgtggtgttgggagttgctttccctgctgtgcaaaaccagagtcacagccggtcttgggccaaagttccatgcaactgaggttgtggtgttcagccatgtga

SEQ ID NO: 474399 - DNA, 592 bp, Homo sapiens
aaatgcctgtccttgactggagacaggtgattgatgtatttccctatccctctattcctccatttctcaattcctccatcttctcctccctctctctctccagccaatacttactgaacatctactatgcaccaggccccgggggaggtgctggggccacagcgaaggctaagacctggtcctgttctcaagatgctcatagtcagggtggtggtggggggaagcaggtgtgtcatccactagccacaagggctcaactgcagcacccatctctagaggcagggaagcctgtgagcatcataatggctatgatcccagcagggacttgggatccagtaggaatgcctgtgggcagtgagaatgacctctgggattctcaggcatgtcacaggcaggagaaagagaatgaaggagatgtgctatcctttgccctttatttsagtctgagaaaggccacatatctttgccaagggcagcattgccctctgacagcctgatctttttagcatttttatcatcatcaccatcatcaattattatatgaatatttattatcagatattcagaatcatttggttgtagcaggctattt

SEQ ID NO: 474400 - DNA, 668 bp, Homo sapiens
tcctctacagggcagtgatatctccaaaatacaaactggattttgtcactaccctgyttaaaatccttcaatggctccgccggccagcacacaaacacacttaccatgtttaagcaaataactatgttcataaaatgtgctaatgctataaaacaaaaaaataaggggcaaagaaagaaagcatgtaatggagggaactaacttattctgggtagctgagaaacagttcttccaggagacagaattccagatgacgccaggcatggtggctcacacctgtaatcccagcacttggggaagttgaggcgggtggatcacttgaggtcaggagttcgagacctggacaacatggtgaaaccctgtctctactaaaaatacataaactagctggacgtggtggtgcacgtctgtaatcccaactacttgggaggatgaggcaggaggattgcttgaacctgggaggtagagggtgcagtgagccgagaccatgccactgtgctccaggcctgagcaacagagcaagactcaaaaaaaagaaaaaagaaaacgaaagaattgccattgagacctgccagaggagaaaaccaggaagggtgagggatggagtatcctaaaggaactgcatgtgcaaaggtcctgaggcaagaaagagcttgaaggcttcaggg

SEQ ID NO: 474401 - DNA, 668 bp, Homo sapiens
tcctctacagggcagtgatatctccaaaatacaaactggattttgtcactaccctgtttaaaatccttcaatggctccgccggccagcacacaaacacacttaccatgtttaagcaaataactatgttcataaaatgtgctaatgctataaaacaaaaaaataaggggcaaagaaagaaagcatgtaatggagggaactaacttattctgggtagctgagaaacagttcttccaggagacagaattccagatgacgccaggcatggtggctcacacctgtaatcccagcacttggggaagttgaggcgggtggatcacttgaggtcaggagttcgagacctggacaacatggtgaaaccctgtctctactaaaaatacataaactagctggaygtggtggtgcacgtctgtaatcccaactacttgggaggatgaggcaggaggattgcttgaacctgggaggtagagggtgcagtgagccgagaccatgccactgtgctccaggcctgagcaacagagcaagactcaaaaaaaagaaaaaagaaaacgaaagaattgccattgagacctgccagaggagaaaaccaggaagggtgagggatggagtatcctaaaggaactgcatgtgcaaaggtcctgaggcaagaaagagcttgaaggcttcaggg

SEQ ID NO: 474402 - DNA, 556 bp, Homo sapiens
ctgagacagcagtctcgctgctttctgtgggcagcacatggagaaaggacacgatcacatggagattcgtcagcacgggtaaggcttggctgtggctgatccatcattaccccaaaatgaaacaatccgtacattccgacctgtaatcccatcctgctcaaaaaggaagaaggagaagggggctgtgggatttggaacagtgaggaaagccaaagagcttttattaaaagagctgtttaatttcaactggggtctagaccaacatgtagtcaaaattccagtgtcaacactgtgtcatttgccacagtctcccactgaaattctcgttttgaaaagtccataaatcgaaccytgtgttctgttctgcgtgctaattaggcacaaaaggtttctctctccgtgctgactgatggcaaccagcatggctgagattcatgtcacaccgacaggctcgcattaacgtgcactttttacaattcggcacgcgaatgtttgggaaacactggaccggagatgcctgggctgtggaccccgcagggggtgggggacactgact

SEQ ID NO: 474403 - DNA, 604 bp, Homo sapiens
gaggaagaagactcagtttagtttcaacgtacatgtactaygcaacctaatttctgctggatatggtgcccaaaactggggatagagagatgagacatagctccttaccctcaggtggtgctcagtctagttggggtggttagggaaggcaggcacagcagcaggggatagggaggaggaatagtgatagaccttggtctagggcattggaggaacacagaagttgggtagaattgaggagaggagaagagaccagggaaggatgttgcagggtgaagatgctggaggcaagccctccaagataagtagaacttagccaggcaaagaaggcacggtggggacaagcagagggaacaggcttgagaataggcatggcaaggacagggatcatggcatatgtgtgagcttggagtgagctggtttaggtggattatgcagtgcaaagcaggtaatgatgtttgtatttggcatcttaactcacaagtgacagaaaacccaaaccaaactggcttacagaaaaagggaatttgttactctctgtaagtcagtagtcttggggtaacctggctgcaggcacgggttgatcaggggctcaaatgcagca

SEQ ID NO: 474404 - DNA, 200 bp, Homo sapiens
aaaagactgagcacctttgagggcagactgggaattgaggtatccgtgaaacccctaagagcagctcctatacagccctagaactgctgctgaaggaagtggctcattttgctaaactccagtttggaatctggggctcagtaaggctgtccctgcagagcattcttgagcccatyctgttcggtagccaggcaagtgtg

SEQ ID NO: 474405 - DNA, 295 bp, Homo sapiens
ctgatccccaataaataaaactggaggtgactacagatggtctayagtcaatgtacagactattcaactataatttacttaagccttttagagaaatgtgagatgtaatcctgctacactctccaagaaccctgaaggaagaatcctgcaagcatctttaagagaagtccccagaatgcgaggtcaggcagatccttatctagacccctagctccctaaccttcccaagagatcacccctccaacgccccaggactcacctaagcactaactacactgtatgcagtgcgaaaaca

SEQ ID NO: 474406 - DNA, 560 bp, Homo sapiens
tggccacaggcccacaagccttgtatraacttttcctgttggaccatggggaattggaggggggtggcgggggggcagcattcatgacactgaagtcacagctattcccaatcatgtagggtggcacttaatcagaatcaggaaccagggaactgggttagaaggcaggacagagtgggaaaggggcagccagctacccaacccgcacagctccaggggtgccagcccagggtcctccatggagacgcagagcctgagctgctccctgcagctctgcctggaatgcaacatgggggcagctcccacctgcctttcaggacccccagccctccctgcctcaaggtctcatggctctcagtccccaccttccttcatctggaaggagcccctgggacattggagccaaaatcacagctcaggcttatggcccttcctttccttcctgggcagaagtgcctctctgctttgcaagctaatagcgtctttactatttcccacatgcttactgtgttgaaaactttatgtggattaatcctcaccaccacctgggagctaggtgt

SEQ ID NO: 474407 - DNA, 450 bp, Homo sapiens
gatggagaaataacctgtacctatagaaggaaagagtttcaaataacttggatgcagggagtagtccaagactgtgggcaattctgcaatcagcctacctcaagaggctagtgtgcagttcaagaaagacaaggttggaggcttaaagtaggatggccatgacagaagcaaattattgagaatgtattttggaagtagagctgaaagaatttgtcaccaggttgagtgtggacaagagggagaagactcaggaatgacccttgagccatcctttggcctgagtgactgtcgggtgtgccatgaaatgcagtgggaaagagcaaaagagagaaaggcacragtcaggatttgggttagaattggttagatgggagatgctgccagtatccatgatgttccaggggtcatgaggaaccactaatgggtttggagcaggaaatgatgtggtga

SEQ ID NO: 474408 - DNA, 536 bp, Homo sapiens
ggagggccagctggagaggcaaggttcaggagggaggcgaggtttgccatgagaagtggaattcaactctgggttactccraatcagagcacctcgcctggagccttcacctgggtcttggacagatgatatcagaccttcgagatgaaacatcagatttgttccccaatctcctaacagctcttaacacgatactatgacccacatttcaatatgaggaaaccgaggctcagattcatggagtctgtgaactaggatattaaaaaaaaggtgacatctttattttcacccacctctaactaaaatttactattcccttaaattacaaatttagtaacaaattaaaatagtctgatcagtgccttccacttcatcaccgcaagaaagcacagacattttcctcatcatcccacagtgttgcagatacctctagacagaacttatgcttatcactgctgcaaaatgatagtcacttgacacgaggtaaggtgctaacaaggaaacatattcctacttcacgatttaaaaaatatttt

SEQ ID NO: 474409 - DNA, 601 bp, Homo sapiens
tgcatgcttgatccaggcctatcaggtgagttggctcttggctagtggtttttcttctcttgctgtacaaaagtccagacagtaatgtctttttttcatttttatagatatattccattgaaagtcctcattctcaaatttaaaacaaagactttttgtgtacctcaatagcaatgcacacacagttggcttcacaaacatattgtacatttctttttttcatatttattcaacaaatgtatattgactacccaccgtgtgacaggtgttatttgttgrcggaaccaggcatcatcagcaaacaaaactgacaaagcttcctgccctctgtggaaggcatctgaggaagagactggattttgtagcaacatgttattctcattataaactttatcattggaatactaaagccaaatcatcccccatctccttgatcaggatacccacttaatctaggcagctacacaattgtgagagcctttgtttttttctgctgaaacatccttaaaaagatacctcacaacccaagatttggcttttcttaaatacgatttttaatttttttcatttctatctagagatttaattggaaatggaaaat

SEQ ID NO: 474410 - DNA, 645 bp, Homo sapiens
ttggaaatggaaaatcatcaattttccaattaaatgtctgttccaatcaacattataccttttaggttgtcattgtcatttttaagtttaagcaactttaaggattttgaatctggctgcctgtaaattaaaggtgaaagtaatcattgtgttggattggwacattttgtcaattgagagtggtttccttgttcttagtgtatgaaaagtttatttttctaatgtagattaataaaggagataaagaaaaacaaaatgagtgatttatgtgtgtgagaaaagaaccatttcctcaaggattaaataaaattcataccttttgtttcttttgaaaagtttttaaaataaattttaatgaatgtgtcctttaaatattcctttaaaaatgtatcctattttaaaatggactctctgagagaaggaattgatacctgtgtttaaaatcaaaaatagcatgcatagagactgtttttctagttggttgaagcttttttccctctcctttacatcagtgaaccagcatcttgcccttcagaccctacagcacactcttgggctcatgaagtgtatgacacatcctccttgggggatcggccatgtcctcgctctcatgaccacatgaattcttctgtatgtcttttctca

SEQ ID NO: 474411 - DNA, 563 bp, Homo sapiens
gaatatggattagaccctcattctgtcctcaaggagttcctggtctagtagagaatcacatcactttatagttgattgttcaagaaggaagcttgttcaaacatgaataaaagactgtgcatcttctgactttgtaggtgtggaataacaaagatctgttcctttattgggtttccagaaaacatctccaaagctataccagtcatcattttgtgctttcagaaatgagtaacattgtaggatagtacttattgcttgtacttagctttgtgtgctagctgagcatttgtaaatagaaggcattcacgggtaaaatgtgtttcctttagccaaatgcacaatggtagtgcctttctagaatccaagctaaagatgtcgtcacatgccacatccacacacttcttagcaaaaatccaactagaagaactttgctatttacaacaaaggcaaatgctrtcaagaagtaggcttagtaccacaggaagcggagccaaatgtgttcttgaaatttataagttgacctgaaaataatgttttgggaagccatggcttgccgttgtcag

SEQ ID NO: 474412 - DNA, 623 bp, Homo sapiens
tctgcagaaggatgcttgggagatggacgggctccccctgccgccggagcctcctgtggcccgaggccatgagggcagtgggtggcagatgtggggtgatgagtggtgagtgtcctgatggggccttcagaccagggcccagtggtccagcctctgggaagcggccgagaagctggaattttcccagccggcctcgcagtcccgtgttgggagactgggccactttgtgttttctgggcttaagaacaggaacagcagcttcatccaacactgcctccctccacacggtgcccagtgcagggcctgactgctcgccctggctgtgcacccctccttgctgcctgtaatcctggaaccaccagctccttgggcacagtccaggctgctcaggcatccatgcaccagyggcaccacgacccacccgggcccgcgtgactagactcaggactcagacagtgcctggcacgtggcaggtgctctggccatggctgggtggcagggaccctcgctgcgggccaccatagcacgtcctcaagggtgaggtcaggcccttctggctgtctttgtgcctgctccatttattaaatcaaagccacctgtgttctctggggtcaggaggagcc

SEQ ID NO: 474413 - DNA, 595 bp, Homo sapiens
gggatggggacagctcttctctcccgccgtctccagtctctgccctggggacggctgctcccgtgtgctgtgcatttgtgggggrcattccttacacctctccctggccctccacacagcacaagggtggtttccagcccatgagatccatttgcacctgagagaaggggctgctgtctgaagggcctgcgggagggactccagggcactcacggggctgccaggatggaagggacccctggggctgaacgtgaccaacgggtggactaaggctgaaggggccagaagagcacgctggaagagagggcagtggggcttccagcacggtacagcgtgggtggcctcctgggggtgtctcaagctcagagaaactgtccccacgtcaggaggggtctgctgaataacagccccagaggcatccatgtcctgatccctgaatcctgcaaacatgtgccctcacgtggcaaaagggactttgcagatgtgactgaggttccctttccagggaaaggaccctggattccctgtcatctcaagtccttggaagaggaaggcagaaggacgaggccacggagagactggagctgccacgcag

SEQ ID NO: 474414 - DNA, 675 bp, Homo sapiens
gaaggaatccacctgcccccatgggcctgtggatctgaggactccgctcccacctcctgtgccaaccattgtttggtgaaggcgcccttgctcccagcccgctctcatatgacattctttggtgarcatcccatctccttttctccagaaccagccggctcagaccacccacatattttacagttactgggcttctatgttccacagagggtgcttggctggggggacaggggaggggacagagcctcaggccaggtgcagggaggacggtgctggccatagggctggggcagcctcaggtcacaccaccattccagcactctctgtgtggctccagggactcagcgtcgccacctgggagttgggatgggggctcaggcagaggcgctggttcgttgtcccacagatcaagcctctctgagtcctcggctgtcttggtggagactccaaaggtgaggccggactgcatgtcccatgacccttctccaccgggcagggccaaggaccctgcagcaagggcccttcatgccgggctcaccaccctgttccctccatgacctcgccaaaagcctcccgctcccacccccggctttgggacggtcaaacaggtgagggctgggggtcctgccccggggggaggatgacaggcgacgggaggagtgcccggcatggccg

SEQ ID NO: 474415 - DNA, 559 bp, Homo sapiens
taacaaagccgaggctctgtgctctcactgctagagagtggggtgggggcatgggaagcccccggggcaggcaagggtgtctgggttgcagccccacccaccccgagctgcaaggccacatcctgccatctgggggtgctgtggaccccatggggagkgtgggagagctcaggctgggggcctcagactctgacagtggaagcaccacctgccacaccttgaacttgggcacatgcctgcctctgtgcagaagcctggcctcatctctgctgtccccggcagcctcttggtcaggactcagggctggacaaactggctgaagcccactgtcagcaggagaggaccatgagcctggaaaacggaggggaagagatgggagaacgtggccactgctgcccctctgctggggagctctgctactctcttctaaagtggatctgtggcctgtggacagcagctcctgccctccctggcaggaagccaggccgagtcagagtgcagacaggactggggtctggggggcaccaggcagtgcaggggggcagagctctgcaggaag

SEQ ID NO: 474416 - DNA, 363 bp, Homo sapiens
tttcccctgcacccttggtttcctcaagattgtccatatggtctcagggcactgcagattgtggaaaagatcaggagtgattgtgcctgtgtgtgtcctgtgcagtgtgcagcaccccagaggagccgtctgtaccgtgccacggctcacgggtccatctgatcccatcttctcagagtcctgggggacaggccatggctctgtggatctcgtgtccatgtggtgcacrgaagcgcttcagggatctgggaagggaaggcccggatggatgagtgcggagcgcggcgtacggagagaggggtgggaaggagcagcccttccccgtgttctcgtctctaaatcagcttcttgaagcaaaaacaa

SEQ ID NO: 474417 - DNA, 363 bp, Homo sapiens
ctgagcctccttttctgactttgaaacagagctgcctttcatcaaagcctctaagtgtttatattaatgcttttcctataatttaaaattatttgccgcattctcggggctgtttctcacctcccgttgtgcaacggctttctcgtcttcacagacacatgggcagccatctctgtcccttgtcaccagyggtgggcggtgaggctgtcatcccacaaagcaaggatggtccctgagggataagagagtgaggactgtgaggcgtcagcacaggctcacgggaggatcctgcagaagagctgcctcccccgtctgaactggcagcctgtctgatggcagagggaggcagcaggtatttggacc

SEQ ID NO: 474418 - DNA, 521 bp, Homo sapiens
ataggtgggcagatatgtcgatgggtagatggatgaatggatgggtggatggatgcagggatgatagatatacagatggatgggtggatgtataaatgggtaagtggacgaatggatgggtggacggatgcaggaatggtagatgtacagatggatgggtggatggataggtaggtaagtggatgaatggatgcgtggatggatggatagatgggtggccagatgcatgaatgagtagatggatgtttggatgggcagatgaatgtgtgggtggatggacagatggggtgrgtatgttgcctgaacctcgttgttgatgagggcactgttgatactctgagttttttccctttctgtgtttggtgtggattctggttcatgacagcacaatgccttcactggccagatgatttcacagtgctttatggctctgccagtggggatcacagggcctggccatcagggcagtggtgagaaagcaggatgaggtcagaataaagcccttaaatcttcacagggaa

SEQ ID NO: 474419 - DNA, 638 bp, Homo sapiens
ttgtgtaacagagggattctctgcaccgctccccaggacagaccactccttacagcggatgatctgattaggttttaatgagaataatgttggcttcgaggaaggaagaatccagcagtgttttgatgtcagccaggcgtcttgaacactgmccccccgccaaacatttggaatctggcacgacctgtcatgcagtttggcgggcgggtccccctccacccgcttcgcgatgaaccccatgtgcgtttccagggagacgtgagccatgtgtcccttattcacttacacttcgttcatcaaaacacagttttgtaagagctaattggcaccggggtagcctttcaaatcttctttataagcctcttaccatctctctggttttgagccaagtgttaacagaacctcaacttcaaaagactgaagtttggtctgaaactcagagtgtgggtgtctgaggggtactgaacttggccgaacattttctactgattttaggctgagcagagccaggctgttgggaaagatgctggaatccaggcaaagtgaactggtttttttccccacatattttctaggctgacaacggccttgagctgggaatttcatggcctccctgtcacctgcccactgtgggcctg

SEQ ID NO: 474420 - DNA, 579 bp, Homo sapiens
tggcttcagttttctaatcctgccagtaaccatgtgatcttgggaaaatgactttcctgtgctttggtgctgtctgtaaagggagaatacctgccatttactgggctgttacaaggacaacaaagagaaggtgcatccaamtgaagctttgtacagggcgctggcacagcccagggctcagcctcacctctggagacatcttcacatttcaaaccttcaaaggcagaaacctctttcttaacctcaaatccatcttaaggggtttgcagggttctcaagctcaaatctatcttaaggggtttgtaggggcctatgagctgcttgaaattattattaaaagtttgagtgtacatgcagttttctgaatccagtttttataaaaatctcaaaaaagtaatgaatcaccattctgaagggtgacaagaacacaaggaaaatccagtccagcactcccacaacactgaccttctttcaggtttccgctcaaaagctgcttgtgtctaaaaacaaaggtgtagaacacagcttggcaggctgagtaaaatggtccatggagagcaacatcgcagaatgcctttg

SEQ ID NO: 474421 - DNA, 579 bp, Homo sapiens
tggcttcagttttctaatcctgccagtaaccatgtgatcttgggaaaatgactttcctgtgctttggtgctgtctgtaaagggagaatacctgccatttactgggctgttacaaggacaacaaagagaaggtgcatccaaatgaagctttgtacagggcgctggcacagcccagggctcagcctcacctctggagacatcttcacatttcaaaccttcaaaggcagaaacctctttcttaacctcaaatccatcttaaggggtttgyagggttctcaagctcaaatctatcttaaggggtttgtaggggcctatgagctgcttgaaattattattaaaagtttgagtgtacatgcagttttctgaatccagtttttataaaaatctcaaaaaagtaatgaatcaccattctgaagggtgacaagaacacaaggaaaatccagtccagcactcccacaacactgaccttctttcaggtttccgctcaaaagctgcttgtgtctaaaaacaaaggtgtagaacacagcttggcaggctgagtaaaatggtccatggagagcaacatcgcagaatgcctttg

SEQ ID NO: 474422 - DNA, 579 bp, Homo sapiens
tggcttcagttttctaatcctgccagtaaccatgtgatcttgggaaaatgactttcctgtgctttggtgctgtctgtaaagggagaatacctgccatttactgggctgttacaaggacaacaaagagaaggtgcatccaaatgaagctttgtacagggcgctggcacagcccagggctcagcctcacctctggagacatcttcacatttcaaaccttcaaaggcagaaacctctttcttaacctcaaatccatcttaaggggtttgcagggttctcaagctcaaatctatcttaaggggtttgtaggggcctatgagctgcttgaaattattattaraagtttgagtgtacatgcagttttctgaatccagtttttataaaaatctcaaaaaagtaatgaatcaccattctgaagggtgacaagaacacaaggaaaatccagtccagcactcccacaacactgaccttctttcaggtttccgctcaaaagctgcttgtgtctaaaaacaaaggtgtagaacacagcttggcaggctgagtaaaatggtccatggagagcaacatcgcagaatgcctttg

SEQ ID NO: 474423 - DNA, 451 bp, Homo sapiens
gctgcttgtctgagcctgagctgtggggccgcttgtgccccaggccatctcctggcactgtcagctcccaccaccgccccccccccaccctccacatcaagcaggctcctgagtgctcagrcatggcctcgtagccctggagggtcgtgatctcctacaagcctctggtgttttccgtgcccaggctggagctggccaattctcccaggagtcctggccactttgaatggaacacggtactgagaagccgaggtctgggtgctcgggatgctcatgcccatggaggccgggacgtcaaggggcttccaactccagcctctcatgggatggtagagcggcctgggcaggggcggagctgagaacagaatttcacccccgaggttctcggactggagctccagaggagccgctgcccaggggcacttatcgtgtccttcatgaaaacagaaag

SEQ ID NO: 474424 - DNA, 542 bp, Homo sapiens
ttaactgggcattctgcatagttttacctgtttttttgttttgttttgttttgttttttgagacggagtctcactctgtcgcccagrctggagtgcagtggcacgatctcagctcactgcaagctccgcctcccaggttcatgccattctcctgcctcagcctcccaagtagctgggactacaggagtccccgaccatgcccggctaattttttgtatttttagtaaagacagggtttcactgtgttagccaggatggtctcgatctcctgatctcatgatccacccgcctcggcctcccaaagtgctgggattacaggcttgagccaccgtgtccagccggcatccttcatagttatgtgctagatccagtaacactccctaaagcctccctctgcccatgagctcaccccgtttcagctccatcttggcagcagcagaaacaaagcgtttggccagggtcagggccaggccactgagccagaattggggttgggggtgtaacctcaggcaagcctcctgtcctcctggcctcaggctccc

SEQ ID NO: 474425 - DNA, 542 bp, Homo sapiens
ttaactgggcattctgcatagttttacctgtttttttgttttgttttgttttgttttttgagacggagtctcactctgtcgcccaggctggagtgcagtggcacgatctcagctcrctgcaagctccgcctcccaggttcatgccattctcctgcctcagcctcccaagtagctgggactacaggagtccccgaccatgcccggctaattttttgtatttttagtaaagacagggtttcactgtgttagccaggatggtctcgatctcctgatctcatgatccacccgcctcggcctcccaaagtgctgggattacaggcttgagccaccgtgtccagccggcatccttcatagttatgtgctagatccagtaacactccctaaagcctccctctgcccatgagctcaccccgtttcagctccatcttggcagcagcagaaacaaagcgtttggccagggtcagggccaggccactgagccagaattggggttgggggtgtaacctcaggcaagcctcctgtcctcctggcctcaggctccc

SEQ ID NO: 474426 - DNA, 542 bp, Homo sapiens
ttaactgggcattctgcatagttttacctgtttttttgttttgttttgttttgttttttgagacggagtctcactctgtcgcccaggctggagtgcagtggcacgatctcagctcactgcaagctccgcctcccaggttcatgccattctcctgcctcagcctcccaagtagctgggactacaggagtccccgaccatgcccggctaattttttgtatttttagtaaagacagggtttcactgtgttagccaggatggtctcratctcctgatctcatgatccacccgcctcggcctcccaaagtgctgggattacaggcttgagccaccgtgtccagccggcatccttcatagttatgtgctagatccagtaacactccctaaagcctccctctgcccatgagctcaccccgtttcagctccatcttggcagcagcagaaacaaagcgtttggccagggtcagggccaggccactgagccagaattggggttgggggtgtaacctcaggcaagcctcctgtcctcctggcctcaggctccc

SEQ ID NO: 474427 - DNA, 542 bp, Homo sapiens
ttaactgggcattctgcatagttttacctgtttttttgttttgttttgttttgttttttgagacggagtctcactctgtcgcccaggctggagtgcagtggcacgatctcagctcactgcaagctccgcctcccaggttcatgccattctcctgcctcagcctcccaagtagctgggactacaggagtccccgaccatgcccggctaattttttgtatttttagtaaagacagggtttcactgtgttagccaggatggtctcgatctcctgatctcatgatccacccgcctcggcctcccaaagtgctgggattacaggcttgagccaccgtgtccagccggcatccttcatagttatgtgctagatccagtaacactccctaaagcctccctctgcccatgagctcaccccgtttcagctccatcttggcagcagcagaaacaaagsgtttggccagggtcagggccaggccactgagccagaattggggttgggggtgtaacctcaggcaagcctcctgtcctcctggcctcaggctccc

SEQ ID NO: 474428 - DNA, 637 bp, Homo sapiens
ttttaggtatactttgccttttcggctgttctatggataaaatatgtatcttaatattttcacagaccaaataacaattaatattacagcatttcacataaaatatagaatcctgccagcctatagatacataccctgtcctcatcctttatgctacatctaccttcattatcaacattgtcattattcactctcaacaatgtattatcaacattgtcacaagacactgttataattttgkcattaaacactgtgtggtaaagaattaatcttgctcaaagggaggtctgccctgtgcccttgacttctggaaggtaatcttgaagcccttggaatgtcctgcctcataagagtgtctgtttacctgagggctttaagccacatcaaatatagcaatgtaatgtatagtggaaattttgggtcctatggtatcagctcaactactggaggggctggaaactaagatcagccgtgtggatggtccatcatgtctatgtgacacagccatgataaaatcttgaacaagattcaggtgagtttccccacttggcactactctatatatcttgttatacatcatttccatgaacactgagaaaggacaactggaagctccatccatggaattctcttggac

SEQ ID NO: 474429 - DNA, 637 bp, Homo sapiens
ttttaggtatactttgccttttcggctgttctatggataaaatatgtatcttaatattttcacagaccaaataacaattaatattacagcatttcacataaaatatagaatcctgccagcctatagatacataccctgtcctcatcctttatgctacatctaccttcattatcaacattgtcattattcactctcaacaatgtattatcaacattgtcacaagacactgttataattttgtcattaaacactgtgtggtaaagaattaatcttgctcaaagggaggtctgccctgtgcccttgacttctggaaggtaatcttgaagcccttggaatgtcctgcctcataagagtgtctgtttacctgagggctttaagccacatcaaatatagcaatgtaatgtatagyggaaattttgggtcctatggtatcagctcaactactggaggggctggaaactaagatcagccgtgtggatggtccatcatgtctatgtgacacagccatgataaaatcttgaacaagattcaggtgagtttccccacttggcactactctatatatcttgttatacatcatttccatgaacactgagaaaggacaactggaagctccatccatggaattctcttggac

SEQ ID NO: 474430 - DNA, 595 bp, Homo sapiens
atgacatttaaaaagttttagaccaattttgcataaggaactaagagaaccaggcaagactactgggtatggttgtgcagattgtacactgcaccattcgaggggaagccatgtgactggcaccccctaaaataaagtgctgtcttcaacgtcagcagccatatgtgcagctctggaacaggaacagattgggaaaggtagccaggtgccatggtactttgagttttcagatgcaaatataaattttgagcaagaaattaggacagaatggcaaccagttttaggaaaataatatatgtaaaaactcacctcgaaacaggtaatcaaaacttgcacatagtacagtattggcaagagaggactggtacatcctgataagccaagagtttggagtcactttttattatattcataatcaytatgttcctaatatctatggattcactctcctccctttttttttctttctccttttttctttttaccatcttctgtcttttccagatgtttcatttgagctgctctgctccccactggtggctgagccaggcctgaccagggcaggaagggtgatcagtagcctcacacacagcag

SEQ ID NO: 474431 - DNA, 595 bp, Homo sapiens
atgacatttaaaaagttttagaccaattttgcataaggaactaagagaaccaggcaagactactgggtatggttgtgcagattgtacactgcaccattcgaggggaagccatgtgactggcaccccctaaaataaagtgctgtcttcaacgtcagcagccatatgtgcagctctggaacaggaacagattgggaaaggtagccaggtgccatggtactttgagttttcagatgcaaatataaattttgagcaagaaattaggacagaatggcaaccagttttaggaaaataatatatgtaaaaactcacctcgaaacaggtaatcaaaacttgcacatagtacagtattggcaagagaggactggtacatcctgataagccaagagtttggagtcactttttattatattcataatcactatgttcctaatatctatggattcactctcctccctttttttttctttctccttttttctttttaccatcttctgtcttttcyagatgtttcatttgagctgctctgctccccactggtggctgagccaggcctgaccagggcaggaagggtgatcagtagcctcacacacagcag

SEQ ID NO: 474432 - DNA, 489 bp, Homo sapiens
tccacttcaacactgatttgtacctttttgggaaagaatggctgccattggcacgcacagtctgccagtggtaaagaaattttccagagagcattggccagagcgttggcttctaggagtggcctctgggtggaggagaaactagttagagggcattggcaggctggagctggtctgcaagggctactgagatgagcatgaccasatctctcacataccactgcatgggctgccatgcttaaaaatagcacacaaatttggggaaaagtccctttagcttgcaattgccttgcagcgtcccttcagggctctctattgataaagcctctattgacattgagtcatctggtgcaggagaaatgtttacaggacccacctctagtatctcaaagcagggtaaagaaggatggatttagagctgcgaggcaataaactgatacctggcacaagagtgaataaagttggttgtttaatggttggaaagaaggc

SEQ ID NO: 474433 - DNA, 489 bp, Homo sapiens
tccacttcaacactgatttgtacctttttgggaaagaatggctgccattggcacgcacagtctgccagtggtaaagaaattttccagagagcattggccagagcgttggcttctaggagtggcctctgggtggaggagaaactagttagagggcattggcaggctggagctggtctgcaagggctactgagatgagcatgaccagatctctcacataccactgcatgggctgccatgcttaaaaatagcacacaaatttggggaaaagtccctttagcttgcaattgccttgcagcgtcccttcagggctctctattgataaagcctctattgacattgagtcatctggtgcaggagaaatgtttacaggacccacctctagtatctcaaagcagggtaaagaaggatggatttagagctgcgaggcaataaactgatacctggcacaagagtgaataaakttggttgtttaatggttggaaagaaggc

SEQ ID NO: 474434 - DNA, 627 bp, Homo sapiens
cgccaggctgcactgagctgtgattgtaccactacactccagcctgggtgacagagcgagaccctgtctcaaaaaacaaccaaaacaaaaaccagagaaggtttggctctcagaggggccggggggttgccctgatgctgtatcagcagatcccagcctgcctctctcctttctgacacccactgaacctttatactattctttcagagaaaccattctccctggtgaaactgctgagacaggcccactgcccattgcctgctgctgcctttccaggggtgaggtatctgtgcaaacacggcgcatgcccctgccttgcttctgctgggaagggccagcaggtgacccttaagcttctctgtcctccctaccggctgcttagtgcctggctatgggaaaatcggctcctgagccagcgggtcgggggaagctgagtgcagcctggcactygctcctttcaggcatctgtttgtcttgctccttgcccacgccactcattctctccttgccctgcttagtttttctttggcactcctgaccttcctgatgtgttatatatgtatgtgtttattatctgtctctcctcaccatgatgtgagctcatgagagcagaagctctgtttctca

SEQ ID NO: 474435 - DNA, 469 bp, Homo sapiens
tgttacatttaaatagctcttcacagtttcaaaacaccttcctatacattattctaactaccctgcaaggtaggaaagtcaggaattattgtctccaatttacagatgaagaatctgagtctcagagagkttaaacgctttgcccaaggtcacacagccagtaagaggccgagctgggactccagcccagagctgtctcctgcaccctgatccctgggatccctggagcagtggtgccgtccttccgcagaggggaccctgcttctccagttccctctgtgggacctgtctcctcctgcaggctgctgtaccgctccatcgactcccacacggaagacaagggccccatctacaactaccgtgtggagatctccatcttcttcatcatctacatcatcatcatcgccttcttcatgatgaacatcttcgtgggcttcgtcatcgtcacctttcaggagcagggggagca

SEQ ID NO: 474436 - DNA, 570 bp, Homo sapiens
caagagcaaccatctgaaagtggagagtaaaagccaagtcctgactttctagaaagagttagcagctcagatggtcaagatcagtcggggctgagccctctgtgctggagcccaaaacgtaagggcaccttcccagatccaggctccaggaactcggggagagggctggccctgggatactcaccagaggccagtttcctcagctcctacccccaaatgagttcagcagtcagacccgtgagaacagcttcctggggtgttagtgtcctaaattgtgtgcagggctttcaagtttagaaaacaattcaacagtcattatttcatgccaacggtcagggctcgccgcacctatagaccaacagctaagcaaggccatctcctgccygagcctgagctttcagaacaagccccattatggagtgggttgaggccacctctggaggccctcctcagtgttgacttgaagtcggtctcccctaaacctgagaggccactgcccttgctttgtttaaatatatgtgggcaaggataggctctggggtcagcaaggcctctgtccttcagctggcc

SEQ ID NO: 474437 - DNA, 520 bp, Homo sapiens
ctgagttataaaatcctaagcctcctctgcatactcctctggggaaacacaacctccttttaaggagtgaaaatagaagttcaagcagatacacaggtgatagaaatacagagattaaggtcatcaaaggcttcagaacacacaggcagggaagagcccagggcaggacagggctgctgcctgcagctcttgacccagcccctcaggtacccgtgcagcaggtccygagtcccacctgtctgtcccctgccttgaggggaacgggagccttaggaggaactgaggcagctctaattttgaaatataagaaatatttttgctcttctcctgtttggaagatctggaaagcaggagaggtctctggcttgcttctgggcagagtggtggctgccttcgggtctccctgcttccctcataatctcctgtcctgcatagtgaggggagcggcctctgacgcctcatcagggtgggccagagcaggcagcgcagttagaagggctttagcgctggatattgccag

SEQ ID NO: 474438 - DNA, 603 bp, Homo sapiens
cagctgctgcacagcacagttctaggggcataaaggaataagtaagtacattttccaaagtttccagtcaagaaaaactttatattcctgataccttgatgtactgtaatatcaaggaaatgttaggagctgtttactggagaaaccacttctgtgaatggcactcccagatttgtttaacaaagtggccctttaactctggtgagagaagatggacatggagaaacaagtgatggagcaagaatcactgcagattaacaatttgtatttagcaatggaggtagtgtatccttgagattacaaagcagtcattagttatattgacagatttaaatttrccaacacctccaacattttagtgcttagctttcataaaatgttgcatgcatatactcttctctcatgggttaaatactattatttggaaaactattaaacatgacctttgatattgcttttcattgatgtggctttgcaaatattataaacttattttactatattatggtctaccaagctttactttccaaacatgactattcattggcatcatgtgagttttttgtttgttttaatactgagttctcccctcctcccagtaag

SEQ ID NO: 474439 - DNA, 363 bp, Homo sapiens
ctcagcttctagcctaatcaagatgtaggactggtctttggcaaaactttgaaggaggcaaagtgtagcttcctcctgttgattctgcttttgaattgttgtataagactgctcttccccaaagtgctcattcttcagatatttgtccttgtctcagtgttttagtctattttgtgctgctataaaggaatacctaagcctgsgtaatttatttaaaaaaaaaatggttcgcagttttgcaggcttacaaaaagcatggcaccagcaactgcttggcttctggtgagggtatcaggctgcttccactcatggcagaaggtgaaggagagtctgtacagagatcatgtggaaagagagtaggaa

SEQ ID NO: 474440 - DNA, 462 bp, Homo sapiens
gtactttctaagtgtttgctatcaataagtaataaatcatagaatactcgactgaaagtggtacaaatattagagatttattattacagaacaagatggaagttggcagttccagggtttgtcctgtcaattaaccaaggcatcccggagactggactcttcctgtacccactgccacgctcagtgtggcagtgccttctcccctcatcatggcagggaggccaccacagctccaacaaccaagtcttcacatggtcagcatcccaagcatgaaataaggggatgtggttagaaagggcttttctccttgtgyagccttccctttacaagcaagaaaatctctcctagaagtccctagtaggtttcctttcagctaaaacttgggtcacaggcccatccctgaacctggcacttccaacctgtaacaaatgaggcagaagtgggactagggctggctgctgg

SEQ ID NO: 474441 - DNA, 343 bp, Homo sapiens
cgtactgattttctggaacactgccctgggaggaactgcctggactggcctccctaccttcccaggaagcagttttattcatagtggaagactccacatttgacatagaaagtgcagtagggttatacacattccctgtgttcaaagttargttggagatttctgtaaacggtatggtttctaagctgcctttcgagtccgtaggtgcctgaaaggtggtagtcagaactgctgttgtagccattgcttggagtgtagccgcagcccgtgtaaaaactgtagaaatgagggtcgtgggaggctgagaagtgacagtggttacaggtggagctgtggtggccag

SEQ ID NO: 474442 - DNA, 420 bp, Homo sapiens
gactcaggttcatttcattcatcctagaaaagagcacacacaactagttatgcaaaaatttactccaatgactctgtattaagatactgaagaaactgaaacagtggggatggggaaatgggacttggccaactattagttcacttttacgctcaacaattctcttagatagctagtgccatattctttctactgataagraaactgagattgagacattaaaaactcaattcaatgtcacatagcagaaataggatttgaattctgccttgttcgaaactctaggcacaccatctaaagcaaagtctgcaattcttagagcacaatggcaatgacagtttttttttaaatcactcaagcttcatcttttataatatttatttttctccaaatggcttattatttcaaaccagtagtgtt

SEQ ID NO: 474443 - DNA, 577 bp, Homo sapiens
tgagccaccgcacctggcctatttttctagttttctaatgaggggttagaaatacaacattttcacatagatatctattgggaatgatgcttgcraaattgaagtaaggagaaaatgggtcttgtgatctttggaaaggtaaggtaccactgtcattgggaactttaaatttggaatgctaggcccaagtgggaaaatcatgacaagggatgatcctctgcccttaatggacattcagtcattcagtgcctactgtgtgataggtgatgaagacaggtggacaggtagactggttttttgtcttttccaggcaaaggttgaataatcaaaaacaaagtcagtctcttcactgagcactaactgtaggtctctgatggtctttatgtattgctggaaatagggagaatgttgaaatgatagcatgttggagaagtaggaatatattttcccactaagaaagctgggacctactgcaaatgagtaaatgaggtgattgctggcctaagtgtaatgtagtgctttattgcatgtcagtgcatttgacatgtgtgcttgctttctgttggcagatatacca

SEQ ID NO: 474444 - DNA, 549 bp, Homo sapiens
aggtggaaaagggagggagggagtgctttgtgagcccccactacacatcaagcaccgtgctggggacgctgctgatgcggtgtcatttcatctcagagaggtgaagccgctacatccagggcataagcaaataagttggaaattggcaaacccaggcgtgtctgacatccttgcaactcccaaggagctctgtttcaggagtgctgggcgtgaagtgagattcttctcatgggcaaggtgaggcctcatgggactcagggtctgcaacatggggtgaagtctctgcctggtgaagaccccctcttgcccactgccacccagaagactcctcccataaaacrcttctccaaatttctgggaagaagggctgtggtaggcttttcccttttaccattggtctgttctcctgttccctgcctggctctttaccctgggaagctgacctccatagacagcatccaggggcaacttgtcctctaagtttcaggtggaatcatccaatgggaggctgggagcgggcagagggagagtttggggtgtctctgccca

SEQ ID NO: 474445 - DNA, 432 bp, Homo sapiens
ccttacagaagttctatgaggcttaaaccaggcatggactgaatacatgccagctattattgtcattactatcagacacacagaaaatgctcaacagatagagatgttctgttccakggagctaggaccttccagggcctactggacgctccttgaaggccaatgttctaccccttgacggatgctttctttccgggcacctgatctaggctttctggtgaagacaatttgattgatctgctgttcctgctgctggtaccaccgtctgctctccaacttgcctgtttgttcacctggggatagaggaggttaaggtcttccgctgtgcatacgtggagggaaggtgttggtgagtgagtaggggagggcgatctgcttccaaactgcctacctatccccaccttcccacccgacccctctccccgacccagg

SEQ ID NO: 474446 - DNA, 488 bp, Homo sapiens
gtgtgtctgggtcctaatcgcctcttcttgtgaggacaccagtcatgttggattagggcttaccctcaatgacctcattttacctgaattacctgcataaaggtcctgtctccaagtacagtcacattcttaggtagtgggggctgggatttccatatatgaatttggtggtacacaattcggcccctaatagcaccccacccatgtcccagacccttaccacgtgggtgcatgtgagtccagcctctagctaccagcacccacatttctctgccccaggcatttctcccaagactgttttgccacttatacaccgagccggaagtattcaagaatgaatgtcccctggagcagtccccatggtgatgggagatgatctatcagctctccagcccccagccccttgaagtgtgtatcccacactgckgcccaggggacaacacccgggtggcccacagtgattgtccagctttatcacacagcctttc

SEQ ID NO: 474447 - DNA, 555 bp, Homo sapiens
aaagatattatttagcaaggtcacagatagttcctgcgttgggaaataataaacacattttaatatgtttttttttcctctaagtttttttgtrtcattgatggtagccaattcaccttgtagtttattgaatttctcctgtcctttttgctatttagggagtagccaactaaaatgccaaaagtttcaatgagcacctcactctaggagattctatacatcaacttaattaactctttcactactgcataccttggactggcagaatataaaaataaaactaaatatatactacattcagcctgaattaagcaaaattcccaaccccaaattaccactactttctgaggatctctttccagaagtctgtactctgttgcctttgtttgtatcagtgagtgatttcggttgaatacatgagaaatctggtaaagttaactatgcagaagataaacatattagaaatatattgcctagatagcatgatgcttctgtgcactgttgtttcctgaattcgaagtcccagatggtttatcaaatttgcaaatattggtt

SEQ ID NO: 474448 - DNA, 555 bp, Homo sapiens
aaagatattatttagcaaggtcacagatagttcctgcgttgggaaataataaacacattttaatatgtttttttttcctctaagtttttttgtgtcattgatggtagccaattcaccttgtagtttattgaatttctcctgtcctttttgctatttagggagtagccaactaaaatgccaaaagtttcaatgagcrcctcactctaggagattctatacatcaacttaattaactctttcactactgcataccttggactggcagaatataaaaataaaactaaatatatactacattcagcctgaattaagcaaaattcccaaccccaaattaccactactttctgaggatctctttccagaagtctgtactctgttgcctttgtttgtatcagtgagtgatttcggttgaatacatgagaaatctggtaaagttaactatgcagaagataaacatattagaaatatattgcctagatagcatgatgcttctgtgcactgttgtttcctgaattcgaagtcccagatggtttatcaaatttgcaaatattggtt

SEQ ID NO: 474449 - DNA, 626 bp, Homo sapiens
cttttatggctaaatagtactccattgtgtatatgtgccacattttctttatcaaattatctgttgatggtcacttaggctgcccccaaatcttagccactgtaaacagtgcataaaaaacataggagtgcagatatctctgatacgctgatttactttcttggaggtatatacccagtagtgggatttctgggtcatatggtagctcaatttttagttctttgaggaacctccaaagtgtattccatagcggttgtactattttacattctcatcaacagtgtacaaaagttcccatttctccacatcctcaccagcaattttttattgcctatcatttggatataaaccattttaactgggtgaaatatatttactatgtacatatataattttttgaaatatttttaaattaaatatatatrtgataaaatcctgtgaaaatatgttatttggcatgtatcaattttttgttaagaacagctatgtaaaaaatgaatggtgcacaatctctgctttcaaataactgagacttaagataaaatttgtgttatgtacaagtagtttcactaagtatattatttatgacaaagtccacaggaaaaaagaaaaccctatattagaaa

SEQ ID NO: 474450 - DNA, 229 bp, Homo sapiens
ctgccaccatcatatctggaataaaacaattatcatatgaccatatttctattgccaatcacattattgatatctagtacaaagttcctctgaattacgcataaaatattagcacrtaaaacaaaaaatgtttaaataattttggtatagctcaatatattacagtatatacaggtgcatattcaaaactctacataactgagtttaaaaagcagtaaaaaataaacag

SEQ ID NO: 474451 - DNA, 403 bp, Homo sapiens
gaggccctgttctgacttctccgaatgtaccccagacccagcccatctctccagtagctgcmatttctcacacacctgtttgctttggagttaccttcacttttagatttatgccccaaaagtccactgtaatcctagttctgctataatgaaattttgaggatggcagagctacctttcaaatggattttgttatttaatcactgagattattttataacaggataatttcaagagtgagcatacccatttcctggaaactcggacctcagcatcacactcacagtgtgtctggaggacctggccaggcgccagtactttgggggtgctcaggaccctggcagctctcctagctttctctccctctgcagccctatagccacaaaccatcaattgcagtgaa

SEQ ID NO: 474452 - DNA, 594 bp, Homo sapiens
ctgtcaacttttctttttaactctcctttgaatagacctaacccacattgttgtgttgaattttgatgatcaacagtactctgctcgggcttcctggatccagagccctgcaagagataaagtagcaacaggtaattacttggtgaacaggagatattgaaattgaatcaaatgtcctagagctctttccgccagactaacctatccccagcttactatggaacacacatagactttggcttttagcacccttcygatgcagtgcctttcttccctgattgcactgtataaaagctacaaatcatgcttctctgtctacactccaccccgcaaacacacacttttttttttttgccctccatgcttactattctccttctgttcacatggtctttcttcaaaatacagttatttatttatatatggtaaattttttgtaaagatagggtctcattatgttgcccaggctggtctcaaactcctgggctcaagcaatcctcctgccttggcctcccaaaaagcataaaattattttgaatagagagttgggaatgaaaggaattcttggattttaagtttatagtatttgggctt

SEQ ID NO: 474453 - DNA, 594 bp, Homo sapiens
ctgtcaacttttctttttaactctcctttgaatagacctaacccacattgttgtgttgaattttgatgatcaacagtactctgctcgggcttcctggatccagagccctgcaagagataaagtagcaacaggtaattacttggtgaacaggagatattgaaattgaatcaaatgtcctagagctctttccgccagactaacctatccccagcttactatggaacacacatagactttggcttttagcacccttccgatgcagtgcctttcttccctgattgcactgtataaaagctacaaatcatgcttctctgtctacactccrccccgcaaacacacacttttttttttttgccctccatgcttactattctccttctgttcacatggtctttcttcaaaatacagttatttatttatatatggtaaattttttgtaaagatagggtctcattatgttgcccaggctggtctcaaactcctgggctcaagcaatcctcctgccttggcctcccaaaaagcataaaattattttgaatagagagttgggaatgaaaggaattcttggattttaagtttatagtatttgggctt

SEQ ID NO: 474454 - DNA, 594 bp, Homo sapiens
ctgtcaacttttctttttaactctcctttgaatagacctaacccacattgttgtgttgaattttgatgatcaacagtactctgctcgggcttcctggatccagagccctgcaagagataaagtagcaacaggtaattacttggtgaacaggagatattgaaattgaatcaaatgtcctagagctctttccgccagactaacctatccccagcttactatggaacacacatagactttggcttttagcacccttccgatgcagtgcctttcttccctgattgcactgtataaaagctacaaatcatgcttctctgtctacactccaccccgcaaacacacacttttttttttttgccctccatgcttactattctccttctgttcacatggtctttcttcaaaatacagttatttatttatatatggtaaattttttgtaaagatagggtctcattatgttgcccaggctggtctcaaactcctgggctcaagcaatcctcctgccttggcctcccaaaaagcataaaattattttgaatagagagttgggaatgaaakgaattcttggattttaagtttatagtatttgggctt

SEQ ID NO: 474455 - DNA, 530 bp, Homo sapiens
cttgatgtcatatgggatcacgtattaggatttgagcattatgcagagtaatttgaatttgtattcatcaaaatactgtgaactaaatatatttaattgtatattattccagaaaccttcattttaaatctgtaggtacctaaggacaacatgttaaaatattcttgcattrtgataaaaaatggtattctaggaatttctaaatagttttcattgaagcaacttagacttattactgattcttgatatcacagaaaaattaatgtgtataatagttgagattattattctttacatttctcccttgaactaattaactggtaacttaatttttcttctcctatcctctccatacattgaattccagaaatttataataatagcaaaacaaaaacaaaaacaaaaaaacctcatctgtaacatgagtaccatctagaataatgaaagaaattttacctgtatgatttaagtatttgccttcttgtaaatattattatggaaagtgttaacagaaatgatttctgatgtct

SEQ ID NO: 474456 - DNA, 530 bp, Homo sapiens
cttgatgtcatatgggatcacgtattaggatttgagcattatgcagagtaatttgaatttgtattcatcaaaatactgtgaactaaatatatttaattgtatattattccagaaaccttcattttaaatctgtaggtacctaaggacaacatgttaaaatattcttgcattatgataaaaaatggtattctaggaatttctaaatagttttcattgaagcaacttagacttattactgattcttgatatcacagaaaaattaatgtgtataatagttgagattattattcttyacatttctcccttgaactaattaactggtaacttaatttttcttctcctatcctctccatacattgaattccagaaatttataataatagcaaaacaaaaacaaaaacaaaaaaacctcatctgtaacatgagtaccatctagaataatgaaagaaattttacctgtatgatttaagtatttgccttcttgtaaatattattatggaaagtgttaacagaaatgatttctgatgtct

SEQ ID NO: 474457 - DNA, 530 bp, Homo sapiens
cttgatgtcatatgggatcacgtattaggatttgagcattatgcagagtaatttgaatttgtattcatcaaaatactgtgaactaaatatatttaattgtatattattccagaaaccttcattttaaatctgtaggtacctaaggacaacatgttaaaatattcttgcattatgataaaaaatggtattctaggaatttctaaatagttttcattgaagcaacttagacttattactgattcttgatatcacagaaaaattaatgtgtataatagttgagattattattctttacatttctcccttgaactaattaactggtaacttaatttttcttcycctatcctctccatacattgaattccagaaatttataataatagcaaaacaaaaacaaaaacaaaaaaacctcatctgtaacatgagtaccatctagaataatgaaagaaattttacctgtatgatttaagtatttgccttcttgtaaatattattatggaaagtgttaacagaaatgatttctgatgtct

SEQ ID NO: 474458 - DNA, 606 bp, Homo sapiens
tagtgatattacattaggccagacaaagatgacagaaaatttttccagaattgtgaaaatgtaaaaatggaggcgaagagataacacacacacacaggcacacatattaaatataaaatattggcataatggggtaattgagacatatataagaaaaccaaggttcccagcttatttagctcattaatgaaattcaaatttactgacaaagaaagtattagaaaattagtgcattgattctaactcattctttagatctcaatgtaaattcttcaattacaatgggacactatcactatgagataaaagcatgtggattttgctcagtgttatctttcccttttctggtatgatacttgacataaagtaggagcccagaaaaagttcatgaataataaaaatatgttttatgtaaaagatacatttgggcatagtttttgagtaagtttccaatatatgttggctttttaaacaaagtatttatttatttattttagagactgtctcmatctgtcactcaggttggagtgcagtagtatgatcataccttactgcagccttggattcctgggcacaagcttctacagtagctgggaccactattcc

SEQ ID NO: 474459 - DNA, 545 bp, Homo sapiens
tcacaaattccaaagcttttgtgatctcatttcaatataattatgattatgcttataagggatgaaatattttataattcaagttatttttgcatggcatgtatgtatgtgcttatctaaaatttgcattcaaatttaggcaaatttatgttataaatttaggaaaaacaaatgctaataagatatgacctatgcctttgtgrctgatgctaatatagtagttctcaaagtgtagcgcacagacagcaagagcatcacttatgaaattgctagagatgaaaatttcataatatcaccatagacctattaaatcagaaatttttatggtggaacctaatgatatgttttattacaagctctccaggtcactgtgatagaggataaagtttgagaaatactattctaacagaataaataaaaataacaattatagaaaactatattactaaaagtaagacagtcataatagaattgtgatttaaaataccaattatatttctattagaaagaatcagaaaatacctgtgtaaggagcactatttaca

SEQ ID NO: 474460 - DNA, 577 bp, Homo sapiens
tatttatacccacctttaattatattaattatatattttatatttatatataatatatacttatttataatatataatatataatatatgatatattatacttatatattatatattatataactatatattaattatatgctaattaatgtaatataatgtgggtataaattataattgatataattaatatatttaaatatatttaaataatttaaataatataattaaatgtgggtataaatacaactgccaactatattcagtgggccatgcagaactacttcaacgattctctttcttcttttctctttcctcttaattatatgctaattaatataattaaatgtgggyataaatacagtgaaccacaacccatatactgctgctctgggcacagccgccatggggtagacctactccatgaggggcaatacctctgctgctactgtacattgctgctacagtgaaattgctgccaccgccagcctgcccttggattatttcctaggtgaagacaaaaaccctcccagattaagcctcagtttaggggttcacctgccctccatcagttaga

SEQ ID NO: 474461 - DNA, 513 bp, Homo sapiens
gctgggcttggtagtgccctctgtggtcccagctacccaaggaggtcgaggctgcagcgagccacgattgcaccactgcatactagcctaggtgacagaatgagatcccgtctcaaaaaaaaaaaaaaaaaaaaaaaaaaaamcgaaggtgcttcctgcccttgagcctccttgtaaattgcttcaggggctctggagagcaagtgcaaagcaggggggctctggtgcagtttggctcctctgctccactggctttacaggtgccgagctctgagtcccaggcttcttccctcatgcacgtctgtccctcattcttattctgcaggccgagcatgtcgggactccacctggtgaagaggggacgggaacacaagaagctggacctgcacagagactttaccgtggcttctcccgctgagtttgtcacacgctttgggggggatcgggtcatcgagaaggtacagatgggtctcggcactctgggtggggtccgattggggtgcaggggcccct

SEQ ID NO: 474462 - DNA, 539 bp, Homo sapiens
taggtggtgtgttgatgtgggcgggcctccaaggccaccaaagtcagagtgacccaggtttaagtattagccctacaggttagtggtcctgawaaacacacttcatttcctttgcctccatttccacatctttaaatgggcatgatatttgcgatgattcaatgcaataatgtttatagaacccttagaatcctgcttggctgtctattcattctcaattaatgttaattctattcctttctcttaggaggtccacagatgaagaacagctctcatctctatggtccccagcatttatttaaagctaagaattcacaggtcaaccaaatcactccctgaaaactaaaatcaaccaaaagcagaggaagaatcactgagaccctcctagcatgtctttcttaactctcatacctgaaaggatgggtaattgggtgtttcatattggcatggaccctaacatggtgtgactcaatctcttgcaatgctgtgcattgctagggcactgatttcattgttgagagtctctcactggtaagaaa

SEQ ID NO: 474463 - DNA, 539 bp, Homo sapiens
taggtggtgtgttgatgtgggcgggcctccaaggccaccaaagtcagagtgacccaggtttaagtattagccctacaggttagtggtcctgataaacacacttcatttcctttgcctccatttccacatctttaaatgggcatgatatttgcgatgattcaatgcaataatgtttatagaacccttagaatcctgcttggctgtctattcattctcaattaatgttaattctattcctttctctyaggaggtccacagatgaagaacagctctcatctctatggtccccagcatttatttaaagctaagaattcacaggtcaaccaaatcactccctgaaaactaaaatcaaccaaaagcagaggaagaatcactgagaccctcctagcatgtctttcttaactctcatacctgaaaggatgggtaattgggtgtttcatattggcatggaccctaacatggtgtgactcaatctcttgcaatgctgtgcattgctagggcactgatttcattgttgagagtctctcactggtaagaaa

SEQ ID NO: 474464 - DNA, 644 bp, Homo sapiens
gaatttgtatcttttcctttttgaaatgtctgttcaagtgcttcatgtactgttaaaaagtaggttgttttgttgcattattagaattgtgtttatattccagatacaataatacaagtcctttgtcatatatatgtatggctgatattttctcccatctgtggctagcctgttcactttttttcagtgtctttygatgagcagatgcttttaattttgatgaagttgaatttacaaaattttcattgcttaatgctttctaggttgtatctaagaaatatttgcctacctcaataatgtgaacttctcttacctctcttatgtaaactttatagcttcaactttttactttgaagcatgatctgtatcaaacttgtaactgtatgtggtgagaaagcaaaacataattttattttcttgtcaatatctaattgttcattcagttacaatttgtagagacaactctcatttttcctttgaattattttggaaaatttgtcaaaatcaattggacataaaagttttggtttaatatttatatccaattctttttgacccaatctaccccaacactgagatgaatcaaaagggggtcattggtgatttttaattcttgctataaagaaaaatctctccattgccta

SEQ ID NO: 474465 - DNA, 644 bp, Homo sapiens
gaatttgtatcttttcctttttgaaatgtctgttcaagtgcttcatgtactgttaaaaagtaggttgttttgttgcattattagaattgtgtttatattccagatacaataatacaagtcctttgtcatatatatgtatggctgatattttctcccatctgtggctagcctgttcactttttttcagtgtcttttgatgagcagatgcttttaattttgatgaagttgaatttacaaaattttcattgcttaatgctttctaggttgtatctaagaaatatttgcctacctcaataatgtgaacttctcttacctctcttatgtaaactttatagcttcaactttttactttgaagcatgatctgtatcaaacttgtaaytgtatgtggtgagaaagcaaaacataattttattttcttgtcaatatctaattgttcattcagttacaatttgtagagacaactctcatttttcctttgaattattttggaaaatttgtcaaaatcaattggacataaaagttttggtttaatatttatatccaattctttttgacccaatctaccccaacactgagatgaatcaaaagggggtcattggtgatttttaattcttgctataaagaaaaatctctccattgccta

SEQ ID NO: 474466 - DNA, 644 bp, Homo sapiens
gaatttgtatcttttcctttttgaaatgtctgttcaagtgcttcatgtactgttaaaaagtaggttgttttgttgcattattagaattgtgtttatattccagatacaataatacaagtcctttgtcatatatatgtatggctgatattttctcccatctgtggctagcctgttcactttttttcagtgtcttttgatgagcagatgcttttaattttgatgaagttgaatttacaaaattttcattgcttaatgctttctaggttgtatctaagaaatatttgcctacctcaataatgtgaacttctcttacctctcttatgtaaactttatagcttcaactttttactttgaagcatgatctgtatcaaacttgtaactgtatrtggtgagaaagcaaaacataattttattttcttgtcaatatctaattgttcattcagttacaatttgtagagacaactctcatttttcctttgaattattttggaaaatttgtcaaaatcaattggacataaaagttttggtttaatatttatatccaattctttttgacccaatctaccccaacactgagatgaatcaaaagggggtcattggtgatttttaattcttgctataaagaaaaatctctccattgccta

SEQ ID NO: 474467 - DNA, 569 bp, Homo sapiens
tcttcccctccaaccccagaccagtaaaccccacttgccaccctgatgtgtttaattgggccttgtctaattagatgcttagagagggctgcccacttattgaatgctaacacatggcataaggcacgcagggaggtagacatgcttaccctggttgccagtgacagggtacacacagagtaaagaatgcttatcatcacccctgctgatcttgggtgctacagactggaggtcccactgcagttggaacactgmgaggagggaagagtggatatctaggcttatccatatgacccaagactaaggattgatggtggatggttgacccagagctccgaactcagcctctgtctaatatgaaagcacaaaacagtgctttgcatcatgctggcagcccacttttatgcagatacataaatgaaatatggtgccttcaagaggatgatttgcttgcccaccacccctctggaatgaggactcaaccctcagtgtgatataaagtcatgagaccctgagctcttctggcatcaggtcaaccccacaggtgaagtaggaagttgcagagcaga

SEQ ID NO: 474468 - DNA, 563 bp, Homo sapiens
ctgaaaaaaaattactccaactttatagccagacctgcttggctrgcatagaggcaaattaagcttaccaaacatttttttttttaaccatcaatagttcattgccgttgataacagacaaccaaatatctaattcatgatagtccaatttactaaacccaagaagtggaagctcttggaaaagtatgacttttttttttttcctggagattcatatgctaatggggaggggacagaacttagaatgtaaagtagtcaaaaggtatgaataatatcaataatgaccagagggctttatcacaggagagtagatagggactgagaatccttggagtcaaaaaatatatatacataggttagtatactggccactgactttgccaagtatagtcttgtgcatctttagggaaattacttaacactcctatgtatcaactctcttcaccataaaatgctcaatctaacagcatcttcctgataagattacatgaatgaatacatatagcacatatacctatagtttgtattttatgtaattttaatttgttattataaatattttg

SEQ ID NO: 474469 - DNA, 563 bp, Homo sapiens
ctgaaaaaaaattactccaactttatagccagacctgcttggctagcatagaggcaaattaagcttaccaaacatttttttttttaaccatcaatagttcattgccgttgataacagacaaccaaatatctaattcatgatagtccaatttactaaacccaagaagtggaagstcttggaaaagtatgacttttttttttttcctggagattcatatgctaatggggaggggacagaacttagaatgtaaagtagtcaaaaggtatgaataatatcaataatgaccagagggctttatcacaggagagtagatagggactgagaatccttggagtcaaaaaatatatatacataggttagtatactggccactgactttgccaagtatagtcttgtgcatctttagggaaattacttaacactcctatgtatcaactctcttcaccataaaatgctcaatctaacagcatcttcctgataagattacatgaatgaatacatatagcacatatacctatagtttgtattttatgtaattttaatttgttattataaatattttg

SEQ ID NO: 474470 - DNA, 589 bp, Homo sapiens
tgaacatctggggcttgcattgtctctttctggaacgtctttacatattctctgcatgagtcccagaaatataagctacatatatgtgtgtgtgtatgttatatatacatgaatgatatgtatatatatatacataagatatatgtatatatttgtatgtacaaatacatttacacatatatgtatataaacatggtgtactgtatatatgttacatgttacatataagtgtatatacatatataaaatattcatttctacaagttaactagattcaaatgtacaaggatcttttccagagcgccttcctggtacttttatgctgaatctgatttttctaatctgctttttcatactacattttataaagttatmattgatatcactgcattttaattattgagttcaccattttcctttcccactaaaatatgaaatcctcaaagtcctagttttcctcttccacatctatatcctaaaaacctaaaagaaagtctagcagatattcagtaaatatttattgaataaaccacactactaaagttccagataagatgcacatatatgattgtaggctatattgaagttc

SEQ ID NO: 474471 - DNA, 488 bp, Homo sapiens
actggatcccatcatttatttactgttcttgagaaagtctcttagatcaactttcctttctgcttcccagaggcaaaaccgtgtactctaaaaaactcatagaatttggttacacacagatacgggttcatgtccctgaatttccaggtactagttytgcaaatttggaggagttgttcaagctctcttgattttattgtccttttttataaatgaagaaaaacacatgacatcttatttagtttttatgatgggtgttataaagtttaaataaaattattataagtttagaataaattatttgacagtttctactacagtagctgtcagagttggtgctgtgtaaataactgttaggttgttattgcagttaccagcctaaacccagcaaaccaatttaaagtggcataacccaatttagactagttaaaaaataaaaattaaaaacggcttttaaaaaaagtattgatatggaatgacttcaggct

SEQ ID NO: 474472 - DNA, 700 bp, Homo sapiens
ctagactcagtatttgttgaatggataaaggaataataatctttgcatgtattcagttctttcagtctccaatgcactgttttcactgctctccatctattcacccatatagccatcacaaatccctgaagagattacttctatcattattcctttcccaaaaataagaaaattaaagttgattggaatacccagttccatttgtaagtgacaaagttattgatttgaacccagatattctggttccacaacctccatttgtaactctccagaatgaatacatggatgagcctaggcaataaaacactgaatttaatcttttataaaagagaaataattttcaaatggttttcayagaaatggaattgtataaaaaagggagctgacatttgtgtattttggtaaaatgtatctaaaatccttttattaatccttccagatataaaaactttctacaagcttcaatatttctaacctttaacaaagaacttccaaaatattacaaaaaactagctaagtgaaaacattttccttctttttaaatatcaaacttgttttgtctttctgaaatagttaatgtgaatatatattttaaaactatttaaaattacctttagaaatatccaaatttcaattcttgaacatgctagtgcatagcccaaatggaagatttgggtttagacagtttaaggagctaaat

SEQ ID NO: 474473 - DNA, 700 bp, Homo sapiens
ctagactcagtatttgttgaatggataaaggaataataatctttgcatgtattcagttctttcagtctccaatgcactgttttcactgctctccatctattcacccatatagccatcacaaatccctgaagagattacttctatcattattcctttcccaaaaataagaaaattaaagttgattggaatacccagttccatttgtaagtgacaaagttattgatttgaacccagatattctggttccacaacctccatttgtaactctccagaatgaatacatggatgagcctaggcaataaaacactgaatttaatcttttataaaagagaaataattttcaaatggttttcatagaaatggaattgtataaaaaagggagctgacatttgtgtattttggtaaaatgtatctaaaatccttttattaatccttccagatataaaaactttctacaagcttcaatatttctaacctttaacaaagaacttccaaaatattacaaaaaactagstaagtgaaaacattttccttctttttaaatatcaaacttgttttgtctttctgaaatagttaatgtgaatatatattttaaaactatttaaaattacctttagaaatatccaaatttcaattcttgaacatgctagtgcatagcccaaatggaagatttgggtttagacagtttaaggagctaaat

SEQ ID NO: 474474 - DNA, 488 bp, Homo sapiens
actggatcccatcatttatttactgttcttgagaaagtctcttagatcaactttcctttctgcttcccagaggcaaaaccgtgtactctaaaaaactcatagaatttggttacacacagatacgggttcatgtccctgaatttccaggtactagttctgcaaatttggaggagttgttcaagctctcttgattttattgtccttttttataaatgaagaaaaacacatgacatcttatttagtttttatgatgggtgttataaagtttaaataaaattattataagtttagaataaattatttgacagtttctactacagtagctgtcagagttggtgctgtgtaaataactgttaggttgttattgcagttaccagcctaaacccagcaaaycaatttaaagtggcataacccaatttagactagttaaaaaataaaaattaaaaacggcttttaaaaaaagtattgatatggaatgacttcaggct

SEQ ID NO: 474475 - DNA, 444 bp, Homo sapiens
agagcactaaaaatacatcacatctacttccataaacaactcaaaatttatcctgtgctgatagcttatcgtttttgtatgtcaargatgatagacccttatgttatttgataacattcaaggaaagctttgtaattctagctgtttcacttaagaatttggtctactatttatgatacaaagtcaatgcaacaactaaggtcacatatgacctagtcccaaagtaaggatgttattgtaggaagaaaaggaagctaatttgtgagatacccaaaatttggtgctgtagtttagcaacaagttgattgtctaaacaagcaaaagttccttgctcacagttgacctgaaaaaaagaagtagaaagaataaaagcaaaggacagtaactatgataattttggtttcttgcttgggagttaggtgatgtgatgccattgatttctat

SEQ ID NO: 474476 - DNA, 597 bp, Homo sapiens
taggtctgactttcatcatttctcacttgggcttttgcttttgtccctcaaatgtggcccctgcctaccttctctgcatcctctaattcatccttcacgtagccatcaaagtcctgctcacataccaaagacctctaatgtctccccactgcctataagacaaggccaaattcttagcatgtagttacagctccttcaaggaccttccccattatatctactttctcaatctcttccgtagacactactccccttccttgtaacctgaaacccagtcacagaaacttactctaggtgtccctaattaactatacttccaagattttgcataagcccctccttctttctcaaataatgtcttttatctccctcctctgcctaccgaactctacagtagcatagatggctggctggccaacaaaagcagtgtaamccttccatattgcagagttgtcactcaatcagggaccacacttcccagcacccattgcacataggtgggaccacgtgaccagcacctaccaatagaatgtgagcagaattggcatgtgacacttgcaggtaatgtcattcagtttggggttcacaatcctccac

SEQ ID NO: 474477 - DNA, 637 bp, Homo sapiens
ttttcactaacataatgtatgttttacttacttatcttgtctcyacccctccaccccaaagtaagcatcttgaatacaggtatctttgtctgttttactctttgctatatccccaaggtctcgattagtgccttgcatatagtaggtgctcaattaatgtaggtcagatgaatgaatataacattataggtttagaattttgctgcacaacagaaaactcaaacagaggcctgttcaggccagtagggtggctgcacaaggccatcagggggcctggccatctagctttcctctctgccatctttggtaggtggctttctttctccccatggtgttctcatgagcatgaggatgttcgcctcacctctgggctccccttcatgctccaggttataaagaaggaagtgactgggagaaagaggttccacctacatcaggaaagcaaaactttctagaaatgcccagcacacttctgcatgtatctctttagccagaaatgagtcaccccaagctacgggggaggatgggtattatagtctcctagcaggatgcattaataccctaaaggaaatcaagtttctggtagtaaggtgaaaggggaaatggatatcaaagaggtgacttataccatcagcca

SEQ ID NO: 474478 - DNA, 619 bp, Homo sapiens
tccgctcgacaggcttatttccctccatgctggagcaaaccccggctgaaagagggccgcactaattggtttgcgtacccgaagtgggaatagagagggaggaaaaccatgtttcaggtgttacggggggaaaaaagtgaaatgcgaaccgcaggggagagagcgaccgtcaggcagacaccttgtgaaccgcggtggagagcacacctaggtggggaggtcaccggcccaacccaccaccctccgggagaatgcgggcagggacagcagcagggggcagcatccacgtctctacgcttgcaagggttccccaagtccctggccactgctccccacttcctgcagcctcggtgtccgccgggggcgtgtgtgaggggcggggccgcatggggaggagggatttaaaaaaaaaaaaaaaaascgaggtaattagcattctccgattccactggctctccgccgcccctgctttgcatacgcccgtcccactggctgcccggggtttgctggggttcggcaaggtttgcagccgccacggccgctgctgcgctccggtgcagggcaggctggcgccgagcgaaccagggccgggaactgggagccgggagccgggagccag

SEQ ID NO: 474479 - DNA, 650 bp, Homo sapiens
gatatattaacatttatttttagagtaaccattaatatttagaatataaaattaatatttttttgtttttaaactcttgcacttcttctaagccttttgatgctacttcaattggaagaggaggctgccaaggagaagttagaacagtggaacccgactgaaggtatcaaatcaatttttaaagcccatgagttaagaaggtgatgaggaatccatccacaaccagttaacaggacttttattataatatctggaaagacaatgtcaccacctgtcttaggaggtgggaggtgaacaaagaatcatgacagtgygctaaagcagtacttcacaaacaaccagtggtgatggatgagtttcaaatttccaacccatcctggactgatgtttttgtgaaatataaaatcacacatttgggtatcactgtaatttcaaattgctgtaaattactctaaatttctttacttattgcagaattatagtaaatgcttgtaggtcaccataggcccatggatcccacattgggtaggtctgtactaaaatacttgtcttgtttcagggacaaattagttatcaatagtgattaagacagtaatatgctgatgaatgtctaacaattggttctctgaaggggggatgagaggtgaagc

SEQ ID NO: 474480 - DNA, 467 bp, Homo sapiens
tgtttttatttatttttttagataagagccccaggaggggaattttatggaacgatgcatgaaaatggtgtgcttcctcayactgctaaaatcgaagccctgggtccctttcatagcagagggaggcagattaatgagttggggggacatggctgctgcctctcagcagctagctcaattacctctcctgttcaagctgtgctttgggtcttgaaacacaagactggtggaattttaaccttgctggaggactttgttccttcactgaggctgcctacttttagcttgaatatatcctttacttctcatagacaggcttgctggaaccatgggtgtgagggaattacccagtgagtgcccttttaaaaacaagtgaagtaaatgagatcatgaggataatgacaaatgagaagctctgggaagaaaaataagacccatttggggaaaggatattagtaatatgcact

SEQ ID NO: 474481 - DNA, 307 bp, Homo sapiens
atttagagctagtgggatgcatttgtggttagagggacctctttaagagtccaattgccagcttttctggagctttaaaacctagggagcttggaccaagttcagatcctttaaaaactgtggatttgatttttttctcccctctccccaccccttccactgttccccttctgcttccaggtctccctgcccttgggccttcacgggtcatccccatatgttgtcttcatagctcccccaagggtaacttagcaatatggtagacaccattcgtggagyaccattaactgaacatggtgccaggagt

SEQ ID NO: 474482 - DNA, 551 bp, Homo sapiens
tgtaaaatggaagttggcaaaatgtgctaatgcatcagttacattttgtcccttaaattatgccttttctatttactcatgatgtgactttgaataatgttatcagttggatcttgaatgttctcctctataaaatggacacaataatttcctctcttctacctcaaaaaaaatcaatatgaggattgaatgaaaaaatgaggatgaaagggctctgtaagttctcaaaaatcataccatgcatgtaaagaactggtattggagaatagaaggtacagcattttgagctgatgtagatcactagaaattaataccctgtaaggttctgtaatctatgtcagggaaaataaaggatgggacacataagataattctgtagactgttatagtctatagaaagtgttagaagtccatttggtgatcaggacaggtggagcaccacctttactcagattgcatgcagcatgcaacaccagaggaagacacaccaggagagaaggctgaggcatggtgagggtgtaggcacktgctagtcaaagcatggtttgcag

SEQ ID NO: 474483 - DNA, 563 bp, Homo sapiens
ctcaggttttgcatctgtgaagcatggatggagaaagaactgtctcttagaatttcacacatctcacaaaagagtaagatgctcttgttactaagcttgtgctatatctgctttgggagggaatatattcttacaaattaaaaaaacacaaagccaatrgcaagattcacgatgcctgctagggactggacctctgccccctgtctctccggaccaacaggtgccatggtcctcttgatctcctgtgcctgaccatccctgcagtgaagatggccaggccaaccctgactccaggggctctaggtctccatgtgaagtggtgaccatgagccctccgggtgagagcagtctgcctttccccactctgaatgaagaactgcccagggcttgccagacacacacctcaagttaccataggtctagagtttaattacagattatgtttatgaaacatgctggctgggaagtcctctaaaagggaagaaagtatttcaggtcatacctaaagcacttctcctaatggtggctgaaattcagaccttgacattttgaaggcccactga

SEQ ID NO: 474484 - DNA, 563 bp, Homo sapiens
ctcaggttttgcatctgtgaagcatggatggagaaagaactgtctcttagaatttcacacatctcacaaaagagtaagatgctcttgttactaagcttgtgctatatctgctttgggagggaatatattcttacaaattaaaaaaacacaaagccaatggcaagattcacgatgcckgctagggactggacctctgccccctgtctctccggaccaacaggtgccatggtcctcttgatctcctgtgcctgaccatccctgcagtgaagatggccaggccaaccctgactccaggggctctaggtctccatgtgaagtggtgaccatgagccctccgggtgagagcagtctgcctttccccactctgaatgaagaactgcccagggcttgccagacacacacctcaagttaccataggtctagagtttaattacagattatgtttatgaaacatgctggctgggaagtcctctaaaagggaagaaagtatttcaggtcatacctaaagcacttctcctaatggtggctgaaattcagaccttgacattttgaaggcccactga

SEQ ID NO: 474485 - DNA, 605 bp, Homo sapiens
tgaggtagtagtgtaaatatttgaagtggaatgaacgttcatactgctgtggagtcctggcaacagaggccatggctctagtaaagtcagaatgaacattgctgttcaatgtrtaaaacaaaatagccacagcgtgtgtggtagtcatgttctggggtagaacttttccttggttaagccaggctaagtgggctttttgccacatcctaaaataattcttctgggcttctatgtcttttgtgaaataatccccttgagttagtttctccataacctgtttgctacagccttggtactgatcatcaaaagaacctggtgcgaagtcgaagtcgattttaattgcaacctgtaaaaaaagaaaaatcttgagtttaatttttcaaatcagatggtgaatgtggttgcagatttgctgtactctataagggtaagtcttctcctggaaaccaatatttactgaagtaagttacactgaaaatcattacactgttccaatccttactgcatcaatgacctgtgctagagattgaatttggtttgataaataaattactgaaagcttgaaaaactcatctccccagagaggaagtaactcttttaatatc

SEQ ID NO: 474486 - DNA, 629 bp, Homo sapiens
acaaatgaatgcaagacagataaatggtcaatttaggaagtgagttgacatctacttaagtacaacaacagtaaacatttatgagtccttagtatgtgccagacaccgatttgagtgcctcatatgtgtaacttaattgatcttcacagttattccttgtggtagctactgttgttatcacctcctcattttacagttaaaaatactgagggacagggaagctgaacagcttatccaagggctccaggtagagccaaaatagagctagaattcaaactcatgtcatctagctctagaactcatagcaattccttccttttctcccagaggttttttgtcagtttttgtatctggaacatggggaaatggctgtcttatttacaggacaaggagaaataagagaaataagtgagatcatgaatgtgacactgctraaaacaatgcaaaataatataaggtattgatatttattaacacaagttttcaagtttgataattatttagtgaatttattggtaccctaactctctcaaaaaataatttgagacatgctaccaaaaagggacgtacaaataaggttaacaggaaaatcaagtttaagcaaaggagggagacacgacaataaataa

SEQ ID NO: 474487 - DNA, 424 bp, Homo sapiens
ctgagggaactgtggcagtcctgctgttgtctcacgtggccctagggggctcatctgtagcccccacgggagccccaagaagccaatccctgctgggctcatgggctaccacctcatacagccccatccctcgggaggccctgaggagaccctggggctgggcagggcgtgaccggccagctccatgctycctgacaagggggcctggatgtccagggagagccaggagggaagcggagactcaagtggagagtgtgtgggagggaacgttgctgggctccacaaaggagggggcaccagggctgactcccaggttcctggtggcatgcgtggaggcaggtggggccaggagcaccagcgcagcacatcctgcgtgaccttgggccagctcctcagccctccctcgacagccgtgctggtagct

SEQ ID NO: 474488 - DNA, 477 bp, Homo sapiens
ggtgcctgtcctctgagtcctcctaagccagaggctgggcagggatgcgctcaagggcggtgggcatctgggctgagccctgcmccctcttttctcctgacatcccttgcctccccccaccccgcctggtctccctccctctctaatcatttctcatggctccaacccactctgcctttcttcctctcctcgaactacaaggctgggtctggtgcactctggtggggccaccttatttatgagaatttgggaaatgcagatgtgatgtttccagctaatagccccaaatcacttgcaccgccccattagcggggaaaccagcctgtgtacattacataccacctaagtgggagccgagacagcggttttatgaccccataaaactttgggagtttattgctattgaacaaacatgtaatccgatgcttcaagttcaatatatatagccagcagcatctagagccaaccatggccgtg

SEQ ID NO: 474489 - DNA, 477 bp, Homo sapiens
ggtgcctgtcctctgagtcctcctaagccagaggctgggcagggatgcgctcaagggcggtgggcatctgggctgagccctgcaccctcttttctcctgacatcccttgcctccccccaccccgcctggtctccctccctctctaatcatttctcatggctccaacccactctgcctttcttcctctcctcgaactacaaggctgggtctggtgcactcyggtggggccaccttatttatgagaatttgggaaatgcagatgtgatgtttccagctaatagccccaaatcacttgcaccgccccattagcggggaaaccagcctgtgtacattacataccacctaagtgggagccgagacagcggttttatgaccccataaaactttgggagtttattgctattgaacaaacatgtaatccgatgcttcaagttcaatatatatagccagcagcatctagagccaaccatggccgtg

SEQ ID NO: 474490 - DNA, 704 bp, Homo sapiens
atttatcagaaatggaactgatggattaaagtggaaccaagcgaattgatttttctccctgggcactgaaatgctgcgcttaatcaagcgatcaactccgtgggcagggtggctgtggggacggaggtgggggacaaggggatggtggccatggtggggactgaaaggtggctatggggacagatgaggtgagccaggtggccctggggtcgagctccagcccagcctctggcaaagaggccctgtgtgcagaagtccgggtgtgatgccctccccccaccgattgtgtgataccggccagtcctgtcccggctgagcctcggtggccttgatgtaaccctgtggggtctggtggcagggactgattcactcatttgctcattcattcatgtgtttgacacacactgcagcaaaggaaaggtgagagcagccacaggctggccagggacgattcagacttcagartgtagcgtgcccgcccctcctcttgtgaggtccagccttggtgtgtgtggattcccaggcaccctccaggtccaccctccactctgcagtgccccgcccacctgtccacatactctgttctgtggtttgatcgccatccttctgctctgcggccaactggatggcccaagcggactgagttgggcagggtggtcatacctgtggagcctgtggctgtggttggaggccccgtgggcagc

SEQ ID NO: 474491 - DNA, 217 bp, Homo sapiens
tgggtgtgcccagacagcaggsggggtgtagtccacccccaccacgtccacagcccctgactctcgggtgggtctgggggctgctcgccctgggagagaagccatcccctcccggcggggccatctatcaggacctctctgacatcagcattttcctctgtggctctagcttcctgcctcctatctctgtcctcctgagaatgtcccatctgtccca

SEQ ID NO: 474492 - DNA, 663 bp, Homo sapiens
ctgccaaacttctcttccctccccgtctccttacctaccccctgcttctaacactctcagtggggggataatgtatcttcctcctgctgatgcgtgtttcaaatctgatacctgcctctggcgtgtttaatcacccaccaagccctgtataatcttcacagaaaccattcacatctcttccctcctgtgagcaggctgtcattttcttttttttttttccaactggagcctcgctcttgttgcccaagctggagtgcaatggcgcaatctcggctcactacaacctccgcctcacgggttcaagcggttctcccgcttaagccttccaaatagctgggattacaggcatgtgccaccatgcccagttrattttgtatttttagtagagacggggtttctccacgttggtcaggctggtctcgaactcccaacctcaggtgatccgcccacctcagcctcccaaagtgctgggattacaggcccgagccaccgtgcctggcccagcctgtcattttctcttttgcctagcttactgtgtaatctccctgacttgtccaaaccacttggcactgccagagacctgaactgtcccgtcgggtccctactccatagcatcctctatcagctttccattgcccaccagaaaaggtgggaagaaaatta

SEQ ID NO: 474493 - DNA, 568 bp, Homo sapiens
cctgcctcagcctccctataattctcctgcctcagcctccctattagctgggactgcaggtgtgcaccaccacacccggctaatttttgtaatttttagtagagacatggttttgccatgcgggccaggctggtctccaactcctgacctcaggggatctgctaaccgtggcctcccaaaatgcttggattacaggcatgagccactgcacctggcccacatacatattcttgataccagaactggcatcagagttygtggatcccagtgaaaaatgaagatgtgagtctcctttttcaaaaccatttaagcaaggtttgggcccctctgagcacagggcaatgtagagctacacatgttaaaagcctgtgaagccaggcatagtagatgcagctttttttgctttaacaaactccttcctttcacttttgtaggatttctctctctctctctctctctctcgttttgtttagtaaaagaagaattttataattcacagatctacaagagaaaagagaaatcgatgagggcagacaggaagtccagagaaagcaggatgcctaaccag

SEQ ID NO: 474494 - DNA, 447 bp, Homo sapiens
ttgaagtaagaaccaggtgattaaaacacaggtttcattctttgacaattttgcagaaaacaatcttgtttctgtttgccaacttgtataggcaacatgttataagggaaataaaatactttaaaccagattttttagtgtgccagcaggtacaaagccagaattttccatcttgtgctttgtcttttaggcaaatttagagaaataatttacctagcytcataatttggatattacataattgctacgtaagtggaaatttccttaagatcaataacttgcttagtccaatggcaccagggccatcattatatccccatgcctggtacccaagcatattgcaaatgacggaatgtgcaacttttattcatgttcaatccagtttatggtgcttttagtcacagaaaacattagactgtattttcttttcagattaaacactaatga

SEQ ID NO: 474495 - DNA, 447 bp, Homo sapiens
ttgaagtaagaaccaggtgattaaaacacaggtttcattctttgacaattttgcagaaaacaatcttgtttctgtttgccaacttgtataggcaacatgttataagggaaataaaatactttaaaccagattttttagtgtgccagcaggtacaaagccagaattttccatcttgtgctttgtcttttaggcaaatttagagaaataatttacctagcctcataatttggatattacataattgctacgtaagtggaaatttcyttaagatcaataacttgcttagtccaatggcaccagggccatcattatatccccatgcctggtacccaagcatattgcaaatgacggaatgtgcaacttttattcatgttcaatccagtttatggtgcttttagtcacagaaaacattagactgtattttcttttcagattaaacactaatga

SEQ ID NO: 474496 - DNA, 496 bp, Homo sapiens
aatattcttgctttaaagaaagttatatattataacaaaaggagcataaattggaattgatttcattagaggaatttaacacccgcaaaataatgacactgttttttctttaggsacactattacattaccattttgcttcactaaattaaaaatgctatcaagttggtagtaaattctgaagtgtgttactgagcaaactctaaagtccatagaggggtctggagctcatatataacagcagaaataaattagacacaaagtttaaaaatcagctttcattacaggaaactttgaaaacacatcaacatctcatctctttaaaaaagaatacttcattttaatgactcagcagataactccactgatgtttagctgctaaaagaggtaaatttaatgatgccgagcatttcagagttcaagaatatttggactatagactactctacaataattggaatttattacaaatgagtttctccacacctgttttctaa

SEQ ID NO: 474497 - DNA, 575 bp, Homo sapiens
ggcctccatacctgacttccatccaccatagaaggtccaaccccagtctcagccctactccactccagcactatcgttatagcaggagttttcctgctcatctacttctaccctttaatagaaaataatttatcaatccaaacctttacattatgtctgagggctgttactaccttattcacagcaacctgtgctctaacacaaaatgacattaaaaaaaatcatagcattctccacctcaagccagctagcccttataatagtcacaattggcattaatcaaccacayctagccttccttcacatttgcacccatgccttttttaaagctttattatttatatgttcagggctcatcatccatagactcaatgttgaataacacatccgaaaaacaggagggctattcaagactttacccctcacttcctcctcccttattatcagcagtcttgcacttacaagtatgcctttcttcacaggcttttactctaaagacctcatcattgaaactacaaacatgtcatacaccaatacctgtgccctttttgttactcttattgccacctccttga

SEQ ID NO: 474498 - DNA, 575 bp, Homo sapiens
ggcctccatacctgacttccatccaccatagaaggtccaaccccagtctcagccctactccactccagcactatcgttatagcaggagttttcctgctcatctacttctaccctttaatagaaaataatttatcaatccaaacctttacattatgtctgagggctgttactaccttattcacagcaacctgtgctctaacacaaaatgacattaaaaaaaatcatagcattctccacctcaagccagctagcccttataatagtcacaattggcattaatcaaccacatctagccttccttcacatttgcacccatgccttttttaaagctttattatttatatgttcagggctcatcatccatagmctcaatgttgaataacacatccgaaaaacaggagggctattcaagactttacccctcacttcctcctcccttattatcagcagtcttgcacttacaagtatgcctttcttcacaggcttttactctaaagacctcatcattgaaactacaaacatgtcatacaccaatacctgtgccctttttgttactcttattgccacctccttga

SEQ ID NO: 474499 - DNA, 570 bp, Homo sapiens
acctttcatgccttcgtgaaacaggatctaataacccttccggggtttcatccaactccaacaaaattaccatccacccctagcatacaaccaaagatattttaggtttaattattctcctcctccttctaataactctagtactgttttcgcctgacctcctgggcgaccgagataactatgctttagccaatcctctaaacacctcactccacattaagccagagtggttctttttgtttgcctacacaatcatatgctccatccctaataaactaggagacatactggcccttgtatkctccattctcattctagcagttattcctgtactttacgtgtctaaacagcaaagtgtaatattctgaccgttgagtcaacatctattctgaattttagtggctgacctatttacactcacatgagttggagggcagccagtcaaatacccttttattgccatcaggtagacagcatctattatgtacttttctaccatcctcactcttataccactcactggcctaattgaaaataaactacttaaatgaagatgcccttgtagtataa

SEQ ID NO: 474500 - DNA, 583 bp, Homo sapiens
aagacacatgcacacatgtgtttattgcagcactattcacaatagcaaagacttggaaccaacccaaatgcccatcaatgatagactggataaagaaaatgtggcctatatacaccatggaatactatgtagccataaaaaaggatgagttcatgtccttcgcagggacatggatgaagctggaaaccattattctcagcaaactaacacaggatcagaaaaccaaacaccacatgttctcactcataaatgggagctgaacaatgggaacacatggacacagggaggggaacatcacacacaggggcctgtcagggggtcrggggctaggggagggatagcattaggagaaatacctaatgtagatgacgggttgttgggtgcagcaaaccaccatggcacgtgtatacctgtgtaacaaacctgcacgttctccacatgtatcccagaacttaaagtataataataaaaaaaagaaatgcaatacaaagaaatacaataatttttataaaacattgattttaaaaatgttcccactgctgattctaatttacaaccttgatattagagagataaacagtgt

SEQ ID NO: 474501 - DNA, 493 bp, Homo sapiens
gctggaaaaattcaagcttactatactcttgtttctattttattcatgaagacatacagacaatatataataagcataatagctataacattatagagttctcatcatgctttgtacaagtmataatgataactaaatagtgtttgttcaattcacacttattaattgatgtataaataatttttttcttctgggtgaatacaaaccatatatatttttattgtcaaagtttgttctttcatataggtatatgcccatgaagggaaagaataattattttgaataatatcatttcagagagaatcaaaattatttctatgttacttttgttttagagaaatgaccaagttatgtaatatcttgtttgctatttccagaagagcaggcataggggatgggcatgtaactgctggcatgagtaactaagagccaagctccctttgagttgatgtgcattatagttcctttatctgaggaccaagagaacctacct

SEQ ID NO: 474502 - DNA, 493 bp, Homo sapiens
gctggaaaaattcaagcttactatactcttgtttctattttattcatgaagacatacagacaatatataataagcataatagctataacattatagagttctcatcatgctttgtacaagtaataatgataactaaatagtgtttgttcaattcacacttattaattgatgtataaataatttttttcttctgggtgaatacaaaccatatatatttttattgtcaaagtttgttctttcatataggtatatgcccatgaagggaaagaataattattttgaataatatcatttcagagagaatcaaaattakttctatgttacttttgttttagagaaatgaccaagttatgtaatatcttgtttgctatttccagaagagcaggcataggggatgggcatgtaactgctggcatgagtaactaagagccaagctccctttgagttgatgtgcattatagttcctttatctgaggaccaagagaacctacct

SEQ ID NO: 474503 - DNA, 629 bp, Homo sapiens
ttactatactcttgtttctattttattcatgaagacatacagacaatatataataagcataatagctataacattatagagttctcatcatgctttgtacaagtaataatgataactaaatagtgtttgttcaattcacacttattaattgatgtataaataatttttttcttctgggtgaatacaaaccatatatatttttattgtcaaagtttgttctttcatataggtatatgcccatgaagggaaagaataattattttgaataatatcatttcagagagaatcaaaattatttctatgttacttttgttttagagaaatgaccaagttatgtaatatcttgtttgctatttccagaagagcaggcataggggatgggcatgtaactgctggcatgagtaactaagagccaagctccctttgagttgatgtgcattatagttcctttatctgaggaccaagagaacctayctaagggaagatgcagggctcacattgggccagatctaccagatgctttttgagaataaatgtaaaccgtataactatgtttgttgataaatatgaaaatgttgttgcaaatggatattaaatgattgcccttaaaatactttaaggtaaagttg

SEQ ID NO: 474504 - DNA, 420 bp, Homo sapiens
cagaggtggacttagtgcacaaggactgttttccacactcctatgattccatctgtaaccaatcaatattccccattccctagtcccctgctcaccaaacttcctggaaaactcctagcctttgagcctttgagattgatttgaggctggtctcacatcaattaaactatttctctactgcaatgccatggtctcagtcaattgattttgtctgtgcagcaaggagaaagaacccatcaggtgatgatataaacatgacacmgaaagagagttatgtattaaaagtgactcagcaaatgctttcttacctaagtaaaatgtgcctgttctgattgtcaattaaaaaccaagtagagcatgcaatgttgagcatcactgaaaatattactatcacatccaccttctaatactgtgtttaat

SEQ ID NO: 474505 - DNA, 606 bp, Homo sapiens
gctgcccaaaacaactgtgacttacacaggtgaatttaaatgctacttccttatagaaatgttttgtactggggttatttccatccaagaataaatgaatctaacagattttctacatcattaggaatccaaaagacacagctctttctttatgccactactatagagataaccctaatctcacctgcattaaaacatgggctacaattttagagccattcctaagaggaaatagtaaatataacaataatttttatttttaatttacatgaactttatcactcaaaatgtaagcattttccaaaagtttaagtggatcataaccatttttagaaatacactgaatatattattcttatattctttctaagcaaattctttttcagtttgcttcttcacagttgtgttaatccgttttcacactgctataaagacataaccaagactgggaagaaaaataggtttaatggactcacagtttcacrtggctgggaaggcctcacaataatggcagaagtgaaaggcacttcttacttggtggcagcaagagagaataagagccaagcaagaggggtttccccttataaaaccatcagatttcatgag

SEQ ID NO: 474506 - DNA, 429 bp, Homo sapiens
caaatgaagtaagagttcaggtgaataatatagaagccagacggcagaaccagaaargaccaaagaatgttgacaatcacaggcacacctcataaattgcactttgctttatttcagtttgcagatattggtatttgtttttattttattttatttttttacaaattgcaggtttgtggcaaccctgtgttaagcaagtctatggatgccatttttcaacagtatgcactcactttgtgtctctgtgtcacattttggtaattctcccagtgtttcaaacacttttattattatatatgttagggtgatgtgtgatcagtgatctttgatgttactattgtaattgttatgggtgccatgaaatgtgcccatgtaagatggtgaacctaattgataagtgttgtaagtgttcggactgttccaccaaac

SEQ ID NO: 474507 - DNA, 641 bp, Homo sapiens
tccgtcagctacagccacagtaatgctgcgtaacaacactttgaaactcagtaacttaacagcaataaacatttattgtcccacccatgggtctgcaggttggctgtggtttggctgctgtaggcagggcagggctaaggggctgtacttcargctgagggtcagggtcagggctgcttcacaggtctcttctcacaccaggatcatgtctacccagagcagttgcccacagaaatgacagaagatcaagagccaagagaaaccacacaggcagatcgagggccactacccatgttactagcattccactggccaaaacaagttccattgccaaactcagtatcagtggaaaatacacttcacctggggtgggagtgggaagaaagatttgctgaacaattatccagactactgtggtacccttgggcctctgttttctcatctgtaaaatgggaaccaagtgctgagtcagcagcagaggcttcggtctgacgcagcacctcccagggtccaagcctttgcctccccaaggctttctgattttaccctgctttattctgtggccttggcacgttggcaacctctggggtggaaaaagctgatgtcctgggcccccatgtcatctgggtcatttactcaat

SEQ ID NO: 474508 - DNA, 596 bp, Homo sapiens
aaatttatttctttaagtgtaaatggactctcccacaaagatgctgctatgtcatttcatacattcttttttaacttcatcaaacaaagtacagttctctggcgctaatgtcaatctccacagctcattgggtttttaaaaatagtggagacacagatttcatctcccagcctcagtgaggaaggcagcactctagccagcgagaggaacccttcgcttctcaccccagaaagagccataaaacacgctcagtgccggagcacgcgccccatttgacaaagacaatttgatttgtcygtggcttctaaaatattcatcccactttgatggactatcgttttataaatatagattatcattaaccgacaccagcgggcgctgctggtcgacccagcgccacgccactggttcgggatgaagacgtctaataaaaaaaatcattatctctgtctgcgaaccttgatctgtatcgtctgcctcatttgcagtgcaagggtcagtaactcatgctaactgcatctgtttgtgcatttcacggcctggccacccctgctggggagattggcagaatgcttctcgagttcagacctggggta

SEQ ID NO: 474509 - DNA, 607 bp, Homo sapiens
tgccaagaatcaattctcaggaagccaaagttagcatgaaatccacagggccagaagtagggaagacacctggaaacccactcatgtaataaggacaacctgaagcctgtgctgggcaggacagtcacggatgctgctatgtcctggtccctctgcagcctgaaagtgggagagctgggttaaaggcacaggtggggagggacacctctttctgctgtaagcacagacacacagaacaggtccacgcctgccacaaggctattggtcctttccccagtccatgtgtaggactctttaagcataagccaaaagcctccatcactctggtttctggggtctgctgtggccccaggctggtaagtagggcacagggctaggtgaagtggagatggggctgaagccctctccaggaggctacagggcagtccttttggggmcagccaaagatccaatgtatggaggctagagggacagaaaacagaggttaaggagatgtggtctggaaggtgtgcctgatggctccagcacaggcagcaggcagtggctgacacacgagcaccaaggtttatgggccccttgtccctgacagaaggtccttggccagcag

SEQ ID NO: 474510 - DNA, 607 bp, Homo sapiens
tgccaagaatcaattctcaggaagccaaagttagcatgaaatccacagggccagaagtagggaagacacctggaaacccactcatgtaataaggacaacctgaagcctgtgctgggcaggacagtcacggatgctgctatgtcctggtccctctgcagcctgaaagtgggagagctgggttaaaggcacaggtggggagggacacctctttctgctgtaagcacagacacacagaacaggtccacgcctgccacaaggctattggtcctttccccagtccatgtgtaggactctttaagcataagccaaaagcctccatcactctggtttctggggtctgctgtggccccaggctggtaagtagggcacagggctaggtgaagtggagatggggctgaagccctctccaggaggctacagggcagtccttttggggacagccaaagatccaatgtatggaggctagagggacagaaaacagaggttaaggagatgtggtctggaaggtgtgcctgatggctccagcacaggcagcrggcagtggctgacacacgagcaccaaggtttatgggccccttgtccctgacagaaggtccttggccagcag

SEQ ID NO: 474511 - DNA, 580 bp, Homo sapiens
cttcctcaggcgggaagggagggctggtgttgcctgagcttccagtttttgataaactgataagaacacatatatttgtgtcaaatctcccaattttaaaatagtgactcagaaatatctaaagcagtatgtgagtaaagtaaaaaagagtcccatgcctgcaggacaaaattgggcacgtcaggctgttggggcatatactttttctttaagtcacaaaggaatgattatcttgtctgctacttttgtttcagattagaaaacctgagacccagacgggggaaactgctttccatggttaatcgtcaacaactggccaggatgggacagaagcccatacatagccttcattccagggctcagaacaaaaagaaggcagtggcctgggctgcacctgagcttggcttcacataggagggattctggaacgcaggatcctgacaackacctcaaggttagaatgaatgccaaagatgccttttttgtgtgtgcttttcttttttaaataaaatacaaattgcttatttcatctgtaaaatggggagtatctcacaaactcacaattgtggtatgaggactg

SEQ ID NO: 474512 - DNA, 470 bp, Homo sapiens
cctgcacattgttacagggaggtgagtagatgggagaagcaggctgtggaccaacttacttaacaaatgttacctattatgacctacaagtgttacataatatgacctacaaatgttacatgctatgacctacaaatattacataccatgacatgcaaatgtcacgttatgacctacaaatattatatgttgtgacttacgaatgttatatactataacayacaagtgttacacactatgacctacaaatgttacatattatgacatgcaaatgttacctactatgaccttggaaaatctacacactcatcaaccccactagttggctcagttgtttgtaaacagtgaagaagagaatctgtgaaattctctccccaaaaacgcatgtctctaaagccatgggattccgggcagaagatatcaatgattccttctctgaaaattatcatctcccaataatctttatagtg

SEQ ID NO: 474513 - DNA, 582 bp, Homo sapiens
atttggcaagctggtgtccatttttatcatagacttaagtagatataatcaatctttggcttgctatttcacgttgagagtacattcttgattcatgccttatttggagaagctgccaacatccacttatcacacgtaaaattacgggagaagagaggaaacaaagtcatcaagtctctggaagtcagagtatccattctcagcaagattgttagaytcacaatctatgattctgaagaatgaatgtactttattcgatagaaagtgcaatcctgaaaattcaaaattatgtgggctttggggttattttgtatgggttctgattttatttttgttatctaatagtgtaatgactttaggcaagtcagaattggtctatattttagtttcatcagtaaaactggaaatttgtattgcggaatttaagtgaaataatgtggataaatcacaggaacctaaaaccgattttcttaatagagagatagatataggtaaacatatagatagaaagatatataatgtatgtaatatgtatgcaatagtattacaattatattgtattacaatatatgtaatacatat

SEQ ID NO: 474514 - DNA, 582 bp, Homo sapiens
atttggcaagctggtgtccatttttatcatagacttaagtagatataatcaatctttggcttgctatttcacgttgagagtacattcttgattcatgccttatttggagaagctgccaacatccacttatcacacgtaaaattacgggagaagagaggaaacaaagtcatcaagtctctggaagtcagagtatccattctcagcaagattgttagactcacaatctatgattctgaagaatgartgtactttattcgatagaaagtgcaatcctgaaaattcaaaattatgtgggctttggggttattttgtatgggttctgattttatttttgttatctaatagtgtaatgactttaggcaagtcagaattggtctatattttagtttcatcagtaaaactggaaatttgtattgcggaatttaagtgaaataatgtggataaatcacaggaacctaaaaccgattttcttaatagagagatagatataggtaaacatatagatagaaagatatataatgtatgtaatatgtatgcaatagtattacaattatattgtattacaatatatgtaatacatat

SEQ ID NO: 474515 - DNA, 566 bp, Homo sapiens
ctgtctgcatattgcttcagatcagctgtcgaagatttttgtttgttgcattttgtttgtgcttcaaggtccacagtccctttgagtaaccggctcctaaggccctggctgacacgctcaggttgcgaaagttggtggaaaactgaagcagtgttagaatgactgatgaggaggctgttgtgtttaagggtgaaatgatggcccacaggcatccatggacacctcctaaaggaagaaagtggctttgctctgtgaaggaggatagcagcagggcctggaaatgggagtttgcctccrcttcctcctgggaggttcctcaatcactccgtaaatacagggctgtggcgtgcaaacactaatgcaggtgtggttccatttctaccagcttagagaaggccacatgaaacaaatcagaacataaaaaaagaacaaaatgagaaaaccaaggacaaccaatcagaggtctgggactcaaaagatgtggcgtggttggatatttaaatgatgtcgcacagtgtggacagaaaaagatcacccccgggatggagaaagggggtggtcaatgt

SEQ ID NO: 474516 - DNA, 566 bp, Homo sapiens
ctgtctgcatattgcttcagatcagctgtcgaagatttttgtttgttgcattttgtttgtgcttcaaggtccacagtccctttgagtaaccggctcctaaggccctggctgacacgctcaggttgcgaaagttggtggaaaactgaagcagtgttagaatgactgatgaggaggctgttgtgtttaagggtgaaatgatggcccacaggcatccatggacacctcctaaaggaagaaagtggctttgctctgtgaaggaggatagcagcagggcctggaaatgggagtttgcctccgcttcctcctgggaggttcctcaatcactccgtaaatacagggctgtggcgtgcaaacactaatgcaggtgtggttccatttctaccagcttagagaaggccacatgaaacaaatcagaacataaaaaaagaacaaaatgagaaaaccaaggacaaccaatcagaggtctgggactcaaaagatgtggcgtggttggatatttaaatgatgtcgcacagtgtggacagaaaaagatcacccccgggrtggagaaagggggtggtcaatgt

SEQ ID NO: 474517 - DNA, 651 bp, Homo sapiens
gggctagctggacagtgcagtcagaaaacaaagtgggggacgcgtgataggagcagttgctccttgtaatcccatagttaaattcagtgctgtgagcagcacttagaaaaaagagcatgtcatctatcaggcctccagaagggccgccttctgtgagatgatgtcatcataatggcagagtgtgttaagtcctctgtgaatccccacagggcatttgtcctgcatgagaatcaattacagaaaagataaatggtgcatgagaagtgtcttttggcatatatttcacttctgatacatgttgttctgctgagcaacaaacaatttagataaacctcaaggtcatgtttggaccagagagatgtttttcattagctagagagtgaccatgctgataagagaagcagcagtttgtggaaaactgtaaaacacccgcccttccgggcagccgaagcagcctacctggatcaggctgagagccctggacatcacagaaagccatgttagcattggaaaagcgagagtgacgtctttgcccaccatctcccaacgaaagcccttctgagtgcrcggaatgattatttctgtgaactgtagttatacttcaggcatggactctggagaatacattttactggctcaactttttgtgaa

SEQ ID NO: 474518 - DNA, 569 bp, Homo sapiens
agctgctcttttggccccgtggaagagcacaagtgtggggtagggaacgggggtgacctcagttccagccccaattaatgtctccctttctcctccatgaatcatgggttatatattaaagtgagaccttcagaggcctgcatttggaaacaaatgcagtttgtttgacagtttgatgagcagtttaataagcatatctgatgcttggtagcagagtccgagagacacagaagatgatggtcttgccttcccacagcttctagtccaaggaaaggggcacaatgtccaccttctctctgtgttcatytctatggcatgggaggttgaatctgtagcatgcatgttgattcatctggcaactcttcaaacagaaacctctgtgagctggcaggcttgcctagtggctatcaatgttcttaatggggatccagggacacctaggatctgccaatgccttctaaattagcaaagaaatatcacctatggggttgctttagtgttgtgtattgtattaaagcttaaaacatctgagaacccactcattcttcaaagactttactgtgagcagg

SEQ ID NO: 474519 - DNA, 595 bp, Homo sapiens
taaaaaaataaaataaaaaacaaaaatacttccctgagcagggccaacccaccatattgtatacactaagtaagaagctccattttcatttacgattttagacgccatcacctaggatgttgaatcaattatggacaagtcggaatacgttaaggaagttgttataatgagaattcttttccctaagacttcacttcaactttaatgtttctctttcagatttatctaccatccaattataaaacagaagtgcagcaagtcgggtggaaatggtcttggtacctgacactagccagcgtgtgaacttctcccctctgaatagcatttgaataaaagctgtgctcatttttggagygcaaggtcaaattagagaagatggatgtgaagatttctctgaacaaaggtctaagaagtaaagggagccagtgttctgtatcaaagttcctgggaaagacattctactgatttcgttactacagattcttccacttctctccatcactcagcgtgggatgggccagacatagaaagatgcagtatctgaatcctgtaagaagttcctagggatgggaagaagaacctttctttgggtata

SEQ ID NO: 474520 - DNA, 649 bp, Homo sapiens
cctatgatgtgacaagtatcgggaaagccatgagtcaggaagtcagatttgccatgcccctctcttcatggagctccggggcctggaacaagcgctcttctttatgtgttatttctcagtcagtaatgggaaaatagataactgagtttccctgaagaatcccattcaactcaaccaatgtctacccagcccttagcttgatggcagccagtgtgtttgaggctagatagctggaaagcaaaaaaggaatctaatggtgaatgagatgggaccccctaccttagaaaaagtgcaataagccagggaaggcagacgtgtaaatgactgagatcagcactcagcagaggcacaggcctcaarcaaaggagggatttccctgagtgctgtgcaagagcagaaagaaaccccaaagtgtgatgtgccccatttaccctgggccttgaaggaagaatgacttctccagtaaagaaccgaggaagaacagtccagtctgagtgtacagagtgagcaaagggcaaaggtccagagcatgaaagcgccagacccttaaaaagtatagtcctccccagtcataccactcccagctcattctcattcatcctagacgcgggaacccaaacacgcagctcagacaggagtcaggaaacag

SEQ ID NO: 474521 - DNA, 422 bp, Homo sapiens
agatagctggaaagcaaaaaaggaatctaatggtgaatgagatgggaccccctaccttagaaaaagtgcaataagccagggaaggcagacgtgtaaatgactgagatcagcactcagcagaggcacaggcctcaaacaaaggagggatttccctgagtgctgtgcaagagcagaaagaaaccccaaagtgtsatgtgccccatttaccctgggccttgaaggaagaatgacttctccagtaaagaaccgaggaagaacagtccagtctgagtgtacagagtgagcaaagggcaaaggtccagagcatgaaagcgccagacccttaaaaagtatagtcctccccagtcataccactcccagctcattctcattcatcctagacgcgggaacccaaacacgcagctcagacaggagtcaggaaa

SEQ ID NO: 474522 - DNA, 422 bp, Homo sapiens
agatagctggaaagcaaaaaaggaatctaatggtgaatgagatgggaccccctaccttagaaaaagtgcaataagccagggaaggcagacgtgtaaatgactgagatcagcactcagcagaggcacaggcctcaaacaaaggagggatttccctgagtgctgtgcaagagcagaaagaaaccccaaagtgtgatgtgccccatttaccctgggccttgaaggaagaatgacttctccagtaaagaaccgaggaagaacagtccagtctgagtgtacagagtgagcaaagggcaaaggtccagagcatgaaagygccagacccttaaaaagtatagtcctccccagtcataccactcccagctcattctcattcatcctagacgcgggaacccaaacacgcagctcagacaggagtcaggaaa

SEQ ID NO: 474523 - DNA, 602 bp, Homo sapiens
ctttggcccctaggatcttccagtgcttgagatatttagaaagtctttgttgttcctatactcatctactttctctatactcttagatctttactgtgtttctgtatgatgggatctttggcataagacattccagagtattaagcatatagtggtaggcttcatcagtgctacccaggacctttttacatccaagacagcttaatagcttcaatggataaaacggcactgactcagaatgccagtagtgaggtgtactgggaaagataaacatttaccatcacattgtcccttgacgacaggtgrggaaactggggttcgtggatatgcagcagttacatagtagagatgggacccccacccatcagttctgcctgattcaaattccccactttgaaaggggtatgtgagtgttccatagtgcagaggcccagcaggaagacgggggactgggaatggctcagtcacagattttagcattgctgctggcagttatttatcttcaccacctcctatgtgccaggtgctgtgtaccatgagatagttctactttgggcagattaatgcttgaataaactcattgaaactttgctttcgaccca

SEQ ID NO: 474524 - DNA, 629 bp, Homo sapiens
gagttcagggtagttaatgccttgcctaaagtaaaccaactggaggggaggcagtgagtggagaggagatgaagctcaatcctagagcctccagcctctgcttccaccttctggctagctcgccactaagtccatttaaggtgtcggctcwcactttctgagtgttccattttctcattccttgtgccaattctcatgccaggattaaagttgccaaatatttaggtctcaggagaaggttgtttcacaatagcctctcttatcccctgggcctcctttctcaagaaggcagaaggttcgcagtaagtttggcaaacaagtctagtgtatgttgccaaaccagaaacaattattcctgtctctcttataagctcttcagttaagtctctgaaaatcaaatgtggtgggtaaaagcaatgaataataacgatagaaatacctaatccactggagggaagaggtcattcagttattcatgcgtttatgaacacatttttgagtgccaggaactgtgcaaggtgctggagacataagacagataagacaaataaggaatttacaggctgttagagagtaggatgtgctaaccagaggggagtgcaggttaccagaggagaggtcaggttaac

SEQ ID NO: 474525 - DNA, 615 bp, Homo sapiens
agacttattcaaatgcagaaaactagaaaattggctgagctaggactcagtcaacagccactctaacctccttctatatcatcttctactattgtagaagatggaaagttaaaaaccatctttcaccaattccctttacattaggattcttcacatggcgtaggtttcatcaaactcgtgaggggggagtaatcattccacagcccacatgagtgggctcacacagtggtggaatccctctttgttaytgtttgacgccataggtttcacgtaaggagaaatatgagtcaatgacaatttttacttttttttcaatggatcctggagtttaaaaaactgcaagaaggcactggaattaaatgattaagtttgggtccaggcacagtggctcatgcctgtgatccaagcactttgggaggctgagctggaggctaccagtgtgtaatcaatccacattatatttaaggaagtgtgtttattatgtcttggccttcagaagtattgctccacttgagcccaggagtttgagaccagcctgggcaacacggcaaaaccccatctctacaaaaaatagaaaaattagccaagtgcagtggtatgcacctgtagtcccag

SEQ ID NO: 474526 - DNA, 615 bp, Homo sapiens
agacttattcaaatgcagaaaactagaaaattggctgagctaggactcagtcaacagccactctaacctccttctatatcatcttctactattgtagaagatggaaagttaaaaaccatctttcaccaattccctttacattaggattcttcacatggcgtaggtttcatcaaactcgtgaggggggagtaatcattccacagcccacatgagtgggctcacacagtggtggaatccctctttgttattgtttgacgccataggtttcacgtaaggagaaatrtgagtcaatgacaatttttacttttttttcaatggatcctggagtttaaaaaactgcaagaaggcactggaattaaatgattaagtttgggtccaggcacagtggctcatgcctgtgatccaagcactttgggaggctgagctggaggctaccagtgtgtaatcaatccacattatatttaaggaagtgtgtttattatgtcttggccttcagaagtattgctccacttgagcccaggagtttgagaccagcctgggcaacacggcaaaaccccatctctacaaaaaatagaaaaattagccaagtgcagtggtatgcacctgtagtcccag

SEQ ID NO: 474527 - DNA, 628 bp, Homo sapiens
ctgccaggctagcataaattctggcataccagaaaatccctttgatccttcctaaatgcttgtcttactttgtgccaaatgactaatgatttaaagcagtggttctcaaccctgcctgtatatcagaaacacccacagaacttttaaaaattatctagagaaactgccccacctgacattttgattcagtagcctckggtgtagtttaaaaagctccacaggggagctctttcctttcgctgctgtggctgcagccttgagtatgctcaggcttcagaagaggcttgcctctagtgtcctctgctgtggcaagaagaatatctggttagaccccaatgagaccaatgaaatcaccaatgccaactcccgtcagcagatccggaagctgatcaaagatgggctgatcatccgcaagcctgtgatggtccattcccccgcttgatgccggaaaaacaccttggcctgccggaagggcaggcatatgggcataggtaagcggaagggtacagccaatgcccgaatgccagagaaggtcacgtggatgaggagaatgaggattctgcaccggctgctcagaagataccgtgaatctaagaagattgatcgccgcatgtatcacagcctgtac

SEQ ID NO: 474528 - DNA, 657 bp, Homo sapiens
gctgccaggctagcataaattctggcataccagaaaatccctttgatccttcctaaatgcttgtcttactttgtgccaaatgactaatgatttaaagcagtggttctcaaccctgcctgtatatcagaaacacccacagaacttttaaaaattatctagagaaactgccccacctgacattttgattcagtagcctctggtgtagtttaaaaagctccacaggggagctctttcctttcgctgctgtggcygcagccttgagtatgctcaggcttcagaagaggcttgcctctagtgtcctctgctgtggcaagaagaatatctggttagaccccaatgagaccaatgaaatcaccaatgccaactcccgtcagcagatccggaagctgatcaaagatgggctgatcatccgcaagcctgtgatggtccattcccccgcttgatgccggaaaaacaccttggcctgccggaagggcaggcatatgggcataggtaagcggaagggtacagccaatgcccgaatgccagagaaggtcacgtggatgaggagaatgaggattctgcaccggctgctcagaagataccgtgaatctaagaagattgatcgccgcatgtatcacagcctgtacctgaaggtgaagaggaatgtgttaaaaa

SEQ ID NO: 474529 - DNA, 510 bp, Homo sapiens
ctgtcactgtggaccgctcagcacttaaggaaaagtattcctcaccatcttgagaatttggccagtatgttttggaaatgccttattctaaagtctataccattttcattaatcagagctgacacttctgtaaatgtgatactgagccaaaatctatatggtttcttatgatttttttccctaatggattttgaatccctggaggtcaggggttcatattctccacagcaactggagagctaggacttagataaagtagacattctaacaatgtttgttaaatgcaacttttaaaatgctttaagtagaagcccttacargtaatatctggaatctttttaagtttgaaaatctaatggctatttgtatcagatttatatgtcctggctcttaataacctcctagcctacctgataaacctgtgaaattgcactttcttccagtagataactatgctgttctcaggtgaaatacttcgcttatcccttgccagtccagcctggggaaggc

SEQ ID NO: 474530 - DNA, 312 bp, Homo sapiens
gtcgttccccgtgcacaataagtgaactccctccaatagatgcggtccttatcagtcacaaccactatgaccatctggactacaattctgtcattgctttgaatgagcgatttggtaatgagttsagatggtttgtgcctttgggtctccttgactggatgcaaaaatgtggctgtgagaatgtgattgagttggactggtgggaggagaattgtgtccccggacatgataaggtcacttttgtctttacaccttcccagcactggtgtaaaaggactctaatggatgacaacaaggtgctatggggcagct

SEQ ID NO: 474531 - DNA, 573 bp, Homo sapiens
ggaaaaatacaatttccttggaattttagaatgtggttatttgggaaaaacaaccattttcttttttaagatcatcatacggttttcatgggaactcattwtttcatcaaacatttagtgcccatacaccacagggcacagagctgggtggggaatagggatgagcagatgaatacgatggttcctcttctacaggagtggagctccattctatcccagcattcagaacacttatcacagcttttaattaccttgttcacttgttatatatttttgtctctccactagactgtaagcttcgtgaggacatgtaccatgtcacgctgtgctcactggtgtgtctcatctagcatatgctggggactcagtactgctgtttcagtggatactaagatacatgtaaacacaaacagttcaagtataaaatatgggatggcacaattgtacccaaaattgggtagagaaaaaagttataatttattgttgctagggtgaatttttaaaaatgtttttcaaaagtaaaagaggctcattgcaaaaaatttaggaaatttacacatacaaaatgaattt

SEQ ID NO: 474532 - DNA, 573 bp, Homo sapiens
ggaaaaatacaatttccttggaattttagaatgtggttatttgggaaaaacaaccattttcttttttaagatcatcatacggttttcatgggaactcattttttcatcaaacatttagtgcccatacaccacagggcacagagctgggtggggaatagggatgagcagatgaatacgatggttcctcttctacaggagtggagctccattctatcccagcattcagaacacttatcacagcttttaattaccttgttcacttgttatatatttttgtctctccactagactgtaagcttcrtgaggacatgtaccatgtcacgctgtgctcactggtgtgtctcatctagcatatgctggggactcagtactgctgtttcagtggatactaagatacatgtaaacacaaacagttcaagtataaaatatgggatggcacaattgtacccaaaattgggtagagaaaaaagttataatttattgttgctagggtgaatttttaaaaatgtttttcaaaagtaaaagaggctcattgcaaaaaatttaggaaatttacacatacaaaatgaattt

SEQ ID NO: 474533 - DNA, 607 bp, Homo sapiens
gttttttttcctcgtcacatgcaccatcttgtggtgacactaggacattttaaaccattagttttgttttcattgaggatgtaacaagcacacagtttatgttaatcctccactatctgcattaagttatcaatcagtggtgtacccaaacggttattacagtacagtgagatccctgacttaagcaaaatamgatatttaaacattcattttagtggttatttactaagaaaatacctaaatcagacacactttcccactaacaaatggatggctatccaaaagttcatttgcaagttggaactttaaactcaatttttatggaaaatcaatgttgtaattggtaggtatgttccaaggcagaccaagaaagcaaattttctatcctagaaatactgtactaagcaatgtaatggaaaaacacaacacaacaaaacaaaaatagaacatactattgtggtctgggtcatcttttaaaaagtcaaaaaatatatgaaaacacagacgatgtctgagacagatatatacagccccaaggccagacttgcctggctgaactcagcctggctctggactcagagttcctcctgaggttctgggtaaagca

SEQ ID NO: 474534 - DNA, 450 bp, Homo sapiens
tttctctgacccacatgctcctgggttttgtgatctctctggctgctcttttccagtctcccttacagatatctcttgttcacaaacattgatgtcctctagagttcaaaaactaggctctttttacctcacacacattccctgggcaatctcattattgtctttttgttgaagatttccaaacctgtgtctacaggccagctctcctcagtctcagacccatacgcccacctgcctgttcagtgcttacactggcgtaagaagcagactctttrgtgagtcggagggtatgtggcagctccttctgatggtgcccagtttctccattgagtaagaggcaaggccatgtttaggggtgtgggagttggtgacagggtagcaggtttaagagactagtggacatttgctgtatcttcttgggagtttggaattaggagaatgtagaagcca

SEQ ID NO: 474535 - DNA, 450 bp, Homo sapiens
tttctctgacccacatgctcctgggttttgtgatctctctggctgctcttttccagtctcccttacagatatctcttgttcacaaacattgatgtcctctagagttcaaaaactaggctctttttacctcacacacattccctgggcaatctcattattgtctttttgttgaagatttccaaacctgtgtctacaggccagctctcctcagtctcagacccatacgcccacctgcctgttcagtgcttacactggcgtaagaagcagactctttggtgagtckgagggtatgtggcagctccttctgatggtgcccagtttctccattgagtaagaggcaaggccatgtttaggggtgtgggagttggtgacagggtagcaggtttaagagactagtggacatttgctgtatcttcttgggagtttggaattaggagaatgtagaagcca

SEQ ID NO: 474536 - DNA, 556 bp, Homo sapiens
aacctatatactcatctggcagagttgttttgaaaatgataaatcgtgtatgtaaagtacctaccacagcacctagtaagctctcaagaaatagaccttttgtcatcattattgggcatgataaattgaactctgccttgtagtgtactctaaaatatcctaygttaaatacattcagacagttaatttagaattccagttaattgggtgctggtaaaataagttgtattgtgtttcataaaatcatgactaaaattaaggcaagtctatagatcactatagaacattaactaaatttttgaaacatttcagtgtactgcccacaactcttattttgaaaagtttttgaaatccttaattcacagccatacttaatagttgatttctgtttgtgtagtagtcatccctatggtctttcagaacttggcagttaatcctcctgggttttgactagttcagtgttttaacccctaagttagctttgggagctaggacacaagttcacaagtgtggacaggaacattaaactttctgccagccgaaatctgtcaggagc

SEQ ID NO: 474537 - DNA, 556 bp, Homo sapiens
aacctatatactcatctggcagagttgttttgaaaatgataaatcgtgtatgtaaagtacctaccacagcacctagtaagctctcaagaaatagaccttttgtcatcattattgggcatgataaattgaactctgccttgtagtgtactctaaaatatcctatgttaaatacattcagacagttaatttagaattccagttaattgggtgctggtaaaataagttgtattgtgtttcataaaatcatgactaaaattaaggcaagtctatagatcactatagaacattaactaaatttttgaaacatttcagtgtactgcccacaactcttattttgaaaagtttttgaaatccttaattcacagccatacttaatagttgatttctgtttgtgtagtmgtcatccctatggtctttcagaacttggcagttaatcctcctgggttttgactagttcagtgttttaacccctaagttagctttgggagctaggacacaagttcacaagtgtggacaggaacattaaactttctgccagccgaaatctgtcaggagc

SEQ ID NO: 474538 - DNA, 520 bp, Homo sapiens
tctatttgcatgtagccagagcaaaaaatgatttctttcccttaagttactattattataaaagggacgataaacacatgagtcattataccacaagtatagtgtggaaaggactctaaacataggctcactgaagaaggtggcatttgggccaggcctcaaaataaggcagattcagatttgaactgaatagatggagagtcatttcaaacagaagaaatgacataacatgtggaggcaaaaaaaaaatcataaaggttacataataaatgctgactattcgcttagctggatacagatgatagaaaggagagtggcagatgagtgtgagccattggccttgtgtgagcatgtacttattactgtgcaacaagtaaggaaggaagtcttgtgctagagcagtagcagtgcaaatagcagggaaggagtrtctgggtgtgaagggaaaagatgtcagagatgactgaggcctcaaacccaaaagactggcagaagggcaagtgttaacaggaagcgagaa

SEQ ID NO: 474539 - DNA, 498 bp, Homo sapiens
aatcctattttctatgacttaaagccaatcacaggctgggcgtggtggctcatacctgtagtcccagcactttgggaggccgaggcaggcggatcacttgtgctcaggagttccagaccagcctggccaacatggtgaaaccctgtctctactgagaaaatacaaaaattagccgggcgtggtggcgggcgcctgtaatcccagcttctcaggaggctgaggcagaggaattgcttgcacccaggaggcagaggttgcagtaagccaagatcacaccactgcgctccagcctgggcgacagagagaaaaagaaacttgtcrgcgttctagattgaccagttttcctcaaggtcaggtagttaggaagaaagagtgcagtttgcagttgtgaaaagtctgataatggattctttttttcttttttatgcgtgaagggattctggagtacgtctggtctaaaggccgatttcgttttaggaactttggatcagaacagtc

SEQ ID NO: 474540 - DNA, 565 bp, Homo sapiens
gtcattacagcactattcacaatagccaaaatatggagtcaaccaaagtgtccatcagtggatgaatgggtaaagaaaatgtgatttgtatgcacaatggaatgctatcaagtcttaaggaaggaagtgttggcatttgcaacaacatggatgaacgtggaggacattatgttaagtggaataagccaggcacagaatgacacatactgcatgatctcatatgtggaatctttgtattctttagttcaagattctcaatgtgggtgctgttgacacttgaggctggaggattctctgtggtgtggccatcctctgcactcatagggtgtcgagcagcattcctgggctccacccaccagatgctggccacatccactctccaatgataataactcagaatgtctccagacattgcaaatggctcctgatggtttgaaagtcaaagagggtccagtacccaagccttaacgtacgtttcaaaatgactttgaaagaaagtcagaaaaaaatgcagcatctatasggaccagatgtccacttaggagcccttggtgagagagaaaga

SEQ ID NO: 474541 - DNA, 535 bp, Homo sapiens
catttcccaattttccttgcagttcaaatcgtagtacatgtgagtcccagccctggagtgagtagtcacttgggggacaccttgcagttaggtgtgaccacatgactaagtttgcactatatgggcagaagagatgattacacctaggccttaagatagtgggaatgcggcaggctgagacatgagaattgcttgaacccaggaggcggaggttgcagtgagctgagatcatgccactgcactccagcctgggtgatagagtgagactcaaaaaaaaaaaaaaagatagtgggcatgtctcatccttactctttccccttcccttgaaccagaacatgatcttgcctgagacctagctttgccatgctagtaaaaatgatgccctaagagatgacaggaaaatgcaaagaacctggatccctgaatgaccttgtggagcagagtatcctgmcaatctgcaatgaatacctcaagtgagaaagaaataaatttgccttttctgagagactaaatgttgcattacatctattctaag

SEQ ID NO: 474542 - DNA, 673 bp, Homo sapiens
gcatttggggattgaaatgaacagaggtcacagcagaaagacattgaaacaatctaaatagggctaaagcagtttgctgattaaaagagagggcttgccaggcatccaccctgcctagaagcctgtgctgaaccaggagaggtgactccatgactcaggacctgggcagtgctgatgggaatggatcctggcctttttgaccccagcagaatcctgcttcccttcccaaggagcaaaaaaatataaaaaggcatagctattattgagtaatgctgctgcccaggctgcactgggacaaacatcactaatcaatcacgagtgcacccatcacctccaggccagaayaaggtgtcggaattctcaacacagtgctcccaagagccattactgatagcttgggatccacataagtggatcactggtctcctaagtgtcaagtgcttaataaatccatggcacaacctatccctgagttaaggattaacttttacttctgaaaaagaacaaaaactcagcatggttgaggaattcagccaagttcacacaggtagtaagagctgggctaagaatttagaccttcctaggcctggcttccaattccttgctcttgagcatttatcatgctgccagcttccaatgggcatctgttccaccatgttgtgggcattcattg

SEQ ID NO: 474543 - DNA, 617 bp, Homo sapiens
gcaggcctgtcctctgtggaggcacaccggctctttgtcgctcactggcagaagtgtcagctcacattcatcttgctctgcctgtaagagtcccacgggcattgcctccccaagtgggacccattttgtggcacgtggcccggacgacacgtatccctgggcttgacatacacagacacacaggaaacatyggccatgggacatgcctctccccctgcagtgaggagcatctaaggatgcgctctgcaaattccacgaaaggccccgggtgcggtatttcatggtgcagaggtgaagttcctcctccctcctgtttcgttgtctcgcagttttctacgggccagtccctctgttaccccatcccacaggcgccaatggaaactctgagccccatgcaagctcccatggagacccaaggcccagcctctctccctgcccagccctccacccccaggcccgcaatcatcagaaagcagcacttcccactgcagccctgccttgacgtggcccacaactcactccatccagacagtcaggggggtaggcagtgtgtatttgtgtgtgtgtgtatgtgtgtgcgcgcacttcttgtgctgaatgagtggtattcacgaaca

SEQ ID NO: 474544 - DNA, 448 bp, Homo sapiens
ctctccccctttctgttctaccttgggaagctcccaaggtcacctaccaaggtcacctttgaaactcccaccgttgaaactatcctacttccagaggccccagaagaataggcatgttggcaactccccaagtcagggatcagttgccaccagctccagtccaagcagaacagggcattgtgaacctccagctccaggcagacacargggaggggggagattgtgggaggtggtcacatgaccgtctgggctgagacccaggggcacagagttaattccttcacgttcacatggccctacattccacagccgcctctcccagggtgctggccatcagtattgcccccggcgcccccagccacgcaaacctgttctcagatgcacccagacctcctggaactgcagctctggggttccaagtgctcactcctcccctcaaaaacaccac

SEQ ID NO: 474545 - DNA, 448 bp, Homo sapiens
ctctccccctttctgttctaccttgggaagctcccaaggtcacctaccaaggtcacctttgaaactcccaccgttgaaactatcctacttccagaggccccagaagaataggcatgttggcaactccccaagtcagggatcagttgccaccagctccagtccaagcagaacagggcattgtgaacctccagctccaggcagacacaggggaggggggagattgtgggaggtggtcacatgaccgtctgggctgagacccaggggcacagagttaattccttcacgttcacatggccctacattccasagccgcctctcccagggtgctggccatcagtattgcccccggcgcccccagccacgcaaacctgttctcagatgcacccagacctcctggaactgcagctctggggttccaagtgctcactcctcccctcaaaaacaccac

SEQ ID NO: 474546 - DNA, 643 bp, Homo sapiens
cccccacggataccaagggatgtttatctgaagttcacatttaactatgcattctgtatttttatttgctaaatctggcaacactactcagttggctactttggaacgtatcgactaagttttgtgggtcttttattgtcatgccaggtgggggaaatctgagaagyggtaagaattttgtgctttttcctgaaaaaaaaaaaaaaaaaaaaaaagaccatcgagtgagacgtaatttttttttttgagatggaggcttctgtcacccaggctggagtgcagtggtgcaatctcggctcactgcaacttctgcctcccaggttcaagcaattctcctgcctcagcctccagaatagcggggattacaggcgcccaccaccatgcctggctaatttttgtatttttagtagacacagggtttcaccaggttggccagacttgtctcaaactcctgacctcaagtgatctgcctgcctcagcctcccaaagtgcggggattacaggcatgagccactacacccggcgagagagagacataaatcttaaatgaattctgaaaagaagtataatttgaggtataagtgcatactcaggaaataacaaccctcaatagagaaagagctcaaaaggaagcgaggagctg

SEQ ID NO: 474547 - DNA, 643 bp, Homo sapiens
cccccacggataccaagggatgtttatctgaagttcacatttaactatgcattctgtatttttatttgctaaatctggcaacactactcagttggctactttggaacgtatcgactaagttttgtgggtcttttattgtcatgccaggtgggggaaatctgagaagtggtaagaattttgtgctttttcctgaaaaaaaaaaaaaaaaaaaaaaagaccatcgagtgagacgtaatttttttttttgagatggaggcttctgtcacccaggctggagtgcagtggtgcaatctcggctcactgcaacttctgcctcccaggttcaagcaattctcctgcctcagcctccagaatagcggggattacaggcgcccaccaccatgcctggctaatttttgtatttttagtagacacagggtttcaccaggttggccagacttgtctcaaactcctgacctcaagtgatctgcctgcctcagcctcccaaagtgcggggattacaggcatgagccactacrcccggcgagagagagacataaatcttaaatgaattctgaaaagaagtataatttgaggtataagtgcatactcaggaaataacaaccctcaatagagaaagagctcaaaaggaagcgaggagctg

SEQ ID NO: 474548 - DNA, 549 bp, Homo sapiens
taccacagtttgcttggtaaacccttctgtcatacaacaaaatacattctttctcatgaatgattgctgaatattcaccacgagacctagactcggaagcatggaaagtgtgcattggaactttctcccacttgcatggatttggacatgtgctaagaacctgaaactgcttcctttctggaactcaattctgtcartgtgcttactgctgagatgatctgctatcttaaactgagaacacacaataacactgatccacagaaaaaaggagaggtcaccatctccctcataagatatgttgtacatcaggtcatgctgtttgtcacgttttagccatcctaagaaaggacagaagctgcattccattctgcagtcttggcaaatgactttcttctgtttccacctctattttgccttgtttatttcatctccattatccctctttcagtcatgaatcatgacttttttttctacagtagtcagagttttgtaggacaaactcaggtctctctggcctctcagcaagcttcagggcttcatgcatgcctg

SEQ ID NO: 474549 - DNA, 603 bp, Homo sapiens
ctgggcacagtccagttctcagcagtaatgacagaaatgaaggaaggaagctcagaatgagtgcacgggggaaatgggttttgctgatgcatttccagggccggccgtactctttgttttggcacacttttcctgacaaacagccagtgttctcaacacataaatactagtccacgttaacaacaatagcatatgagaccgctctccgtaaagatgccagattggatgcaaatggactggaaataccttggagggtttcacaaaaataagacaaagggcaaaggaactttgccaaaggagatggagagcaattctttaaagwtagtgggagggaggaagcaaagagctcataaatacaagcctcttaaaatgggacgcatttgcctcgcgcctactgggtgtctgcagctcagcttggtgccccacacaggacaccgactttaagtggctgcctttgcaaggctgagaggccatgagggttgatgcctgaagtgtcagcgccatctagtggaaacatggggcatggccgctttggacggcctcagcctaaaatgagaggcagagagacacgctctatttcgcatctcacaatgcaagatgaga

SEQ ID NO: 474550 - DNA, 472 bp, Homo sapiens
ctggaggaggagcagaagaaagcactgtatggtttggaagctgcgggtaattcctaaaacacaggctcagtgttgtcactgtgtgtgctggagtgcgggtttctgtcctctctcagggcactgcctcttctccctgcccacctgtgcttttcctttttcctgtctggcaccaggcatccatttcttcttagccccaggcagcgtcaggtcactgttacttgccgtgtgtggctgtgtggagcggcgggttttgtgaaaggccccgttgcyctttctgaaacgctgttgtggtgctgagtctggactcctgtcccaggtgctctagaatgtgggggcagcagatgtcccatggagggcttgcttggtgaccacctcaggccctggcaaccacacagtctctgtccagcagaggcagcctaggcagtgtacagtgagtgggtatggccatctgccgatgaaactttatttatgg

SEQ ID NO: 474551 - DNA, 544 bp, Homo sapiens
ctgaactcattcacaacttagcgtttcccaacttgttgatgttttcccattgcatgggagagcactcctgggtggagagggcaggctgcttcctggaggaagcccaccagccagggccaccagccagggccccaccatccatggccccacaaaccagggccctccctctccaagagggaccaagctcctggcaggccagtcaggcagctcaggatgaacccgcacaaaagcaccttggcttagmaagagtgaagcaattagcatgccaagaggcaaaccccagcaggctggacaaaagcagacgccacaccacaccaagccctgacctgggggaccagaaaccataatgggagctggctggggacgccaaggcagaaagcagtgatgactgacctcccacacagatgccctgtaagggtctggcgtctctgcggcggctggagcctgagggaagccttacagcccagtggctacaagcacagcagctaattgggccagtcacttccagcccctgcagatcggcccctgcatccctaggacggga

SEQ ID NO: 474552 - DNA, 602 bp, Homo sapiens
gggatagttccaaaggcagccagggatcaggactattcacacccctggagggccagggggacatcacacccagggggaggcctccaaaggctgggcttagttttggcctaaaccctgcaggttcctgcccggctgacctccctctgttaggcaccaacaggatgtctgtcactctgcttagcattagcacatttcaccctcaaggtgatactaccctactacagataaggaaactgagtcccagagaggctggaggaaccagggttatccagtgggccaggggcagaactgggaatgaacccaggactgccagactctgaagcccaccctcttcactgccttgcaccctgttggccatgttcggggtttctactccaagctgaaaatgccctgagagcaagccagcttaccagcacccaggggagggtgtgcacctgcctcttctggtgtcttcaaataaggtgtccatttctcactgatgcaatgcaggcttgactcattccaggtactggaggcacagcagtgtccagccttgggagtttgggggaagarttaccccaagaagcccccatcctggtgacatctgtgaccccgcatggggt

SEQ ID NO: 474553 - DNA, 605 bp, Homo sapiens
cctgtgaatgtggcctcccatggcagaagggactttgtagatgtggatgagtcgccgacctttggtggagatggttctggattatctgggggcgcacagtcaccacaaaggttctgagaaggagatggcaggaaggtcagaggaggccatgtgagggtggggttagaggtcacagtgacgtcattgctccctgggggccrcaagccaaggagcacaggagcctcaggaagctggaaaggcaggaaatgggtctcccccttcccggagcctgcagaaggaacagccctgcccacgccatgagctcagcccagggagacccaggctggacttctgaccccagaactgtaagagaatacgtttgtgttgttttaagccgctgtgttggtggtgagccatgggaaacaaatgcagaggtcaccaaggggctccgtggcctgccctgtgtgtggcctcgctcccacccccaccctgcaggacaccttggccctgacctgcagggcagggaggcctgtgggtggggcagcccggcgtcctcagtgtctgtgagcagctcggggcacaaggaggcccactccggaggccgagggaacccagagcctcagcag

SEQ ID NO: 474554 - DNA, 605 bp, Homo sapiens
cctgtgaatgtggcctcccatggcagaagggactttgtagatgtggatgagtcgccgacctttggtggagatggttctggattatctgggggcgcacagtcaccacaaaggttctgagaaggagatggcaggaaggtcagaggaggccatgtgagggtggggttagaggtcacagtgacgtcattgctccctgggggccacaagccaaggagcacaggagcctcaggaagctggaaaggcaggaaatgggtctcccccttcccggagcctgcagaaggaacagccctgcccacgccatgagctcagcccagggagacccaggctggacttctgaccccagaactgtaagagaatacgtttgtgttgttttaagccrctgtgttggtggtgagccatgggaaacaaatgcagaggtcaccaaggggctccgtggcctgccctgtgtgtggcctcgctcccacccccaccctgcaggacaccttggccctgacctgcagggcagggaggcctgtgggtggggcagcccggcgtcctcagtgtctgtgagcagctcggggcacaaggaggcccactccggaggccgagggaacccagagcctcagcag

SEQ ID NO: 474555 - DNA, 547 bp, Homo sapiens
tgtgctgagttgtcaagactgtgtattggctgggctcagtggctcacacctgtaatcctagcactttgggaggctaaggtaggaagatggcttgagcacaggagtttgagatcagcctgggcaatatggcaaaaccctgtctgtacaaaaaaaattagccaggcgtggtggcacacacctgtagtcccagctactcaggagactgaggtgggaagatcacttgagcccggaaggtagaggctgcagtgagctaagatcatgccactgcactccaccccgggtgacagagcgagaccctgtctcaaaaaaaattgcctattaaggttataagcaaacaacatgaaatagtgttatraatacaaaatgaatgaacacctaccactttgtgtgtgtgtgtgtgtgtgtgtgtctaccatatgttcctttttttaaacttttaagttcacgggtacatgtgcaggtttgttatataggtaaagtgcgtgtcatgggggtttggtgtacagattatgtctctagccatcctaccactttttaagggtgacaa

SEQ ID NO: 474556 - DNA, 549 bp, Homo sapiens
taaaccagcgataaggccagcaatctggggcacgcaggaagggggtgggggtgcagaggggggtcttttggtggctgataacacagtctctacagcacagtgcccagcacagagtgaaggcycccagtggctgtaaccatgggagcatttaaacacactgctttccctggctctctgtttcatgaggaggagattttgtctccccagtgaaatgccatctctggagtgtgttctgatttctgtgtctatcggctgttccccatccctgcagaccccaggctctaagctatgggggtcctggctcttgccttctcgccagtctacccagctccagatttcatcagcccccgactcacgcagcccaccccacccacatccccagcccacggcctccactcttgccccctagtctcccaccctactctgaccctcctccagcccctcccatgagctgcccaaggactccacgtcgtccatggccactggcaacactctgctcagaagcagtcatcggctcttccttccacagaatagcaaccgctttctgat

SEQ ID NO: 474557 - DNA, 425 bp, Homo sapiens
caccaggccagagcctcagaaacccctcaagcacatgaagctctattgcccgcaggacctttgcacctctgggcctgtccctagaatgctcatgccccctcttcaaatacctgactccgtgcagatctcgccccagaaacagccaactgcagagcagctccagcctctaccctccacatgccttgactctccctatatgcttcctgccttctgatggttgcgggggtactgagcgagctccctctgtctcctcacacgagaatgtcagctccttgagggcagggccctcgcaagcctcgccgccgaytcctccccagtgcctacaaccacagcaggtgctcaacagagcctggatgagtgactttacataaattcccactgaccttcacgaggaccctgcagggcaggtctcatgctccctctac

SEQ ID NO: 474558 - DNA, 536 bp, Homo sapiens
gaggcttcatgctgtgctcgaagtaaaagcagagctccttctcctggacttctcagccctggggacctggtccctgcctgccttgcaggcctctccccacaccccactcagccaccaggccagagcctcagaaacccctcaagcacatgaagctctattgcccgcaggacctttgcacctctgggcctgtccctagaatgctcatgccccctcttcaaatacctgactccgtgcagatctcgccccagaaacagccaactgcagagcagctccagcctctaccctccacatgccttgactctccctatatgcttcctgccttctgatggttgcgggggtactgagcgagctccctctgtctcctcacacgagaatgtcagctccttgagggcagggccctcgcaagcctcgccgccgactcctccccagtgcctacaaccacagcaggtgctcaacagagcctggatgagtgactytacataaattcccactgaccttcacgaggaccctgcagggcaggtctcatgctccctcta

SEQ ID NO: 474559 - DNA, 443 bp, Homo sapiens
ccctcggtagcaggagtaacaccaggctcacctttgcacacgccccagggcctcatgtgcaaacagagcgcatcccataactgcttgttccatttaattctcttcctcactgtgcacgtgtgtgaatgattaagcattttaaaggtacaccgtatctttgaaggaattaacttccaagaacacagcacattctctcacgacaaaacccagctaggtgacaccctcttaaaagctagtgagctgctgtaaaggtggccttttctctcagctatttaaaagcatgacggctgaggcaggcacatctggctgatgcacaagctgttacagtggctctagtgactggttttggaacacaaaactaactcaytatagagattagttctaagagaaaacaaaatgcggcccacagccaacaaccctctaccagcccttccaggaggcag

SEQ ID NO: 474560 - DNA, 529 bp, Homo sapiens
gccctccctcacttacaggcagggaaactgaggcccagccaatgggagccctgtcctgcttgtctcccattcgttaagagcctctcaaggtctcctgggtcccagtgctgggcgggcaacagcctgcctcctccaggtacttgccctgacccctggtgctccatgcaagaaacaggcactgagatacccaactaggcccgtggaggcaccgaggcytcccttctgcccacgcccagtggtcctgccccatgggccggggtctccctctagagcagacttctgtaaagggccagacagtaaatatttttggcttccatggccacgtggtctgtcgtctactcaagggtagtgcaaaagcagccgcagcagtatgtaaatgaatgggtgtgtctatgtgccaataaaactttatttacaaagttaggcagtgggccagaggtgggttttttgttgtcgttgttctgtttttttgagacagagtcttgctctgttgcccaggctggagtgcagtggagggatctcggctcac

SEQ ID NO: 474561 - DNA, 566 bp, Homo sapiens
gaatcacagctcttccctgagcctcggtgcaaggctgaggttcactccaggggtaaccgcaggctaagaaggacccaggagtgcagggactaggggtccaccccagggcatgggcttcccagagcccccctcagcctccacagggagggggtgctcagagggggcataaggggtgacacgagagccctgactcaggccagggttggggttaacgcgtcagtcacacgggcgtgctgtctgcaggcgactggtactcattcccggtccagctcctccccagcaggctcatctccaacaggcagccagcaggaaccttccggggcgtggagccctgtttgcttcacccacctacccactgatgttggggagaagccccctgcgatgttcgggcaggtgctggaacggccctggctctgctggcygcccggggaaggagctgctgggggatttgggaacttcccactaccatctctagcaaaccagggagggggcagccgccctgcctggggggtctctggagcctgtcaggggaccacccccaaaacgtcagtgcatgacatacccag

SEQ ID NO: 474562 - DNA, 596 bp, Homo sapiens
acctggaccaattccttgattttactggtagggaaactgaggctacggcgggattaagtagctggacggtctgagggtggcagaggcaggatctgagcmcgggatctcagcacctcctctccatctccagtggctttctcatggcaccacagctgcctcaaatcgaatgccttcacctggcgggccagaccttccaagaacagaccccagctgcatttttggcttttcctaccactgccttcttctgaaactatcagtcctgcagggcgacagactagatgctggctctctctgacacacctggcctcgagtgctggctccactagctgggcgaccctgagccagacactgagcctctgtaagtctctaggaatcgcaggggcactgcacacaacgcgctcagcacgcagctcgatacaccgttgtgaccgttgcttgtgactgttgctgctgctgccaccctcgccactcagactccactctgcctcctccgctcaactctccgcttaagtgagtccctccctaagagaggcttgccccatctcccactatggaaatcacacccatgagacaagatgcacccacaaatgccagcc

SEQ ID NO: 474563 - DNA, 651 bp, Homo sapiens
tgcatttttggcttttcctaccactgccttcttctgaaactatcagtcctgcagggcgacagactrgatgctggctctctctgacacacctggcctcgagtgctggctccactagctgggcgaccctgagccagacactgagcctctgtaagtctctaggaatcgcaggggcactgcacacaacgcgctcagcacgcagctcgatacaccgttgtgaccgttgcttgtgactgttgctgctgctgccaccctcgccactcagactccactctgcctcctccgctcaactctccgcttaagtgagtccctccctaagagaggcttgccccatctcccactatggaaatcacacccatgagacaagatgcacccacaaatgccagccttcagaagccacacaactcaagtgctcatcaccgtccagcacagggcctggcacagcaggcacctactcgtgtctgacggatgaatgaagagatgggaaccttgctttcttgtcacctgtgtctctcttctggttccaccccaccccagaatctgtccctgacagctccttaccactccatgcaatgggtcttcctgaccaggccacggacaggcaccaaagcctgtccacatggcccagtcaccatccagtgcctgaatctggcc

SEQ ID NO: 474564 - DNA, 649 bp, Homo sapiens
accaccttgccttctctgagatccacaggggtcaacactgaggccagttccctccattcctttctgggagacctgaggggccttttcacaagtcagggaccatgaagcctccacctacaggggccaaagctgaaaagcagatgtccccacaacattcagagccaaggcaagggtccaaatggacgcccacatcccatatctaaatatttaaaattggccgggcrcggtggctcacgcctgtaatcccagcactttgggaggccgaggcaggcggatcacgaggtcaggagatcaagaccatcctggctaacacggtgaaaccctgtctctactaaaaatacaaaaaattagccgggcgtggtggtgggctcctgtagtcccagctactcgggaggctgaggcaggagaatggcgtgaacccaggaggcggagcttgcagtgagccgagatcgcgccactgcactccagcctggcccattagggaatcatgataggtttaaagcagatctttaaggaaataaaaccagagatgatagaaacagaaccattttgagataattagaagtcaaactgcccaaaatactaaaaggtagcacttactagccatgagccttgagtctacttaacctctctgggcctcagtgtttgc

SEQ ID NO: 474565 - DNA, 533 bp, Homo sapiens
ggctggggtggatgggcacagacattaccaagaaggttctgagagtgggtgtgaggggacagctctcagggaggcaggtgtaggctgggcaggtactcaacacagtgtctgccgcacctaggaaaaggaggagcactagaagaagagtccagaaagcctgggatttgaggaggtttccttccccagaggccctctgagctggggttttcccagtagattcctagtcctctttctcaggtcattccagctcgttaaagattcaaatgaaggtctggaagcccagggtractgttccagagctcacaaatgctcaggctggttcccacgtgctcgtcccccagacccccacctccaggaactcattggcgtatgccttccttccgcggcagctccttttcctctttgtgccccctcactggggctggagggctgggttctgattcaggtaggagaagaggcatgttgaaacatttgcatgcaagacagacgtacaacattgtagggagagcaaacaattcactgagtctatctct

SEQ ID NO: 474566 - DNA, 533 bp, Homo sapiens
ggctggggtggatgggcacagacattaccaagaaggttctgagagtgggtgtgaggggacagctctcagggaggcaggtgtaggctgggcaggtactcaacacagtgtctgccgcacctaggaaaaggaggagcactagaagaagagtccagaaagcctgggatttgaggaggtttccttccccagaggccctctgagctggggttttcccagtagattcctagtcctctttctcaggtcattccagctcgttaaagattcaaatgaaggtctggaagcccagggtgactgttccagagctcacaaatgctcaggctggttcccacgtgctcgtcccccagacccccacctccaggaactcattggcgtatgccttccttccgcggcagctccttttcctctttgtgcccyctcactggggctggagggctgggttctgattcaggtaggagaagaggcatgttgaaacatttgcatgcaagacagacgtacaacattgtagggagagcaaacaattcactgagtctatctct

SEQ ID NO: 474567 - DNA, 590 bp, Homo sapiens
tttgctattcctcaaaacctaaaagtggccaggtgtagtggctcacacctgtaattccagcactttgggaggccgaggccggaggattgcttgagctcaggagtttgagaccagcctggacaacatggtaaaaccctgtctctacaaaaaatacaaaaattatccaggtatggtgatgtgggcctgtagtgccagctaccaggaggctgaggtgggagggtcccttgaggccaggaggttgaggctacagtgagctgagattgtgccactgcactccagcctgggcaasagagtgagatcatgtctcgaaaacaaacaaaacacccaagaaaaccaaaaacctagaagcaataagggaaaaagattaataaatctgataagacaaaaagttgtgtattagtttgctaggtttactacaacaatcacaggctgggtggcttaaaccaggggttcccaacccccaggccgtggactggtaccagtccgtggcctgttaggaatggggacacacagtgggaggtgagcagcaagtgagcattactgcctaagttctgcctcctgtcagatcaacagcagcattagtttcccat

SEQ ID NO: 474568 - DNA, 532 bp, Homo sapiens
ctacctaatcttaaagacaatatttaatagagacatttctacattatcatcaataattaaccragagaaaatgcttctatttatattgggtctcttattatcataaaagtagtcttaaaaggctgatttaaaattacatgagctaatacaagcctaaaaggacaatgagacaaaggtccaagtcataatgaatggtttgtatgatgactggttttgttctttaagtctatttcttatccaatgacacataatgacacaaacatatccagatagtgttcttgcttccttgtaagttgagaattcctttcattaattcaataacaataataggatgatacactaaaacttaaaaatctctaagaatgcaaggaactgactagccagtttcaattgtgctacaaaccaggataaacctcactcgtcaacaccagcgcttttcagaactttgttttcatgacaaaccagtgggttttccaggtataaagttagcatcatatatctaatgactgttaaaaagaaaaggagtagaatt

SEQ ID NO: 474569 - DNA, 532 bp, Homo sapiens
ctacctaatcttaaagacaatatttaatagagacatttctacattatcatcaataattaaccaagagaaaatgcttctatttatattgggtctcttattatcataaaagtagtcttaaaaggctgatttaaaattacatgagctaatacaagcctaaaaggacaatgagacaaaggtccaagtcataatgaatggtttgtatgatgactggttttgttctttaagtctatttcttatccaatgacacataatgacacaaacatatccagatagygttcttgcttccttgtaagttgagaattcctttcattaattcaataacaataataggatgatacactaaaacttaaaaatctctaagaatgcaaggaactgactagccagtttcaattgtgctacaaaccaggataaacctcactcgtcaacaccagcgcttttcagaactttgttttcatgacaaaccagtgggttttccaggtataaagttagcatcatatatctaatgactgttaaaaagaaaaggagtagaatt

SEQ ID NO: 474570 - DNA, 557 bp, Homo sapiens
atccaagcatatggctatcctggagaatgttccatgagtgcctgcagtcattgggtggggtgatttaaatcatcacccaagtctcagacttacccataagtggcataagtacaaacagatccaaaggagcacagcaaagactgtgaaacaactgaagctggaatccacccacagaagatgagacaagactttctcactgaaaagaactgggaattctaacaggactcagagaataaaaaacactcagtatatactcttctgcttgcatattctttcattcagcaggattttgagatccatccatgctgttgtatcaataattcattccttttcactgctgagtaatatttcattgtacataccacatttcatttatcctttcaccttctgaggaatattttggttgcccaagttttgagcttttatgaacaaatctgctgtcagtakttgtgcaatagtctttgtctagacatgtctttatttctctttggtaaatacataggaatggaatgactgacatatatggtcattgtgtatttaacattttaagaaaattg

SEQ ID NO: 474571 - DNA, 586 bp, Homo sapiens
agtagagaccagcatctctacagagacaggagaagatgggaccaaaatcccaggataatttattctccacttttccttcacaactcagttaaagacttttccttctctaagatgcctcccattaccagtccatcttactgattattaccttattatgtttttaaagtattttgctttatacagcatgtatcatgtttttatatgtatataaattcatatttatatatcccrgttttctctgatagcctctctactatatattcaacatgcacagaagaaataaacccttattcaatgaatgaaagaaataataactacatggataaataacactacattctaaaactgagattttccttctttgcatatttttaaagaaaaaattttgttaatagtcaaggcaaatttctacatcacaaagctgtcttgcagcaaaatggaactgtctctgggccaaccagatctaacgctattcttagattcaaaagcagcagcagtcacaatattctcctttgggaaaacagccaacttgtgctgtttactttgaagttagacctcacaataatttactcttttactttcagac

SEQ ID NO: 474572 - DNA, 586 bp, Homo sapiens
agtagagaccagcatctctacagagacaggagaagatgggaccaaaatcccaggataatttattctccacttttccttcacaactcagttaaagacttttccttctctaagatgcctcccattaccagtccatcttactgattattaccttattatgtttttaaagtattttgctttatacagcatgtatcatgtttttatatgtatataaattcatatttatatatcccagttttctctgatagcctctctactatatattcaacatgcacagaagaaataaacccttattmaatgaatgaaagaaataataactacatggataaataacactacattctaaaactgagattttccttctttgcatatttttaaagaaaaaattttgttaatagtcaaggcaaatttctacatcacaaagctgtcttgcagcaaaatggaactgtctctgggccaaccagatctaacgctattcttagattcaaaagcagcagcagtcacaatattctcctttgggaaaacagccaacttgtgctgtttactttgaagttagacctcacaataatttactcttttactttcagac

SEQ ID NO: 474573 - DNA, 593 bp, Homo sapiens
gcttctcctcttaaatcactttcttgggtcagtcaccgtattgaccttcctccaattaaactcttatcattctgtaccaaattgccaaatgtcttgaatatttctccaactagactatatggttctatgggaaygtactgaacattggctgacacatgatgggaactcaatatttattgagttcagacctcacaataatttatgttttaagttatctaaatgaatcaatgttttttcagctaaaaactgcaaggtcaaacctagtaataggagagcccaatcaatttagtaaatgaatggagaagacaaataaaatctaatattttaatgtatgcctaagtacagtaaaacattaaaatactgagtatatcataagacaaactctttcctaaataatgcctgtatagtaatccattttcaaatataacaactggaacatttcatttcccaaactgctcaacaaaatctacggaggaatttctaaatgtcctaagacctaaatctcattttttaaaaaatatgttttcgcttaagagggagagagcatctgaaaccactaagttctatttttttacattcctatcacttaaaaa

SEQ ID NO: 474574 - DNA, 607 bp, Homo sapiens
ttgagctcaagaaagcttctcctcttaaatcactttcttgggtcagtcaccgtattgaccttcctccaattaaactcttatcattctgtaccaaattgccaaatgtcttgaatatttctccaactagactatatggttctatgggaatgtactgaacattggctgacacatgatgggaactcaatatttattgagttcagacctcacaataatttatgttttaagttatctaaatgaatcaatgttttttcagctaaaaactgcaaggtcaaacctagtaataggagagcccaatcaatttagtaaatgaatggagaagacaaataaaatctaatattttaatgtatgcctaagtacagtaaaacattaaaatactgagtatatcataagacaaactctttcctaaataatgcctgtatagtaatccattttcaaatataacaactggaacatttcatttcccaaactgctcaacaaaatctayggaggaatttctaaatgtcctaagacctaaatctcattttttaaaaaatatgttttcgcttaagagggagagagcatctgaaaccactaagttctatttttttacattcctatcacttaaaaa

SEQ ID NO: 474575 - DNA, 596 bp, Homo sapiens
gcttctcctcttaaatcactttcttgggtcagtcaccgtattgaccttcctccaattaaactcttatcattctgtaccaaattgccaaatgtcttgaatatttctccaactagactatatggttctatgggaatgtactgaacattggctgacacatgatgggaactcaatatttattgagttcagacctcacaataatttatgttttaagttatctaaatgaatcaatgttttttcagctaaaaactgcaaggtcaaacctagtaataggagagcccaatcaatttagtaaatgaatggagaagacaaataaaatctaatattttaatgtatgcctaagtacagtaaaacattaaaatactgagtatatcataagacaaactctttcctaaataatgcctgtatagtaatccattttcaaatataacaactggaacatttcatttcccaaactgctcaacaaaatctacrgaggaatttctaaatgtcctaagacctaaatctcattttttaaaaaatatgttttcgcttaagagggagagagcatctgaaaccactaagttctatttttttacattcctatcacttaaaaacag

SEQ ID NO: 474576 - DNA, 499 bp, Homo sapiens
aactcaagtcagaattttatttatgtctagttcatgtagccccacattaattggggttatgatgaagttttcggtcctctgttgtcaatatcagttcagatcgtttattaaatgctctcaacagagttggatagattctatctcctcactgaacaattactttaacaaatgatcatcggctcatttggggaaagactggagttacagtactttctattcttgctgtgccatttcaggatctatagggcccaagcctctccttcaatggactggttccaggtcatagaactagctcagttcctgaaagtggataaaatattgrtgctttctattataatggctggcatcagcattctatgtagcagattttgatgattgtttgcttgtataccttaaactatattcttgttgactgcctaccctgtttttcttctagtggcacctcaatcagtcatcaccagcaataagaaaggtaaagaggagggttaggattcttgaa

SEQ ID NO: 474577 - DNA, 656 bp, Homo sapiens
acatttcatatagaatcgtcgttatttttaacagtttttagtgatgtgtttctcagtaccttgatgaagggcatgttctgtttcctctaaaggtatatagttcagaagttggtaaacaggtaacgcatgataaatgaaatcttatatatcactaagcatatgcacttgttcttctgcatatgaagacatctctgtcatctcaaactcattaaggcatgttgaactgatcatataaatagcagcactgttctcatttggtcaaagtaaaatgttaaatttaggatcttggtcaatygcgcaatgctagtaacttaagccatgtctaaaattatgtttctccttcttttgcgtgtgcagccataatccattcttatatatattccataaatgtctatgaaaagacattagcaaagacttgaaatttgttgatgcacattcttttttattccaggttagattttctctttgcccccactgtgaatgctgggatctatctctagttataaatttaaagaaaatgagagtagcagaggaatcattgcaagcaatgaacataaattgtgtgaggtgaccacattcttcatttagagatgatgtaggaattactttctagttggaacctgacaaggggactcaacgctgttttaacaatttct

SEQ ID NO: 474578 - DNA, 618 bp, Homo sapiens
aggtaataaaacactatgaaacatatatttacctcattcaatatactaagatactaatttcaattacaaactgaaaatcatatataatcactatggttagtttggtagggttaaatattttatggttaaatatcttgaggctaaatatctaaagagccggattaaaaacttttcatatttataataactttatgtaacaagccctaaatccaaataatgtactttccattgcccagagctcagtttaacaagtgatacagcagtgtgtatgtgtgcttgtcatttactccatggttaatcctgatgttgcatcaattattttgacagctattctcttcactatcaatttttagtaaaattattccaatttacaatattttaatamaaagacaaattatgttgaatacttttttcaatgatagagttttcatcatctctagcaatgagtaatatattttgtatgttaataattattgatgtcccaaaatctactatataaatctataaagaaaaagagagtgaacaaatgaacacattaaagagaaaattaagaaaatgatctgagtgcctctgtagttcataactttctcttgctcttcccaaaaatgggcttcctaa

SEQ ID NO: 474579 - DNA, 559 bp, Homo sapiens
tgattttgcgtcataactcactaccggccacctaatgaaaccaacataaatacgaaagttgggacattctgattctccttggaaatctggaattgagattgagatgatcactttctgtatgtagctgagatgtaaatagaaatgattcactcttggccatatggccaatctgcggagagaaaatatgaagtagataaacagaaagtagtataaaaaactgagtacttgaagccagtacctacactctgggtttgatgagtctcacatggattctttctttgggagtctggacatacctgcacagtaatgcctttaggctttaagtagctccaaacagtttttttgttacttgcaagcaatcgtttttctcaatggctcaagatgccttttgcatataaaaccatattcatttggaattcatcaataaattagtattaattagaattatataactatttattgtgttagatctatacagatttagttaacagatttagtatgtgtgtgtgtrtatatatatatatatatatatatatatacacattcatacctgccatat

SEQ ID NO: 474580 - DNA, 608 bp, Homo sapiens
aaacctctgactggtatataaagcttttgccttctctttttccttgggcaggtataccagggtcaccacaaaactttgctggaaatgaaaagaaagacgcttatatcaaagatttagtatacagcagagtacacagtttggaaaaatggtgacaatcaatttgaatattgtactaaagagatatattattcaygataaagctatcccaatgaaaaaatttattttttagcttatgtgcagataaatactgaattgaaaactcagtataatatttaaaaattagctcgatttcgatgttttccacttagtaagctaccttaataaagaaagaatttttgtacttttgtcgttttgtattgaccaaaatcaaaccacatatttggacttgttggctgccaaggtggagtatagccttgaaaaagtaggtgactcataggtgtccctgtcaaaaagaagcaacccataatgttccaggctgcacgctacagattgcagtgcccttttacatgtatataaaaagctctggttatttgttttattgtaccctgtatactttgaatactcgaagcacatatcccagaaacttattgccttcctctccaaaatac

SEQ ID NO: 474581 - DNA, 608 bp, Homo sapiens
aaacctctgactggtatataaagcttttgccttctctttttccttgggcaggtataccagggtcaccacaaaactttgctggaaatgaaaagaaagacgcttatatcaaagatttagtatacagcagagtacacagtttggaaaaatggtgacaatcaatttgaatattgtactaaagagatatattattcatgataaagctatcccaatgaaaaaatttattttttagcttatgtgcagataaatactgaattgaaaactcagtataatatttaaaaattagctcgatttcgatgttttccacttagtaagctaccttaataaagaaagaatttttktacttttgtcgttttgtattgaccaaaatcaaaccacatatttggacttgttggctgccaaggtggagtatagccttgaaaaagtaggtgactcataggtgtccctgtcaaaaagaagcaacccataatgttccaggctgcacgctacagattgcagtgcccttttacatgtatataaaaagctctggttatttgttttattgtaccctgtatactttgaatactcgaagcacatatcccagaaacttattgccttcctctccaaaatac

SEQ ID NO: 474582 - DNA, 567 bp, Homo sapiens
atagctgcaaactccactttgtttttaaaaagacaccttcaacatagatgtttgatttctggaggctttagatgtttcagcagaacatttacttctggtatgttctataaacatgctggtataggttgttcgataggagatataaaaaaattttatatttaataattatgtattgtagtgattgactgtggacaccctggcgttcctcctaatgcagtcctgtctggcgagaagtatacttttgggtctactgttcactattcctgcacaggaaagcgttcccttttaggccagtcatcaagaacctgccaattgaatggccattggagtggatcacaacctcattgttcaggtaccacttggaaaattggacaatatgtgttggaaattacattatygttagtagtagtagtagcaacgtatacacaaaacaatctaaagacttaaaatatatttctctctgaaaaatctcataagaaaagctgaaacactgcttacacattactggaatatgtgtaaggctatagaaatgcagggtactgatgttgtagatgataaattacaagt

SEQ ID NO: 474583 - DNA, 621 bp, Homo sapiens
aactgaactcaaattttgatagtaaaaattacttaaaccaatgtaaatattggcatactttggaatacatcaaattcttttaaagtgaattgctgcattgtgtaggtcttaagaataaaataggaaagaaaagagaagtctttactttttaaaatacaatgttttttaaaaaattaataaaaaactagacaaacaaaaaggagctctacttagccagcaatagatccaaccaaactattttaaagcagttttcagagcaaatattatggaagacatttattcctctacatatttgccagttatcctttaacttcaaggatactgcttgctgcttcagaatagctctgctgaagttgtgtgtatagagaaatgggcatgattgctcattgcagggctaagtggcagcttaagacttaaaggcacacatttataaagttcagagctttctcaagtgtcagttagcatgtacttgatgaagtagctcagtgaggaagccagctggcctgcagtcatactaactgcaagatcaaygattaataccaaagtgttcacatattcaaaagagaagtttaatcctgtgaaatcccttactgtgctgctctcaagtttgattggggatga

SEQ ID NO: 474584 - DNA, 518 bp, Homo sapiens
tcctatcaaatgcagctgcttatattctacttccttacatcaggctgaaactctttttaatagttgtccaagactgaatgatttttcaamggtatcaggtcctaatccctggaacctgtaaatcttatttgataaggaaaatgatctttgtagatgagattaaattaaagatcttgacctggataaattatcctggattacttgggtggacatttgccatggcaagtgtcttataagagagaggaagaatgagattcaacactatccacaaatggaggcagagatcaaaagtaatttagccacaaaccaaagaatgacagcacccatcagaagctggaagagacacaaaatggattctcttgtaaagccttccaagaaagcatgggctctgctgacatctaatttcatacttctggcttccagcactgtaagataataaatttctgttgttttaatcgattaggtgtggccatttgttacagcagccactggaaactaatacaatattctaagaaatc

SEQ ID NO: 474585 - DNA, 518 bp, Homo sapiens
tcctatcaaatgcagctgcttatattctacttccttacatcaggctgaaactctttttaatagttgtccaagactgaatgatttttcaacggtatcaggtcctaatccctggaacctgtaaatcttatttgataaggaraatgatctttgtagatgagattaaattaaagatcttgacctggataaattatcctggattacttgggtggacatttgccatggcaagtgtcttataagagagaggaagaatgagattcaacactatccacaaatggaggcagagatcaaaagtaatttagccacaaaccaaagaatgacagcacccatcagaagctggaagagacacaaaatggattctcttgtaaagccttccaagaaagcatgggctctgctgacatctaatttcatacttctggcttccagcactgtaagataataaatttctgttgttttaatcgattaggtgtggccatttgttacagcagccactggaaactaatacaatattctaagaaatc

SEQ ID NO: 474586 - DNA, 518 bp, Homo sapiens
tcctatcaaatgcagctgcttatattctacttccttacatcaggctgaaactctttttaatagttgtccaagactgaatgatttttcaacggtatcaggtcctaatccctggaacctgtaaatcttatttgataaggaaaatgatctttgtagatgagattaaattaaagatcttgacctggataaattatcctggattacttgggtggacatttgccatggcaagtgtcttataagagagaggaagaatgagattcaacactatccacaaatggaggcagagatcaaaagtaatttagccacaaaccaaagaatgacagcacccatcagaagctggaagagacacaaaatggattctyttgtaaagccttccaagaaagcatgggctctgctgacatctaatttcatacttctggcttccagcactgtaagataataaatttctgttgttttaatcgattaggtgtggccatttgttacagcagccactggaaactaatacaatattctaagaaatc

SEQ ID NO: 474587 - DNA, 565 bp, Homo sapiens
acaacccttaatcaaggcttcagaatttcttcctccattactctattatcattacttgatttaccttttgctgtccctcttcatgatccctaaatttcggaatccttcccattaggagcattttaaatactacttcctccaggaaggagtgactgttttccttctgagaagtaattagtaattcttattgttccttagtacattgctttatagtaacttgtattagaattatttataaacaagtctttttccccctacaacaaattacacatttctctcaaaatataatttatttgtgcctttgcttggtaattatcagaggaacttacaccaaatgaagkttcagtaggttaagtttacttgaagtgcctaaagtaaaatatcacattagtgttcattggcacttaaaggcaagacatccaatatcaaatttcttttcttatatggccctcccttgaaaaaagttgttattgaatttttatataagtttaaagtaattgacttcaaagacaactaataaagttaacatgagttatgaaataaatatcctctaaaatgtacttcc

SEQ ID NO: 474588 - DNA, 465 bp, Homo sapiens
gtaattcaactcattcaattttgctttctgttatggaataaataacagaggatagatttcaattatctgtcaaaaacaatgcttataaattacctgggaatttttaatgttcaatctctgtaattaatacagttaattgacaggtgactctacatttgatatttaagaataaatcaaccttytttattgcctctccatcaggaatattgtttatttggatagtaagattaatcaacattcatgtgtcaaaagctgtataaattattgtgatgttcttaactaagtaaaaaccagaaatatgaaagctgtagccaaccacagtatccctcctcagttacagagttttaccttaacagctaaagcggctgtcttcctaggcacatctcatagtaaaataaatattactatgacaaaatctcattgtgaatacaagtttcattaagaatgtggtatgagttatacact

SEQ ID NO: 474589 - DNA, 465 bp, Homo sapiens
gtaattcaactcattcaattttgctttctgttatggaataaataacagaggatagatttcaattatctgtcaaaaacaatgcttataaattacctgggaatttttaatgttcaatctctgtaattaatacagttaattgacaggtgactctacatttgatatttaagaataaatcaaccttctttattgcctctccatcaggaatattgtttatttggatagtaagattaatcaacattcatgtgtcaaaagctgtataaattattgtgatgttcttaactaagtaaaaaccagaaatatgaaagctgtagccaaccacagtatccctcctcagttacagagttttaccttaacagctaaarcggctgtcttcctaggcacatctcatagtaaaataaatattactatgacaaaatctcattgtgaatacaagtttcattaagaatgtggtatgagttatacact

SEQ ID NO: 474590 - DNA, 579 bp, Homo sapiens
cccccatataggaaatccaacatctgaaaacccaaactcatggataaagaaagaacagataaagtacgttgtggggattctcaattccagggacatatttgcaagagaattcactccaagggctctcaatgtaataagttccctgatcccccagcttcctgatctccatctttcctttcttccttattaatggaagtctcatttcatttggacagccatgcacttggtgaaaaaactgtatttcccactctccattgcagccagggctggtcaaacaacatacaagtgggttggtcaagtgacatacacatggttgatacataaggggaagtcgacaggtggggcttccaggaatgctttttaaaggagagaacccagatggctttcctgggtatatagatcgaatccgggaatacagaagtagtgctgcacctggagcagccatcctgtgatcatgagacaaccaaccatgtgaatgaagtcacaggctaagratgatggaacaggaagagaatgagacagagctgagacccctcctggcctcttgtagccactgtacaaaccctacactgcctacat

SEQ ID NO: 474591 - DNA, 568 bp, Homo sapiens
ctgtgctccaaaatctaacatcctcgcatctgcacttgccagcccctgcctgagacatcaggctcccctgcctggtgaatttggttcaagaactcctcatcagccttgccaagatgtcttaggactgcactgaagtccaaggtgcccagtctcaaccttccttccttccctctctccttcactcagggacacacctcccagcctcccccagctcccttccccacttccccttttaggrcttttccccaataaatgggtggcacattgaatccctgcttggaggaccggactcacataaggagaaacaagctgagtgcttgtgtgatttacccatcatctttcagccactcgcttactatataaagcccctgccagacggtgcagcccttcatgtggattaacttgcttgctcatcactacagcctgtgaggtagccagggttattacctccattctacagaaggggaaacggaggcacacagacattgggctgacctgaggtcacgcagctaatgagggttcaaacctcgggcagtctggctccagagcctgtgctctctattacaat

SEQ ID NO: 474592 - DNA, 594 bp, Homo sapiens
tctccatggtttcaggcatccactggggtcttagaacatctctcctgcacatacyggaggactactgtgttggccacaaactcagcctccatttctgaaactagcacccttctcagggatgggccagccaggtctggccacagcctattccaggcttgtgagtctgagggatcaggcagtggtagcaggactgagtcctttgtacaaattggcacctgtggttctgatctcagtagcccttgccgagactgagctatgtggcccgccattttaaaatggcggctcccatccacaaacccagcccaagaggtaaaagaatagatggaagcaattctttactttgtctttttttactgcctcacaaatcacaggaggcaagaatatctgagagagagagaaggagagagaagccaggccaacccagcggccagctagaggggcaatttaaaggcatcaggtaggagagagagagactcctgttgaaactgggagacactggagtagcagaaatgcagaaccagatggactgcaaaccttgcatgctctgagtggtgaaaggacctcctgggagtgttgcagcaactcgctgccaca

SEQ ID NO: 474593 - DNA, 637 bp, Homo sapiens
ctggcgggatggagtggaagtgcttgcggaggctgcgggccagacaccagcgggcacaggcctggcgccggagcagggccttctcagatgtctggcactcagccagcaggccccagtgctcccgggacaacagccctgccaggaaggctgctgtgatctgaaggttgtgcggctcggccttctgcagcaaagctgccacgctgctgtcctttccctccgaggcctggatgcacatcgtgggcaggagcctggccattggtgagttgcctggcctgccacaattgaagaggtgtctgagcaaagctggtggcacatcagcactgagtgccaggtagaacgcggcaaagaagcactggaaagtgatgtgaaggaattccaggggcgccgtactccctggcacgacacctttggcmcgcaccaggaagccaagagaaatgtcatcagggctgacctgtgctgcctggagctgctgggctgagaacacgtagcagcacatgcccaggccccacagagccagtctgcccaggtgcaggagggtggggaggcggccccgaagaagactgggtcccagaccttgggaagctgagtctgggggggtggcatgcagcagaaaatgctgcagaatcagcaggtacat

SEQ ID NO: 474594 - DNA, 494 bp, Homo sapiens
tgcatccatgttgctgcaaaggacatgaattcatttttaatggctgtaaagtattccaaggtgtatatgtaccacatttttttaatccagtccaccgtggatgggtgcctaggttgactccataactatgctattgtgaacagtgctacaataaacatacaagtgcagatatctttttgataaaatgatttcttttccgttgcgtagatatccagtggtggtatttgctgggtcaaatgctagttccatttttcactctttggagtttctatagcattaattaaataatattcaaccaatgaaatatgagtggaaaacattttttaaactaatttgaatgtttgtaaaagatgccataackataatttgcttttaaaatgtggtgttccctatgaaagcagtggacaaaaaatttgtcatggaaataaagatgaacaagacaagtataaatgttaggagaaaacgtcatagaaatccaggcttatgtattcaga

SEQ ID NO: 474595 - DNA, 482 bp, Homo sapiens
aaaaaaggagaaaacacacaggcacatgcaccttgagctggaggtgactactccaagtcactgaacttcaacactacagaaagtttgtcagatcccagagtggtggctcatgcctgtaatagagcttccggatgcccaggcaggaggatcacttgaggtcaggaattcaagaccagcctgggcaacataacaagatcmccttctctacgaaaaatttttaaaattggctgggcatggtggtgcatgcctgtagtcccagatacttgggaggctgaggcaggaggatcgcttgagcccaggagttcgagactagcttgggcaacatagtgagatcctggtctcataaaaaataaattcatgaatgtgtcaaaactcatctaactgcttacttaaaatatgtgtatgttactgtatgtaaattacacctcagtggagttggttaaaaaataataatgaaagaaggaaggagtgtaaactttgga

SEQ ID NO: 474596 - DNA, 538 bp, Homo sapiens
catggtggtgtgcacctgcagtcccaactactgaggaggctgaggcgggaggtttgtgccaggcactgatcaaggtggtaaggaaagacaattaaagggactaggggaggtcctgaggagcccacgataagccatgcrgccaggggatcagtgctgtggagaaaatgaagcgcacaggagtctatatgtgcctgtaggtgtgtttgagatgatggcagaagtaaactggagctggcatccatggctcacaagagcccattattaaattttcaggaattttgcgagtcagttcttggatggatctattattgaattattaagctaacaaagtatataaacttacaaattatataaacttaaaatgaaattatacttaaaataaaggtaacaaatactcgcaactcattacttcctaattattttatattttaccattttctgtgccaaaggtaagcaaactgtttctgggaagggccatttaatgactgcgtgagccataagggttcagtcaaaactatttgactcagccattgtagca

SEQ ID NO: 474597 - DNA, 609 bp, Homo sapiens
cttcagaaggaaaatcttagtcactgagaagagttcctaaattatagcatataaatttcctaaagaaaaacaactcccactattaactgtaattaactgcatataacatttttaaagtatgttcacatgtataccacgatatagatccattatatagttagtaaccattataacaaatgaagcaagtgctcttccctttgttaggctttgaaggtagcctggcaggactggagagccaactggatggccggtggtgacagttctgcaggtgacactagggaggagctccaaagattaggaatgtgagcaggggggcactggagttggaaactgtggctaccttctgtcaaaggctgtctgagagggggtcaaatatcagctctgaagaaraagacattccatcagaattctatacagacaaaggggcacaaaccacctctaattgccctccagcaattacacaccaaatatttcttattactttgtcacaactgtgttcatggcccaaaactacttgggtcatgaagcaaagctttcaaagttaaatgaattataagtgattaccaactcagaaaaagataaatatgggatggaaagcaaggtaagata

SEQ ID NO: 474598 - DNA, 583 bp, Homo sapiens
atataaaaggctgttcaatcctacttgtaatcagggaactacaaacttttaaaccaccttgagataccatttctcagctgtcaggctggcaaaaattttaatcagtaccaagtgtggaaaaggaggtggaaacaacctaaaacccaagcgtccattaatattacaatgggcaccaaactgtgggatagtcacatgacgaaatatactatgaagcagtgagagtgaacaaactactaatgccctcatccacagaaaagaatctcaaaatacattttaagtaaatgatgcaagtaatttaaaaatcagtaagattttaactacattaagttcaaaagcaggctaaacagtatattgtttagctacagakatataattaaattataaaaagcaaggaaataattaatgaaaaaatcagaataatggtcacctctagggagagattgcaattataatgaaaacaaggtattgcaggtggttttcaaggtacttctaatgttctgtttcttaacctagatggtcagtttcatgagtgttcattattattcttaatatatgttgttatatatacttttgcaaatacatt

SEQ ID NO: 474599 - DNA, 623 bp, Homo sapiens
tgtggatgatgcccccagatgtagatgaagccacaaatgatgcctgtgtggacagacagaatgatggacaggcagatgaatgtgagggttttatgtgaaacaagtccacttggttgttgacaagatgctgttttaaagtttcattttgccatactttgaatagcttttcattagctaaatttagccacatgtaaaatcactaaggcagacacctggagttcccatatgaaaatcaaatgtaaaccagcagtgacctacttcaatgtgatcatcggaagtcagaagttgagctcatttttgatgtttaaagcctgcataatattcactgtgttattattcagtgtattactatttccttcatgatggaaatttggtttgccccaactttctattctatcaaaacactgctacatagaaaatccccatgcacatatttctcctaattgtggaaatattttacataaaagactctagacatgggatgaaattcccaggttattggaattttaaaatagataggtactcccaaattgccstcttacaaattatatgaattcgtaagcttccaactgttatggagttacccattttgagaaatctgtgctaaaaggacccaaacaatg

SEQ ID NO: 474600 - DNA, 571 bp, Homo sapiens
cttggagacttaggcaggaggattgcttgagcccaggagttcaagtctagtgagctatgattgtgccactgcactttagcctgggcgacagagcaagaccttgtctcaaaaaaaaaattctattttttaataaatggacctgaatattttaccgtaggtcttcccaaagggtccagggatgccatcacccgattgcatagctagaaagcggatggactttttagtaagtgtgggttctagtaagtgttgccgcactgaagaamatctctggccaggcgcggtggctcacgcctgtaatcccagcactttgggaggccaaggtgggtggatcacttgaggtcaggagttcaagaccattctggccaacatggtgaaacacttcctctactaaaagtacaaaaattagctgggcatggtggtgggtgcctgtagtcccagctacttgggaggctgaggcaggagaatcgcttgaacccaggaggtggagcttgcagtgagccgagatcatgccaccgcactccagcctgggcaacagagcaagactccgtctcgaaaaactaaaaaagaagaa

SEQ ID NO: 474601 - DNA, 614 bp, Homo sapiens
cttgagaggctgagggaggagagtagcttgaacccaggaggcagaggttacagtgagctgagatctcacctctgcattccagcctaggcaacagagcaagactccatctttccaagaaaagacagcaatttattaagcacctagacccaaacaacttaagcatttatgtcctaggaacttactagccatttgagaaaatacacacaagttgaaaatactattaatatattaaaacaaaataacatttttatttctttrccaaataaccatctcactcacttatggcgcctgttaggcactgcacctctcaaaccttggaatcagactaaacagcaccacctttatttcttctacaaactgatttttgcctgtacttagcaactgctaaaaacccagtttcacaaaaatatgacattatagaaagggatctggcaccatctaatgttgaaacagaactaccaggaactaggagttccagggtatctgacaaatgtacctgtgtttctcttggaaatttaaaatacctcactgtgcccaccgtgtgccacagtgtctcagggcatcagcacagtgtggaaccttattgggaagttcctctattacattgtaagaat

SEQ ID NO: 474602 - DNA, 614 bp, Homo sapiens
cttgagaggctgagggaggagagtagcttgaacccaggaggcagaggttacagtgagctgagatctcacctctgcattccagcctaggcaacagagcaagactccatctttccaagaaaagacagcaatttattaagcacctagacccaaacaacttaagcatttatgtcctaggaacttactagccatttgagaaaatacacacaagttgaaaatactattaatatattaaaacaaaataacatttttatttctttgccaaataaccatctcactcacttatggcgcctgttaggcactgcacctctcaaaccttggaatcagactaaacagcaccacctttatttcttctacaaactgatttttgcctgtacttagcaactgctaaaaacccagtttcacaaaaatatgacattatagaaagggatctggcaccatctaatgttgaaacagaactaccaggaactaggagttccagggtatctgacaaatgtacctgtgtttctcttggaaatttaaaatacctcactgtgcccaccgtgtgccacagtgtctcagggcatcagcacagtgtgsaaccttattgggaagttcctctattacattgtaagaat

SEQ ID NO: 474603 - DNA, 614 bp, Homo sapiens
cttgagaggctgagggaggagagtagcttgaacccaggaggcagaggttacagtgagctgagatctcacctctgcattccagcctaggcaacagagcaagactccatctttccaagaaaagacagcaatttattaagcacctagacccaaacaacttaagcatttatgtcctaggaacttactagccatttgagaaaatacacacaagttgaaaatactattaatatattaaaacaaaataacatttttatttctttgccaaataaccatctcactcacttatggcgcctgttaggcactgcacctctcaaaccttggaatcagactaaacagcaccacctttatttcttctacaaactgatttttgcctgtacttagcaactgctaaaaacccagtttcacaaaaatatgacattatagaaagggatctggcaccatctaatgttgaaacagaactaccaggaactaggagttccagggtatctgacaaatgtacctgtgtttctcttggaaatttaaaatacctcactgtgcccaccgtgtgccacagtgtctcagggcatcagcacagtgtggraccttattgggaagttcctctattacattgtaagaat

SEQ ID NO: 474604 - DNA, 441 bp, Homo sapiens
tccggcatggggggctgggaaggggtggctgccgtgggagcctgctcaacaggtgcacagtgacggtctggtgaagagaaaggagccatggtccagggctgaggagctctggcrtctttaccattccctcactggcacttgatctgaaggaagctcagttcctcatctgcagaatggggctgattgtctgccctgcgtatcttccaaaagcacatgggaaacggacccggaaagtggctatagtctgggggctgtgcctatgccagcccctgtcagccctcccccaggactgggaattcccttcttggggcttcgctgataataatggcagcacacacttgcttagcactgaccgtgcaccagcctgtcctcagggcacttatatgtggccactctgtcctcagaacaacaccctgaagtaggcactctacctcccttttt

SEQ ID NO: 474605 - DNA, 684 bp, Homo sapiens
ctctaaacagcaactacaaaaagctcattgcaaagaataacttgtttacagtctgggaagtggcaggttaattcacaaaagaagcagaagcgtcagtaagccgatttgatagcccagaataaaataaaacaaaacaaccaaagactatcggttatttaactttcaaggcaaattctgtatagccaaaatctggtccttgatctttgtttcttcttttcagcaatttgaaagtaacttattttccaattttgaattaatccatgtatgacagagtttgcttgaatgttcaaacaactctcaagtgatttaaaaccaaaactctaatgatttggcatatattttctattcttacaaataatagtctgcattggaatgagcaaagttcagatagaacttacttacatacttttattactatgagttgttaataaatggctaaatatccacgaattttatgagcttgggccagctcttagacattagtataactacatcaatgcctagaacaatgaattattgccaggatccatttggtcatcaaaaaataytctttccttaatacaaaaaaattatatttcttaatataaaaaaattatatttcttgaacccatgcttgttcaagctgaaacaattttgactttccttcacttcttaattatgttgtgacctataaagacaggaaat

SEQ ID NO: 474606 - DNA, 253 bp, Homo sapiens
tgcttctgtttctttataggccttgagatttttggttttgtaaagcataacattacttaatagaatatatgtgtgtttgtgtgatgggagatgtatataaaaagaatgctgttgttttaagtaactatggctgcatcacaaaccaatccaacttcgaatggcttaaaccaacaataactatttgtttttagcttrtgtgtttgcaatgtaggcagggcttatagggaaggttcatctatgctttatacagtaa

SEQ ID NO: 474607 - DNA, 511 bp, Homo sapiens
aaaaccctatgactggcagtagtcggggtactaagaacttctgacatgcaatcattagaatttctctggtaacataccagtatgggatactattagaaaaagcaaaacaaaacaaaataaattyttgttgaaatatctcagaactggggcattttagaaattcaggagaaatagtaactataaggacagtggaatacgatagctattgctaagagccatttatacatagggatttaaaaagagctaagaaaggctcagagtgattaatcactaatttaaggcaacacatcacataagtacatacaaacaatcatctcccatgtctggagggtaggtaaagctaacaatcagatctgagtcttaattagaagaataataaaagtacagaaaattcaacaatctaaatcctgagtgttatgtcgagaagactatgactgaaaaaaaaaaggatgataagacatagaatagtgaaaccttggtcagaaatctgaatccccagagttttacccct

SEQ ID NO: 474608 - DNA, 679 bp, Homo sapiens
aaaaccctatgactggcagtagtcggggtactaagaacttctgacatgcaatcattagaatttctctggtaacataccagtatgggatactattagaaaaagcaaaacaaaacaaaataaattcttgttgaaatatctcagawctggggcattttagaaattcaggagaaatagtaactataaggacagtggaatacgatagctattgctaagagccatttatacatagggatttaaaaagagctaagaaaggctcagagtgattaatcactaatttaaggcaacacatcacataagtacatacaaacaatcatctcccatgtctggagggtaggtaaagctaacaatcagatctgagtcttaattagaagaataataaaagtacagaaaattcaacaatctaaatcctgagtgttatgtcgagaagactatgactgaaaaaaaaaaggatgataagacatagaatagtgaaaccttggtcagaaatctgaatccccagagttttacccctcagggcctaaaaatatgaattttattgtctgaaagctagtccttttcccttgcttcaaagaaatgcagaaacctctgccttataacacctgtgtcttctcaagatgtatcccaatctccctaacaaccactagaccaatatgtaaagattggtttcaatataaactgt

SEQ ID NO: 474609 - DNA, 679 bp, Homo sapiens
aaaaccctatgactggcagtagtcggggtactaagaacttctgacatgcaatcattagaatttctctggtaacataccagtatgggatactattagaaaaagcaaaacaaaacaaaataaattcttgttgaaatatctcagaactggggcattttagaaattcaggagaaatagtaactataaggacagtggaatacgatagctattgctaagagccatttatacatagggatttaaaaagagctaagaaaggctcagagtgattaatcactaatttaaggcaacacatcacataagtacatacaaacaatcatctcccatgtctggagggtaggtaaagctaacaatcagayctgagtcttaattagaagaataataaaagtacagaaaattcaacaatctaaatcctgagtgttatgtcgagaagactatgactgaaaaaaaaaaggatgataagacatagaatagtgaaaccttggtcagaaatctgaatccccagagttttacccctcagggcctaaaaatatgaattttattgtctgaaagctagtccttttcccttgcttcaaagaaatgcagaaacctctgccttataacacctgtgtcttctcaagatgtatcccaatctccctaacaaccactagaccaatatgtaaagattggtttcaatataaactgt

SEQ ID NO: 474610 - DNA, 681 bp, Homo sapiens
aaactggaaaaaaaaatcagcattcaatatagcagaccaatgatcaaaacgtaactaactttcagggagggtggtaagcatttagttatgccccgtctggcaaaaattttatttgctttatgttacttgcaggccacaacttctccagctcatctggtgcatgcaaacacaacagacactcccagatgaaaataatatatggtttctccattacttgaaaaacaaaaaagactagtatctgagagcaagcaattgatgytctattccatattcaatcttatcaccccaaatattttctgccttgtcatctatttttgagatttgagttaagaatgaaggttctcagaataaaacctatccactggcattactacccaacatatatgtaagctattagacagtcatggggttagaacatatccaagccacagtattagcctcaggtcataaatcaaataaaaatcccacccaattaagggccctattctttgaacaatatgagtttactgtcatgtttggatactgaaaagagtttttgcaatctgtttctcatctgctgtccattacttgtacacttaaaaaatgtgttttacaacttcagcgaatgcacacatgccaaaaacaccactttttaaaatcatgggggcatgaattcacactataataatgcaaccgtatatg

SEQ ID NO: 474611 - DNA, 631 bp, Homo sapiens
tgattgagatggtatctcactggaagaaatcataaccacggagccaaacaagaatcataaagaatgccacgcttgatcctttattcactgcacatctaagcaagcattctaacagtggtgcaaagaaaatatatggctgtcctccttcaagtcaatctcagaaacaacagtgctgtctcaactttgatggcactttagaaatctgccaaagagccttaaaatatactcatacctggagaaacgttatttaattggcctttkcaatctaaagcacctgcagttttcagtgttcccctaagtgattcttctgtgcagccgaagttgagagccactgctttaaaatattctgattatcacattcatagacattcaaaccatcacagtgtgaacttgtcccatttccaagatagaatgtccttcaggtttgataagaaatataaacattgcaatgacaggcttctttctttccacacttgtggtagactgtttcactggtagatcccagtgaaacatgccttagggattcatgcctttgtgcttctcatactgactctgggcttgggcacatgacttgttttagccaagtgaccttaagcaagcactgagctttcgggtttccttcttggaacac

SEQ ID NO: 474612 - DNA, 437 bp, Homo sapiens
tagaaatctgccaaagagccttaaaatatactcatacctggagaaacgttatttaattggcctttgcaatctaaagcacctgcagttttcagtgttcccctaagtgattcttctgtgcagccgaagttgagagccactgctttaaaatattctgattatcacattcatagacattcaaaccatcacagtgtgaacttgtcccatttccaagatagaatgtccttcaggtttgataagaaatataaacattgcaatgacaggcttctttctttccacacttgtggtagactgtttcactggtagatcccagtgaaayatgccttagggattcatgcctttgtgcttctcatactgactctgggcttgggcacatgacttgttttagccaagtgaccttaagcaagcactgagctttcgggtttccttcttggaacacc

SEQ ID NO: 474613 - DNA, 604 bp, Homo sapiens
ctgataaatgagaagaaacacaagttgaaagtggttgcttccaaagagtagggaggggtgggtggggcatggcattgctgatatttgttaaaaaccttgtaatacatgcagttttacatgtcttacttcagtgagtttaaaataaatttaaaatatttaaaatatcaataagaggaatacacacttaactttataaatacatattaacaaaatacagatatatacatgcacagacaattgcaaagaaaattggaagttgtaaatttttgttgacaaagcaaaccaatctatgaaaagctaagaagatcaaagaaatgtatttgtaaattttgagaatttcccatccaatttttgttmtaaactaaacataactgggaagaaaagacagtctcctatctaacgtttcaccagagatcacaaactgggcacccgcaggctgatgcagtccacctacaggtctatactccttgggctatatggtttgttgttgttcctgttgcttaaaaatcaggccaaactgcaaaagaaccaggctgccatctcatctggtaaaagcaaaagtcgggccactggtggcctgcattctacatcgaggcaacaacca

SEQ ID NO: 474614 - DNA, 565 bp, Homo sapiens
tacattttataaaatccaaacgaccaaatgagtggtcgggagacacttagagtatcaacaactggcttacacaatatgccatcttctaaccatgataagaggtataaggatggtctgtacgttatatttgtatctcacccacccccaccaacaatcaacacagagccctttacacaataagggttgatttgatctctcttttaaatagggaccctcattaatgagagttggggatacagtctgtgacaatggaaaaaggtaacgggccataatgcagattaaagtacaaggctctgacctaaactgacattttactaaccacagattaggaatggtrtgtgtagaaataataacattttgcctcctcttgaactcaacagttttgtttttatttttttttaaactgtttttattttttttaaactgtgtctttgtactattgtttaagaaagtccttgggcagggttggggaaaacagaactcaattaagagactgaaaattaaaagacggtcaaataaaatgagcacatcttggacgagacacacctaggagtgagaggagaga

SEQ ID NO: 474615 - DNA, 253 bp, Homo sapiens
cttggctcccctgctcaaaaaaatcctgctrcttttcaaatcttaaacaatttcattcatctcagtcattcctgcaaacaaaaacaggccatgcaaattgcacaggtccacaatcccttatccattattccaatatccaagcgtgttttcttatctttttgtacatttggcacaaactatattgactggaaactatttatcatcattatttcaccagatataaatattagtgttttgctagaaaaatattaat

SEQ ID NO: 474616 - DNA, 640 bp, Homo sapiens
tataaggacacagcaagaaagaaatccatctgcaaaccaggagagtgccctcaccaggaacgaaattggctaacaccttgattttgcacttcccagcctctagaactaagagaaataaatttctgctgttgaaaccacatagtctgatatttttgttgcagcggctaaaactaattgagacaagactatattaaccttaactatgggaggcaggtaacaggaagtatccagttttgagatttaagttttaaaaaggcatatttcgcagttttcatatatgttacctatttattgcctctcagctccaaatttcccctcaaagccagctctgtggtagcatatctcatttgtggttgacacgattttaagctctgggtgctggagggccactgcaaaggaagaggctctgctttctagtcctgatgtgctttggttcttttcttcttgctcctatggcttggccaccaacaaggcacstgggcaacatcaagtggcacttacttccccgcttcctccctctgttgacaacctcccactgagtttcagtgacactctcatgggcagattgttttctagtgaatcacccaggcacctgagagggaagcttcccagactggaagctacagtaaggctgcctata

SEQ ID NO: 474617 - DNA, 536 bp, Homo sapiens
ctacaaccattacctgattccaatcacagatttttatttttaaagaaaagataataagacaactcaaataaaaaccagatatttaaatttttggttaaatacataactattctcaaacaaacaggaaaaagccttacctccaaacttaaaaatcccccatcatgggtagcagtgacttgaggtgatggttcaaaccattcacaggattttcccagtaaattcttcaaagttttcacrgatgaaacagttaaagcaccagagcatcgagctaaagtcactgcactgtctgcccaccaattgacatctatcagtgggtaaaaggactctttatctaagaagcgaaaaacaaatcaatacaaatgcatctgctaatgtggtttaaattcaaaatatttagtataataatcaattttaaaacaaaatttatctacattatttgggccctaatggtatgttaaataataagaaaaaataaaatgtaagtcattctcaaaattttactctatgaggtataaaatgttaattcccttgacaaa

SEQ ID NO: 474618 - DNA, 536 bp, Homo sapiens
ctacaaccattacctgattccaatcacagatttttatttttaaagaaaagataataagacaactcaaataaaaaccagatatttaaatttttggttaaatacataactattctcaaacaaacaggaaaaagccttacctccaaacttaaaaatcccccatcatgggtagcagtgacttgaggtgatggttcaaaccattcacaggattttcccagtaaattcttcaaagttttcacagatgaaacagttaaagcaccagagcatcgagctaaagtcactgcactgtctgcccaccaattgacatctatcagtgggtaaaaggactctttatctaagaagsgaaaaacaaatcaatacaaatgcatctgctaatgtggtttaaattcaaaatatttagtataataatcaattttaaaacaaaatttatctacattatttgggccctaatggtatgttaaataataagaaaaaataaaatgtaagtcattctcaaaattttactctatgaggtataaaatgttaattcccttgacaaa

SEQ ID NO: 474619 - DNA, 536 bp, Homo sapiens
ctacaaccattacctgattccaatcacagatttttatttttaaagaaaagataataagacaactcaaataaaaaccagatatttaaatttttggttaaatacataactattctcaaacaaacaggaaaaagccttacctccaaacttaaaaatcccccatcatgggtagcagtgacttgaggtgatggttcaaaccattcacaggattttcccagtaaattcttcaaagttttcacagatgaaacagttaaagcaccagagcatcgagctaaagtcactgcactgtctgcccaccaattgacatctatcagtgggtaaaaggactctttatctaagaagcgaaaaacaaatcaatayaaatgcatctgctaatgtggtttaaattcaaaatatttagtataataatcaattttaaaacaaaatttatctacattatttgggccctaatggtatgttaaataataagaaaaaataaaatgtaagtcattctcaaaattttactctatgaggtataaaatgttaattcccttgacaaa

SEQ ID NO: 474620 - DNA, 626 bp, Homo sapiens
gacctacatgcctttcctgagcttatcttctcaaaatattaacatgtcattttaatcatttgttcataatttcccttggaagcctgtgaatatcttaagagcagggactatgacactgtattccctactggagctcttagtagagtcaataaatacttgaactttattatttcaccattatgttattacgtaaataggaacaacctactctactgtacagtcctgttacacataggctttattatacttactataatacactagattttagtaattcataagctaaaattcaaatctaaaacatccaagtgattgattcccaggatacaggtgaaagactcaaagaaactatggttgttcaaactcttcttgcttgacaaagttaccaccttcmcccaaccccactacatcatgagtactctagatatctattagaaagctaagggtttaccaatgagaggcttccccaattatttattctggtatctggtacacactaactagctcaagagttaagcatatctgagagagctgaaggaatctgtatcacatccaccgagaaaaaggatttgtctctgtgtttttaaagatcatcaaataaaaagaatcaatgtaaaaaattaata

SEQ ID NO: 474621 - DNA, 611 bp, Homo sapiens
cggtggctcacacctgtagtcccagctactaggaagtcggaggagggaggatcacttgagcccaggagttcaaagctgcaggagccataatcacacctctgcattcccattctagcctgggcaacagagtgagacctcatataaataaaaataaggaagcccacctatcctgagactgccccgctatgaaggaatccaagtcacatgaagtgtaaatgttccattcagcagtcccagctaaggtccyggtcagcagccagcattgaccaccagatgtgtgaatgaagaggccttcagatgattgcagcccctattgttaaggcaaccccaacctccgagtcttcccagcagaggattcagctactatggagtcaagataagtcattcccactgtaccctgtctggggtcctgacacatgaagattggaagtggtttgtcacatagcaatagtaactgaaacactgggagagggacgtctttaagaggagaaattaagttcccaatgagattttaaagatgtactaatgaaacaatcaagtagagatatcaagtagttagttggacatgtgagcgtaagcagacttcttggctggagatatactaatggcaa

SEQ ID NO: 474622 - DNA, 576 bp, Homo sapiens
attaggaagagaggaaagggaaatatagccccacaaacccagaaaagaaagaatggagaaatggggcctccaaagttgaattcctggccgggcatggtagctcatgtctgtaatcccagcactttggcaggctgaggcaggcagatcacctgaggtcggcagttcgagcccagcctgaccaacattgagaaacctcrtctctactaaaaaaaaaaaattagccgggcatggtggtgcatgcctgtaatctcagctactcgggaggctgaggcaggagaatcacttgaacccaggaggtagaggttgtggtgagctgagatcgtgccattgcactccagcctgggcaacaagagtgaaactccatctcaaaaaaacaaaaacaaaaacaaagttgaattcctggcatggagaaaccccatctctactaaaaatacaaaatttagctgggtgtggtggtaggtgcctgtaaccctagctactcaggagactgagacatgagaatcgcttggaacccgagaggtggaggctgcagtgagctgagatcacaccactgcactccaacctgagggacagagc

SEQ ID NO: 474623 - DNA, 583 bp, Homo sapiens
gaagtgcgaagaagaaccctagggcggtgttactctaagtgtagttcctgcactgacagcagcagcattacctagaagctagttagaaatgcaaattcttaggtcccaccccagagccttttgcctgtggaagtcaggttaacctgtgaacaccctccatcctttgcttatacctcaggttgcccctttctgtcttgggcactgacaggtcacagcttgctggtgatgacataaagagaaaatgaatgacctgtaattctgtcatccagagataaccgctctcactatttagtgtataccttttcagayttatttccatgcaatgtaggtatacataatgaaaaacaacagagaaacaaaattctattatatcacaatactgctttttgaatttctttttaccgcaattaacactacggcggactatctttccatgtaagtaaagttatgtttgccaccttaattttaataacagcatggtatttccttgtatggacatattataaatcacttagctattccctatggtacaagtctttccacatttttagaatctctaaacaactttcagaagaatatccat

SEQ ID NO: 474624 - DNA, 453 bp, Homo sapiens
ccccaaatggtgaaatgttttgctcaaggctaccaagttaggatctgattgacagagacttggaatttgagcttctctgtcgacagttggattcactctattgtttgcccattcatttcctggtcaacttctccttcaacctctcttcccactggattcaacaagtttttattgagtatctaatacattattggagtcagatatagaacagtggttctcarttggagggtgagttatccaggagacagttggaaatgtctaatgacgtatttgtcacaactgggtgggtactaccagtatctaatgggtaggtgccagggatactgctaaacatcctataatgctcaagacagcccccagcaattatctggccctaaaagtcaatagtgctgaggctgagaaaccctgatatagaggatgtacagataagtgaaactttttttttttttgctt

SEQ ID NO: 474625 - DNA, 652 bp, Homo sapiens
catttcatgtaattcactgatggtatttttagcttttacataggtctccatggaaatttaatggaaattaatgaccctaaaagcttacatctgttttgattagattctgattttagtaaactgtttttcacaacctgagatgaactcatttatacgcaggcttatagctacatggaacatctactaagaagctatctccatcagaaaagatgataaaagctattcaacctttcataatgtggtaattattattcaacaaataattaaaacatagtgtcttccctaaaatcagcaaacaggcaggacaagaaaagaatgtgtaaacactcaggtaamggaagatgaatacataatcaaggagtaaggacaactaaatcgattctgaatatctttagcgaagatctaagggggctctggagaacatgcacatttgaaagggaaatgaaatccagagaagaaaaaaaaaggtaggataaataattagtgactgaggtgaaataggtacatttgagaaaaagactgaggagttgcaagatgaatcgatatgggaataagaatgaaatacaagagacaatgaaaatatgtggtggtttaattttttttaatcataaagataattgcagccaagacattttgaagtgacaagagcagc

SEQ ID NO: 474626 - DNA, 480 bp, Homo sapiens
tatgaagcggatgggaagagtaggagggctggggaatggttgccattactacatttgggagacctaaagatgaagatgtaacaaaacacaaggaagagatgaaattcataataccaaggttcacaacaccaaatgtaatgaagctaaaacgcaggaattgggaaaatacaatttaaaagttcayttgcaaagaatcatgcagttttagttgaaaggaggtttaaaaggaaaaaaaaaatatgacatagttgctaaaaaagccttttagaaagtgactaaatgcttactaagtgctggacattgtggtaagtgctttcagtcttagttatctgggacaggtatccaccctctcatccattcaaaatatattcagtgagtatctactatgatccaggcactgtactaagaactgggtaaccaatggtaagcaaagcaaaacagatacagtccttgccctcataacatctattattgagtgat

SEQ ID NO: 474627 - DNA, 480 bp, Homo sapiens
tatgaagcggatgggaagagtaggagggctggggaatggttgccattactacatttgggagacctaaagatgaagatgtaacaaaacacaaggaagagatgaaattcataataccaaggttcacaacaccaaatgtaatgaagctaaaacgcaggaattgggaaaatacaatttaaaagttcatttgcaaagaatcatgcagttttagttgaaaggaggtttaaaaggaaaaaaaaaatatgacatagttgctaaaaaagccttttagaaagtgactaaatgcttactaagtgctrgacattgtggtaagtgctttcagtcttagttatctgggacaggtatccaccctctcatccattcaaaatatattcagtgagtatctactatgatccaggcactgtactaagaactgggtaaccaatggtaagcaaagcaaaacagatacagtccttgccctcataacatctattattgagtgat

SEQ ID NO: 474628 - DNA, 577 bp, Homo sapiens
ggtaagcatccaggggtgaaacttgcaaagcaagtgggaaggagggcattctagacagaggaaataggcaagcacataatatattgaatagttggaasgcaaaggaaagatgggatttgtaggaaactttacaagcagtttgtcattgcagcagaataggggttcaaaatgagcctagacacttaaaatggttgcaattttcattatatgtcaacggtaactcaatacaactgactttaaaatgcaagatcatggactatttttaatgctgtcttgtttattgttcgaagaacgtcctctaagttggcatttatttcttcatatttctggtagactgtttctccatgattatactgcaggggttcctgaaggaaaatactgtattattcatcttcgcatctcgtatggcatctaatgcaacacatagcacactgcaggcactctatactactacttttggtagtgggcttaaggcgcccaggaaaaggaagtgtgtgtgtgcatgcatggatgcatgtcagtgtgaagacaaaaaatagtatatacaaaattcaacaaccaatctctaatacccatg

SEQ ID NO: 474629 - DNA, 577 bp, Homo sapiens
ggtaagcatccaggggtgaaacttgcaaagcaagtgggaaggagggcattctagacagaggaaataggcaagcacataatatattgaatagttggaacgcaaaggaaagatgggatttgtaggaaactttacaagcagtttgtcattgcagcagaataggggttcaaaatgagcctagacacttaaaatggttgcaattttcattatatgtcaacggtaactcaatacaactgactttaaaatgcaagatcatggactatttttaatgctgtcttgtttattgttcgaagaaygtcctctaagttggcatttatttcttcatatttctggtagactgtttctccatgattatactgcaggggttcctgaaggaaaatactgtattattcatcttcgcatctcgtatggcatctaatgcaacacatagcacactgcaggcactctatactactacttttggtagtgggcttaaggcgcccaggaaaaggaagtgtgtgtgtgcatgcatggatgcatgtcagtgtgaagacaaaaaatagtatatacaaaattcaacaaccaatctctaatacccatg

SEQ ID NO: 474630 - DNA, 501 bp, Homo sapiens
tgcaagtttgattagggagtctgctcttgcctatttctcaaacrgttcaggccctgacagaatcagtgtcacccctaaggtatttgcttcaaatgccccccatataatcaaaacttataaatgataaaccaaaagttgaggtacactcattgcctttcagaatgaaaccttccaaggggccatgatcatattgtgactggacaagaactatcatggatgaggcacatcatcttttggaaccatctatggaacagatattattattccattttgcggaagaggaatctgaggctcaggccagacagatgcagctaacgttgagtggcatcctgatgatcaccttcatcacaaaaggaaggagtgctctgaggactgtaggtggctctcagaaccctgacctccacggcagccatcaaggagtggcaaagggggtccacagtggcatatgcagtgagatccaagttttaggcattcggagtagagcaagccacgaatgagaac

SEQ ID NO: 474631 - DNA, 477 bp, Homo sapiens
caaacggttcaggccctgacagaatcagtgtcacccctaaggtatktgcttcaaatgccccccatataatcaaaacttataaatgataaaccaaaagttgaggtacactcattgcctttcagaatgaaaccttccaaggggccatgatcatattgtgactggacaagaactatcatggatgaggcacatcatcttttggaaccatctatggaacagatattattattccattttgcggaagaggaatctgaggctcaggccagacagatgcagctaacgttgagtggcatcctgatgatcaccttcatcacaaaaggaaggagtgctctgaggactgtaggtggctctcagaaccctgacctccacggcagccatcaaggagtggcaaagggggtccacagtggcatatgcagtgagatccaagttttaggcattcggagtagagcaagccacgaatgagaacaggttctgaaagtg

SEQ ID NO: 474632 - DNA, 501 bp, Homo sapiens
tgcaagtttgattagggagtctgctcttgcctatttctcaaacggttcaggccctgacagaatcagtgtcacccctaaggtatttgcttcaaatgccccccatataatcaaaacttataaatgataaaccaaaagttgaggtacactcattgcctttcagaatgaaaccttccaaggggccatgatcatattgtgactggacaagaactatcatggatgaggcacatcatcttttggaaccatctatggaacagatattattattccattttgcggaagaggaatctgaggctcargccagacagatgcagctaacgttgagtggcatcctgatgatcaccttcatcacaaaaggaaggagtgctctgaggactgtaggtggctctcagaaccctgacctccacggcagccatcaaggagtggcaaagggggtccacagtggcatatgcagtgagatccaagttttaggcattcggagtagagcaagccacgaatgagaac

SEQ ID NO: 474633 - DNA, 554 bp, Homo sapiens
aaaaactgtcaattgctgtcatcactttgttgcactgmaagagttcaattataccacaaagaattttagaatgtactaatttaattataatgcgaaaccttccaactacctatagctttgcctagttcagaaattagcaagttttctatttaaataagattaccttccctatatccaccaaccacatgcatggtgtatatgagtagtactatcgacatgtctttattttctacttctcattattttatccttctcctttgttcttcctttcaaaattatttcacattctcatttcagatatctgcaccctttagtataacacttagaaatctggataagatgatggccatcatggaacataatcacactctacattgatgaatggctatttacaaaatgatttctatcatttaaaagacaaaacgtcattgagcttttaaattccaaataaaatactacaacttaaatggcactgactagctatgagcttctggaagtcacccacctggggcagcatgcgattttcttcctccagctgtcttactcttgcctcc

SEQ ID NO: 474634 - DNA, 396 bp, Homo sapiens
tatctgctatgtgccaggtattgttctaggtcccggggatacagtagcagccaggaatgataagatctgggtgtttatggagcccacattccagcggtgaagacaggcagtaaaaaccaaatacaatattttatgaaggtgatttgtacaacaaaggcaacaaaacaaaccagartactaggatagagagatttggggaagacagctacttcaggaagcagtgtcagggaagagctctcagagaactaagatctgcatgtgaaaaagccaactatgcaaagatcttggagaagagggttttaggcagaaagaaaggtggtgctcagaagcactggctgggaagacccatattctggaatctagtcatggagagggaagtgacagcagcttgagaca

SEQ ID NO: 474635 - DNA, 612 bp, Homo sapiens
tgagcagctctggtctggaagttcagtgcctataggctgggatatccttgtttctctccacatggtcactcatcctccagcaaggggatggtggcaaggccttttaaggcctaggcttaagattacctagcacattgtcacctttgctgtactctgttgacctaagcaagtcccaagatgagatcagattcaagatgtaaacaaatattcaccattttatagccaccaggtcccactgcaaaaggtatagatacaaagaagagtgaaaattaaaggcaatttagcaattaaccttacttacttgtgactatagctccagtatcaagtctagaggttaggctatagaaaatgctcaataaataattgctgaaggaatgattaaatgttgtatttggacctcagccccaaaagatctcttatttctcaatgtgatccctgattgatatcacagatgtaacttgcgtagtcycttcttcctattcctgttctctggcctcagatcagccctgatgtcaaccagaaaattgccagtataaccagtcatcctatcattatcaaggaaaaaaatctaatggaaatattttcattctgatcaggtttaaaatatttaaa

SEQ ID NO: 474636 - DNA, 609 bp, Homo sapiens
cctggccacatttgcagatgatttcaccatttatttgatagtcggcacacttcttttgcagtgytttgttttctcttacaatgtaaagttccctataagtatcaaagggaaagaatcatcatggagaactgacaaaataccagtgtgtagttcatgggttattggacctggagctcatccgcatgcctgcggtattctacacggcattccttccttccctcctgcttcccaggcttgttattgcaactaaggcaatgcttctcttctacacatacctctcaaggggcatgttgcctttcataacttctttcaagtctgttggttatattaacttgactttagttgttcaaaaatttgagaacaaatgatgagcatacaaaaatacgtgccttggatcaaaatggctttggttcttacacttctcttttcctgccccagtgcagtttatttaaaacatagacatttaaaataggaatataattgagaggctaaaggagaggaagttgtaaaataaatgaatctcatttgcactattttgaaagaacatttacaatgcaacctgcttcaccccttgtggaaaaatgtaaaaatgggtctttctggactcac

SEQ ID NO: 474637 - DNA, 292 bp, Homo sapiens
cacttcaatctggagttaccatgggaggaaagccatttgttagtgatggcagaacagaaagaaaaagaccacgagctatccctgacatgtttacctttgatattctttcctctggacttctgattttgtgaaacttataacccttttattagtttagtctctgtggttgggtttatattacacgcagtcaaacataacacctaactgatatgtttaacttaatttctrcacttgaatgactcctcactcacttccttagcttcctttttcaatgacatcctttcgtttgcct

SEQ ID NO: 474638 - DNA, 572 bp, Homo sapiens
cgaagatcatggcttttacacctttgtttgcttatttatttatttatttatttatttatttatttttgagacggagtcttgttctgtcgcccaggctggagtgcagtggcgtgatctcggctcactgcaagctccgcctcccgagttcgcgccattctcctgcctcagcctcccgagtagctgggactacaggcgccagccaccaagccaggctaaattttttgtatttttagtagaggcggggtttcatcgtgttagcaaggattgtctcgatctcctgacctcatsatctgcccgcctcggcctcccagtttgtttgcattctttccccacaaataatgggcaaaactcatagcggaaaaaagggtgatgcaaataatatcttaaaaatgtatttgatttattaagcatcaatttgcctctaatgtttttatggacacttgttctaataaatgtattgttgaagacagttgacattgatgaaaagaatcaaataaaaattataaattcagagacacatttgaccaaacacccagggtaaagtgtaatagtcattccttccattggttagc

SEQ ID NO: 474639 - DNA, 469 bp, Homo sapiens
ctgggggttgtttgtaacaaccgtgttacaaacagtgtctattaacagcacgtaggacctcaaataaatagatattgaataaataaaaattcccagcacaattttctttgataataatcactagatttttatgggaatgttgttagcttaaaaaaaaaatgggccaggcacggtggctctcctgtaatcccagcacttcaggaggctgagacgggcagattgcctgagctcaggagttcacgaccagcctgggcaatatggtgaaaccccatctctcctaaaatacaaaaagttagccgggcatggcggcgttcacctgtagtcccagctactcaggaggctgaggcaggagaatagcttgaacccgggaggcagaggtagcagtgagccgakattgcgccactgcactccaacctgggcaacagacagagactctgtttaaaaaaaaaaaaaaaaaaaaaagagctcc

SEQ ID NO: 474640 - DNA, 643 bp, Homo sapiens
tggggcactcagcacctctcttgggtttagctgtgtctggtctccttccttccagggagctgaccatcctgttgctgctgttacctgctctgggtgcctctgtgtttatttcacagtgtaagacctggcatagattaggtgctcaatgactattttgtttgtgaattggtggatagatgacataaactgcagacrcgttcttggacagctggaaagggaggagacccttgggatttggaatgccactgactgccctgtacagagagcactgtgaggctggtgtcatacaagtgtccaacatcaaggattttgcccctagactcagaaagggtgtggaaaaaagcagcaggaagagaggcagggatgaatgaacttctcctgggcaggacaaggagaggagtcctcattgactgagggtcagagaagctgcggccctcagggctggctttcaatttggacacaggatcagagtgatgggggctggcatggccagggatgggagggatgtcaggggctgccaccccaggccaaacgccacccaaagagactctttacatagagagacttgtgtatttacctttagggtctttgagcttgtgaaatgcttttctacttggaagacacaaggtagaaaagcagccgc

SEQ ID NO: 474641 - DNA, 673 bp, Homo sapiens
gttcatcagatctctattttagctatgtgcagaatggctgctgtactcactcatggctccgtttaaagacttggctgttagacgtttatacatccgttaattagcagctaggmatgatttaaaagataatgttcctggcgttcagcatatatgaagcagtaaacagcttttgtggaagattaaatgctttagcaaatcagagacatttggtgacccccagaagccatttgttgccagaaaactgcaatgctacaattattgtgccagggagaaaacatactcaaccaatagcacaacaaatagaagaatgcatttgaatttgcctcttgtatgcttggaaatatgactcctttcttgtttattttttattttattgattgaatttcatttgaagagaagtttatagccaaatacaatgtactttaacataccttagattaaaaggatttaacagttctagggatcaaggtaggtttacaattaagaagttaaaaatatgtggctaatatgaaaaattataaattttttaaaatttctcttataaaattaaatataaatctgtatgatacttacctattgctatcaatggactgttaaaaaaattttggattttgtacaatgccaaccatatattcataaatacagtatgtttaaaaaatcaaaacatatttgg

SEQ ID NO: 474642 - DNA, 617 bp, Homo sapiens
taagggatgttcctcctctgaactctcggtagctttcagtagttacctgtgtgtatgcaccacaaacaccacaaatccttcacaattaacatctgtcatgttagggagattaaaacatcttttatacatttctgtgtgtatgctatttttttgcaaactcttttcctgaatcccatacgaattaaaaaaatggtaatttggggaccctgcttcagtattcttgagcctgtgacctgatgctgtcctttagctgtcaacactagccattcccaaaggtaaaaatacctacacccacgaatcccatttactctccacacagttttggatgtcactaaaacccagatgtttaataacatgtgtttttgaagctgttgataaggaatgacgagggtttagagaaatcatggaagggaaagcctgtctattccagccctggtcttatccaacatccagcctgcagctccccgtcacaratcatttttatctgcaatggtaaacgtgctggggatacctgcggacagacacccaggccaggaaaaggcagtatttgtgtagttgtcttctaataaggtcaaaggcgcaatgtattatgcagctctgcgggcagccagactcat

SEQ ID NO: 474643 - DNA, 613 bp, Homo sapiens
cattcttagcagatgaaaacataacatttgagcttctttctttctttctttcaagtgctgttggaatcaaattagctgctggaaaagaaaggctcaaccttcattttttgttcttaccctttcagctctaatcatcttgaagtgttaaggtgcataataaaaaaaatgtttaggtccacaggaagtggctcgtgatgaggactggctttaatagcacagggaaagctgaggacaaaaggggccagatgttttgacagggcaccgaggagcaaagaatctgggaaagggaaagaaacctttcaacaattctcagaacagggggctttttgtctccagctcttgaagaggtcctgtggcatgagcttccccctaagaggcaaaagatgagaacttcaaacatgcatcagcattgtgaacacaacatgttaatcttattaattatgaaaacccccactgagggagcatttacatgtgctagcaaatttacctgcattatctcatttagtctttgcaaaacaagcctgcgcagttggctttatcattcccattttactggtgagtcagyttaggctaaggaaatgtaaactttacttgtccatagacatgctcactg

SEQ ID NO: 474644 - DNA, 562 bp, Homo sapiens
tacccccaaaagaaatgaaagaaacttctgggtgtgccctcaaaattaaggggagttccacctccccttctttctctgttctgccacctgttatgtaaatgttatgatcactgactatgagaacaagcacaggacagaactcctaaaactcaacaacaaaacccaattcaaaaacgggcaaaggacttgactagacatttctctaaagaagatctacagatggccaacaagtacatggaaagatgctcaacatcactaatcattaaggaaatggaaatcaaaactgcaatgagataccacctcatacccattagggtgactactatcaaaacataaaaaagcagaaaataataaagtgttggtaaagatgtggagacactrgtacccttgtgcaccattggtgagaatgtaaaatggtacaatcactgtggaaacagtatggtggtctaatgggcacagagtttcagtcttagaagatgaagagttttggaggtatatgctggtgatggttgcacaacattatgaatgtaataccactgaactggacatttataaatagtta

SEQ ID NO: 474645 - DNA, 460 bp, Homo sapiens
actcataatctataaataatcccgtcacagcaagattaaatagatggtgaaagaacacaaaaagacaaattatacaaaagaaatgcaaatagccaataaactcctgatwtattgtcttcacctcattaataaagaatgcacactaatcatgtattatttgtcacctaagattggcaaagatttaaaaactaattgttggcaatggcatggagaaataagtgtcataatacccactggtggaagagaaaaacaatagaatctttaacctttttggaatgtagtttaccaatgtttatcacaatttagaatatgagttctagggctgggcatggtggctcacaactgtaatcccagcactttgggaggccgaggcgggtggatcacttgaggtcaggagttcaagaccagcctagccaacatggtgaaatcccatctctactaaaaagacaaaaattagccc

SEQ ID NO: 474646 - DNA, 520 bp, Homo sapiens
gtatggttttgtcaccacttgtggaattgtacaattaaagtatgtgtatttcactgtacacagactttaacttcaatttaaaaaatgtaaatacacattccacttgtactgaatcttgctaatgcaagactccagcgccttactaagtctcaacggtgttttctgaagttcccggagtagactatgtgtgctcatgaacaagtccttcaggcttccgtgcagcccctgctgtcattgtggcttctgcaggctcctggggcttcccaagcatccctgactttcctggcctggctgctgcctcccttccactgcagtctcccctgtctgttagatctggctcctcacaccaaaaaagctgtggttatttatctgtgatgacragcccctagcaggtcactcataactctcagtagaagactcccaagcagtgttactgtgagagttctgccaccatagtcatcatgtttctctgttgttggccccaatgtttgatcgattttgctgttattaatattgtttt

SEQ ID NO: 474647 - DNA, 521 bp, Homo sapiens
tgaactctatcctaaaaaataatctgcagtgcatttatattgatgtgcaagataatttgttatagcattgtttataatgtcaaaaagatcaaaaacattctagctctatgctacttagtagagtgtattttcataggatggaacattataccccattgaaaaygcataatttttaacttgagaaaatactcatggaacattgtcaaaagtaggattaaaaatctatagtatgattctacttttgcttcagatctacatatgtacattaaaaaagaccaggaagctatgcaagtaattttttagaatttgtctttatacttgcctatattccatttttgtgcaaggaatatagattatataatcagaaaagggtttaaataaagagagagcgtttgctgaccagttgagtggacaggaattggctcagtaatttaaactaacaatccataagcaaggggctctgatagcatggcaaaccagatcacccacaacgctccacatgaagaaaaggcgtttttttc

SEQ ID NO: 474648 - DNA, 579 bp, Homo sapiens
tggcttcacctctcacttggaagaagygatttacacaggatgtgcagatctcaacaaaaggacacaggaaacatgaaaaagcaaagaaatgtgacgcctccaaaggaacccagtaattctccagcaaccaatcccaatccaaaagaaactgaagatattttggatagagaattgaatatactgattatacagtcaatgggcaaggtgcaagagtcatttggaaaagaacaaagggaaaagatggaaacaagggtctgcaggaacaatttacccactgcaatgatatttttaaaaggaacctgacaatacttctgaaactgaaaaaaaatcactagatgaaatacaaagtaaactcaaaagcttcaatgacagaataaaacaagtagaagaaaacctctcaaaacttaaaatctgaagcatatgtcttaaaggtttaaagggttatactctggtcattaatgtgagtgaaatctgctgggtcaattgttatactggggtcttgcataatcattaaagtgaaatgagaataaaaaggaaaagaaaagaaaaagaatatactaggcccaaaaatcagtcaag

SEQ ID NO: 474649 - DNA, 661 bp, Homo sapiens
cattaataaacgggattcctggggtcctggctacattttgcctcgtggtgtccagattggagtggggcaggaggaggtccctaagagtctgagggaacagcaaggtcagtcagccaacagcaggtggtcctgctacactctgctccagagcacagatgccgtatgtggctgaagggcctgggagggggccaggagcacacgggctttgtgtgcactctaggctagctcagagaggaagacaaacccctcatgcctggtaaatggctgctcagccagtaaatgtgatcctacatccttcacagtcacctggctgctgcctcctcctccccgccaagrtgttcagacccaaggtactgcatctcttctcccacgacccatggaagaaaacagtgctgaaactgtcaccggcagacttttgcagtcatctcatcctcctcacgtaagtctctacggaaaagcctgcctaaaagttacctccaccctctagcagcctagtggacagagtccatcctccctggatctttgtggacagcagcaggccacatgcaaacggcagagtgctctaagaaaaagaaggaagtgagaaagggagggaagaagacaaaacaggggatacatttaaaaactaacaaaggctctgatggagccagatgaaccagat

SEQ ID NO: 474650 - DNA, 661 bp, Homo sapiens
cattaataaacgggattcctggggtcctggctacattttgcctcgtggtgtccagattggagtggggcaggaggaggtccctaagagtctgagggaacagcaaggtcagtcagccaacagcaggtggtcctgctacactctgctccagagcacagatgccgtatgtggctgaagggcctgggagggggccaggagcacacgggctttgtgtgcactctaggctagctcagagaggaagacaaacccctcatgcctggtaaatggctgctcagccagtaaatgtgatcctacatccttcacagtcacctggctgctgcctcctcctccccgccaaggtgttcagacccarggtactgcatctcttctcccacgacccatggaagaaaacagtgctgaaactgtcaccggcagacttttgcagtcatctcatcctcctcacgtaagtctctacggaaaagcctgcctaaaagttacctccaccctctagcagcctagtggacagagtccatcctccctggatctttgtggacagcagcaggccacatgcaaacggcagagtgctctaagaaaaagaaggaagtgagaaagggagggaagaagacaaaacaggggatacatttaaaaactaacaaaggctctgatggagccagatgaaccagat

SEQ ID NO: 474651 - DNA, 551 bp, Homo sapiens
cctctgtctctatttcaacatcttccaacttccaactcagctcccatctgctctgggagagctttgccacaaggacctcactttctgagactgcagccatgttggggacaatttgacatatggaccaaatgcttgaaaaatacgcatatcatttgatgcatcaattcctcctgtaagaatttgtcttaaggaaataattaggcacatgctcaatgacatacgaaaaaggatgctcattgcagtgaatttttttcatagttggacataacccaagtgtctagtaagaagatagtgcttaaagaaattattatacctccattaaaaggaataacaaagaaccactaaaataattcatatttattgacttggaaacatttacatgaaatatttttaaatgaataaagcaggttccagtatggaacaatatgtaaagtatgattttattatataaaaataatcacatgtagactcaaaaaaatcttgaaagagtcaataaagggtaacaaaacattagcartaattacctctgggcagcggagggagagttgaag

SEQ ID NO: 474652 - DNA, 556 bp, Homo sapiens
atttaaagtacctagcagagtaccagggaaactggaaagcctcaataawcggaatatagcaagggttttactgccatttctaaacaacagataggatgagtaaaaccacaaatatggtccagttacatagcataagaaatctgacaaagctcttacagcctttcgtatgttgtctcagtctgtttgtgctactacaataaaatagcttagattgtggccgggtatggtggctcacacctgtaatctcagcacttcaggaggctgaggcaagaggatcacttgaggccaggcgtttgagaccagcctgggcaacatagcaagacgccatctctgagaggtgacagcgtgctggcagtcctcacagccctggctcgctctgggcgcctcctctgcctgggctcccactttggcagcacttgaggagcccttcagcccaccgctgcactgtgggagtccctttctgggctggccaaggccggagccggctcccttagcttgcagggaggtgtggagggagaggcacgagcgggaaccccgggctgcgcgtggcgcttgt

SEQ ID NO: 474653 - DNA, 638 bp, Homo sapiens
catggtttaagataaaactgaaaccctatatgggaaaagraatagttaaaaagtagtcagtcacttaaacatacacatcaggtactgtcccaggacaatgacaataacttaacaacaatggctagtgtttactgagttcttaagagatgccaggcattgtgctaaatacttaataagcattaactaatttagtccccacaacaatattatgtagtatgtattatgatttttcccattttatggatgaataactaaaatattaagaaacatgttcaaattcccagttagtaagtatagagctaggtcctgaattcagtgtgtctagcacataagtcttgcttttatagatacttaaataacctgaagatttgttcaagaatcattatcaataatccttaagaaattatgcagaataaaaagatacctaaatgggagaccggcatgggttgttatttttaagacaaacaaaaaaacagtgaaatccataaaatatgaccagttctaacttgcatagattcacagaaaagctctaaaccaaaccgttaagcaaatagtgctgttgctttaaaaaaaatacagtatgtgatcaccaggaatcagcatagattcattaccagtccatttctgcactagccctg

SEQ ID NO: 474654 - DNA, 573 bp, Homo sapiens
cccttatcaataaattagctacagctcctcacccaggcccccactatgaccaagcatatggatggggaaggtggctgctggagggaatctctgccgtgggatggaagagcactacaaggtcccacagagatagggcattatgtccttgggtggcctcattacatgctaagttctaaccaactgaaccaactggccacagacaataaagctaatgtttgatagctccaaaagtcaagagcagaccacctgggaacttttaactaatgccaggtccaaaggtaggctacagaggggcctcrgcactgacaggatgaagcacgatgatggctgcgtgtaccacataaggtagaagccgtgtggaacagtgggtcacaggagatgggggggaggacaaggtgggagaagggcagagagacacgaaccagagatgcaatgatggagagcagggagcagggcaaggagagaaaggaggacagagagaaggaacaatcagagaagccaagaggggaagaaacaaagaaggatgcatgcacaggcaggctgagatgagtccatgagggcagggaaaagcag

SEQ ID NO: 474655 - DNA, 573 bp, Homo sapiens
cccttatcaataaattagctacagctcctcacccaggcccccactatgaccaagcatatggatggggaaggtggctgctggagggaatctctgccgtgggatggaagagcactacaaggtcccacagagatagggcattatgtccttgggtggcctcattacatgctaagttctaaccaactgaaccaactggccacagacaataaagctaatgtttgatagctccaaaagtcaagagcagaccacctgggaacttttaactaatgccaggtccaaaggtaggctacagaggggcctcagcactgacaggatgaagcacgatgatggctgcgtgtaccacataaggtagaagccgtgtggaacagtgggtcacaggagatgggggggaggacaaggtggkagaagggcagagagacacgaaccagagatgcaatgatggagagcagggagcagggcaaggagagaaaggaggacagagagaaggaacaatcagagaagccaagaggggaagaaacaaagaaggatgcatgcacaggcaggctgagatgagtccatgagggcagggaaaagcag

SEQ ID NO: 474656 - DNA, 573 bp, Homo sapiens
cccttatcaataaattagctacagctcctcacccaggcccccactatgaccaagcatatggatggggaaggtggctgctggagggaatctctgccgtgggatggaagagcactacaaggtcccacagagatagggcattatgtccttgggtggcctcattacatgctaagttctaaccaactgaaccaactggccacagacaataaagctaatgtttgatagctccaaaagtcaagagcagaccacctgggaacttttaactaatgccaggtccaaaggtaggctacagaggggcctcagcactgacaggatgaagcacgatgatggctgcgtgtaccacataaggtagaagccgtgtggaacagtgggtcacaggagatgggggggaggacaaggtgggagaagggcagagagacacgaaccrgagatgcaatgatggagagcagggagcagggcaaggagagaaaggaggacagagagaaggaacaatcagagaagccaagaggggaagaaacaaagaaggatgcatgcacaggcaggctgagatgagtccatgagggcagggaaaagcag

SEQ ID NO: 474657 - DNA, 631 bp, Homo sapiens
tgtaaatacagatgaagctccacccactaagtcactgcttactgcctgctatgcagcccagttcctaaaagcagacacactggtaccagtccatggcctgtgggttggggacccctgctctagtaggggtgagatgaagccaagccctgactcttctctgtctcaaggagagccctaggtrcataatactgagaagaggagcagctctgtaattgcagttttaggcacaaggaagcatcattgggcatcctgattatctctttaatgaatattcactgtcactatcttgataatatctgtaggtatcatttacaaaattttcttaactactatcttgaaataattttaaacttacaaaaaagttgtacagttggtttctttctttcacacagattctcataatgttaacatcttaaatgatcttaatacaattattgaaagcaagaaatgaatattgactaacactattaatgaatctacaggctttattttaattttatcagttgtcccctcatgtccacttcctgctccaggatccaatccagaatcccacattgcttttgatgatcatgtctcctttgtgccctcccaactgggatagtgctttgtgttttcttagagtctgtatttc

SEQ ID NO: 474658 - DNA, 459 bp, Homo sapiens
caatgcagtcacagtggcatggcagatcactgatggacgagccaaaactgatcctggggaagacggcttaggagacaatggcctccctagggttgggtttggcccagatgtacaggaatgaaatggggtctcctctagagctggcatgaagtttttgatgcccatcacaaacttcacagagcttgtttcagaaatcttgggcccacggcaggtaattgtgaactgatttggatctttgccatcctttctcagcatgtcaggatgcgtacaccacatgmaatattatctccttcgtaggctcatttatctgagaagcttgtggcgggcgttgatgaaccagttacagacctgtagtgtagacagatatgtttgctgggacaacagtgctttttcttgctcggaaggatggacattgtaatggtgctcatacagccaatcttgaagaatctgcacagactc

SEQ ID NO: 474659 - DNA, 578 bp, Homo sapiens
ttctctgcaccctggtccagacaccacctcctttcacctggattttgccctgcctcttcagtgacctcccaggatgcactctggcctctgtgaagccaaagctctgctcagatcttttctaaagtcaccctcaaaaatgagtcacatttttcattggcatctcttgattcctagaatgaggcccaagctcctccccatggccaacagcatgggctgcctacagtatgggctgcccccatcccagcctcaccttgcttactcccaaaagcctctttctgactcctgcagccactgtccccttcttgctgcccttgaacatgctttgactaccctgttcccttggggacttcagacacaccaggtatawgttttaaatagaggaacctggaacgaattcaggaactttgtaccttagctttaagacaacaaaacaccaagccagccttttgtaaaaagacaggactatttacacatcacattcctttttttaatttttattttcttttttccctttcttttgcctgttctttcatttgaggcacagatcccttaaagacactaagaatataaacattagc

SEQ ID NO: 474660 - DNA, 625 bp, Homo sapiens
agctgcagataggagctctcctctcyagggcctcctctttgctgagggctgaacacttgacaggatgacctgcctacagagaggagctacccactgtgggtctcttctgagctattctatcacttaacaaagctcctctttgtcttgctcaccctccatttgtctgtgtacctttcttcctggatgcaggataagaactcaggcaaaagtgccagcagccacagaggtttccagccagaaagagcaacaccccaaagattccataacaataccagaaggaaaaaaaaaaaaagaaatgaatggaagaaatgtttgaaacaataatgactgagaatttccccaaattcatgtcagacaccaaaccacagatccaggaagctcagagaacaccaagcaagataaatgccaacaaagcaagacctcatctcctgaaaggtgcttactttctgggagacacagatcccctcctggaagaggcccatgaccacacggcaggagttcctttccgagactgccaagcacctgtagcagtgcagaccctgagctctcttcatgcacagcagggccatcagcaggaccagggcaaaggtcttcatggcataggaactgctcattcttcctctct

SEQ ID NO: 474661 - DNA, 666 bp, Homo sapiens
aatgaagagaactgctgtatatgtcccctatgaaccatgggagcagtaagtaaaacttggtaaaggtcatcaaattagttctgccaggctctcacctgtgactgtgaaggcacctcatgtaaagtaacatgccttcctgggaatggcatttgataacagcagatttgttctcagtaatatgttttsttttcatttcatttcttttctgttcttttccagatagggtctcactgtgttgcccaggctggcctctaacttcaggagttcaacagtttctcctgcttcagcttcctgggtagccaggacaggtgtgtgccaccaggctaatcttcagtaacgtgttttctttgatctatcattgcatgttttgttagcctcccatggctggattgaatcttgaatacctcccatgatcttatcacacccatcttaactagaatatttccattcaacattgtggccacaaattttccaatcttttgaaatgaggtcaaagctcttcatttgaatttgcttattagtgtttacctatattgaaaaaaaactacatcattaattgcatccttcagttctggtccttataagtggaaagagagctttagagatacttggaaagatcagaatgtagaatcatagatatttacactttgttctcaatattttaca

SEQ ID NO: 474662 - DNA, 486 bp, Homo sapiens
ggccaaactctccccaaggctcgccgagcttttagctagtgatcaggtctgtaaagcctgacctttatcgtaggataaaagtaggctttgttcattcatttcatcttccctaaaggtaccattagcgatttattgatttttctttttagagaaaatcttaaagtttctttttaagacagagatttgagcctgtgcatctaaccctccccaacttccaccttcctgctggcatacaaaacagggaaagactgtgtcagtgctgaagctccggaggaaagagagccccttggcagaaacactgtagacttctgctgggccaagagctggggaaggcagactgcaaggaggacctaccttacataggagaccacgtttgcctggaaggcgagtrgaggaaaacccaggggacgccactagtgcctcagacttaaagggagagctggactgcagatgacgatggacagaggggttgcctggggtgcacag

SEQ ID NO: 474663 - DNA, 540 bp, Homo sapiens
gcccagtgtgatggagaaagagccccacgtgtggagcacctgccaggtgccaggcactgcgcatcccgatctctgggtgagctgtgctccaagggccaagtccatgtcagtgttgccataagagatgccccaggcccagcaggcastgcatgctccccacccccaccatgagctgagtgtttctggtcctcacatcagccctgcaaggtagatcttatgatctttgtgtcaggggtgaaaaactcaggcacagtgttcagtgactagctgaaggggcagagccagaattcgaacccaagtgagcctgacaccagggcctaggttttctcttccatgacacagttctcaccacactgagagtcagaggaggcacaggtcctctcctggggcttccagaagaatactgcttacaagaaaaaacaattataggaaaaataaggtgtgagggatactacggacacagctctgcattggctgggagagggacagatcaaaagccttctagcaaatatcaactccatgaggacaggcactgtgtct

SEQ ID NO: 474664 - DNA, 527 bp, Homo sapiens
gcagtgagcagagcgcccaggtggcagctctggttagcggactctggcaaatggtatgcccttccaacatgggattgagtatttgtaggatgtcagagatgggaagagctatgcaatcgtcttggccagccactctgtttatagatgggcaaggtaaagctgagatcagaaaaggaagctacctggggtcatgcttttccattctccagacatytggtctccttccctaatcgggggaaagtcaggtgaccaccacggatctggtcagacagggcccagggcagctatatgagctgctcagattctgagaggacaggtcagggctgggtgtagactgagccaagcacctagcctggaggttgatttttctaaagccaagtcactgactctttgtgaacagtggcaggcagtcaaagtccacagtgcacccacacatcacttagatcattccacaaaccttacttgtgggattagtctggcgggctgtgggataactccaggcatggctgacaaaaaccctgccctcc

SEQ ID NO: 474665 - DNA, 701 bp, Homo sapiens
atattttcctgtaagtgaaatttataaacatgaagcccacaattatagagcaaagatagttgctttgcgtttcctaggatcaaatggaagcccctattcagaactaaatgggctggctgtggtggctcacacctgtaatttcatcactttgggaggctgagaagggagcattgcttgagttcaggagttcaagaccagcctgggcagcacagcaaaaccctgtctctacaaaaaaatacaataattagctaggagtggtgatgtatgcctgtagtcacaactactcgggaggctgaggcaggaggatcaattaagccccagaggtcaaggctgcagtgagctgtaatcacattattgcactccagcctgtgcaacagagtgagaccttgtctcaaaaaacaaaacagacaaataaagcataaacaatttaaaccaggaaatttcttctgatctattctgtgtgtatgaagcacctcctatctagaacatgggagtgatattrtacatatatgataaatccaataagatctctttggagtgaggggtgacatgagcataggagactggctttatgcattgcaaaattgtcaaatgctgtcttgggactccttgggttatagatgacataagcctacccaactcaacttaatcaaaaaaggaattaccggttcttgccactgaatagttgggtttggatgcag

SEQ ID NO: 474666 - DNA, 410 bp, Homo sapiens
gactgtctcatactgagttgtctccaaggggtcccgtgaggttgcagggcacccgttgctgtggagtcctaaagagggctttcagaggcacaaagaagacagacacagcaacaataacaaatgaatgaaggaatcagtttttcccaagaaaagagccactgtatcccaataggcctgtaccaattccagggaaagaacaacatagcgacaacataaagcaatctgtgtgattaggatgctgcactcatcccagccaggtacatgtccttgaactggaggtgctgcgcacggcacctgtttacaaattaggcaaccrgaggtgctgaaaagtattcatctcttctgctgcttccttcagtatgtataatattagcaaaatgtcccagtggctggtaaatcatctttaattc

SEQ ID NO: 474667 - DNA, 413 bp, Homo sapiens
ggagaatcagggacttcttcacagagggaatgggactttagctcagccttaaaaaagtgagtgagacacatgacaaaaggcactrtcatataggtggtgatggtggtttcattcactagattccatctaagtctccattcatcatgcaccagagttcaacactgattgcccgcctcacccagcgtgggttaaggaataggttttactggtgaaagggaaaacttacaaggctaagtcagcaagagaaaagagggagtactaggtatactaggtttggattctgctgaacctactctgtgggtttgagtttccctggtattccgccttaccacagggcaagaatgaggaagcattcttattggtggggaatacagaggctacttaggaccaagcagttcaatttagggccccag

SEQ ID NO: 474668 - DNA, 627 bp, Homo sapiens
gtgccactataacatgatgtaaaattcatctattctgtaaacttcttttgggctcttaccccatttcattattagttggccaatagcattaacaagaaggacttctatgtacaagtcattatactgagaccttgaaggttttctagcccagacactccaacacatgatcttttctctagcatcccttcatcttgaattttgtccaccctaacatactgttagtaatacagaactctccaccttttgaggaaacccattccatctctcaatgaaattagctattagaaagccttcctttaatgcaaaacgcagtctcctcccaggaggattatttctgtgacagtatatactgggggaaatttccattgcacttctagcctttgggtttctatggaaatagtctaatctctcttccacaaaacagttcttcaaatatttgaatgacagatccatagttctattctgtagactctgttggttctcagataatgttrgttattgatgaattttcttccattatatttccttagaattagtttcaagaagacctaaaaagaacaaatacaaaaatttagttgcgaactaaaaacttgaggcaagttgtgagaagaaatgtgggaatgattg

SEQ ID NO: 474669 - DNA, 534 bp, Homo sapiens
tcccaagcgttttggataagagatactcaacctgtatcggtttcatgcaactttttgaaatattagagatttaacaagtcatgactcacttcattgtctgtatatcgtaaatgttaaaggccaggcacggtggctcacgcctgtaatcccagcactttgggaggctgaggcgggtggatcatagggtcaggagtttgagacaagcctgtccaacatggtgaaaccccgtctctgctaaaaaaaaaaaaaaaaaaaaaatmcaaaaattagccgggcatgatggtgtgtgcctgtaatcccagctactcgggaggctgaggcaggagaattgcttgaaccttggaggtggaggttgcagtgagccaagccactgcacaccagcctgggtgacagaggaagactctgtctcaaaaaaaaaaaaaaaaaaaaaaaaaaaaaaaaagttaaagtacggtttggtgtttgtctttctttagacttaatgtacatgttgaaacatcagtttaagcagtgctttttcttttttataaagca

SEQ ID NO: 474670 - DNA, 583 bp, Homo sapiens
ctgttttatcttctgtgagttttaggaatttgtcatcaacataatccaaaagaatatcagttctgcaggaactgataatattgtaatcgaaattcttctacagagtctagtttttcttagaaaatgatgcatattgtatcattttaatgtctatacaactgatagatattcacttgcaagtaatcagttagacaggaagacaccttttctttattatcctgtgtacaaatgtaataatctatacttttctatatctcagatttgtgagcagaatttttaactctgatttagccttacaggggatatgaaaacataaataaaatagaaaggtggaaatactaaaagtctttaattcctatgtaataagtggacctatttatgaaattaactataaagaatttaacacagatgcctcttgaaggaacaaagaactgtaggaatggaatggtagctcagatggcttaaaatatttagtttggtttactgttagttcacttttgatgtgaatttgatgttactccaacccattttgttatgtcgaaatmctgataatgtgatatatcaatagatgacccaaagtgag

SEQ ID NO: 474671 - DNA, 478 bp, Homo sapiens
ctgcaggactgcagttagttaggggtaggaggcccacctgggatgggcttctggcagctctctgaagggtggagaacatgacctggatgttcctgcctgaggaaggaaccatggccacagactgggccctttttcctgctgctggtcaggggacttagaagccctccccgagtctctggaaatcttggatctgaactccaggctctgggcttctaagccgtgcctcccgctcccctgtcacctggtgrggaatatgggatgagggagaagacagggtgaggctggcacaacggggagagggtcggaggaaaggatgccagtgatgtgcttcagaccttttctaaaaccacaggttgaattgttgatttctggtcaggtgtggtggctcaagtctataattctagcattttgataggccaaggagggaggatcacttgaaatcaagagtttgagaccaacctaggcaacatggtgagac

SEQ ID NO: 474672 - DNA, 516 bp, Homo sapiens
gtaatcccagctactcaggaggctgaggcagaagaatcggttgaacccagcaggtggaggtggcaatgaaccaagatcacgccactgcactccagcctgggtgacagagcgagactctgtctcaagaaacgaatttgggggctaccyaacctatcaatgcactaggcttttacatctttttttcttttaaagacaagagtcccactctgtggcccagactggagtgcagtggtgcaatcatgactcaccacagcctccatttcttggactcaagtgatcctcctgcctcagcctcccaagtagctgggaccacaggcccaacaccatgcctacctgaaacaagctttttacaaagtgacaaatcagctcagttcaatacatgtgggtgggatcctgctgttctgctgccctgcccctgtggctgcaacctcagaaggcaaatacccacagggaacagacgcgcccagaacagtgtgaggcagggtccgcgggggcttccaaagaagaagacagaga

SEQ ID NO: 474673 - DNA, 516 bp, Homo sapiens
gtaatcccagctactcaggaggctgaggcagaagaatcggttgaacccagcaggtggaggtggcaatgaaccaagatcacgccactgcactccagcctgggtgacagagcgagactctgtctcaagaaacgaatttgggggctacctaacctatcaatgcactaggcttttacatctttttttcttttaaagacaagagtcccactctgtggcccagactggagtgcagtggtgcaatcakgactcaccacagcctccatttcttggactcaagtgatcctcctgcctcagcctcccaagtagctgggaccacaggcccaacaccatgcctacctgaaacaagctttttacaaagtgacaaatcagctcagttcaatacatgtgggtgggatcctgctgttctgctgccctgcccctgtggctgcaacctcagaaggcaaatacccacagggaacagacgcgcccagaacagtgtgaggcagggtccgcgggggcttccaaagaagaagacagaga

SEQ ID NO: 474674 - DNA, 516 bp, Homo sapiens
gtaatcccagctactcaggaggctgaggcagaagaatcggttgaacccagcaggtggaggtggcaatgaaccaagatcacgccactgcactccagcctgggtgacagagcgagactctgtctcaagaaacgaatttgggggctacctaacctatcaatgcactaggcttttacatctttttttcttttaaagacaagagtcccactctgtggcccagactggagtgcagtggtgcaatcatgactcaccacagcctccatttcttggactcaagtgatcctcctgcctcagcctcccaagtagctgggaccacaggcccaacaccatgcctacctgaaacaagctttttacaaagtgacaaatcagctcagttcaayacatgtgggtgggatcctgctgttctgctgccctgcccctgtggctgcaacctcagaaggcaaatacccacagggaacagacgcgcccagaacagtgtgaggcagggtccgcgggggcttccaaagaagaagacagaga

SEQ ID NO: 474675 - DNA, 616 bp, Homo sapiens
ctgctgagaggcagcgctcacccagaaagaagagaattcaacaactgcatgcccaacccaactttccctagacacataatgataacttgggtgccctgagtaaccatgtgccagggattgtgctcagtgctatgagaacataatgtccttcagacacagaacttgaggaggtaggaactttttgcgcattcagcagatgaggacacagaagaccagagagtccgaggaacttgygcaaaaatcacaaagtaacaagggctaggtccggggctccagaacagatcacatccaaaagtccatgcttctactgacaatattcggcctcctcgctcaggaggagcttgggcttattcttttaagtgtcttattctcaaggcttgaaggagccttagccctttgcgccaggaatgttgctggccaagttgttatacagacaggatgttcatagctttttataagtctgcatgtcttgatcacttttagataaattctattccggatctgatgaagcccccattcttggcaagtgatatctgatcatgaattttgatgcattcctaaatgttatagaataacccctattaataagaacacaaataacctgaattcttaatca

SEQ ID NO: 474676 - DNA, 616 bp, Homo sapiens
ctgctgagaggcagcgctcacccagaaagaagagaattcaacaactgcatgcccaacccaactttccctagacacataatgataacttgggtgccctgagtaaccatgtgccagggattgtgctcagtgctatgagaacataatgtccttcagacacagaacttgaggaggtaggaactttttgcgcattcagcagatgaggacacagaagaccagagagtccgaggaacttgtgcaaaaatcacaaagtaacaagggctaggtccggggctccagaacagatcacatccaaaagtccatgcttctactgacaatattcggcctcctcgctcaggaggagcttgggcttattcttttaagtgtcttmttctcaaggcttgaaggagccttagccctttgcgccaggaatgttgctggccaagttgttatacagacaggatgttcatagctttttataagtctgcatgtcttgatcacttttagataaattctattccggatctgatgaagcccccattcttggcaagtgatatctgatcatgaattttgatgcattcctaaatgttatagaataacccctattaataagaacacaaataacctgaattcttaatca

SEQ ID NO: 474677 - DNA, 560 bp, Homo sapiens
tagaactggaaggatctgaaagggggccatatgcctaatatcacatttctaaatgcttcctttttatagaaaataaactctaaattattgaggaaggaaagctaattcatcataatggaggtttaaacataaaaggaaaagaagaaagaaaataacatatgcttggatttcaaaatcctgttacatcatagcacccaaaattggaaggaagatagaaaacacatcttgaaagcctatttcgcaggcttggctccacctcacaaaatccctgtgccattttcttaacaaacttctttacatgtagcagttggatctaatgagaggctaaatcttgcctttgtgttagaaattgatttatttttttccctcgttctgagttctcctgtagccagccccagaactcaagagcctgcttcattgttcatcatttgtatttatcacttttacagactgccacagggtgctcagaaatctaccacgctcttcaaaagaaaacacaaaatccctgctcttygcaggggaccagcccattaaaagcattggcagaatctaagaaaaga

SEQ ID NO: 474678 - DNA, 288 bp, Homo sapiens
cccaatacacttaaaatggaagtattattctctgctgaaaatctgtttattgmaaaggacaaaagggaatccagattgggctaggaagctgctagaggagcatttagtctcagcatctcagtgtcatgatcagtgtctgatgttgcactgtttgtatcagtggctgatgtaagctgatgatggcatttttttttattatagttttaagttctgggatacatgtgcagaacgtgcaggtttgttacataggtatccatgtgccatggtggttagctgcacccatcaacc

SEQ ID NO: 474679 - DNA, 619 bp, Homo sapiens
acactatggtcataataataaatgccttatacatctgaagaaaatcgaccaatagtattgtccattaatttgctgaataaatgcacccaagaatcacaaaatacttttcacatcttactaatatcttatatgctcaatagcaaaacataatctgtgataaatattaaaataaatttttatgatagaacattccctaattaataaaaaaagaaaatcttttcccttccacctcccttgcatcttgtcccaaagtatatgaaattttacaggaaccaataattaatgattcccaacagaaggcyttatactgaaaaaatgtaaggtaaactttcaccaacaacagattcagcaaaaccagtatcaatacaacttctaaacatctttaaaggtacatataagtatctatagaacatttcttttacaaacagtaaatgtctcatacctgggatgttatataaaaagtcccataattgctcttcttccatgtagctcacaaaaacgtttgcaaatgtttgtggagaaaaactgcaatggtacaatattttaaagatggcttccatcaagctgggtccttggttcaggttattttctgtgtcggaaacttgttcttgaaaggtac

SEQ ID NO: 474680 - DNA, 631 bp, Homo sapiens
actaataagtgaacaataaatgttgtttatgtgaggaagtagattccctagtgtgagttttctctttaggagagtggttaagcctgaagctaaataaattgctttcagataaactttgtgagatttgagttccaaacagtactgcttgggagctaaggacataaaatcagattcagggcttgggagggagcaagctctgcctttctgcytggaacacagtgaggcctgaggagttgtgatgacctttggcaccacatggctttacagtttggagagcaccaggagagaagcaatattctcacaagagacactgctcctaagtgccttttgggaaccaaacattgagatggatgggagagaatatggggaactggtcctgagcagatgtgagaaaacaaagattatcagaaatgactgaagctatttacacaaggaaaggctatgaacctcatttgtatactaacaggctggtagggcccgatgacatttgcctcattcacatataaacacaatgaaaatataaggcagtgcatgctaagggcaaataaagtagccaagacgaaagttcactatgaagttcaggggagcaagagattagcgttaagacagagcattcaaagctccgaaacat

SEQ ID NO: 474681 - DNA, 631 bp, Homo sapiens
actaataagtgaacaataaatgttgtttatgtgaggaagtagattccctagtgtgagttttctctttaggagagtggttaagcctgaagctaaataaattgctttcagataaactttgtgagatttgagttccaaacagtactgcttgggagctaaggacataaaatcagattcagggcttgggagggagcaagctctgcctttctgcctggaacacagtgaggcctgaggagttgtgatgacctttggcaccacatggctttacagtttggagagcaccaggagagaagcaatattctcacaagagacactgctcctaagtgccttttgggaaccaaacattgagatggatgggagagaatatggggaactggtcctgagcagatgtgagaaaacaaagattatcagaaatgactgaagctatttacacaaggaaaggctatgaacctcatttgtatactaacaggctggtagggcccgatgacatttgcctcattcacatataaacacaatgaaaatataaggcagtgcatgctaagggcaaataaagtagccaagacgaaagttcactatgragttcaggggagcaagagattagcgttaagacagagcattcaaagctccgaaacat

SEQ ID NO: 474682 - DNA, 553 bp, Homo sapiens
cagaagccctacaagggaggtgctattattgcaatccccattttacaagtagagaaaccgaggctcagagagatgagaatgggcggcagtaatcatcccttcctcctgggggtggttgtgaagcttgaaggagacactgtaagcgctcgggtggtaccctggtactccatcactaacctgctgtgtgacctcaggtaagtcgcttagcctctctgagcctcagtttcctcatctgtaaaatgggaatgattgcaatacctacctccagggcagattttctcaacctcagcgctgttgatgttgttgactgggttattctgtgtggtgcggggctgtcttttgttttggaggatgtttactaccatccggcatggcggatcccagcaaaggcccctgtgcaggcctggtgaggtggccgagcttcctggtggggaggcyttccccctctcctccctggtcaatctatttgagggtgaggatggctccccttcaccctcacctggcacccaggacatccccagtccatggagggattcaatctgggctctgcagc

SEQ ID NO: 474683 - DNA, 333 bp, Homo sapiens
agctggagtcctggagctcctgctcccctgagggaaggtctggagggatgggcaggtgtctgggctggtagtcctgattctacttcttggggtctgctccaccccagccyagctttagggctccacttcctaggctgaagccccagcccagagagctaacccttcagccttgtccagattcaaaacacccacctcaggacaccggcaccctccacagccccaggccttacctgtgaacacctgcacccaaatcagccacctgcaatgtgctgggttctgggtaagccattattaaactggccgtgatctcacaagtcaagataccatgtcaag

SEQ ID NO: 474684 - DNA, 575 bp, Homo sapiens
ctctgctcgggcctcttggggcctcagtggctccagaaattgcaatgggtagacgacgctggagcagcaggggccccgagccagtggggacagttccgccctgccatcctggccccactgccccagcctcacctgaagcaccacctgcggtcaggagtgccgtccgagctcttgcccacggtgaccatctccccagagcggaaggccttcctcaggaatacggggaaggagcgctcaatgtccaggatggtggtggcccactgcggggagggagggtcaggagggacatcggtgagcctcacagcctgcgcctgccgctctggtggcagaaatgagacaacgggccagggtgggcccagaactaggcatttagactcctactccccactagacacagggtttataaactcaaatacccacaggtggcaggcaggaaaacaaatgggtgaaacaggatcaggtgcagaaaggctgccgcccaagccctatcacacttacacagcagttgcctctcagtgagggaggggtagagactggggmgaacagggagcaaatgcccacgtgtaagggggcag

SEQ ID NO: 474685 - DNA, 616 bp, Homo sapiens
ctgccactcaccccacctgagggctgccaggcaggaatccggaccctgcactgcctggagcttccaacttttcaagaaaagccagaaatctgggttttcatagggaatctcttaatttttaaattttgcagttttttgttgttgttgttgtttttaatataatggtctgatgctgggtgcagtggctcacacctgcaatctcagcactttaggaggccaaggcaggtggatagcttgaactcagaagttcaagaccagcctgggcaacatggtgaaaccccatctttacaaaaaatacaaaaattagccrggtgaggtggtgcacaccttagccccagctactcgggaggctgaggacagagaatcacttgagcctgggaggcagaggttgcagtgagccaagatcacaccattgcactccagcccacaggatgcccagtttgcatcctgtgagtaatgcccagtggggaaactgaggcccaatgaagtaagcaatatagataaaggttaagagcaggccagagctgtttccctcagacccagtcctgggaggacaaccttgggcccttttttctcactgcaccattttcctgaaatgcacagtcaaggtaaacac

SEQ ID NO: 474686 - DNA, 519 bp, Homo sapiens
tgttgggctttaagaaaatacctgggctgctagtttaattattaaattttatccttccatgtatccatcctccttcaatgtggctttacagcttctcccactaagaagtggagtctaggccaggtgcagtggctcgcgcctataatcctgcactttgggaggctgaggcaggaggactgcttgagcccaggagttcaagaccagcctgggcaacatagcaagaccctgcctccaccaaaaaaaaaaaatggaaaaaaagaagtggcgtctatttccccatcccttgaatcgaggctggccttgtgacttgctttggccaacagagtaaggcagcagtgatgccatgccaggaggtgtccttgaacacttctgctcatgttcttggaaccctaagrccaccatgtggacaagcccaagctagctgtccagaaatgagtgaccatgtggaagatagatagcaaaccccctctaaccaagtccatactagctagaccagtcagccagcagccagcctgccag

SEQ ID NO: 474687 - DNA, 498 bp, Homo sapiens
tggcaagagtaatcatttactagataggtgttgaatgaatggccgaatcartgaattggttattgtcagataaagtgatctaggcccagagaagccaagcgtcccaaacaaggtcacacagcaaggcagggacaggactggggcatgtgcctaaaacactcatgttctttctgtgaccccatcttgccccctccctgcctggcatcatcccatctgcaggaggccagcctctcagagtccccgcctggactcattacccccctggccaagcaccatccagggagcactgttcattttgaaaccctatctgcaaatcagactgtttataagctcaaggtcttttgtgactttaataaaaaaagggggggcagggaggggaaaaacgtcgcatgcctcaatgattagaatgcttggcaccttccctgacatgggggctgataagacgccttatctcggagacacccgaggaaaaggtcccctccaccagataacgccccc

SEQ ID NO: 474688 - DNA, 498 bp, Homo sapiens
tggcaagagtaatcatttactagataggtgttgaatgaatggccgaatcaatgaattggttattgtcagataaagtgatctaggcccagagaagccaagcgtcccaaacaaggtcacacagcaaggcagggacaggastggggcatgtgcctaaaacactcatgttctttctgtgaccccatcttgccccctccctgcctggcatcatcccatctgcaggaggccagcctctcagagtccccgcctggactcattacccccctggccaagcaccatccagggagcactgttcattttgaaaccctatctgcaaatcagactgtttataagctcaaggtcttttgtgactttaataaaaaaagggggggcagggaggggaaaaacgtcgcatgcctcaatgattagaatgcttggcaccttccctgacatgggggctgataagacgccttatctcggagacacccgaggaaaaggtcccctccaccagataacgccccc

SEQ ID NO: 474689 - DNA, 518 bp, Homo sapiens
ccccacaaatgctggctgctattttcttgctgtgtaaccttggccaagctccttcccagctctgggctggactctcctcacctgaggggcagggacttggccagctggagttgctcagcccagggttccagtcccagctctggcctcttttcagctatatggccttgggagagtccctcaatctctctgagcctcagtttcccccacctgtagaatggagttcatcattcccatagattgcacggtggtttccggatgccaacaagaaagggastaaaaatcctgaattcctggcaagccaagtgcctgtgtcccatttcctctccggaaagccctccaaatacctccctcatgcattccttcactcactcgttcattcattcattcaacattgggtgttccaattagaaacttgggaagacattagtgtacaaagcaaaggaccctcacccccacctcacaagggaagagagatgacaagcagagaagcactttacgtccagcactcccattttaca

SEQ ID NO: 474690 - DNA, 424 bp, Homo sapiens
ccggatcagccaggccgtcgaagggcaccaggtctcagctaccacgacgctccgctcgacgggtcgcagccatgcaggagtggcagaggctgcctgasgaagccctccttgggggtcgatgcctctctccgggtgggaaggggcgctgtcggtgagggctatcctggcgccggcctgcgccgtccgaagtcgggggggaggggaggtctccgttcagcaggggtcacgcccgccccggacgggggccgcgcgggcgctcaggcgacgcatcttcgccggggcccgtgatcgccacgtccggcgggcggcgctgcgcctcccctcggggccccgctcaaggctgcagctcggcccgcgccgctcccagggcgccctctccgcccgcgctgggagcccggcggccgcggcccctttcgccagcccc

SEQ ID NO: 474691 - DNA, 424 bp, Homo sapiens
ccggatcagccaggccgtcgaagggcaccaggtctcagctaccacgacgctccgctcgacgggtcgcagccatgcaggagtggcagaggctgcctgacgaagccctccttgggggtcgatgcctctctccgggtgggaaggggcgctgtcggtgagggctatcctggcgccggcctgcgccgtccgaagtcgggggggaggggaggtctccgttcagcargggtcacgcccgccccggacgggggccgcgcgggcgctcaggcgacgcatcttcgccggggcccgtgatcgccacgtccggcgggcggcgctgcgcctcccctcggggccccgctcaaggctgcagctcggcccgcgccgctcccagggcgccctctccgcccgcgctgggagcccggcggccgcggcccctttcgccagcccc

SEQ ID NO: 474692 - DNA, 617 bp, Homo sapiens
ctgcctctttctgtaacccctccactgagctcctgcttgcgtgagtctgagctgctgagggtggcattcaaggccctggccacctggcccaggtctccttcccgcaggcccctggaaccacacatggcgtccccagcttcctctcatacgccaccctctgttgactgttccctccaggccaggcactgtgccaaaccctcatggccttgcccttccgcagtccttgtggcagccccgtgcttcagaagaggtcagacgttcaaggagtagagtgtcaagcgggggtcacaaacaaatgcctagagaggacagatggcagggactgaggtgggcagggagggtgtgtcctgaccagagaatgttcacatttaagcagcgttcaaatacccagcagggccaaccacacaccaggtgggcgggatgtggtccacaggctgccagtttgagaccactggtggccaagagaggatttgtgagycaggatttgagcccaggtcctccatccccctggctcctgctctcagtcactgggcagcgttggtactgtggctcgggcccattctctcacactgatgtgccctctttcctccataaccggagcctcactggtcctttag

SEQ ID NO: 474693 - DNA, 584 bp, Homo sapiens
cccctggctcctgctctcagtcactgggcagcgttggtactgtggctcgggcccattctctcacactgatgtgccctctttcctccataaccggagcctcactggtcctttagggtctaactgaagcactgcctccccgtgctgaccacctgaacagactgctctccgggtctgtatgtgtttcccctgccccacgcccctatgcaaagggcctcatctgtgagtcacagcacctgatccaaagtggtgaaatgtgtgtgtgggggtgctgtccatgaggcagggayggcctccacccagcgttccaccatgcactggtgcccactggtgcatggtacacagtaggagcttgcgttgtgtgctgggtaaatgcagtaagaggggttgcctacatacccctggcccactggctctcctgaccctcaggtctcagccaaggtgtccctcagccaggcagcccctgacgtgccctcgtaggacccccatgctgtagctgtcggtctacttttctcctgggctagatttggagaccttctagggcagatcctgttttttctcaccaccctgacatctaaataattgca

SEQ ID NO: 474694 - DNA, 585 bp, Homo sapiens
gctgtgtcaccagaggtcttttcacattacaaaatccrgaaccatttaacctagagtctgcatggtttatgtaatgtacctaacacggcactctgctcatgtgacttagagcattggcatgcagagaattcaggacctggagttgattttccaatgcttggaggtcatattcttatcaatgtgattttaagctatgaactgaaaaatcaaaaaccaatcatgtaatatgtggctacaaaaatgtcagtgtgggcccacagttaagagctggtaggaaacacagcctgttgtcaaagactcaaccaggcaagcagcctctctttttaagggcaaacacacagaagtttttgtccatttcctcagcctcaatgaactgtatttgaaatcacctccaatgcactattgtttggagtgagggtgtggggaggtaagagtttcctcaaaagttcctgaagatggagttttaaaatgcatagactgaactcaatggtggtggggatcatcaggggtgggagggttatggagcttctttgaccagaggacagtatcaaaggaaggcataaagcagaatggtaaacaatcttg

SEQ ID NO: 474695 - DNA, 585 bp, Homo sapiens
gctgtgtcaccagaggtcttttcacattacaaaatccagaaccatttaacctagagtctgcatggtttatgtaatgtacctaacacggcactctgctcatgtgacttagagcattggcatgcagagaattcaggacctggagttgattttccaatgcttggaggtcatattcttatcaatgtgattttaagctatgaactgaaaaatcaaaaaccaatcatgtaatatgtggctacaaaaatgtcagtgtgggcccacagttaagagctggtaggaaacacagcctgttgtcaaagactcaaccaggcaagcagcctctctttttaagggcaaacacacagaagtttttgtccatttccwcagcctcaatgaactgtatttgaaatcacctccaatgcactattgtttggagtgagggtgtggggaggtaagagtttcctcaaaagttcctgaagatggagttttaaaatgcatagactgaactcaatggtggtggggatcatcaggggtgggagggttatggagcttctttgaccagaggacagtatcaaaggaaggcataaagcagaatggtaaacaatcttg

SEQ ID NO: 474696 - DNA, 585 bp, Homo sapiens
gctgtgtcaccagaggtcttttcacattacaaaatccagaaccatttaacctagagtctgcatggtttatgtaatgtacctaacacggcactctgctcatgtgacttagagcattggcatgcagagaattcaggacctggagttgattttccaatgcttggaggtcatattcttatcaatgtgattttaagctatgaactgaaaaatcaaaaaccaatcatgtaatatgtggctacaaaaatgtcagtgtgggcccacagttaagagctggtaggaaacacagcctgttgtcaaagactcaaccaggcaagcagcctctctttttaagggcaaacacacagaagtttttgtccatttcctcagcctcaatgaactgtatttgaaatcacctccaatgcactattgtttggagtgaggktgtggggaggtaagagtttcctcaaaagttcctgaagatggagttttaaaatgcatagactgaactcaatggtggtggggatcatcaggggtgggagggttatggagcttctttgaccagaggacagtatcaaaggaaggcataaagcagaatggtaaacaatcttg

SEQ ID NO: 474697 - DNA, 585 bp, Homo sapiens
gctgtgtcaccagaggtcttttcacattacaaaatccagaaccatttaacctagagtctgcatggtttatgtaatgtacctaacacggcactctgctcatgtgacttagagcattggcatgcagagaattcaggacctggagttgattttccaatgcttggaggtcatattcttatcaatgtgattttaagctatgaactgaaaaatcaaaaaccaatcatgtaatatgtggctacaaaaatgtcagtgtgggcccacagttaagagctggtaggaaacacagcctgttgtcaaagactcaaccaggcaagcagcctctctttttaagggcaaacacacagaagtttttgtccatttcctcagcctcaatgaactgtatttgaaatcacctccaatgcactattgtttggagtgagggtgtggggaggtaagrgtttcctcaaaagttcctgaagatggagttttaaaatgcatagactgaactcaatggtggtggggatcatcaggggtgggagggttatggagcttctttgaccagaggacagtatcaaaggaaggcataaagcagaatggtaaacaatcttg

SEQ ID NO: 474698 - DNA, 629 bp, Homo sapiens
gaataatcaaggtgtggtgaggttaaaatgacttggccaaagagcattgcatcgaatgatttacttacaaacagcactctggctatgccctaagcagaatcaactggaagcaggctgcaaagcccaggtaagaacatgttgtaagggaaagctgatgacagcttgggcatgcgtgtgtggcagatggcatagaaagcctggatcaatcattcttttggagaagagtggacagagctggcccagactgattggactagggcagatagacaagagaggagggaaggttgactcccgggttattggtgggagcacttagatggatgatggaacccgtaactgagaaagacaaacytacttcagcaagttcaagttctcgaaagcatctgtgctttaggccttgtgccacacgcaggggatgcccagatgactaagctatggtacctgttctccagacattcgttggttgtggaggaatagtgtggggagggcccggatagaaatatacacaaaatataggaggcatggaacaggaagaggagaccagctatgctcaagacatcaaggaagactttacagagcaggaaatccttctctttggtcctaaaagataaagagaagctcactaggtg

SEQ ID NO: 474699 - DNA, 629 bp, Homo sapiens
gaataatcaaggtgtggtgaggttaaaatgacttggccaaagagcattgcatcgaatgatttacttacaaacagcactctggctatgccctaagcagaatcaactggaagcaggctgcaaagcccaggtaagaacatgttgtaagggaaagctgatgacagcttgggcatgcgtgtgtggcagatggcatagaaagcctggatcaatcattcttttggagaagagtggacagagctggcccagactgattggactagggcagatagacaagagaggagggaaggttgactcccgggttattggtgggagcacttagatggatgatggaacccgtaactgagaaagacaaacctacttcagcaagttcaagttctcgaaagcatctgtgctttaggccttgtgccacacgcaggggatgcccagatgactaagctatggtacctgttctccagacattcgtwggttgtggaggaatagtgtggggagggcccggatagaaatatacacaaaatataggaggcatggaacaggaagaggagaccagctatgctcaagacatcaaggaagactttacagagcaggaaatccttctctttggtcctaaaagataaagagaagctcactaggtg

SEQ ID NO: 474700 - DNA, 674 bp, Homo sapiens
aatgccagttgaactgattcaattatttttttataccagtatgggtttgtggatatttattttattctatgggttataatctgtgggttactatctttatttattttgtgactcagattgttccagctctgcctayttagagtttcttcacattggcttttgcgttctttggaaaggcctctatcatattttgagaactttcttgctttctggcatgacaagatgctcctggctcatctcggattttccctgccccagtgctgaaatcaaccactcctttaaggagcccttggccagggtttttttagacaaatgaatggggaaggcagagtgtgggggtcgaggaagccaggtaggccgaggcaggaagaaagcaggcggtgcatgcagcagaaggcacaatggggcaaaggctgagtactgagaatggggatgaggatgcccagttcagatattctcctgctttttccttctctccctggaagctaagaccttcacagaaggtaagcattaaaatccaacttacagaacgttgggacttcattcaccagggctcccaggggcattgggaagccacccacaacttgtctctggtttaggtgacccactcctgggcttgtgcccttccagatgtcacaagccatcttgggagcaggaagacagacatgagtctg

SEQ ID NO: 474701 - DNA, 674 bp, Homo sapiens
aatgccagttgaactgattcaattatttttttataccagtatgggtttgtggatatttattttattctatgggttataatctgtgggttactatctttatttattttgtgactcagattgttccagctctgcctatttagagtttcttcacattggcttttgcgttctttggaaaggcctctatcatattttgagaactttcttgctttctggcatgacaagatgctcctggctcatctcggattttccctgccccagtgctgaaatcaaccactcctttaaggagcccttggccagggtttttttagacaaatgaatggggaaggcagagtgtgggggtcgaggaagccaggtaggccgaggcaggaagaaagcaggcggtgcatgcagcagaaggcacaatggggcaaaggctgagtactgagaatggggatgaggatgcccagttcagatattctcctgctttttccttctctccctggaagctaagaccttcacagaaggtaagcattaaaatccaacttacagaacgttgggacttcattcaccagggctcccaggggcattgggaagccacccacaacktgtctctggtttaggtgacccactcctgggcttgtgcccttccagatgtcacaagccatcttgggagcaggaagacagacatgagtctg

SEQ ID NO: 474702 - DNA, 621 bp, Homo sapiens
gtctcaaattcagtttattcaagactgaacttggcattttcccccaagtctgttcctcctctttatgtttcatattctggttaatggtatctccatttatcccactaataaaattacctggaagtgattgttgactctttcctctcctcccatccctaaagccttggtcacttagcagttaactattgctgggtaacacaccaccccagaagtcaatggcttaaaacaattgttgttatcactggcggcygagtgagctgtgccgggcttagctggcgtgtctctcctcttcttcccaggtccataaaaacacaccaaacctctcaaggcaccagcttggaacggcatagtgttacctctgccttactctattacccaagtaagtcacagggctgaacccatactctgcccgttcagtgggaggagcttcaaagtcaaaagggaaagggtatggataggagaagaggtgaagaattggaaccaatagtgcaattgcccatgttcacaaagccctggagcagttccctcttaagtaccacctcttgccttccatcgcctttgctatggccctcgttcagaccttctcagtgctctcctggcctactgcaacatccctctctt

SEQ ID NO: 474703 - DNA, 621 bp, Homo sapiens
gtctcaaattcagtttattcaagactgaacttggcattttcccccaagtctgttcctcctctttatgtttcatattctggttaatggtatctccatttatcccactaataaaattacctggaagtgattgttgactctttcctctcctcccatccctaaagccttggtcacttagcagttaactattgctgggtaacacaccaccccagaagtcaatggcttaaaacaattgttgttatcactggcggctragtgagctgtgccgggcttagctggcgtgtctctcctcttcttcccaggtccataaaaacacaccaaacctctcaaggcaccagcttggaacggcatagtgttacctctgccttactctattacccaagtaagtcacagggctgaacccatactctgcccgttcagtgggaggagcttcaaagtcaaaagggaaagggtatggataggagaagaggtgaagaattggaaccaatagtgcaattgcccatgttcacaaagccctggagcagttccctcttaagtaccacctcttgccttccatcgcctttgctatggccctcgttcagaccttctcagtgctctcctggcctactgcaacatccctctctt

SEQ ID NO: 474704 - DNA, 557 bp, Homo sapiens
ctggtcagttgaagttctgggaccaatggctagaactggaagctgacacagtcccagagcccgagaaagggacagagatgcgtctgttccagccagcagktgcccttcccactcgaagccttcagtgttgggcaaggtggtggtcaagactccctttccctcaatggtgagaggacatggccagggtttcagtggaagcctttcttgactgctgagaatctgatgaacctcttcaatatttatttttccgatagaactgaacaattctgaagagacacaatattacatttcttagaagcttccccaattgcatagttatcagggaaacctgaataaactaacaagagcttagacctatttatttttgtattcagtcatctctgaggtgtgggttatgccagtgtgaacaagaagagacagtaattagattgtgcttagactgattctcctgctccaggaatgggaatagggccgggctgccccagctctgtggtcttccatgctcatggtgctggtccttcaagtttatacctctgggatcattggtttccaaacat

SEQ ID NO: 474705 - DNA, 557 bp, Homo sapiens
ctggtcagttgaagttctgggaccaatggctagaactggaagctgacacagtcccagagcccgagaaagggacagagatgcgtctgttccagccagcagttgcccttcccactcgaagccttcagtgttgggcaaggtggtggtcaagactccctttccctcaatggtgagaggacatggccagggtttcagtggaagcctttcttgactgctgagaatctgatgaacctcttcaatatttatttttccgatagaactgaacaattctgaagagacacaatattacatttcttagaagcttccccaawtgcatagttatcagggaaacctgaataaactaacaagagcttagacctatttatttttgtattcagtcatctctgaggtgtgggttatgccagtgtgaacaagaagagacagtaattagattgtgcttagactgattctcctgctccaggaatgggaatagggccgggctgccccagctctgtggtcttccatgctcatggtgctggtccttcaagtttatacctctgggatcattggtttccaaacat

SEQ ID NO: 474706 - DNA, 557 bp, Homo sapiens
ctggtcagttgaagttctgggaccaatggctagaactggaagctgacacagtcccagagcccgagaaagggacagagatgcgtctgttccagccagcagttgcccttcccactcgaagccttcagtgttgggcaaggtggtggtcaagactccctttccctcaatggtgagaggacatggccagggtttcagtggaagcctttcttgactgctgagaatctgatgaacctcttcaatatttatttttccgatagaactgaacaattctgaagagacacaatattacatttcttagaagcttccccaattgcatagttatcagggaaacctgaataaactaacaagagcttagacctatttatttttgtattcagtcatctctgaggtgtgggttatgccagtgtgaacaagaagagacagtaattagattgtgcttagactgattctcctgctccaggaatgggawtagggccgggctgccccagctctgtggtcttccatgctcatggtgctggtccttcaagtttatacctctgggatcattggtttccaaacat

SEQ ID NO: 474707 - DNA, 557 bp, Homo sapiens
ctggtcagttgaagttctgggaccaatggctagaactggaagctgacacagtcccagagcccgagaaagggacagagatgcgtctgttccagccagcagttgcccttcccactcgaagccttcagtgttgggcaaggtggtggtcaagactccctttccctcaatggtgagaggacatggccagggtttcagtggaagcctttcttgactgctgagaatctgatgaacctcttcaatatttatttttccgatagaactgaacaattctgaagagacacaatattacatttcttagaagcttccccaattgcatagttatcagggaaacctgaataaactaacaagagcttagacctatttatttttgtattcagtcatctctgaggtgtgggttatgccagtgtgaacaagaagagacagtaattagattgtgcttagactgattctcctgctccaggaatgggaatagggccgggctgccccagctctgtggtcttccatgctcatggtgctggtccttcaagtttatayctctgggatcattggtttccaaacat

SEQ ID NO: 474708 - DNA, 470 bp, Homo sapiens
ataaactgttttttaaaaaatgctaattgtgtttgcattttgtgtgtggggggtggagtgttgcgttaggagggaggagtgaaggacttgccttgtcctggtgatttgtttcaggtgacaaagcatgatgacgattcataggcattccagggaggcatttgaggcagagggctgctggctacccagccacacagctttgacaaagccacacatcgagtctctaccttctttgcctctggggccagtggctgtccctccatgggcaatcagtggcccaggggtggcagtgcttatgcagggtgactcataccacttttcctgggcgcctttcctgactggtggtttctcctgggctctcataagccctcgggtgactcagggcasagaatgagctctttggcctgcccacttctggggatccctcgtgccagggaggactgtgagaaggggaggctgccgggctcagcagg

SEQ ID NO: 474709 - DNA, 524 bp, Homo sapiens
cagctcctcgaatccaggactacttctagccagtaaaatatggaccaaaatgatgtgtgccatttcagatgcggtccccaaaacatccgatgtaatcccccacccacactctcatctctctctttggccaccagaacacaggtgacccagcacaggactccaagaaggaccagggggcagcaaaggctaggtagaaggaatgtagatccctgagtcactgcctggaggaggtcatcaacctaccctatctgcatgagactttgagtgagtgagagataaatcctataatgttaagctaccagattttgtggttgtcttctgtctgctttaaataataaaactatttaatcacaagtaataatgtaatacattttataaattaaaagaaagtgaccaatgcaaagcacagagcatgctaactgttgcrgttatctattgccatgtaacaaatctccccagaaccttaggctttaatcatgacaattatcttatgggttgggaattcaggaagggttggctgggca

SEQ ID NO: 474710 - DNA, 454 bp, Homo sapiens
gcggtccccaaaacatccgatgtaatcccccacccacactctcatctctctctttggccaccagaacacaggtgacccagcacaggactccaagaaggaccagggggcagcaaaggctaggtagaaggaatgtagatccctgagtcactgcctggaggaggtcatcaacctaccctatctgcatgagactttgagtgagtgagagataaatcctataatgttaagctaccagattttgtggttgtcttctgtctgctttaaataataaaactatttaatcacaagtaataatgtaatacattttataaattaaaagaaagtgaccaatgcaaagcacagagcatgctaactgttgcagttatctattgccrtgtaacaaatctccccagaaccttaggctttaatcatgacaattatcttatgggttgggaattcaggaagggttggctgggca

SEQ ID NO: 474711 - DNA, 580 bp, Homo sapiens
ggcgcagtctgctggccctgagtcctttccagggactccactgtccagccttctggcaaccccatgctgccctggcctcagctttgcccgctcttctctggccagctttctctccctccctgccaacctaagctttcttcagacccargatctccttctcctgccagctccgtcttctgtgaggcaggatggcaaaaacgaggggaccatggttcaaatcctgccagggcctccaaccttgctgagcctctgactccccttctataaaataaagggtaacatcatagcttacggagtcatcctgaggttccaggacatgtagcgacccttagtgctcaataaatgctgctgtctttcttcccatgtggcttcaaaccagaagtcctcccatggcagcaggggtgtgcagcaggttctttggcgttggggtgggtagagcccattcccgaggtgtcacattcccaccatggccatctcaaactccctccccacgtgatgtcagggaccgtgggtggagttggggagggacaggcactgcagcggtgacctgggtgagctgggattgacacggcactgccga

SEQ ID NO: 474712 - DNA, 580 bp, Homo sapiens
ggcgcagtctgctggccctgagtcctttccagggactccactgtccagccttctggcaaccccatgctgccctggcctcagctttgcccgctcttctctggccagctttctctccctccctgccaacctaagctttcttcagacccaggatctccttctcctgccagctccgtcttctgtgaggcaggatggcaaaaacgaggggaccatggttcaaatcctgccagggcctccaaccttgctgagcctctgactccccttctataaaataaagggtaacatcatagcttacggagtcatcctgaggttccaggacatgtagcgacccttagtgctcaataaatgctgctgtctttcttcccatgtggcttcaaaccagaagtcctcccatggcagcaggggtgtgcagcaggytctttggcgttggggtgggtagagcccattcccgaggtgtcacattcccaccatggccatctcaaactccctccccacgtgatgtcagggaccgtgggtggagttggggagggacaggcactgcagcggtgacctgggtgagctgggattgacacggcactgccga

SEQ ID NO: 474713 - DNA, 558 bp, Homo sapiens
catcttcaatttgtttacaaacactatttattattaaaaataaaaaaggtcccagaaaagaataaacaagaaccttttccaggtcattggaaaaccttgaacctataatagttttatgtatttttcatacatttgctgagtgaggcatacaagaaaatccaaccaacctgatctgttcccttaagactctgacagaaaccacacaatggagggtaaagggtgttctgaatctggcaggatggtgaacaagaaactcaaaaaccctctagctacagggtactagaaacatattaataacatagagcaagcatcatttaaatgtacatctgcctctgaaagaaagtaaggaagaggcgggccacrgtggctcacacctgtaatcccagcactttgggaggccgaggcaggtggatcacttgaggtcaggagttcgagaccagcctggcaacatggtgaaaccccatctttacaaaaatacaaaagaattagctgagcgtggtggcacatgcctgtaatcccagctacttaggaggccgagacaggagaattgcttgaact

SEQ ID NO: 474714 - DNA, 527 bp, Homo sapiens
ccaccacagtagctactagtcacggtgctagtgaaatttaactaaaattaaagaatattaaaaatttacctttttggaaacactagtcccatttcacatgctcaacagtcacatgtggctagmtgttaccacactgggcggcacagaacattcccataattgcagaaaggtctatgcacagcattggtgtagatgctaccctaccctacactaccctgccctgccctaccctaccctagcctagcctaccctagcctaccctagcctatcctgtaataaaaagaagcatacctggggcattagaaactctagagtactagagatgacacattacctctaccttaatttcttcatttgtaaaacaaggataatatttcatctaacttatagggttaagtagattaaattagataatacacgtcaagcacaaaatccccgtctcagagtacaggctctacgaatgccaactgtcattttgttggggagaaggaggagatagctggtgcatgcatgtgcacacacatgca

SEQ ID NO: 474715 - DNA, 527 bp, Homo sapiens
ccaccacagtagctactagtcacggtgctagtgaaatttaactaaaattaaagaatattaaaaatttacctttttggaaacactagtcccatttcacatgctcaacagtcacatgtggctagatgttaccacactgggcggcacagaacattcccataattgcagaaaggtctatgcacagcattggtgtagatgctaccctaccctacactaccctgccctgccctaccctaccctagcctagcctaccctagcctaccctagcctatcctgtaataaaaagaagcatacctgrggcattagaaactctagagtactagagatgacacattacctctaccttaatttcttcatttgtaaaacaaggataatatttcatctaacttatagggttaagtagattaaattagataatacacgtcaagcacaaaatccccgtctcagagtacaggctctacgaatgccaactgtcattttgttggggagaaggaggagatagctggtgcatgcatgtgcacacacatgca

SEQ ID NO: 474716 - DNA, 502 bp, Homo sapiens
gcctcggcctgactgctctggcgggagggaggaagctgatgctgtctcccacccaggccgtgtagccatttcccccacccccaccggaggtctgagagtgkcagggcttctgcccttggcttcagccagttctcctggaggtcattaaagggaagcccttctggtggcaagttctctgccacaatctacagtgagaatctaatgatggtatcagttgtagaggccccttgatctctggagagggttcttagtgccaaggaactttctagaaccatggaggaaccctgcagggacctctgaagagtcctgagcaaagaagtggggaaagctgtgtgggtgtgcaccagggtctcatcaccctgccctcaagggcagcctcagtattatgacttaaggacttgggggtttacataacatccctttttgtcagcaaaggaagttccttatttctaaacctcatggtcccagaaaacccagttcctgatctagctgtcccgttagg

SEQ ID NO: 474717 - DNA, 558 bp, Homo sapiens
gcctcggcctgactgctctggcgggagggaggaagctgatgctgtctcccacccaggccgtgtagccatttcccccacccccaccggaggtctgagagtgtcagggcttctgcccttggcttcagccagttctcctggaggtcattaaagggaagcccttctggtggcaagttctctgccacaatctacagtgagaatctaatgatggtatcagttgtagaggccccttgatctctggagagggttcttagtgccaaggaactttctagaaccatggaggaaccctgcagggacctctgaagagtcctgagcaaagaaktggggaaagctgtgtgggtgtgcaccagggtctcatcaccctgccctcaagggcagcctcagtattatgacttaaggacttgggggtttacataacatccctttttgtcagcaaaggaagttccttatttctaaacctcatggtcccagaaaacccagttcctgatctagctgtcccgttagggcatttccataatacagcacgttcttaagcagacattaagtcagacaattaggtcc

SEQ ID NO: 474718 - DNA, 540 bp, Homo sapiens
cctttaaaactctctcctaaagcaaatttccagagcgtgccttctggttacccttatcttttgyaatagcaccactctgtggttggaacactgaacagaaacaaaacggcaacgtgggattgaattttgcctttatcttgtgaaaacagcacttatctccctatgtttgagctcagtggactgaatgctggtggtgggggctcagcgtgtggtgagggagggggtcttgtgcagtggcagtatgtggttaattcattgtgacatgttgacccaggaaatgagagaagtggaccgaatggcctccaaggaccctttccgtgtcaaagacaagcttgttttttttccccatgatcgtgtagctagccttgaatgtctgtcctcttccactgcttttctttttctctcttttgaggttactaaaataaacaccacacttctcactgatcctgaagtatttgcaagttgcatcttctgctgctggagggcgctgtggggaggtctcgccctaccccctccatccccacccccatccacccagac

SEQ ID NO: 474719 - DNA, 476 bp, Homo sapiens
acccagggcctcctttaaagcgattaaactcgaatcagactatgctgcacctcctgacagcacagacgtcatgcttggagcagcaaccctgggaaatgctctttgggcaaatcaagaccttaaaaaataattatggttcgcacatcctgaagcaataatgacttcaaaactcccttcacatgtgatttatacataagtatagttytcccttgaaccttcccccccaatcccactctgcacactccacccaaatccaagtggttagaaagtcaatattcataggccctgctaaaaggcccagatggaaaaaccctgatctgtatcaggaggaaaagaactgctaacaccacctgccattaaaattctcatacacccaattgtgcataaatgcgaatgtgtgtgtgtgtgttccaagatgttcaaagaaaaaaggagaaaaattaattaagcctacacctctctgccaaggaatcaaa

SEQ ID NO: 474720 - DNA, 505 bp, Homo sapiens
caactgtacagcccttactaagtatttcygtcatgccccatatgccgtcccctccccttttcactgtgactaatcagcaccaccattcccatgagaagtgattccccgcaggaggctctgagcatttgcgccatgacttttgtgagcacctctgcttttggcactatgacttgggggaatagagtgtctacatgggggtgctgcccctgtgagctccgccttctagccctgctccccagggcctggcccagggctgactgggccacgtttcccagggatgatgggggagggagggagagagtagctgactgcagccaggtgggttgttaggatgacttgtgaggcctggggcagccctatatccatgagtcaccatggctaagtttagtgctggcttcagtcacagaacaggtgggcagtcagggcaaaggcattctgctggactctagccaagcctggccctgtccagttggtgccctagggctgacccagggcagccaggcct

SEQ ID NO: 474721 - DNA, 601 bp, Homo sapiens
ccttcagggctgtgattcagctctggctgatttgagaattaaaccttcctagcctcaaatccagaacttttgatccaaagcctgtactactagcaggtgaacttcttatctccatcacgtggggaaaccttgcctgagaatggggcctacacagaagacagcagggctgagggatagagacagatattgtttgagcacctggagccactgggcctgaagccaaaacctctcctgaggttttgcttcatgagccaataaattcatacgtttacttaagccatgttgggttgggtttatgtcacttgcaagagaaagagtgacaaaattccatgaactggtgatgatcttgagagttggaactggtgttttcctctttcatctgcacccccactcattgccaagtccaagttgcggtttgtctcctctccagcctggatgttccgcacagccttgcacaaagcttcagatgcacatggctctgtgggtatyggggatgctgggtggcattgggttacacttgtctctttacaccaccaaccccttctcacagatgtcaccaggttttgttgttgtccacacttaaatctgttgtctcaggttt

SEQ ID NO: 474722 - DNA, 574 bp, Homo sapiens
acacatgtttattgcagcactatttacaatagcaaagacgtggaaccaacccaaattcccatcaatgacagactggataaagaaaaggtggtgcatatacaccatggaatactatgcaaccgtaaaaaagaacgagatcatgtcctttgcaggcacatggatgaaactggaagctatcatcttcagcaaactaacacaggaacagaaaaccaaacaccacatgttctcactcataagtgggagttgaacaatgagaacacatggacacagggaggggaacaaaacacaccagggcctgtcagcaggtggtgggcaaggggaggaagagcattaggacaaatccctaatgcatgcagggcttaaaacctagatgacaggttgataggtgcagcaaaccaccatggcacatgtatacctatgtaacaaacctgcacgttctgcacatgtatcctggaacttaaagtaaaatttaaaaaaaatttttttaattaaaaaaaagaaaatggtatacgtgttcccaggttaargtaagatgtaacacagcattgtacatggaagaaggtattatttgtat

SEQ ID NO: 474723 - DNA, 547 bp, Homo sapiens
acaaggttggggatggtggctcacacctgtaatcctggtactttgggagatcgaggcaggcagatggcttgagcccaggagtttgagaccagcctgggcaacatggtgaatccccatctctaygaaaatacaaaaactagccaggtgtggtggtgcacacatgtagtcccagctacgaggggggctgaggtggggggcttgcttgagtccaggaggttgatgtcccagcaagccatgattgtgccactacactccagactggggaacagagtgagaccctgtctctaaaaaacaacaacaaaaaaaaaaaaaaaagaaagaaagaaagaaaaggaaaagatgactgcattcaaatgcctttcagttggttgtgccattgcttacattcaagacagacactgttttagggtatggggaggatttgagtggtggaatcacttggataagagagaagacatatgaattaaaaatttgccaaatccatcccttcagaaagaataaacgcaataagtttatttctttccaactttcatttttaggttcaagg

SEQ ID NO: 474724 - DNA, 547 bp, Homo sapiens
acaaggttggggatggtggctcacacctgtaatcctggtactttgggagatcgaggcaggcagatggcttgagcccaggagtttgagaccagcctgggcaacatggtgaatccccatctctacgaaaatacaaaaactagccaggtgtggtggtgcacacatgtagtcccagctacgaggggggctgaggtggggggcttgcttgagtccaggaggttgatgtcccagcaagccatgattgtgccactacactccagactggggaacagagtgagaccctgtctctaaaaaacaacaacaaaaaaaaaaaaaaaagaaagaaagaaagaaaaggaaaagatgactgcattcaaatgcctttcagttggttgtgccattgcttacattcaagacagacactgttttagggtatggggaggatttgagtggtggaatcacttggataagagagaagacatatgaattaaaaatttgccaaatccatcccttcagaaagaataaaygcaataagtttatttctttccaactttcatttttaggttcaagg

SEQ ID NO: 474725 - DNA, 638 bp, Homo sapiens
gctcaggaggctgaggcaggagaatcacttgaacacaggaggtgcagattgcagtgagccgagatcatgccattgcactccagcctgggtgacagagtgagactctgtctcaaaaaaataaaaataaacaaataaataaataaaaggcattggtggcaatgcaaggggttgaaaagtaggaagaaagtaatcatttgatttggatatttggttcatatgaactgatctatttttttttctgattgtgttagagagatgtgttgatctcatgtacatagagccaacactgacatacagcgagtaaatcaaaatatgctatctcacgtgactgtaaacactttggactcctcacctaaaagaggatataaggatatttagttctcaaacctgccgtcagtgtgcttccttagtaaggctgggagaggaggtaraaactatatgtaaatgattctaataccatctagataggactaagaggacagtgactaaggaaattcagaggagagagatgacttccagctaccagcaatcagtgcatacaatttcttgtctgcatgtttaagtttgacttcgagctcacgtctttagacagtatgctttagttgggggccctgcaatcaattcctggatgtcaatgg

SEQ ID NO: 474726 - DNA, 645 bp, Homo sapiens
atgatgtgactttactctttctttagtggaatgtacctttctaagttatactaggtccttcttaaatagatgcatgacagaacaaaagactctactgtccatataaatcatacctgctgtttttaaaatcatgctgtcttcttacatgaagtaaggctaacatttattaggagagtctaggtatctgaaacttcacttgcttaagagaaaaacacaaaagcataataaaaagcgatgatgctttgtgtatgtagcagtgttgacactttttgcattatctatgaagcatgttgagcattattttattcttttggataattcagtatcattgatgyaactaccttatgactccattctcaccactgaaaaagtgtgggtgatgtgaaagtgttggaaatctgggggaaaagatgacaacatgctgggaccataatcatgaagagccttggtatcttagactttaggaaaataaatgttaaaaagtgaaagaaacaataaatactatgccttggccaaagtttctaaaagagggattattaacaggcaagtggatcttaaaagggaaatcctgatgataagtaaaaattgctttaaatgaaaagttgagagcctttaaagacagaaagtgaggtcattttgagatca

SEQ ID NO: 474727 - DNA, 617 bp, Homo sapiens
gttaaccctgaatacaatattcagtgaaaatatcctctaggaatgaaggggaaatcagatgagggaaaatgaagagatttaccctaaaagaatgactaaaagaagttctacagactgaacgaaaataataaaccttggaacatagtaggggagaaaaaacacagtaagcaaaaatatggggtaaatacaagagacattccttttcttgagttttctaaattatgtttgatagctgaggcaaaaattgtaacaatgtctggtgtggttctgcatgtatgtagagaaagtatttaagacaatcatgttgtaagtagggagagtaaaaggacttaacctggtgaagtaacaacagtagaatgtgatgttataatgatatataatgaaatgcctagagtaaccactaaaaaagctgtacaaagagctatactcaaaaacactataaataaatcaaacgaaaaattttaaatgtccctgtaagccatagaaaggaaaagaaaacagagaaatgaaaaacrgaaaggacaaacagaaaataaaaaatataaaatggcagatttaagccctaacatatcaattacactaaatgtgaatggtcaaaacatatcaattacaagtca

SEQ ID NO: 474728 - DNA, 488 bp, Homo sapiens
aaaatagaaaacagtccaattgtccattaacaggagagtggttgaatgcactgtgttatatttacagaatgaaatatattttagtttatataaatgaattatagtgacatgcaaccatatggatgaatgttagcaatatagtaaatgagaaagcttacaaagtatactgtaaaaatgactaaaagtaaaatatgcttttaaggaatgtattttgttttgaattttgtactgtgtgtatgtattatctattttaaaaagtgaaaagtgaagagatgctgctccaataattaccataaaagactttgtaagagcagtattttgttctttggatctcgaacactgatatagtggaktatgtttgtaaaggtaaaggagcctgcaaggaagaaaggattgaatatatatatatatagcaacaataactgatgatgggcaagttcaagtatgtgaaaggaatagatataatcaagactgaagggaccaaagtg

SEQ ID NO: 474729 - DNA, 609 bp, Homo sapiens
aataaagaaaactgttctgggcactcamcagctcgagatgagcaatgtacgaatccccgatcgtaattttcaatacagtattaaggatagattaggtcacttcatctaatagactgaaatgcatcaggaccatgcttgtagttacaagcacttgaagaagttagtctacccttcccacttaacagttgttaacattgttcagcctttaaatgcaaggactccaagcatagttccaaacactcaataacaaatttgcttcactcattttgtgaagtttcacttgtcctttgagcacataagagacaataaagcttggtgtttatgcacatgaactgtggaaccaaactgtcctgctttgaatgccagcattgttcaacatctctgtgactcactttccccacatgtgcctttgaactaaacaatagtacctcctttttacagttacaattaaaatcaaacaatgcctgccatatagtacatgctcaataatggtgagctgttattaatgaaactgaaagcaaaaaggaggtgaaatgatttttcttaggactagagaaggggcctaagacaggcctgggaatccaaagctagtcttgagatcacctttcc

SEQ ID NO: 474730 - DNA, 382 bp, Homo sapiens
tcggctataatagtttttatgcatcatattaattctgggtttttgcttttaaaaagaagccttttttttttttttttttttttttgtagggaagtaagactggatggtgggttagcaggggactcgagaaaaggcagtcagtgctacaggmgcagggatattaacctcaggagtgaccagtgggatgcaaccagccgttggggcttaaaactcaagcacatttctcggatgataatttcaaagaagtagctagttttggttgaggctgcctctggactatccccagcttctcagtggaactcggtgtttctgaatgaatcacaataaagaagcattacttgtgggatgtggccaacctttctgttcagcttttattgcagag

SEQ ID NO: 474731 - DNA, 382 bp, Homo sapiens
tcggctataatagtttttatgcatcatattaattctgggtttttgcttttaaaaagaagccttttttttttttttttttttttttgtagggaagtaagactggatggtgggttagcaggggactcgagaaaaggcagtcagtgctacaggcgmagggatattaacctcaggagtgaccagtgggatgcaaccagccgttggggcttaaaactcaagcacatttctcggatgataatttcaaagaagtagctagttttggttgaggctgcctctggactatccccagcttctcagtggaactcggtgtttctgaatgaatcacaataaagaagcattacttgtgggatgtggccaacctttctgttcagcttttattgcagag

SEQ ID NO: 474732 - DNA, 382 bp, Homo sapiens
tcggctataatagtttttatgcatcatattaattctgggtttttgcttttaaaaagaagccttttttttttttttttttttttttgtagggaagtaagactggatggtgggttagcaggggactcgagaaaaggcagtcagtgctacaggcgcagggatattaacctcaggagtgaccagtgggatgcaaccagccrttggggcttaaaactcaagcacatttctcggatgataatttcaaagaagtagctagttttggttgaggctgcctctggactatccccagcttctcagtggaactcggtgtttctgaatgaatcacaataaagaagcattacttgtgggatgtggccaacctttctgttcagcttttattgcagag

SEQ ID NO: 474733 - DNA, 605 bp, Homo sapiens
gtaaagcggggttcataatacttcccaactttgtagggttgttgagagagttacacaaatatgtgtaaggtacctggcattgtacaaatatatgtgagccacattgtcaggcacactcaggctttacgattcttgtttattttgtatctgttatttttgttttcctacaattcaccattctgaatgktaattatctagccctaacagactaacaggtcttggagggcagggagcgtctcattcactgctatatctctagtacctggaggataaaaagtctcagaaaacaatcgttgattgaatgagggaataaataaacatatgaatagctgtttaatgtagccaattaaaaaataggtaaaatattttccattacttgttttcttatttgtgaagagtcataatttcttctgacacagtaaaaaaaaaaaaattaaaaagcaagaggtagataacttcttaaagtcttgtcttttcagtactcatacattgaccaattcaaattaaactactgaaggtgacagagccagtgtttactggtcaaatactctgccattaattatttctatcgtatagaatattccttgattgggtattaaaaaaag

SEQ ID NO: 474734 - DNA, 605 bp, Homo sapiens
gtaaagcggggttcataatacttcccaactttgtagggttgttgagagagttacacaaatatgtgtaaggtacctggcattgtacaaatatatgtgagccacattgtcaggcacactcaggctttacgattcttgtttattttgtatctgttatttttgttttcctacaattcaccattctgaatgttaattatctrgccctaacagactaacaggtcttggagggcagggagcgtctcattcactgctatatctctagtacctggaggataaaaagtctcagaaaacaatcgttgattgaatgagggaataaataaacatatgaatagctgtttaatgtagccaattaaaaaataggtaaaatattttccattacttgttttcttatttgtgaagagtcataatttcttctgacacagtaaaaaaaaaaaaattaaaaagcaagaggtagataacttcttaaagtcttgtcttttcagtactcatacattgaccaattcaaattaaactactgaaggtgacagagccagtgtttactggtcaaatactctgccattaattatttctatcgtatagaatattccttgattgggtattaaaaaaag

SEQ ID NO: 474735 - DNA, 605 bp, Homo sapiens
gtaaagcggggttcataatacttcccaactttgtagggttgttgagagagttacacaaatatgtgtaaggtacctggcattgtacaaatatatgtgagccacattgtcaggcacactcaggctttacgattcttgtttattttgtatctgttatttttgttttcctacaattcaccattctgaatgttaattatctagccctaayagactaacaggtcttggagggcagggagcgtctcattcactgctatatctctagtacctggaggataaaaagtctcagaaaacaatcgttgattgaatgagggaataaataaacatatgaatagctgtttaatgtagccaattaaaaaataggtaaaatattttccattacttgttttcttatttgtgaagagtcataatttcttctgacacagtaaaaaaaaaaaaattaaaaagcaagaggtagataacttcttaaagtcttgtcttttcagtactcatacattgaccaattcaaattaaactactgaaggtgacagagccagtgtttactggtcaaatactctgccattaattatttctatcgtatagaatattccttgattgggtattaaaaaaag

SEQ ID NO: 474736 - DNA, 605 bp, Homo sapiens
gtaaagcggggttcataatacttcccaactttgtagggttgttgagagagttacacaaatatgtgtaaggtacctggcattgtacaaatatatgtgagccacattgtcaggcacactcaggctttacgattcttgtttattttgtatctgttatttttgttttcctacaattcaccattctgaatgttaattatctagccctaacagactaacaggtcttggagggcagggagcgtctcattcactgctatatctctagtacctggaggataaaaagtctcagaaaacaatcgttkattgaatgagggaataaataaacatatgaatagctgtttaatgtagccaattaaaaaataggtaaaatattttccattacttgttttcttatttgtgaagagtcataatttcttctgacacagtaaaaaaaaaaaaattaaaaagcaagaggtagataacttcttaaagtcttgtcttttcagtactcatacattgaccaattcaaattaaactactgaaggtgacagagccagtgtttactggtcaaatactctgccattaattatttctatcgtatagaatattccttgattgggtattaaaaaaag

SEQ ID NO: 474737 - DNA, 655 bp, Homo sapiens
tgggtctaaaagtaggagttaacctggggtgagggagcgggagaagggaagggcattccagcaagaggaagcaccatgagcaaaggcatggagggaaaggacagccaggggcatgcatggcaaactgtactttatttggtgcttttggaaagagatcaagcaagatagagttgcaaatattcagcctttattgagtgttgtgagttttctcctgttctstgacatcaagagtactgcacagggtatataatcatggagcactctcctggcaagtctgaatgagccaaaatcaactgtaagttgtaaaatagtggcaccgtggacttgctttgaagggtaacaagcatatgggggataaatccttgtagggtgtctctctcttctccaaaggcaagttccaagccataccaataaatacataacaccacatgtcacaggtgctatgatagacaggaaccagaagtgattactgggttagtcaagttacctcatggttcaaatggcttctggaacaccagctattgcagtcacattccagccatcagacagataggaggaatgaactcatttcttcgctttcaggacaattcttagaatttgcacatactgccgttatttatatcctactgatagaacctatggcgaccaatagcaa

SEQ ID NO: 474738 - DNA, 548 bp, Homo sapiens
aatgtacatgcatgtctgtttacatcatcagagggcgctactggaggacaagggtggactttactttctttgggtctcaaacagcacccagcatcatgcttaaggcattgtataagtgtgtgttaaacaaatgcagaacaattaaacgaattttaataaaactgagtgtcttgagatcagcatggtatcacatttaaaagaaacaaaaggctgactccaaaagtattcaaaatataatgggtctttgtggaagtttcatgcccttgtttctccatccaaaatcactctcatcactgtagctgcttcattttctatttcccttttgttttcttytgcttttcaaattcctgacagaatccatattctgtaaactgttgctcttttcttgccatttcactttcacagatttgtcttaccttgttttaatccatagtccttctgcactacttcaatacctttagcttcctgctgttctcactctctaaattctacaggcataacaaggttcaattaatgctggccccgagtcaaaaacctccttcctttag

SEQ ID NO: 474739 - DNA, 481 bp, Homo sapiens
cagtgccttctttccacgtctttttcctattcatatgaaactggcacgttggctctgtaggactccctgagtgtaatcgtagaagcttctctctctcatctcccactgttcctttaatcctgcttagtggagacagttcttctcttgccccttggtgaaaattcagaagggtgccttgatttttcaggtcactctagtcctacagtcactttaaactgcagacaaagttttaaaacatttagatcgttctcaaccgaaatttaaatggttcttaagagyaatttaacgtaaggcaagacatatctaaaggattccagaacaccgttatttgacctatcatcaaggtacttttacttcctgtttgtctttgacccagggacttgaaccccagtggggtggtcgtggtgcctgcctcacacaccaatgtccctaatgatgactaagattggactggatgtgtaggtgtctcctggcctcaccc

SEQ ID NO: 474740 - DNA, 557 bp, Homo sapiens
tgaaattcctctctggtgtcagtgctaggaaaagctgtgcttctcctgagcacttgacttggtttctattaaggacacgggctactgaaattcgatttcttcttgtctttagctgctatgaagcccaggccaaacatggagctctccttatagcagctttattggacttcatggcaggcattttgtttatgaattctattcttgatttcatattattttcatatctttttttctgtgattttcttattaatttttatccttttgtaccatatgcatctctctaagtcacctgaaatacttttrgggatttggtgaggtatgagcccatgatatttgtatgcgtgtaagacagcaaggaagtaataaagtcaacaaatatttcatttcctggcctttccttgccctaaatggtatgtttaacaccagtgctaacttctcccaatccaacatgtctgtgtgtgcagaagcctcatgtcagatactttcgtcacaaacctagaggtattttccatagaaacctcttatgtaagaggaactgaagatatgaaggcaagaga

SEQ ID NO: 474741 - DNA, 616 bp, Homo sapiens
aacatagttgaaggactcgtactttctgattacaaaacttactacaaagctacagtaatccaaatagtttggtactggcataaagacagataaataggccaacrgaatagactagagagcccagaaataaaccctcatatgtgtgtatgtgtatgtatgtgtgtgtgtgtgtgtgtgtgtgttcaaatgattttcagcaagggtgctgaaaatgattctgggacaagtggatagccacatgcaaaagaatgaaggtggatccttgctttacaccagatataaaaattaactcaaaatggatcaagatctaaatgtaagagctgaaaccacaaaactcttagaataaaacacaggggaaaatcttcatgacattggatttggcattgatttacataggacaccaaaagcggaggcagcaaaagtagactgacaaattgaactccatgaaaatggaaaacttttgggcatcaaaggacactatcaagacagtgaagagacaacctgcagaatgagagaaaaaaaaaatcccaggaactggtgttctctagaacccccttcgacaacactggccactccgtcctcttcactgtgtagacctcttgttcagcctgtgtgg

SEQ ID NO: 474742 - DNA, 637 bp, Homo sapiens
tacttcaattggtttttcttttgttttgagacaaagtcctgctctgttgtccagggtagagtgcagtggtgcaatctctgctcactgcaacctctgcctcccaggttcaagtgattctcttgtctcagcctcctgagtagctgggattacaggcacacaccaccgtgcccagctaatttttttgtatttttaatagaaatggggtttcgccatattggccaggctggttttgaatgcctgacctctggtgatccgcccaccttgggcttcccaaagtgctgggattataggcgtgagccaccctgcccggsctataattggtatttttatatgctagtgtgttccatgttttgcatttatattcataaatataaccatttaattattttttaatatgaaaattacacttgatatagaaaattaagtgaggagctttcaatctttttctggtatttaaggctctcaataagctcacttaggaaggtgagggagaatggagaataggaccaaggagcaaaccccaagggactttccaggagaggttgagccagggaaaaggacacagtgaaggtgacaaagaggaaggtgaggcccgagaaccccaggagagtttgtgtgtcagatactccatcgcagc

SEQ ID NO: 474743 - DNA, 557 bp, Homo sapiens
cattctctgcctctggagctttgctggctcttgggggaaatggtctgtgttctgagatgtraagatatcctttttggctcctccttaatgaagaagagggcggtcttatagctggacagccggccaaagaaaccaaatccgcccaggcgatgctcttgaaaatacagtacgtgtgcatccttgattctttaaatccaccccctgcatcacccccgcctcttctctatcccccccaccaccccgtggattctgttgctgtttgatgaatggcttgggctggcaatttgtatttccctctccaaagtggtagtggttgagttgagaacaggggtgatgaaatttaacaaagcatttttagaagagagcaatgtgcatgttgtacgcagtcattggaaagtcatgctttgcgctaggtatccttttgaagcccccgaacctggctctcctgaagccgctctctctctctcctgctagtcagctactagtggttgtgaatataacaatacaaactttgtcctgctggaggtgtaaagactaaaaagagaaaaaaaggatat

SEQ ID NO: 474744 - DNA, 576 bp, Homo sapiens
ggaggcagaaggggcaggaacgagtggcaggaggaggagcccaggccaaggcctttattggagtttctcgggaaagggaagacagagcagggtaaacagctcaggactggctagtttgaaacatttccacaggctctaagttataggagtggtctgtggttgcctggtacctgaccctgggatgacyaaggcagaggaatattgcctcctggggtatacctgccagatagaggaggatggctctgaattggtagtttgcatatcaaagtcaagctcctggctgaactttgccttctctaagaattggctagccccaggagtggcaatttctccccagccagaaaggttaataagatgtcaaacatcataatatacagaaaataaaaacataaacaatacatatttactggctcagttaatgaaatggccctgactcagaggtagacagatagatcgttaaaccagactagaagagccataaatccatttttatacatgggaatgaaatagtttttgttatttgctttttaaggggaagatatatttcaattatgtgaaaaaggatggtttacttaa

SEQ ID NO: 474745 - DNA, 614 bp, Homo sapiens
ttttttttctttcctgcatgttatagggtggtttttctttttggggggcggattttgaaactgtattgcttttttatgattagaaataaagttataaagtagatttacacttaatgtatctggtatatggaaagaacaccaatgggagatgttgtaatcttgttacttcctagctgtgttttacttaatgtgtgaactggaattcctttsctcttaaggtcattgtgaagctcagacgagataatatttaaagtgctttgtaaactttaaagtagtgtaagtccaaaagtatggtgtttgatataaatcttttccttataagtctgatggagccattatctgatggattgatttttgatgatggttttggataaagtctgcccatatctgtaaagaaaattaagggctcccttccttctgaaagactgcatcaaaataataggcagttcttggttgtctgtggtattggagatctcagaaatacctcacaggatctaatagcgctatcttttcaattcatcaagccgtttcatcatggcttcctcaagaacccagtttctactatgtttctgaaagaatttttatggttgacattatattgaatatttcttgtt

SEQ ID NO: 474746 - DNA, 614 bp, Homo sapiens
ttttttttctttcctgcatgttatagggtggtttttctttttggggggcggattttgaaactgtattgcttttttatgattagaaataaagttataaagtagatttacacttaatgtatctggtatatggaaagaacaccaatgggagatgttgtaatcttgttacttcctagctgtgttttacttaatgtgtgaactggaattcctttcctcttaaggtcattgtgaagctcagacgagataatatttaaagtgctttgtaaactttaaagtagtgtaagtccaaaagtatggtgtttgatataaatcttttccttataagtctgatggagccattatctgatggattgatttttgatgatggttttggataaagtctgcccatatctgtaaagaaaattaagggctcccttccttctgaaagactgcrtcaaaataataggcagttcttggttgtctgtggtattggagatctcagaaatacctcacaggatctaatagcgctatcttttcaattcatcaagccgtttcatcatggcttcctcaagaacccagtttctactatgtttctgaaagaatttttatggttgacattatattgaatatttcttgtt

SEQ ID NO: 474747 - DNA, 662 bp, Homo sapiens
tgctgggtagggtgcggtgggaggatcgcttgagcctgggaggcggaggttggctgggtgacggagtgagaccctatctcaacaaaagggagctgggggatgatcaggagcccttgatgtggaaaaaagtaggatcagatttctaataaaacgctttcagccatgacatactactgcatttcaaccttgtgcaaaaaaaacartttttaaaacttcaattcagtgttttcagcaagattcatggggacattacaattaaaactggagcaagtagtcaactaggaattgcatggatatgaaaaataatgctgggcgttagtgaatatttgagcattacagaaaatctaatgaattaacaaggagataaaagcgaaaatacgcaatcagaatttggatgagaggttttcattttaattctgaaactatttcttattagttaagcatctgttatgcctctgttgtgtcaggcattgtaatatctacagaagatgcagtggtgagcaagagaggtgtgatcctactcttggtgtgaaagttaaaagagtgaaaaatgattagaggaaaggcatggtagatatatttagaagacacaatctgtacataagtggaattccagaaagaggacatcatttaaattctgaggattttaaatttcatggtta

SEQ ID NO: 474748 - DNA, 662 bp, Homo sapiens
tgctgggtagggtgcggtgggaggatcgcttgagcctgggaggcggaggttggctgggtgacggagtgagaccctatctcaacaaaagggagctgggggatgatcaggagcccttgatgtggaaaaaagtaggatcagatttctaataaaacgctttcagccatgacatactactgcatttcaaccttgtgcaaaaaaaacaatttttaaaacttcaattcagtgttttcagcaagattcatggggacattacaattaaaactggagcaagtagtcaactaggaattgcatggatatgaaaaataatgctgggcgttagtgaatatttgagcattacagaaaatctaatgaattaacaaggagataaaagcgaaaatacgcaatcagaatttggatgagaggttttcattttaattctgaaactatttcttattagttaagcatctgttatgcctctgttgtgtcaggcattgtaatatctacagaagatgcagtggtgagcaagagaggtgtgatcctactcttggtgtgaaagttaaaagagtgaaaaatgattagaggaaaggcatggtagatrtatttagaagacacaatctgtacataagtggaattccagaaagaggacatcatttaaattctgaggattttaaatttcatggtta

SEQ ID NO: 474749 - DNA, 501 bp, Homo sapiens
aagggtacttgataattttttgagatccgctcagattgaagagtgacaggaagagttaattagagcagttttaaggataaatttgattataagcacagggaggaagcaagagtgtaatttgatcatgaatggaaacattcgagctcttacccagtactaattaaaaagaaaaatagtaattactgagtagctattatatgcccatgatagggggcactttgtagaggcttaggatgtatcagtggaccaaataggcatggctgtccccagacagtttacatttttaacttgaggtgacaaatattaaatataaaataaacattaaataatatgagttttagaaaatgagaagttctgtgacacaaagctaaagcagaaccagggtaaaggtgatgcaggattagtttgttttaaagttagaatttagtgtacaaaataaggtaaaaatgacttattaagtagacagrcctactaacataatctgtaccagaagagagaaaa

SEQ ID NO: 474750 - DNA, 504 bp, Homo sapiens
tacaaaaactgcaaaacctaactgggtgtggtggcccacacctgtaatcttagctacctgggaggctgaggtggaaggatctcttgaacctgggagatcgaggctgcagtaagccrtgattgcaccactgtactccagcctgggtgacagagcaagatccagtcccctcacccccacaaaaagacccagccaaagatgggaggtctttcttgtgaaaagattttgctgtttgcttcactagttttcctaagaatatagatggatgttaataggacttaaatctcatgatgggtgttggggggactgggagggaagatcttccagactgatgggccatggatcatttgtttggccctcatggtgtttcatacgtgttttgaatcagctgccaacactttaaaataaagcaggcacagacacacacacacacatacataccacctccatttccagtgtgtaaaggcttggaagctctaggaatgctgagacaacattagcacatgg

SEQ ID NO: 474751 - DNA, 503 bp, Homo sapiens
attattgcataaatgttttaaatatgaaaataccacccagtgcgttatttttataaatgactgagataaagaaagcagcttcttaaagttgaactatgtaagaatgtagataaactgtcatatgcccaagaattattttctgatataaaagatggattaaagatagacttaaatttttcttcactacatggttagtattatatcccaaactgaataactcttctttcgtatatctctcagcccaaatagagaaaagaaaattttctmtctgtacctgtggtttgcaagttagaagcgatttttgtaattagtcatattcagctgcatgagaagaaacacaagaccccaaaataatttgacctataaaatctcagtctctacttgataacaactgggacttctggaacagcacagaacagaatgacgtgtgggcagaaagctgtcatcagcccttcatctcattttcagtgggttttcttttttttttggtctgacagtaccac

SEQ ID NO: 474752 - DNA, 348 bp, Homo sapiens
ttttggtttcattgattcttgtatggccaaatcctacaccttcctatacttgtggtttgcaggttataatcaagttatcagatggctgtgagaaagctgttaacttccaggggtcttagtttcctcatttcatagtagagatgatgcctgttgtccaaggtttaatcaaacaggtatgtggaggccctcacacagtgcctggcacttcataagtcttttcttagtccatagtccctcatttgtaattctaaaatgccccaaatttgaaataacaaaattgtttcatttgtttgtaagttggtgtcaaaayttattcagtggcaaagcctgacttgaaccaatgagaag

SEQ ID NO: 474753 - DNA, 555 bp, Homo sapiens
ttggcttttattcctcaaacaagatgatggatacctctctgtattaatctagaaaataaagctggtactaggctactccctgatgtaatcttatgtctaaaaagttttgctttggaatttggcatttcttcacatctaatttccatagtatgtaaccccctcaacccatccccaggagagtgaataattaagagctctgcttccgtgtttgacyatggaggggtttgtatgatgtttcagaacagaatataaaccctcatagagtatatattccttaagttgaatttgatggatgtgtgttcactgcatcagactcaccctgtcttgttccaacaatgattgacagcctcgattgaagaccagtaagttaaaggcagattgttcaaagaatggccaccattctctatgaggatgataatgttctatagaagatataaaatccacaaccttagttatgaatttgtcaaacaaagagtggaaatggatagattataaaaatataaatgaatgaaatagtaatgtaataggtgattttctccttacgatttgattttg

SEQ ID NO: 474754 - DNA, 550 bp, Homo sapiens
caagattacttactttttaaagctggagaggcaggatgatcaaatacatgtgtttgaggaagcccaaggatctgcctccattcccacaccctttttaataattcagtgatttccaaagcagaatgataacacaagataatccacgagaggaaaatgaattttaaactcatccttacaaagtcactatttttggtgtatgctttttaatgtccatgctgcattatacagtagtacaagtataccatttacaaagaaatgagtaaagatgtactttgagggtgtgtgcataagatgttcttagagggaagagtgcccaggcaagactgagaacccctgcattaaatggtgatgcagagcctgacgggatttttctctgtgcctttgcctttccgtttgtaaactgaagctcctgtcccctctctttctgttgcctcccttccagggaagttaggagatccagagaaaacagtgttgccctaaagagcaaaaattccataaacattatgcattaattaggatratgtaattcagattttaaaaatgatttttt

SEQ ID NO: 474755 - DNA, 588 bp, Homo sapiens
cctgccaaccaccagatgtgtgagggaggccatcttaaaccatccgatgacctgccagctcaccacaaacacagtgagcccagcagagccaagccagaagaaccgcccagccgacccacagagtcatgagcaaataaatgtttattgttttaagctactgagtgtaagccactgggtggctcgttttgtagcaacagataactgatacagcaggagacacttgaaagaagaggaagctctggagttggaggcattcccaccggacagtatggctaagtagaaaccctatgagcaggaaaaagacggattcagaggacaaagggkagaagcgggaaagaccctgcctgggtccttcagaaacccagcacccctacttctggcttctgccagatggaggagtggcaagaggagagaaattccagatagatgatgggaagccgaaagcaggggttctctgctgactttgggaagacagtccccccaccccaccaccagcacaaggcagccgcctcttgacagattcagtggtgttgcgtattgtacagaaaggacttgagagactctcttgaacttccccaggaccctgtg

SEQ ID NO: 474756 - DNA, 588 bp, Homo sapiens
cctgccaaccaccagatgtgtgagggaggccatcttaaaccatccgatgacctgccagctcaccacaaacacagtgagcccagcagagccaagccagaagaaccgcccagccgacccacagagtcatgagcaaataaatgtttattgttttaagctactgagtgtaagccactgggtggctcgttttgtagcaacagataactgatacagcaggagacacttgaaagaagaggaagctctggagttggaggcattcccaccggacagtatggctaagtagaaaccctatgagcaggaaaaagacggattcagaggacaaaggggagaagcgggaaagaccctgcctgggtccttcagaaacccagcacccctacttctggcttctgccagatggaggagtggcaagaggagagaaattccagatagatgatgggaagccgaaagcaggggttctctgctgactttgggaagacagtccccccaccccaccaccagcacaaggcagccgcctcttgacagattcagtggtgktgcgtattgtacagaaaggacttgagagactctcttgaacttccccaggaccctgtg

SEQ ID NO: 474757 - DNA, 628 bp, Homo sapiens
atatcactccgttttttcttctttctttgttggtatgcattagttattttaaaatatctaattgcaagaactcgttctgagcagctcaaattttcgtgccgaggcatgaattagtgtccagtaactcagagcttgtctgcttctctacttaatttagagatatgctggttggcacaaggcttatggtgccaaaaaatctttcatttctgaagctttctagccagctccatgaaaaataccaccataaatactcawtccaacagctccccagaccatagtcacaaagcttttacactgcatttacccggagcttcccggccaagatcatctcagcgatacttctccagggtcattggaaatgttcgtgtcctcccaccacctacctgccttgctgtgtaccaccttccttgcacccctgggtgaataggccacgtgtccagatgccaggttgaagctgtgggcctgatttcctgcagtcaaattcctgcagtggtaaacctttggctccccagcttaccacacagtgattccctggccaggagaggtattggaggctgaatcctccaacttttggtgtggtctgcagggtagattttctcagttgaattgtgtagggggagtagggaga

SEQ ID NO: 474758 - DNA, 636 bp, Homo sapiens
aacatgcagaaaccccgtctctactgaaaatacaaaagtagccgggcgtggtggcacatgcctctaatcccagctactcgggaggctgaggcaggagaattgcttgaacctgggaagcggatattgcggtgagccgagatcgygtcattgcactccagcctgggtaacaagagtgaaactccgtctcaaaaaacaaaacaaaaccaaacaaacaaaaaagagaacttgaggctgcttcttcagtccagcatgtcaaagcaccatattttagaatatcaatttctgagccccaacatatttaataatgaccattcagctagacagccaggagtggctgccttctcttcatcagagcaggagctggagctctgaagaaggaggtaggaatggggaccctggccaagaatagggtgttagggactcccatgcctgcttgcaattatcttccccatgctaggctccggcccccaacaagctttagtgcaagtcacactcctatgccctgaaggatacagaaaggccacaggaagtttgccatctgatagaggagggagtcaggcctacctataagataaggaaccagtgccccaaataaagcatgagcagggaatgcatagttctgttcccagaggaaat

SEQ ID NO: 474759 - DNA, 612 bp, Homo sapiens
aaccaaatggcagctgttgagaatctcaataaaatgttaagtgcatttgttggcagtggtacccttttgcctaaggttgggtcactgtgccatcatactgtggggggcrggggtgtgcggtatgtgtggtgtatatgtgtgaaactttttgtgtcaggatgggtcataatcttagttgcggttttctttccaaatagggttacaaagtagtaaaacatgggctggaagtgacagacctgagtgaattccaccttcactactttgtgccattggcctgcattttatttacaaataacctctttatttgtaaaggtgcagcacctctcccctggaactataatgacagaattttaaaatgctgcctggcacataataggcacttaatacatggtagccaatagtggcaatgatatgtacagctctgaacaaagaggcagtggcatctttgagctagaagggaaactaggcatttgttttcctgtttctgggcaaaactggggctcttactacctagaaaacaagtattccatatctgcctttcaactattgaacaagtttcacatcctgctatatgtcaagcattgtcttaggcacaagggttacgggggttac

SEQ ID NO: 474760 - DNA, 580 bp, Homo sapiens
ctggctggtactcctgtcagtgccctccaccaacttctaacagtctgctgttggttagcctgttcctgcttcttttctagaggggactcagtccagcaggatctaagagagccctagaatgccctgaggctgcaggaacccaaattaaggcaggatggacctcacagtggagaaagagcaatgtacagatatacaagccctctgttcagcatctcctgacacccaacaaaatatgcctaacctctctataatcccctagttctttgagtataattggctaggaaaagaaagttatagatttgtccaaaggacaactgcttcataaattcctcagaaacaggcatacagcctaagcaagccatgatagctattwaagaaaaaaacacaggtaatacaaaactgtcaacacgacccacgtgcccttctgcctccaccccaaggcccaccaccaccaaggccagtggtggcagagaactgaggtcacttggtgagaggaaaattgttgtcagtcctgtctgaaccccactcaatctcccaactggggatctttggagaacaaagccagataaaacccaccccc

SEQ ID NO: 474761 - DNA, 567 bp, Homo sapiens
gggagtagctggagctaccgcaacttgggagaaagatctgaaccaggagtaaataatagctaacatttaatgagtgcttatgggtcaggctctatactaaccactttgcaatgtatcatgccattttactttcccaacaactctgaggtagctactattcacattttccaaatgagraaactgaggcttagagaaggtgagtaacctacacagggttacgcagatactgagcagcaaagctgggattcaaaccaaggtctcagcagctctccaaagccctgtgctcttccaacacatttgtagtttgtaggtggcaactgaagccatgagactgggtgagattatgacagttttgacaccagggactaagtcttggaggtctttccctctgcagtcatcaaactcatctagtccaaacttgctagctgtctcagtgtcacagatggctgaattcccaggctccgccccagactcaccaagcttcgcagcggtaccagaggatccacccctgctttccgtttggccctgttcaccatctcattgatcctctccacacacttgtctgtc

SEQ ID NO: 474762 - DNA, 585 bp, Homo sapiens
aaaatgcaaaaaaagtatttaagtggtgcagattaaatataagcaagattgtggagatatttaaaacacaaaattaaaaatacagtagatacactgttgcaaattactgctatttgaattatagatcattttcttattgcctagaaacaatacatagctaaaattccctaactacttttactacacatacttagaaggttttaaaaatacctgtagtctcagctattcagcagggcaaggcaggagaatcacttgaaggagttttagaccagcctgggcaacgtagtgagggcagggcccatctcttaaaaaaaaaaaaaaaaaaaaaaaaaaaaaaasaaaaatgcggaaatgtttcttgaactaccttaaaagccttcttgcacttctcactttgaattagtttgaattaatttacaaactgcaatatattttaaaggagcttattgtagaaaataaaataagttgataaaaaaataaggatttatctttagggatttgtctttagggacttgttaccaagcatgtctattttccctcccgcagcttctccaaacaggctggtgtacagggagcaacaccgga

SEQ ID NO: 474763 - DNA, 639 bp, Homo sapiens
gatttaaaaaacattttattttcttaaacctaacaattcaaataacataaartaatattacgtttctattaagcattcatttttatagagaccaaaacttctttacaaaatgtcttcatgtataatataaattagatgtgagaaaagcaataatcataatcattgcctaaatccacaaaataagtagatattctataatatgtatttcagtaatcacaatgtagtggattcaggcagagatgagagacactctgattttagtagaaaaagactgtgctaaattacctctttgccttttttcactctgttcctaggataccaatataataaatagtacctttagaactgtgatacactgagaaaagttctaatttaaatctcaatagatgattacacaggtagtgtttacacacacacacacacacacacacacacacacacacacacacaatgacaggagtttttaaagatattagtatctcggaatttttgtattctgaaaactgtccaagcttttatcattaaatcacttgttatgaaacacactttagaaacaccctttcctatttttaatagcctatgatagtcatacagaatgagttaatcataattgattggtcaattgctaattccgaattc

SEQ ID NO: 474764 - DNA, 576 bp, Homo sapiens
aacttctacagactctttcccttggtcggggaattgccacaacactctgactcctttccccacaactccattacatgacattgtcacctccccaggcttatgatactaatattccagagrgacgaacagttcttgattttgaatagaaatgcagtactgaccaaaactgatttagttttggttcagaaggaagcgctggatatgccctcaataactttccatggtcatctaattcagcaattagtttgtctgagtaaattcaatggaaggctgctttctcgaatgggtagtgtaatgcactgacttccctattagacatttcatttaaaaacatcaattgtctgcataaaacaaccatttccatcagtgtacattcaactggaaaggaaagcttgaggacttttttttgaaagtagtgggattggggttggccattggtaatttctttttgattaaagcgtatgtaattgttttgtgttggatacaaatttatttatgcggatgcctctgatcttatatgttatcatttcccattaagacctgagctgtttatctgctgggttttctggtcataaa

SEQ ID NO: 474765 - DNA, 576 bp, Homo sapiens
aacttctacagactctttcccttggtcggggaattgccacaacactctgactcctttccccacaactccattacatgacattgtcacctccccaggcttatgatactaatattccagagagacgaacagttcttgattttgaatagaaatgcagtactgaccaaaactgatttagttttggttcagaaggaagcgctggatatgccctcaataactttccatggtcatctaattcagcaattagtttgtctgagtaaattcaatggaaggctgctttctcgaatgggtagtgtaatgcactgacttccctattagacatttcatttaaaaacatcaattgtctgcataaaacaaccatttccatcagtgtacattcaactggaaaggaaagcttgaggacttttttttgaaagtagtgggattggggttggccattggtaatttctttttgattaaagcgtatgtaattgttttgtgttggatacaaatttatttatgyggatgcctctgatcttatatgttatcatttcccattaagacctgagctgtttatctgctgggttttctggtcataaa

SEQ ID NO: 474766 - DNA, 495 bp, Homo sapiens
tccggaagggagaaagagagcgcatggagctccttaggacagagcagtttgcaggcacttcagtgatactgtccatctcctcctcctccacgtcgcctgggtcagcaggctcactctcactttctcgaccctcagctcccatcccatggctgtagaatccatcaaggctttgccgatctcttgacctgtttggctttaaaatctgggagagagacacatcactgccatgagaagaatgtcggtccagtgaagccgtgtcatcggtggatgaactggatccggtgatatcacaggccaaatgctcttcctctggctgtaatggagagaaagcacatatggttgaagccagcagggccaatcagatagcctcagttattctagatcaagccaatggcttctsagtggattccaggcaggtaagatcataattggcctcagagacttgtttttttaataggatgatcacaattggattcaaatcccccctggactcta

SEQ ID NO: 474767 - DNA, 549 bp, Homo sapiens
tgctcttttgtttgtttgtttgttttgagacagagtcccactgtgtcacccaggctggagtgcactggcacaaacaatctcggctcactgcamcctccacctcccgggttcaagcgattttcctgcctcagcttcccgggtagctgggactacaggcgcgtgccaccacacctggctaatttttgtattttttagtagagacggggtttcaccatgttggcgaggctggtcttgaactcctgacctcgtgatccgcccacctcggcctcccaaagtgctgggattacaggtgtgagcaccgcacctgccccaaatgcccagcatttaagaaaatcaaccattgcaaattacctaagttagaacatgcccatcttggatggacttagattttatgtaggtttcttgaacaggtagatcactgaatctacataaaactcctaaaattgatctttcaacactgtgcctcaattctctctgctcctcagtaagttccctcctaaaattgaacctagctgcatggaccagtccacagtcctgattgtcccgtgt

SEQ ID NO: 474768 - DNA, 549 bp, Homo sapiens
tgctcttttgtttgtttgtttgttttgagacagagtcccactgtgtcacccaggctggagtgcactggcacaaacaatctcggctcactgcaccctccacctcccgggttcaagcgattttcctgcctcagcttcccgggtagctgggactacaggcgcgtgccaccacacctggctaatttttgtattttttagtagagacggggtttcaccatgttggcgaggctggtcytgaactcctgacctcgtgatccgcccacctcggcctcccaaagtgctgggattacaggtgtgagcaccgcacctgccccaaatgcccagcatttaagaaaatcaaccattgcaaattacctaagttagaacatgcccatcttggatggacttagattttatgtaggtttcttgaacaggtagatcactgaatctacataaaactcctaaaattgatctttcaacactgtgcctcaattctctctgctcctcagtaagttccctcctaaaattgaacctagctgcatggaccagtccacagtcctgattgtcccgtgt

SEQ ID NO: 474769 - DNA, 549 bp, Homo sapiens
tgctcttttgtttgtttgtttgttttgagacagagtcccactgtgtcacccaggctggagtgcactggcacaaacaatctcggctcactgcaccctccacctcccgggttcaagcgattttcctgcctcagcttcccgggtagctgggactacaggcgcgtgccaccacacctggctaatttttgtattttttagtagagacggggtttcaccatgttggcgaggctggtcttgaactcctgacctcgtgatccgcccacctcggcctcccaaagtgctgggattacaggtgtgagcaccgcacctgccccaaatgcccagcatttaagaaaatcaaccattgcaaattacctaagttagaacatgcccatcttggatggacttagattttatgtaggtttcttgaacaggtagatcactgaatctacataaaactcctaaaattgatctttcaacactgtgcctcaattctstctgctcctcagtaagttccctcctaaaattgaacctagctgcatggaccagtccacagtcctgattgtcccgtgt

SEQ ID NO: 474770 - DNA, 551 bp, Homo sapiens
aacaggactgtatgaataaaatccaaactgtgggaaactctctaagtcaaaaagctcagattgttcaaagataaattatatggaaaaaaaaagatggtggggggaactgtaaattaagaattttaagatgcatatcaaaaaacataagcaaattaaactataatgtctaggagtaggcacttaagccataaagatatataagtaagtgattaatggycgggtgcagtggctcacgcctataatatcagccctttgagaggccaaggtgggtggataacttgaggtcaggagtttgagaccagcttggccaacatggtgaaaccctgtatctgtgaaaaatacaaaaattagctgggtgtggtggtgcacatctgtagtcccaagctacttgggtggctgagacaagagaatcacttgaacccaggagggggaggttgcagtgagccgaggttgcaccactgcactccagcctgggaaacagagcagcaagatcctgccaaaaaaaaaaaaaaaaaaaaaaaagcataagtgactaattaaaaaacagtcag

SEQ ID NO: 474771 - DNA, 410 bp, Homo sapiens
tggtttccttttcaaggatgtttagagaagtgatttgaataaaaaggactctttacaaatgtttaacctttttaatyggccaaccaaagtctttttcatcagtttttggcttttattaaatctaagacctcatatcctaatgaaaataactaagttcaagggaagatggtgctgaagccgtgtgtacagagagagggcccgtatgcagaggaaaagccccagcagtgcccaaggcccacctagaggctggttataggtggctgtgtccgcaacaatggaaggactgtgggccggaccgcggctgcagcgatggcttcctaaatacacaaaaccatctgagcagttctccactttccctctggccatctggaggtcaggaaggtgcaccgaggaagaaccagcatctgtgc

SEQ ID NO: 474772 - DNA, 609 bp, Homo sapiens
ctgactgtacttcttggagaatgattgacggaatttaatgtgctccacaatctggggcaagttccatcacttctgcttcctgacggggaagaggcagaggggggattctgggatccctgcagctccccaaatttggattctctggttcagttatgtttccattacctaaaagtggatgagctccaagcacacactcctctgaagagtttctctgcttaaatcagtcttgactcatagttagtgactgttctgttaagacttgatttacttttaatttcagtttttttatgaacatacatttgataagctgtcatgaaaggtaacaccttttgttatttatagtacactgatctcagcttttctctaccctgcttaagaaagaaatatgtttgcttttttttgtgtggttatttctgtaaatcaagctagcaattttaaaaaagcaggtgaattaactattgggtcactgaagaatgtgtggaataatgaaataataacgaatgagagaamgaaacattgacacaggacaatatttagccagtatcctcttggttgcaagtgactgagttccaagctataactccttacaccaaaacaggcatttagtag

SEQ ID NO: 474773 - DNA, 559 bp, Homo sapiens
gtcagtgccgctgggagggcatggaaggccggcagcgtgaagcccctagtgtccacccagtgtacctttgaaatgctttctttcaggtccctctggaagggattatgtttccaggggtccttcgttgtcatattcccgcccgctgcattttgctctggactcatggtaggtgtgccctgagctgtggagtgtcccctcctcatggagtacccagaacaaggccattgccacagcccactccacacttccrgcatctccctggagccagcatggtggcctggccagccttcatttgctgaagcgccaacactggtgtggcctgctgatgtctggctcatcaatggaatgccctctgcctgtactttgccacaaccaagctgacctggccacagaaaggtggctgtgggcccagaaggaagccctagcaggctcatctcatctctgggcatagatgccttccagcaccgctcttacaggctggaccttcaaaaaaggccgacatccactccttgccatcttcaacactgtttaccactttcaaagaggaaaacaaggccag

SEQ ID NO: 474774 - DNA, 641 bp, Homo sapiens
gcccatgtggataaactcacacatatcctccattcctgctgtcacagcctctttatttgttraaacaagcacagggatagctggggaaaaggctaacagaagtcttcttgctcaactgcttctcaaaagcctctttagaagtggttgcctttggtgaacattcaaaagggagcccaatatgcacactctgcccattcgaagtggttcaagcacatcatttccctagacctcatcatcagccctctgatatcattccttccaactctctgaacatcagctgcattgccagccactggctctgtataagccactgaaggaggggactttggatcttcttggggtccatggttaggaagtaagtgactaggttgcataagatgaatctactccaatattcctgactccctaagtatttttgatttcttcatctgcattacttggcattacatttacatttagtgtgagctgccactgagctgatattatagtaaaccaactgggcaaactggcttagcgctcccactgctagaggcagtacatcaactttctttcttttttttttttttttcttgctctgttgccaggctggagtgcagtggcacgatcttggctcattgcaaccccgactccctggttcaagc

SEQ ID NO: 474775 - DNA, 641 bp, Homo sapiens
gcccatgtggataaactcacacatatcctccattcctgctgtcacagcctctttatttgttgaaacaagcacagggatagctggggaaaaggctaacagaagtcttcttgctcaactgcttctcaaaagcctctttagaagtggttgcctttggtgaacattcaaaagggagcccaatatgcacactctgcccattcgaagtggttcaagcacatcatttccctagacctcatcatcagccctctgatatcattccttccawctctctgaacatcagctgcattgccagccactggctctgtataagccactgaaggaggggactttggatcttcttggggtccatggttaggaagtaagtgactaggttgcataagatgaatctactccaatattcctgactccctaagtatttttgatttcttcatctgcattacttggcattacatttacatttagtgtgagctgccactgagctgatattatagtaaaccaactgggcaaactggcttagcgctcccactgctagaggcagtacatcaactttctttcttttttttttttttttcttgctctgttgccaggctggagtgcagtggcacgatcttggctcattgcaaccccgactccctggttcaagc

SEQ ID NO: 474776 - DNA, 517 bp, Homo sapiens
ctgtctcaagggttggcttgttgtggagttgcctccttgcattgtatagtactagggagaactttattacataaatgtcaagggactactactttattaaaatagccagagattgccataactggtccttctaagggctacaatgaccttctttaagaatttttaaaactctccaatatcagcctggcatctgcctttgttaacccacctgacttcactcgtattggagagttttgctccttyctcagggctttgcattcctttcagtccctcctgagctcactctcagtggaagcacggtgagtctttgtgcatctctggtacctcacaggtaatgctgggcttggaaagtattatagtgttgttttgcaaaatgaaggccttcaacaaaggagtgttttatttctctcttctatcactcaacccaatcatcattgataaaattctttttgcagcttactgcaacatctaggtctttctccaccccacctcattttgttgatgattataaaggtga

SEQ ID NO: 474777 - DNA, 638 bp, Homo sapiens
atttcaaatattttgaagcagtgataaataactagttccaatcccaagagaatgggtgtgagtttttggaattcattagtcatcatagacttctcaggtggatgtgtttaaagcaataaggcaatgatgaatgacgtcagtcgagtcattagtggggcaggcttttctctggtggtttctggtgccaagttaataaatggaaagtgaaactcattgaggtaactagaagccagactggcaactgagatgattctttactgaatttgcttaaccaggaaggaaggaaaggtaccagtatgaaaggatactgaagaagtgaggaactgtagccatcacrtctctattgagtagcagagtagaaatgtgaaaggctgagtgtacatgtgtggatgtattatttcacaaatcaagaggaaggtgggcagtgagacttcacatgaacatctcaagctcagaagctagtgtgggatagatgcatggttgcaccctcctcatcttaagatcctaggtgaatttcagcagccttccccaacctcggggcgccagtgttgtcatgcttagcagaagcccagccaatttgaaagaacgcagatataggaggaaagagattcaatctccactagagaagcacttatgca

SEQ ID NO: 474778 - DNA, 427 bp, Homo sapiens
attcccctgctagagaactgctatcatagctgcaaataactttgagttagagcatagcaaactccaattaatctcctttggtcttgctgctttggcttagaaaaactagcctgattttcttttcttyttaagtctttatatagacaattacctacatcttgtccagtgtagaagtggcagcgattaaatgtatcaaactagttagcatgaggatttatgccaccagcatgaatgcagttgcatgatggacagaagaggatactggaaaagaattcgtcctaaatctgaaagtcagagaggtttccaggtcaacgtagcagaagcagagagtgagattattatagtgaatactataatagacgagacaatatgtaaaacctttgatctagggtctggcacttcctaagctacaataattgctagctat

SEQ ID NO: 474779 - DNA, 545 bp, Homo sapiens
ctctcactccttagacttagatctaattgtagatgatcatttttcaacccatatccatccaatttagtttgagctcacctatggatctcctataatatgctagccactaaggtacttgatctcatttaattctcacaaaaactaaatgaagtaggtaccaattttccttatttaatatatggaaaaaatccaaggaacaaataaatgaagtaacatccctaaggtcacacaacaagaagagtgacaaggtgggattccattccatgtctgattctaggccctagctctcccctgaatgtcggatgcccagccatgcctagtatctcatggcaccaccagccattttgctcccaaacctcctgccacagagtttcattaggctctggaaggtcactgccaaccaagcattcaaaagcctccttcctcaattatcaattttcccaaacaaatggaaacttyaggagggtccctctctgttcaaggtacttgctgccaaagaacaattgggtattccctataaagccaaatggcactgaagttgccag

SEQ ID NO: 474780 - DNA, 613 bp, Homo sapiens
tggattctttgcatgcagttttcaacctttctccaagacattctcaacattaccatgtaattaatctccctaaaacacagatcttgttatcatttttttttgctccaaatatttttgggtatcctatcccttatatgatcgagttcaaaccttgtagcatattcaaataccttcacagggctgggtgtaactacttttccagcttgttctagctttagatttcctccagatgtctcatactctaatatccacatgcagccttgatacctttggctttgatcatgcaacccattgccattaatttattcagaaaccatttactcagaatttactattggtaggtgctctcttagattctggagttatagcagtgaaccagctactcaagatccttgactcccagaatatataatgtggaagaccaacaaaagacaagttacaatctatttatgtttatatgtaaagcagttttagaaagttctctgaagtaaaaaaaaaaaaataataaagtgaatcatagataggaggtgaggatgggaggctacttttgaattagtggtcagggaagtcattcctaaggaactgacackgggcaggaggcctgagccagcca

SEQ ID NO: 474781 - DNA, 548 bp, Homo sapiens
gtaagaatagtgataatctggagggggttgagaaatttcttgctggcaaactctcagtgcatgactggttgggtggtgagggaaagggagggaggattctggaaggaccagtgttttcgtctgggtgacagggtttatggtgctgtaggagcatggaagaagaacwgcttctagaagggctttgtccctgtggtatttcacgtgcccataaggctttcagttggtttgtaaacagaccttaaatgtagactgtattgtgtggggaaagcatggtgattcgagactccatcctttgacttcagtgcttctctcaaactcagtagctggtgaggaaattaagggtaagaaatccatttcctgagagaattttttttcattaaaatcttccgcacaagacagaaaaaaattcacgtcacagttctttgtaagctctcatcatgttattgtggttaatcaagactaagaattttcttttatttcttagaattgataagaaattgtgcatttttttcttcaaatgctatttaagagggaagcatggtactgaa

SEQ ID NO: 474782 - DNA, 529 bp, Homo sapiens
tgctcaccacccaccctctgtgggtagtgctctgggactccctcgttccatgagtcagagccaggctggagacagacagtaggcttcctttattaaatcagcctcctgccccgtacactatagaggaaagctataattactcctttggcctggctctgagaactgagcyacagacgcttgactaggagcgacggttcttgatttctgcatttatctaatgatgcaccccagtttggaaataagaataacagccaggggttaagggcttgttacacaaacgtcagatgttttgcatatgtaatggggtgcattgggcctggatagtcatgtagattgctagaaaaatcgctatattaaggctgccaggagttttctgttttgttttgcatgcctcctgcctcgcgttgattgagtcacacttgaggtggcctgctcattgctgatgttggtttacaagagacaaagaaaaaagcagccaaacattgtttcgggtctccaggtcaggactctttcatcccttaggtataat

SEQ ID NO: 474783 - DNA, 544 bp, Homo sapiens
ggcaaatgtgacacgtccgcatgtcagagaactgcacggtgattttgcccttcggggtgatgccagtcacrgtgccttctccaaactcatcgtgcacaatttggccgcccaggcacaggcgaccatcgatgcctccaatcacagccaggaccgccatgaggccccccacttcagggttctcggagtcggggaagtagtcctctaactgggcctagtgcagaccaaacagtgagctcgaccagggacactcacggagctgcccaatccctacaagtttactgttcaactaaattaattctgagaacacaaactcaccccttcagaaggccttcccgcaaagctgtgggtgatggagcggagctgggagttgatgtacttgttgatgagcccattccactgagtcagggagtgcagcgtgcacagcagtgccaccaccacctccaccagtgtgctgctatgggtggcagtcagcaaggcctgcgggcgcaccctgcgccacctcggcatggactctgaggaggaaacaaggggagaagctgctgca

SEQ ID NO: 474784 - DNA, 544 bp, Homo sapiens
ggcaaatgtgacacgtccgcatgtcagagaactgcacggtgattttgcccttcggggtgatgccagtcacagtgycttctccaaactcatcgtgcacaatttggccgcccaggcacaggcgaccatcgatgcctccaatcacagccaggaccgccatgaggccccccacttcagggttctcggagtcggggaagtagtcctctaactgggcctagtgcagaccaaacagtgagctcgaccagggacactcacggagctgcccaatccctacaagtttactgttcaactaaattaattctgagaacacaaactcaccccttcagaaggccttcccgcaaagctgtgggtgatggagcggagctgggagttgatgtacttgttgatgagcccattccactgagtcagggagtgcagcgtgcacagcagtgccaccaccacctccaccagtgtgctgctatgggtggcagtcagcaaggcctgcgggcgcaccctgcgccacctcggcatggactctgaggaggaaacaaggggagaagctgctgca

SEQ ID NO: 474785 - DNA, 577 bp, Homo sapiens
caatgggcaaatgtgacacgtccgcatgtcagagaactgcacggtgattttgcccttcggggtgatgccagtcacagtgccttctccaaactcatcgtgcacaatttggccgcccaggcacaggcgaccatcgatgcctccaatcacagccaggaccgccatgaggccccccacttcagggttctcggagtyggggaagtagtcctctaactgggcctagtgcagaccaaacagtgagctcgaccagggacactcacggagctgcccaatccctacaagtttactgttcaactaaattaattctgagaacacaaactcaccccttcagaaggccttcccgcaaagctgtgggtgatggagcggagctgggagttgatgtacttgttgatgagcccattccactgagtcagggagtgcagcgtgcacagcagtgccaccaccacctccaccagtgtgctgctatgggtggcagtcagcaaggcctgcgggcgcaccctgcgccacctcggcatggactctgaggaggaaacaaggggagaagctgctgcactgctcttcaccaggacacagggaaggg

SEQ ID NO: 474786 - DNA, 544 bp, Homo sapiens
ggcaaatgtgacacgtccgcatgtcagagaactgcacggtgattttgcccttcggggtgatgccagtcacagtgccttctccaaactcatcgtgcacaatttggccgcccaggcacaggcgaccatcgatgcctccaatcacagccaggaccgccatgaggccccccacttcagggttctcggagtcggggaagtagtcctctaactgggcctagtgcagaccaaacagtgagctcgaccagggacactcacggagctgcccaatccctacaagtttactgttcaactaaattaattctgagaacacaaactcaccccttcagaaggccttcccrcaaagctgtgggtgatggagcggagctgggagttgatgtacttgttgatgagcccattccactgagtcagggagtgcagcgtgcacagcagtgccaccaccacctccaccagtgtgctgctatgggtggcagtcagcaaggcctgcgggcgcaccctgcgccacctcggcatggactctgaggaggaaacaaggggagaagctgctgca

SEQ ID NO: 474787 - DNA, 577 bp, Homo sapiens
caatgggcaaatgtgacacgtccgcatgtcagagaactgcacggtgattttgcccttcggggtgatgccagtcacagtgccttctccaaactcatcgtgcacaatttggccgcccaggcacaggcgaccatcgatgcctccaatcacagccaggaccgccatgaggccccccacttcagggttctcggagtcggggaagtagtcctctaactgggcctagtgcagaccaaacagtgagctcgaccagggacactcacggagctgcccaatccctacaagtttactgttcaactaaattaattctgagaacacaaactcaccccttcagaaggccttcccgcaaagctgtgggtgatggagcggagctgggagttgatgtacttgttgatgagcccattccactgagtcagggagtgcagcgtgcacagcagtgccaccaccacctccaccagtgtgctgctatgggtggcagtcagcaaggcctgcgggcrcaccctgcgccacctcggcatggactctgaggaggaaacaaggggagaagctgctgcactgctcttcaccaggacacagggaaggg

SEQ ID NO: 474788 - DNA, 642 bp, Homo sapiens
acgtgctatggtcaaagaattcggaattagcaattgaccaatcaattatgattaactcattctgtatgwctatcataggctattaaaaataggaaagggtgtttctaaagtgtgtttcataacaagtgatttaatgataaaagcttggacagttttcagaatacaaaaattccgagatactaatatctttaaaaactcctgtcattgtgtgtgtgtgtgtgtgtgtgtgtgtgtgtgtgtgtgtgtgtaaacactacctgtgtaatcatctattgagatttaaattagaacttttctcagtgtatcacagttctaaaggtactatttattatattggtatcctaggaacagagtgaaaaaaggcaaagaggtaatttagcacagtctttttctactaaaatcagagtgtctctcatctctgcctgaatccactacattgtgattactgaaatacatattatagaatatctacttattttgtggatttaggcaatgattatgattattgcttttctcacatctaatttatattatacatgaagacattttgtaaagaagttttggtctctataaaaatgaatgcttaatagaaacgtaatattactttatgttatttgaaacgtcatgtataagaaaataaaa

SEQ ID NO: 474789 - DNA, 451 bp, Homo sapiens
tgttaacggatcatattttactgctgaaactatcatgtgtgatataattgctcattatgtgccttaaaacacaagcaatataattattttcaacttggagcaaattaaaatcttatcagcaatttaaaatctctagagtcgtcttcttctggttaattattttaaacttgtatttttctctttatgtttttagtgagttctcttrtcaaggagaagaactcaaggtgattattctttttttctcttccatgcacctcacaggtgtgttaataatttcgtttctcagaaaatgttctttcatatctatcttacatgatgagagaccttttaacatcttccattcggatgtgataccagtaatggaaaatattccagcttcatgaatatggtgatacaaatagttatccgtctaacctctttcagtgccaaatgtttactatactcagtgagt

SEQ ID NO: 474790 - DNA, 554 bp, Homo sapiens
gctgcctatctctctcagaggctttggccccagctaaactgcagggagaaagcaaggcctgcttacccgcaggaytgggacatgtctatcctgtaggcatgcctgtccaccagcctcttacatggcccctgcctggcttcctgggagaagcatgtatacattgtagtttctgctacccaacctggatgcttggctccacctgaatgcattctggcggcccagaaatccctcagatccctcaccacacttggaacctggccctaagcatcaggaagagggagtcataagcaagtcgtggcactccagtgctgtggcctgtggttcaggagtgccaagctgggatctgtgctgggcagttgaattggggaggaacccacactcttcagaaactgagaggccagattcacacaggttcacaggctggcgtgggccctaggcacacctccttccacagggctgttatggtaaagatgcagggtatttttctagaagacatctccctgagggagccccacagcttgaaacacctaacaacaatgacaataatgataatg

SEQ ID NO: 474791 - DNA, 554 bp, Homo sapiens
gctgcctatctctctcagaggctttggccccagctaaactgcagggagaaagcaaggcctgcttacccgcaggattgggacatgtctatcctgtaggcatgcctgtccaccagcctcttacatggcccctgcctggcttcctgggagaagcatgtatacattgtagtttctgctacccaacctggatgcttggctccacctgaatgcattctggcggcccagaaatccctcagatccctcaccacacttggaacctggccctaagcatcaggaagagggagtcataagcaagtcgtggcactccagtgctgtggcctgtggttcaggagtgycaagctgggatctgtgctgggcagttgaattggggaggaacccacactcttcagaaactgagaggccagattcacacaggttcacaggctggcgtgggccctaggcacacctccttccacagggctgttatggtaaagatgcagggtatttttctagaagacatctccctgagggagccccacagcttgaaacacctaacaacaatgacaataatgataatg

SEQ ID NO: 474792 - DNA, 554 bp, Homo sapiens
gctgcctatctctctcagaggctttggccccagctaaactgcagggagaaagcaaggcctgcttacccgcaggattgggacatgtctatcctgtaggcatgcctgtccaccagcctcttacatggcccctgcctggcttcctgggagaagcatgtatacattgtagtttctgctacccaacctggatgcttggctccacctgaatgcattctggcggcccagaaatccctcagatccctcaccacacttggaacctggccctaagcatcaggaagagggagtcataagcaagtcgtggcactccagtgctgtggcctgtggttcaggagtgccaagctgggatctgtgctgggcagttgaatkggggaggaacccacactcttcagaaactgagaggccagattcacacaggttcacaggctggcgtgggccctaggcacacctccttccacagggctgttatggtaaagatgcagggtatttttctagaagacatctccctgagggagccccacagcttgaaacacctaacaacaatgacaataatgataatg

SEQ ID NO: 474793 - DNA, 333 bp, Homo sapiens
tatgaaatacatccatggcctaacgacttctcaccactactaccactcatsctgacagcattctcacctaagtcactaccttttttcgctggattagagtagcctcccaatttatttgctcacataacctatttattctacacagtgcaccagatacacccctttgaaatgcaaacacaatcatattattctctggtgaaattatctcatatattcctatcgcatttaaaattaattcagaatcatcccatgattatcaaaaccctacatgctcttccacaacatggtttacttccaagatatctcttcaacatttttttcactgtactgaat

SEQ ID NO: 474794 - DNA, 504 bp, Homo sapiens
  misc_feature (1)...(504): n = A,T,C or G
ttaatcttacaaaacataggtgctcaaaaaataaacaygtgcatgaatatttacagcagtaatattcatacagtcaaaaagtggaaacaatccatatgcttgttgactcataaatggacacccaattttcagctataacaaagaatgaagtacttatatatggtataatattggtgaaatttgaaagcattctgttaagtgcacaaaaggacaaatattacttgattttattcacatgaaacattaggaattggcaaatcaattgggatataaatcagattagtggtcattagggctcagggaagcagattagggtgtaacaactttatgtataatgggtttttggaagggacatgatgaaattgccctggaacattgtgaatatgctaaaagcaagtgcattgtatgctttaaaatggtgggtgttaattntatattatgtgatttttaccttaaaaaacaaaaaagaaaaaatagccctactctatacataataaactcaag

SEQ ID NO: 474795 - DNA, 504 bp, Homo sapiens
  misc_feature (1)...(504): n = A,T,C or G
ttaatcttacaaaacataggtgctcaaaaaataaacatgtgcatgaatatttacagcagtaatattcatacagtcaaaaagtggaaacaatccatatgcttgttgactcataaatggacacccaattttcagcwataacaaagaatgaagtacttatatatggtataatattggtgaaatttgaaagcattctgttaagtgcacaaaaggacaaatattacttgattttattcacatgaaacattaggaattggcaaatcaattgggatataaatcagattagtggtcattagggctcagggaagcagattagggtgtaacaactttatgtataatgggtttttggaagggacatgatgaaattgccctggaacattgtgaatatgctaaaagcaagtgcattgtatgctttaaaatggtgggtgttaattntatattatgtgatttttaccttaaaaaacaaaaaagaaaaaatagccctactctatacataataaactcaag

SEQ ID NO: 474796 - DNA, 491 bp, Homo sapiens
cctggtgcactggccgggacactcttcctccctgcagcccttgcctacccccttggccatgaggaattcaggcagctgtgtccccagatgtctccacccaattttggactctcagagtcccatgcccaatgagctgccagcccaacccaggtcaacatcgagggtggtggctgcgggggcagcatctcctcccaccagtgccttcccttgggagtggacaagtcctccgccacctcagcaccaccagctcccacccagggccacccccactcccaggtcactggtgtgcggcccctggcccagctgacccagcaccagtcccaaggcctcctcatgcccagtcccaaccacgcgggacccacctgccaccctgtcgatgccgagaccccagaactctcctcccacaagctccaggctctgatgccaggcagatgccctcctgcraggcaggagcatgggcaggtgtgcgtcccgtctggctggcattcgga

SEQ ID NO: 474797 - DNA, 443 bp, Homo sapiens
cgccacaccagacactataatccacaccccaaaatagtgtaacagtgtatagccagtcactrataaatgttatttccataagccaatgagaatttgtgacaaacctctttgcatcatcccacttctggacccttttttgcctttaagaaactgcttgttgcaaagctccaaagggagttcatatccaaggatacttgggtctgtttcttccaggcagctgtcctcattgtggctcaagtaaactctttgaattatgttttgtgcttcagccccttccacttagattaacaacatggatttgtgtcaccatatacagcaattaaaatgtttacacttttcccctcgagggcactgatgtgttttcctgagcacttggaatagctacgtagtgtttcctgtctagattatggtttctgaaccttggtgctacttacctttaggac

SEQ ID NO: 474798 - DNA, 443 bp, Homo sapiens
cgccacaccagacactataatccacaccccaaaatagtgtaacagtgtatagccagtcactaataaatgttatttccataagccaatgrgaatttgtgacaaacctctttgcatcatcccacttctggacccttttttgcctttaagaaactgcttgttgcaaagctccaaagggagttcatatccaaggatacttgggtctgtttcttccaggcagctgtcctcattgtggctcaagtaaactctttgaattatgttttgtgcttcagccccttccacttagattaacaacatggatttgtgtcaccatatacagcaattaaaatgtttacacttttcccctcgagggcactgatgtgttttcctgagcacttggaatagctacgtagtgtttcctgtctagattatggtttctgaaccttggtgctacttacctttaggac

SEQ ID NO: 474799 - DNA, 443 bp, Homo sapiens
cgccacaccagacactataatccacaccccaaaatagtgtaacagtgtatagccagtcactaataaatgttatttccataagccaatgagaatttgtgacaaayctctttgcatcatcccacttctggacccttttttgcctttaagaaactgcttgttgcaaagctccaaagggagttcatatccaaggatacttgggtctgtttcttccaggcagctgtcctcattgtggctcaagtaaactctttgaattatgttttgtgcttcagccccttccacttagattaacaacatggatttgtgtcaccatatacagcaattaaaatgtttacacttttcccctcgagggcactgatgtgttttcctgagcacttggaatagctacgtagtgtttcctgtctagattatggtttctgaaccttggtgctacttacctttaggac

SEQ ID NO: 474800 - DNA, 634 bp, Homo sapiens
ttttcaggggtctctaaaaatgtatgagacttgaaaaaaatgtattgactccaaactccagacataaaattgcagaattgaaatgaataaatgtttaactaaatgcttataaaatggagccttatatcagcttccaaagttgttacagtttgtatggaaaaaaatgtaatttcttcctaacgaacctccttgcttctttccctgccttctctactatatttgaaaagattttgtaagttggaatttggaatttccaagaattcccaagtactatccagtgattgctgagaaattataattagtcataaatgagtttctcaaggccaaataaattcaaacgaaaaatcttctcaaattattttgyattgcagagaaaccttttaatgtgaaatatgaatacaatttaatatgtttattttgatgttgagtgaggccttcaaaagtagcaggatcatggcctacagaggtcttaacattcctattgtatgcagacacatttcaattgctttgaaaaggtgtatgttgaaggtaactaaacacattttgcatttcaagctcagaaaatttcccctttagattcccttttcttttctccttttattttctaataaaatatttactgctgtgatatcca

SEQ ID NO: 474801 - DNA, 712 bp, Homo sapiens
gtctccctctgctccaggtatgttggcctcgggtgcttttcctgtcaagtatacctgaggctttgctgttctgtaggcccagaacattcttccaacaagtatctacatggcttgctcctacatcacctgccccacaagaaataagctcaaagaagacacgaatctcttgtcagttttcacaacttcatttctaatgcctaaaacagtacctggcacagagtcggggagtgaaatccatttgtttaatggagtaagtaacttaatgaatatgaatcatgttgagttagatgtagctggaagactttcaggtagagccactccgtaggcagttggaagtggagagctggaggtcacagggagagctgggatggggacagaggtctggaacctttgagacaagagcagagtyatctcagaaggatgaagagacacaagggaagagagaagcagtataggacttaagagtggagacccaaaagccaacagcccagacttaaatcctagtcccaacatatcctgcacataagtcttaaacaaatttttgaacctctctgtccctcggtttcctcatctctaaaatagggttttagtaacacctgtctcagaagcatatagcaagatttcagtgagctcacacgtgtaatgcacttaaagtagcagcagaacaacctggcacacagctagcacacaatcagtgacagcaagggggtta

SEQ ID NO: 474802 - DNA, 582 bp, Homo sapiens
tttctctttcaaaagttttgaaaatcatgaaaaataattacgcatctctgcaactcttttaaaagggttgtgttaagaatcttttgtaacccactatagctattgtagtacatgttatctaatacacataatgttagagaaaagatgacaacatgcaaactttatggccrgaaaccaaagagtcaggcaaaatataaacactctgatgcaaggggcccaaaagcactgaatagagacttgacatttgaaatctgaaattttaaaaagcttcctatggccttaacaaagcaggtgaaatcgaatccctagggcctctaataatctaagaaaagaagctgttgctgccaccaacactggaagggagtgagagctccctgacctattacagaaggccatgaagaccagtcctcgttatcattttcctaaatgtgttattttcctttctagccttcttgttaatctccctctcatatatctctcttactgagatctctctcatgtctttagtttttaaataaattactgcatgatctttttgtaggttgttttaatttagaggagttgaaagaaggggaaaggaac

SEQ ID NO: 474803 - DNA, 582 bp, Homo sapiens
tttctctttcaaaagttttgaaaatcatgaaaaataattacgcatctctgcaactcttttaaaagggttgtgttaagaatcttttgtaacccactatagctattgtagtacatgttatctaatacacataatgttagagaaaagatgacaacatgcaaactttatggccggaaaccaaagagtcaggcaaaatataaacactctgatgcaaggggcccaaaagcactgaatagagacttgacatttgaaatctgaaattttaaaaagcttcctatggccttaacaaagcaggtgaaatcgaatccctagggcctctaataatctaagaaaagaagctgttgctgccaccaacactggaagggagtgagagctccctgacctattacagaasgccatgaagaccagtcctcgttatcattttcctaaatgtgttattttcctttctagccttcttgttaatctccctctcatatatctctcttactgagatctctctcatgtctttagtttttaaataaattactgcatgatctttttgtaggttgttttaatttagaggagttgaaagaaggggaaaggaac

SEQ ID NO: 474804 - DNA, 519 bp, Homo sapiens
gagagtaaatttgggttcctgactattctaattgcatcatatgtaactccttccctgtacctataattcacagtatatacttacccatgtcatttcttagatgcatgctcaataattccatgtctcaggagtacttggaatttatgtgtattaatagaattgctacaaaccctctgagccctatggacagtatatgaatagattctgttcatttcatgttgatctcccttcaaccttctaagcagttcaatgtcttttcctttatctcactttcaccatctttctctctttttttctttagggggaggagactctcctttctcccaaaaccaagaatcaagtttcttctccttttataaggtcttgtattttggcttagtctctaatattctggcagactgcctctacatggaagttacctaaatggccccatttgagcaacctttccaaytgactttgggcttcatagaaggctgagttaagtaacaagaaggttaagatgagactagacagtgaggg

SEQ ID NO: 474805 - DNA, 587 bp, Homo sapiens
tgtctggaagaacacatactaaaatgtggacagcgtccaaatctggagaggaggtgggactgggggagaaaaaagagggcctgaactattttactctttatgcttctrtattattgcttaaggttttcacaacaaccatgtacttgcttaaaggatgcatttatttaaaaattttagtaatcctttataggagcaacaagacagagaagagagagggactcactttttttttttttttttttttttttttaatttcaccttctcaggtggatcagagagcctggcgatccacctagccatcctggaattttagtggaatgtgcattccacttgagaaagttgtggaatcatgaatcagaagctggttgtggaaagagccctttgttggagttaccaacaaaaagtctatggcatttcgcattatttgcccacaagagcaaaataagggactggaattttgtgattaattccaggcctatcagcagcttggggagactgattctctgaaagccagtggtgtttatttccatggaagggtctgcctacagatttaggcaaactcaccctagggagtcagacaaaacagg

SEQ ID NO: 474806 - DNA, 525 bp, Homo sapiens
ctgaggcagatgatgtagaagatggtggtgggtcatgtgagctccatcagcctgccttgggtgggtgtgttttgagaatcctcttgcaaaagttctgtcctagaacttgggtgaacccctattaccaagacaagtcctctgagcttaacttgccctgaagatcctgmcatctctgtagcggtctagcttggtttcctgactcaatccctctgtgacttaattttttccctgtacaaaactggagctcagtggggatagggattcattcctctagcatgctttcaaaagctcaaatatctcctctactaccctccacttatctcaaatgtccaccattatggattcattcctttgtgtttgtcttggggggctgggatgtggaggattgaaagagctcctgagaaaggaagacttctccagtcttcctggtctggttagatattctcacaagattaggagcacctcaaggaatatgtctcattgccattgtgcattttatacttagcacagcccttggcacataaa

SEQ ID NO: 474807 - DNA, 601 bp, Homo sapiens
taatcctcataatattgctaaagtgatgattatgcccattttatakataagggcaatcaggtttagagaggtaaagtgagctgcctaaaaggcagaagaggtcctgaaacttcagtctgtataatagtccagatccacttcgttaaatacacccagtgattctaaaagctggcttcacaagagaataacctgagggtaattttacaaaatgctgacagccaggcccgtgtggttcaattaaatcacagtacttgagtgaggtgcctgggcatctgtactcttcagagctctcagatgattctaatgggcaaatcaagatcgggaatctctgaactactttatactgcttccaacataactaaactcttcctatagtgaggtaggcaaaataacgtccccatcttccaaaagatgtccacctccatatcccaggaactgtgaatatgctaccttatatagcaaaggggaatttgcaggagagcaattaggttaagaatcttaaaatgagaagattactctggattattttgggaagacccaagtaaccagaaggatcgttatacatggaagcagatggcaggaaggccagtgtcagagtgat

SEQ ID NO: 474808 - DNA, 601 bp, Homo sapiens
taatcctcataatattgctaaagtgatgattatgcccattttatatataagggcaatcaggtttagagaggtaaagtgagytgcctaaaaggcagaagaggtcctgaaacttcagtctgtataatagtccagatccacttcgttaaatacacccagtgattctaaaagctggcttcacaagagaataacctgagggtaattttacaaaatgctgacagccaggcccgtgtggttcaattaaatcacagtacttgagtgaggtgcctgggcatctgtactcttcagagctctcagatgattctaatgggcaaatcaagatcgggaatctctgaactactttatactgcttccaacataactaaactcttcctatagtgaggtaggcaaaataacgtccccatcttccaaaagatgtccacctccatatcccaggaactgtgaatatgctaccttatatagcaaaggggaatttgcaggagagcaattaggttaagaatcttaaaatgagaagattactctggattattttgggaagacccaagtaaccagaaggatcgttatacatggaagcagatggcaggaaggccagtgtcagagtgat

SEQ ID NO: 474809 - DNA, 481 bp, Homo sapiens
ccataaatgaaatcaaacgtcttctatatttctcaacaaaactgttgataagcttctagaacagtgttgtgcaataggactcttttgtagtgatagaaatrttctattttggtgtggtccaatatggtagccactgaccacatttcactattgagtacctgaactgtgcaattgaggaactaaaacattaatttcatttatttttagttagttaaaatttaaacagccacgtgtggcttgtggctacagtattggacagtacaggaccaggaccctatgatatcttttagttttctaaacctctcagatactagataaattctaggtgtgccacaagattttaaaaggtactttatattaaattcttattaaggctcaaacgtgggttaatgagaagattaacacaccatttcctttgctttgaagttaaggataaatatgaaaataatcactagaaaatttatcggagtaaatccctaat

SEQ ID NO: 474810 - DNA, 481 bp, Homo sapiens
ccataaatgaaatcaaacgtcttctatatttctcaacaaaactgttgataagcttctagaacagtgttgtgcaataggactcttttgtagtgatagaaatgttctattttggtgtggtccaatatggtagccactgaccacatttcactattgagtacctgaactgtgcaattgaggaactaaaacattaatttcatttatttttagttagttaaaatttaaacagccacrtgtggcttgtggctacagtattggacagtacaggaccaggaccctatgatatcttttagttttctaaacctctcagatactagataaattctaggtgtgccacaagattttaaaaggtactttatattaaattcttattaaggctcaaacgtgggttaatgagaagattaacacaccatttcctttgctttgaagttaaggataaatatgaaaataatcactagaaaatttatcggagtaaatccctaat

SEQ ID NO: 474811 - DNA, 570 bp, Homo sapiens
acaataagacaaaaatccagtggttcagactttaacttgctcttatgaaagatctttgtgttacaggytgatttttttcaaacaaaattgcatgctgggcctgacctgtttttgcccctcgttgaccttgtattctctctcagctttggaagacccttttatggatcagcagtatgaatgaatacacttcatagtaatcacatacaatagattgatgctgttatgcatcagttagttgatagaaaaaaaagctgaagtgattgcctaagggcaaagaaatatggtaatcttaaaactttgtgttgacatttagatgcaaaatccagctattcaaagtagtctaggcaattcccatgatgtcatgtcaccaggatgagttttcagagtccagaactcattattgttttccagtggtacataaagttctggctacccttccttttgtaggtataggtaagtagacaggcatctgaaagtaaatggaaggtgggtgacaaattgactcacgctaagaggtacatgagatgaaagtaaacatcaaaaggctcttgcattaatttacagtgagaa

SEQ ID NO: 474812 - DNA, 643 bp, Homo sapiens
tcataatagtcatgtgattcatacattttcttatttggcctacaaggaaactgaggcttggaggtgagcagctttataacttttacagagaaagatggtaacatgactggatccataatccaatcccactccagtatgctttctggtgtgccttactcacaactgctgtgtgaactgtagaaattttaagtcattttttagctacttacttctgacaggtactttattataccatgctattcaactctcccatggctggatatttgctataaatgcttgaatttttgttgttattgtttgctcatttcttaatataggtaagtcctaagcaggttagattgtttgcagagatggctacaatactctgttttgtccccatatgccactcctcccatagagacagtctatttttccctcccctgaatctgggctggccttgtgacttgttctgaacagtggaatgcagaggccctcccaagcctaggcctcaagatgtctcttgatgttccatgtgaacaccaaggcctcactgatgccatgtgaggaagcctgggctcttttggttgaggatggaggactrtggaaagtggcccagccaatagccagcaccaaatgccaggtaaatgagtgaagccaccttgga

SEQ ID NO: 474813 - DNA, 594 bp, Homo sapiens
ccgctggcatctggaagtcatccccagagaggaagtggaaaacggggaccaggtcccatacagcatcatgaacaactatttctccattggtgtggtgagttggtcaaagatcacctttctgtatggaagggaaacgcccaggaagggttccagccttctgttgtcccctctgggtccctagtgtctacctgtcttacctgcccccccagccctgagttgggtccaagcattctgaaacttggcctgagtgtggacaccctgattgcacccccgctttattccccatctcttgcttagggagtaaattctctcctctgtcattttaactaacacaggaaaagacagaaaaattttcaaaagacatattttctccttctgcaatttgtagcagtcgtagaaaagcaacaccaagmaataaccgggggacaaggttggtaggaaactctcacatgagcttcaggaactgggaattctgatcttcaaaggaagaccatgtggtcccaagttgccctggctggcttagccctcagatttccttctctcctattctctcttctctcaaccccattccactcactccatgggcatcataaa

SEQ ID NO: 474814 - DNA, 525 bp, Homo sapiens
ggcttactcaggggagcctcccctgacacacccaccagcctcagtcaccttcttatacgacagtgctcctctgtttgttttccaacgtgaatgtgaaatgatgcattatctccatggattcctcattattatytgtctgtcccactggacagtcggtaagcaccatgagaacccaagccacggcttttttgcccactctcagagccggagcacctaacactgcatctgcatatagcaggcttcagtcgatatgtatgaagatgctgtgagaatgagacccagtccccctcggggaggttacaatacattcagggaacaaacaaggagataattacaagagagtacaaagagatcatttctggtgctaaggaaatattctgacgaggcaccaggtccaggctggggcaactagggagggtctcccaaaggcagcttctgagctgagccacagagagctttgtgctttaaggaagtgaaaacacttgagaacggttgacatgttgcgtgggaggcaggatgtgcaga

SEQ ID NO: 474815 - DNA, 628 bp, Homo sapiens
catgtggcttactcaggggagcctcccctgacacacccaccagcctcagtcaccttcttatacgacagtgctcctctgtttgttttccaacgtgaatgtgaaatgatgcattatctccatggattcctcattattatctgtctgtcccactggacagtcrgtaagcaccatgagaacccaagccacggcttttttgcccactctcagagccggagcacctaacactgcatctgcatatagcaggcttcagtcgatatgtatgaagatgctgtgagaatgagacccagtccccctcggggaggttacaatacattcagggaacaaacaaggagataattacaagagagtacaaagagatcatttctggtgctaaggaaatattctgacgaggcaccaggtccaggctggggcaactagggagggtctcccaaaggcagcttctgagctgagccacagagagctttgtgctttaaggaagtgaaaacacttgagaacggttgacatgttgcgtgggaggcaggatgtgcagaaggatgaggctagggagaaaggcagagcctgcttcctgggcctactgtggtaggctatggggccatgaggagccacacagccccatcccagaagtgaa

SEQ ID NO: 474816 - DNA, 628 bp, Homo sapiens
catgtggcttactcaggggagcctcccctgacacacccaccagcctcagtcaccttcttatacgacagtgctcctctgtttgttttccaacgtgaatgtgaaatgatgcattatctccatggattcctcattattatctgtctgtcccactggacagtcggtaagcaccatgagaacccaagccacggcttttttgcccactctcagagccggagcacctaacactgcatctgcatatagcaggcttcagtcgatatgtatgaagatgctgtgagaatgagacccagtccccctcggggaggttacaatacattcagggaacaaacaaggagataattacaagagagtacaaagagatcatttctggtgctaaggaaatattctgacgaggcaccaggtccaggctggggcaactagggagggtctcccaaaggcagcttctgagctgagccacagagagctttgtgctttaaggaagtgaaaacacttgagaacggttgacatgttgcgtgggaggcaggatgtgcagaaggatgaggstagggagaaaggcagagcctgcttcctgggcctactgtggtaggctatggggccatgaggagccacacagccccatcccagaagtgaa

SEQ ID NO: 474817 - DNA, 509 bp, Homo sapiens
ggacattccgcgataaaccacaaatcatgggattattgtatctgctcccacaatgaggcctgtgaactctttgaggggtagagatgtcatcccctctgtccctggcgcctgcagcagcgtcagtcacagtcatgcttggtgtcaatgcccaggggcctgtgttctcagtatagggggcaccttggctttgaccttgtatttcttttctgcgggacaagccagcccctcagaaccagaagcaaccacatctcacaccaggcaccaaacacagggtcctcccccatcttggggctctggtctctgagtgcaacttgcttttggggagactccacagyctgtctgggagcttccaactccacctcggggttgcccctctttccttttgcggtgtgggggtccagggtgtgcagtgcttggccagggagggagctccctttaaagatcactagcctgaggttatcaagaatgagccagcagggaagcacagccctcccggccgcccagacaaa

SEQ ID NO: 474818 - DNA, 510 bp, Homo sapiens
ataggaaaagtcccattccacatcctacgataatggagttatttcgtgtgatggggatatcatgtgatagaaggattctaatttttttctttcaaaatagattgttagttatcacagatgctttctaattggcatattactttttaaatagtagtccaagtcatcaataaattgatattcatttcttctagaagtataaccccattacaataaaatgaaaaaaaattatatcaaaggagtgttctatgtagcaaagctatttctgtgtcacagtgtgtagtccttcaaagcagtattttgttgatcttagtgacaacaaattcaatatatctaataatactgcrtagcaggtcttcattctcttccctgttgatgtgacagtcactctttaatgaaaccttattttgtataccatttgcattgtagatcaggaatgaagagctgagtttgcttaagcaatagctgatctgtttatactttttatattcttccatcaagaaataattaccc

SEQ ID NO: 474819 - DNA, 552 bp, Homo sapiens
tggaaaacatcgcaactgtaattgcctcgcatggagttggtgctcaaaaataaagtgagccccaaacatcaatttccagtcccatttttaaatctatgaacctgaacgttgtaagcaagccaactaggcctcggggatgagtgagtcattaggcattgcctcatctgtggcaggtggggcggggagggacaccgctcttcctgacgggggtggaagactccacagcagccattagggcttttggttttgctattatttattcatttaaaagttctgggctgaggtgggtgcatcacctgaggttgggagttcaagaccagcctgaccaacatggagaaaccctgtttctactaaaaatacaaaaaattagccaggcrtggtggtgcatacctgtaatcccagctactcgggaggcagaggcaggagaatcgcttgaacctgggaggcagaggttgcggtgaggcgagatcacgccactgtactccagcctggccaagaagagagaaattccatctcaaaaaaaaaaaaaaagttcttattgaagtagtataa

SEQ ID NO: 474820 - DNA, 559 bp, Homo sapiens
tgggaggtaagatgaaaaggatggggaggagggaacttgttgggatctgtatcyaagggtacccgaccccttggtctcattccactgttccacaggggttggtgacagtgtgtgggagacaggggtggacagaagtgcgttaaccaagatacagactagagaaggaagcgtcagttcttaggacaggggtcagtttgtagtgtgggaaagaggaggtgagaaagggtagtgaatttcacctggcccttgttgagtatgtgatgcctgtgttcgccatgtgaacagcagaaagcagcaaatataaggatcgagagcacggggtagagagagggctggcgatggacaccatctttagggtaattgcgaaattaggggaagggctgaaatacggaaggctcgccgaagatctctaggtagttaataactatcaaaatgtcacttctttggccttcacttttattatgtaaaagtactcagatcaggccgaatacaattttattctctttatccaatgccggaggctattgtcgaagccacggcctgccatttcatacccttt

SEQ ID NO: 474821 - DNA, 559 bp, Homo sapiens
tgggaggtaagatgaaaaggatggggaggagggaacttgttgggatctgtatctaagggtacccgaccccttggtctcattccactgttccacaggggttggtgacagtgtgtgggagacaggggtggacagaagtgcgttaaccaagatacagactagagaaggaagcgtcagttcttaggacaggggtcagtttgtagtgtgggaaagaggaggtgagaaagggtagtgaatttcacctggcccttgttgagtatgtgatgcctgtgttcgccatgtgaacagcagaaagcagcaaatrtaaggatcgagagcacggggtagagagagggctggcgatggacaccatctttagggtaattgcgaaattaggggaagggctgaaatacggaaggctcgccgaagatctctaggtagttaataactatcaaaatgtcacttctttggccttcacttttattatgtaaaagtactcagatcaggccgaatacaattttattctctttatccaatgccggaggctattgtcgaagccacggcctgccatttcatacccttt

SEQ ID NO: 474822 - DNA, 559 bp, Homo sapiens
tgggaggtaagatgaaaaggatggggaggagggaacttgttgggatctgtatctaagggtacccgaccccttggtctcattccactgttccacaggggttggtgacagtgtgtgggagacaggggtggacagaagtgcgttaaccaagatacagactagagaaggaagcgtcagttcttaggacaggggtcagtttgtagtgtgggaaagaggaggtgagaaagggtagtgaatttcacctggcccttgttgagtatgtgatgcctgtgttcgccatgtgaacagcagaaagcagcaaatataaggatcgagagcacggggtagagagagggctggcgatggacaccatctttagggtaattgcgaaattaggggaagggctgaaatacggaaggctcgccraagatctctaggtagttaataactatcaaaatgtcacttctttggccttcacttttattatgtaaaagtactcagatcaggccgaatacaattttattctctttatccaatgccggaggctattgtcgaagccacggcctgccatttcatacccttt

SEQ ID NO: 474823 - DNA, 292 bp, Homo sapiens
ggccctgagcctccggtgctttgcgaaagccgtcccctccggctggaatgttctttgtctctctggtaaatgtctattcatcattcaagaccacccttcgcccctccccttaattacttcctcccctgtgcgccctcaaattcttgtactcattcaagcagtatytattaggggccagctttgtggccggcaccgtggcgggctctggggctacaaaaggtgaataatacttgggctctgcctctgagggccttacacgttagggaggagtgggtcaactgccacaaacgtc

SEQ ID NO: 474824 - DNA, 616 bp, Homo sapiens
cgaaatcagaaacatcaccacaaaggaaagaaaagatcaggcacaaatcatatcaatatggtttaytgaatgaatggctagacctatcaggaaaacagcctacttttttccccctacaatataattaaaagtttgtaattctcattccttaagtggtactttgcaaggtgtccattaacagacaaaataacctcggaagccctggagcacctgtcttcaagataagacagcagacacaggcggtggaaatgtggaaatacgcattccccagagcagatgtttcagttcctgaatttccatcgccttttgtgcaggcaagcggaggaaagttttcaaaagaatctcggctgactaggagggaagggaagccaatagcgaagggaaaggtacattttcacggtaagttagaggcatcaccaaaggagaacatggttgtgcccacccagagtgagaagcatagagcggagtggctgaaagaacaccctctggagccacagttctcaggctggctcctggcttttcaaacccttggtcagagactgaaggcaaacctgagtcacttaatttctacccgaacctcagtctcctcatctgaaaatgggggtgcctgcctcat

SEQ ID NO: 474825 - DNA, 625 bp, Homo sapiens
tgccatgtggtggtggtgttcaactttaatacaaaaattattttcattatcatagcctcacagtctacttgttaaatgactataaccttagtcattttacagataagggaactgggtaagttttatgccaaagtggtattttcaaattttaggatgagtaaaggtggctagctatagacctttcaaatgtcaagtctctaaaaatgactctaaggatattagaggtggccagagagaggagaaactctacatggatgtctatgtgtattttttcatctttttattataaaataaaacacagatacagagaattacatgctatatatatggcttagtacattgttgtaaggtgaaaatgcttgtaatcagcacccagatcaagaaagaaaattttgccacctagggcaaaagcctcttctatgtgccccatgccttcctctctccacaagaaatcattatcctaacctctgcagtaatcgtcttcctggattttttcctgatagttctgtcamccaaatgtacatccctagcacaatagtttggttttgccatttttaaaaaatgtaactgcgtttcttttgttgcttttggcaaccagttacattatttgtaacaacttgttatc

SEQ ID NO: 474826 - DNA, 391 bp, Homo sapiens
gatttttattacaaaagtgataattgtcattaagcacattagggtgatgcaattctaattaaaagcaaagaatcttcatcttttagttarcctgcactatattatctagtaagcatatggtttctgttaggctttttgaaatattacaaatagtttataaactcccattagtacctatggagactcctaaggggcatgaagctccactaaaggaaccactcaactagacggcatttgagtcctttctagcttaaagttatgtgaaatcgcttggataaattcacttaatttttaacttttcttagactataggcaataatggagaccagtcccacaagatgacaaccagtcgttgtgtgcggctgatgttaatcagcatggccaatgattt

SEQ ID NO: 474827 - DNA, 526 bp, Homo sapiens
acttcctcaccctgtttccagcctcttgctcaatccaggcaggaggcaggatagatgctcttttgcaaggtgatcccagcccagagggccctgcaacctttatgaaacgattctggttaggtgtaggaaacaaatggggcagcagaccctgtactcccaacatgctgaacagcaagatgactcccaaagyggccagccctttcctgcctccaggcctttgtttgatgcccatttccactggagtgcccttccccacagataccctgcctcacatggcatctgaggcctcccaagtctggccctgtaatatctctctactcatggttcccctccatgctttctacactacccataaagccatttattaaaagtaatggcaaaaaccacaattaccaaccttaagacatttactactcctcacctttgcttatgatgtgctcactctcctacgcaatggaacccacaggcatctttcaaatcccacaaacacacaaaaatcccacatgaaatgtccctgctttaattc

SEQ ID NO: 474828 - DNA, 641 bp, Homo sapiens
tgactcacagctgctacttcctcaccctgtttccagcctcttgctcaatccaggcaggaggcaggatagatgctcttttgcaaggtgatcccagcccagagggccctgcaacctttatgaaacgattctggttaggtgtaggaaacaaatggggcagcagaccctgtactcccaacatgctgaacagcaagatgactcccaaagcggccagccctttcctgcctccaggcctttgtttgatgcccatttccactggagtgcccttccccacagataccctgcctcacatggcatctgaggcctcccaagtctggccctgtaatatctctctactcatggttcccctccatgctttctacactacccataaagccatttattaaaagtaatggcaaaaaccacaattaccaaccttaagacatttactactcctcacctttgcttatgatgtgctcactctcctackcaatggaacccacaggcatctttcaaatcccacaaacacacaaaaatcccacatgaaatgtccctgctttaattccatctttccaaatggctttctcttatcactacagtcaaaatcattctctctcttctacaactccacatcaagtgttcagtctgtcccctgtaatacttag

SEQ ID NO: 474829 - DNA, 432 bp, Homo sapiens
atgaggcccttaaagatgcattttgtccctgacaagttctcataatgaatttctacagttgcccaagtaaaggaaatgcagagagagctctgcttctccctgggcaccatgacaaagagcatctgcaggttagagaggccaggcccagagtgacgactcctaaatcctcttggtgtttcccgaaaagagtktggagccctgagctggggacctttctcctcacctgggctaaaaaacttgccgtccccacccccacatccccccactcccactgctccttccattctggaatttcttttctgcttttctcccaacctgttttcaatttgctcatgtggccggctttgacggtgacctcaactcattcagaagcaagagggtgaggggagaaagagagagagaggggaaacaaggaggaggattgagggactg

SEQ ID NO: 474830 - DNA, 556 bp, Homo sapiens
attctttaaaagtgatgaacactttcctttgccccttcttttcctcactgcctgacaccacccctcctttccacctcttaaaatatgraacattctttcttcctctgtcctggaaatgtgcttgtcaggagcttgtcatctctaactcggaacacttctctattttatttatgtatttttgaaatggatgatgttaatggccctgggatccgggccgctctgaccaggaaccagggtgttgtttggaacagtctcttatcccattggcggctctcctcccatggagtctgaccagctcggtctggagttttaaaatagttccagtgtcagttcttggggattctcattttttgcttgctcattttttacccaaattcgtcttcctcttgagccaagaagactgtgtgcggcagtagaaatagcacaggccttggggacacgcagggctgggtgtgaaccctgatactgcctcatgctcataacctgccccgaggcaggtttttcactgctctatgagacaatttctacctctggaaaaggaggctggtgattgtcc

SEQ ID NO: 474831 - DNA, 498 bp, Homo sapiens
actgttagagcatgagacacactggagggctcctgaaatgcttccttgaaaaagtgatacctaaacccaaaggatgagtagaaataagccagacagagaggtgaaaaagatgggatttgcttgccaggcacagtggctcatgcctgtaatcctagcactttgggaggccagggcaggtggatcacttgaggccaggagtttgagaccagcctggctaatgtggtgaaaccccgtctctactaacaatacaaaaaataaaaaatagcagggcatggtggcacgtgcckgtaatcaatcccagctacttgggaggctgaggcatgagaattgcttgaacctgggaggcagagtttgcagtgaactgacatggagccactggactccagcctaggtgacaacttaaaaaaaaaaaaaaagatggaatttgctccaggaagaagagatatgaacaaaagcccagagacaagagacagtacacctctttcaaggactgaaaac

SEQ ID NO: 474832 - DNA, 566 bp, Homo sapiens
tggcctttgcccttgggaaattcaataagatccaaaataaaatccttaagttttgcatatctaaatttggcctttgaacagaagaggagtagtagcaattgaacatgaatctggggatcaggacccctagaatctagcctgactaggctttcttggggaatgtaccagttaggttgggggtaaaacaaaccaccccaaagcttagtggcttaaagcaatgaacactcatcatttttcatgattctgtgagtcagttgagccgytctgatctaggctggtatgcagatcggaggtgtgtaggtggctcaactggggttggctggcctccctcacatacatgaaattgacaggctggttagttgaggaggacttagctgggatggtttgtctctgctccatgtgatctctcctcctccactaggctagcccaggcttcacataatgttctcagcatggtggtctcagggtataaaagagcagcaagagaaagcaagcttcagtgtgcaagtgcttgaatatttcttcttgtgtcacatttgctcttgtcccattggccaaagaaagat

SEQ ID NO: 474833 - DNA, 517 bp, Homo sapiens
gggtctagttcctgcttttcctgccacccttttgacaaagcaggactctgctccccatctttgggggcagaagcactaaattacagcyttccccaaaacatcctagcaagaacataatatagatgcaaagcttcattgtaattcctaaacccaaattattcaaatgcgggctagagaacagcccagcataggaggacctggctggagggtgcccacgtggtctcctggaagcctctggctgacaattctaaccccaggctaaatgcataatgtgcttattatacatttaagtatattgctgatgttttgaacagacagcttcaacaacatttcggtatgtagctatcattaaggagagtttttaaaaataagatcctttgtacttgggggggtggggtggtaagggagaaagggtatcaacatgatgctgtaatctgatctttttagctttcaaatgatgtcacttaatgacttggacctaaatacactcaggaagcttaggcagccccagtgcgca

SEQ ID NO: 474834 - DNA, 633 bp, Homo sapiens
aaaggcaaaatggtggagtttcactggtatatgaccttataggaacacttgactggaaaggggagaacatctcaagtgagcaygcgtacaactctaggaaacacactgcgcatgctcacctcccaagtgctggcaggccactgtgcatgccaacaggcaaccccaaggaaagaatgaggggagaagggacgcaagatcccggaagtatgccaacgtataaaaccccaagtcaaaagctcaaagctcacttgtctttcaagtcacccacttagccctcttccaagtgtactttccttcctttcattcctgctttaaagctttttaataaactttcactcctgctccaaaatttgcctcggcctctccttctgccttatgtctctcagtcgaattcttccttctgagggggcaagaactgaggttgctgcagacctgtacagattcgccgccagtaacatttcttgtctgtctaccccactagaatgtcaggccttatcactgctaccgggataatgtagagggacctatcatgtagagggacagggtacacatctgtagatttagtaagtggagaaatatgaagtccggactcattggccatgagagttctggcaaggaagaggccagtcagga

SEQ ID NO: 474835 - DNA, 600 bp, Homo sapiens
cgcaaatgcagaggcgaacccaaattcattagtcattaaatgtgggaattgctyagccactgcaggatgctctattaagagggttacactgtaggagggatcttcacttttctttcccttttttgtaccccctggcaaactcattttccatatccaaacaactttgcaaactgtctcattgtggagaaacattttatcctgttttatacgttttaaaatgttttcatccagaatgataacagccttaagagaattatagtaaacaagagctatggcaagaacatctttcttttgctctggacagctataaaatgttaggcaaagggaatagtgagcagtgttagtccattttcattgctataaaggaatacctgaggctgggtaatttatgaagagaagaggtttattttggctcatggttctgcaggctatataggaagcttggggccagcatgtgcttctggtggaggcctcaggaagcttacaatcatggcagaaggtgaaggggaagcaggcctgtcaaaggaaagagagggagcaagaaagtgagggaggaggtgccaggatatttaaacaaccagatctgtggatgcagagcaa

SEQ ID NO: 474836 - DNA, 585 bp, Homo sapiens
tttagaactgccatggacctgtaacccctatgtcttccatcccctaccccttctttgaacagggtcatataagtgcttatcttatatctgtcccgctgttgcatgttggcagaggaagacataatttgctcttgttttatgggtttaaaaataacaaggaattgtatttgaagagctgtgcttaaagaactacacttgagaaaccacattcatacttggacctgatttagatgacgagattatggacttgaagctgatattgcaatggaatgagaattttgaagtctttgggggcagtgagtacattttgcatttgagaggtaaataaatcattgggcaccagaggatacactgtggtgggcagcctataaggtggctcctwgtgatccttgccttctggtattcacatcgttttgtaataccttcttgctgagtgtgggctgggcttgttgactcacatataacaaatagaatacctgggaagtgataggacagtaattgagggattaggttataaaaggctgcagttttcatcttggaggctctctctcactctcttttgaatgacttaccctggggaagcca

SEQ ID NO: 474837 - DNA, 514 bp, Homo sapiens
tgagtgctagagtcccaaactttcttggccatctctggaagtaggcccttttagcaactcaagagcagagggttgtgcctagtgatcctctaccactctgtagcaaaatatttcacctgcatcaaaaacatccatgttttaatactttgcttaagtctaggtgtggaaaatatcaarctttaataatggagtgttaaaggagctattgatccaggcagacaactaagtacatccattcactcaacaaatacttattgaacacttagaatgtatctggccctaggtgcttatacacattattgaggtatgaaggaaaaactagtatttgattctgaatacaggacagaaaaaatccatataatttagccatagtaggaacaaagaaatacattttttccaaaccctgtgtggtgaatatcaagagactaagaccaccaaaaagtgaagtaacttactcagtcaatagatggctagttttaaggccagatcttagaacccagatcatccaattctt

SEQ ID NO: 474838 - DNA, 485 bp, Homo sapiens
ttcttgcccatcctatcttcttggcatcaaatgccttgcagtgttttaccacctaaatgaaacaaatcctgcacagccaacaaagttsgagccaaatgctcccttctctacaaagtcctcttttcttccctagttctggcctgagctttttgtttttcccactcatttcccatccaagtgatttgtatctgtactcaacacatacgacattgggctttaaactctagttacagacatgtccttttcctaaatggattttaagctccttaaaaatagggacttaagcttattcatgtgcacatagtgaacattcaatgaaatattttgaaatcaaataaaattgtcaaaaatgaataagtaaatctatacccttcctatatatagtgtagtgatgacttatgccttctattaaaaatcagttattcagaaaagccatgataccatttcttataaaaatgcaagatgtgatttactattcctggcaa

SEQ ID NO: 474839 - DNA, 528 bp, Homo sapiens
aaattattttatttcattttaaaaatctattagtttatgtgttgttgtagccaatattcatccatttctttctccatgtatattattctgacaccaatttcagggaaacagagattaaggacaggatataaatcaagcagctctacttcaataaaacaaatgtttaagatctctactttttataacttttgtttatgagaaaacaagggctcatttattcgtagtttagcttctgtgctttatattgtgaaatgaggtagaaatctaggaccttaacccaagtatgtttcaagtggagagctttatgtagtacagaattaacaaatatttatggatgatgataataatgatgttttggtgcatgatgccagaaaggacatttattgaataacactattttaaaatgccttgatatatacaatctcttttaatattrtaataattttaaaaacaaggtattactatttctgttttacatataagaaaactaactcagatcagtaaaataacttgcctaagatcacacag

SEQ ID NO: 474840 - DNA, 637 bp, Homo sapiens
ccattaggtaaggcatttcttcagggattctaagctaattaatgtctgccacactctagtggtcaccagcagtccctgtcccttggcaccaggagtccctgtagcctggctaggtaaggaaagggagttgcatctccaaataaggaagatccagttgtggccacccaattcctcctcttcgaaagacactttctgcccatcacctgctttctgtgccaggaccatctttactttctccacaaaaggtaccttcaggacaggctgggactgctgggcttgggaaccatcttggaagggcctaggttcccacttacacccttgccatctagcagactgagttggtagtacagggatggcaatagcaagttcagagagcagcttaatatgctaggggtggcagaggggagagggagctttggtgaaatgtctatagtcagaggggtagtaaacagggcatctgagaagttctttcaagttctccccyatccatagggatacacatgttttggtgggaagattcatgagtgctaatcactggcgagtctttcctgggttccactttgaaatgctggctcccgaagaagtaccagagaaattaactttgagccccttaaaccttggagtagagatcgcacac

SEQ ID NO: 474841 - DNA, 434 bp, Homo sapiens
caagccagtcagggctggggttgagggtctagacatctattttaatcctgcctctgggagtttgttgttgtgtgaacttgaayaagccatgcttcgcttctctcatgtggagactggagacgattcctcctttgtcacaggtttggcccagagcctgacacacagcaggcacatagtattaattcagtttggaactgagtgttcattcgtggccccactctggctgggcgttcctggagacccttttgtgacatgtgacccactgcaaagatccctgaacccactctgttggacataacaccataggtgcagaatttgtcttgtaggacctctactcccactcattggaacagggtgagccctttggagggaacagcattgtggatgagaccttggcttccaaaacagaaaaatcatggctccacagtgtttac

SEQ ID NO: 474842 - DNA, 434 bp, Homo sapiens
caagccagtcagggctggggttgagggtctagacatctattttaatcctgcctctgggagtttgttgttgtgtgaacttgaataarccatgcttcgcttctctcatgtggagactggagacgattcctcctttgtcacaggtttggcccagagcctgacacacagcaggcacatagtattaattcagtttggaactgagtgttcattcgtggccccactctggctgggcgttcctggagacccttttgtgacatgtgacccactgcaaagatccctgaacccactctgttggacataacaccataggtgcagaatttgtcttgtaggacctctactcccactcattggaacagggtgagccctttggagggaacagcattgtggatgagaccttggcttccaaaacagaaaaatcatggctccacagtgtttac

SEQ ID NO: 474843 - DNA, 434 bp, Homo sapiens
caagccagtcagggctggggttgagggtctagacatctattttaatcctgcctctgggagtttgttgttgtgtgaacttgaataagccatgcttcgcttctctcatgtggagactggagacgattcctcctttgtcacaggtttggcccagagcctgacacacagcaggcacatagtattaattcagtttggaactgagtgttcattcrtggccccactctggctgggcgttcctggagacccttttgtgacatgtgacccactgcaaagatccctgaacccactctgttggacataacaccataggtgcagaatttgtcttgtaggacctctactcccactcattggaacagggtgagccctttggagggaacagcattgtggatgagaccttggcttccaaaacagaaaaatcatggctccacagtgtttac

SEQ ID NO: 474844 - DNA, 518 bp, Homo sapiens
tgttcttctgagttctcaggcaggccaacctcggcagccctgcacatggctgaccacctttatttcttgaaatgctctctgttcccacttctcgaccgcacactctctcaagggctgctcctccgcagtctcctctcctaattcctcctcctcttgcattccccagtgatctgacctcagctctattcttttcctctttctacagtttccttacaaatcacagctactgccacagcatcaattaccrttttacttgtctgattcctcctttgaaagcatcagccccaaatcccactggccccatggcaacaatttccccaagcagctcactatcaacccctctcgcgtggaattcagtatctgcccttccaacccaacttcttctcctgcttccctatttctcattcttcccagtctgggagagtccgctgtattttaggcactgtgcaaagtcctggaaagactaaaatgagtaagatgcagtctctgcctccaggaagcaatcacctgcactcaag

SEQ ID NO: 474845 - DNA, 518 bp, Homo sapiens
tgttcttctgagttctcaggcaggccaacctcggcagccctgcacatggctgaccacctttatttcttgaaatgctctctgttcccacttctcgaccgcacactctctcaagggctgctcctccgcagtctcctctcctaattcctcctcctcttgcattccccagtgatctgacctcagctctattcttttcctctttctacagtttccttacaaatcacagctactgccacagcatcaattaccgttttacttgtctgattcctcctttgaaagcatcakccccaaatcccactggccccatggcaacaatttccccaagcagctcactatcaacccctctcgcgtggaattcagtatctgcccttccaacccaacttcttctcctgcttccctatttctcattcttcccagtctgggagagtccgctgtattttaggcactgtgcaaagtcctggaaagactaaaatgagtaagatgcagtctctgcctccaggaagcaatcacctgcactcaag

SEQ ID NO: 474846 - DNA, 615 bp, Homo sapiens
atgtgtattggttgaaagtcacctctgactaccccatcaatcccctccatagtaaatattttcatagagagttttgtctgttgccaaagaggaagtggctgtttctacgtgcccatcaacactcccctccccacctacaccagcccagccttttcctgtgaaatgcttcactttctccattgtagccagagtccctttttctttcttgggatctagtatcagcagcctgccaagtacactcattcattcaatgagtattattgaacaccttttatgtttcagatgctgtgttgtttgctggagatagagcaatgaacaggcacaagtcgcctcccttgtggagcttacattaaggacattccagtatttctgcatagttctttataaagtacaatcagwcctccatatctgtgggttccgcatctgtgtattcaatcaaaaatatccagttgaaaaaagttacacaaagttccaaaaagcaaaacttaaacttgctgtgtgcctagtactatgttgaatcaaacaaatgaaatgatgtgtaggtatcatattaggtattataagtactctagagatgatttaaagtgtacaagaggatgtgtgtaggttatatcc

SEQ ID NO: 474847 - DNA, 618 bp, Homo sapiens
agggcaggcaatgtggaatggtagaaagaacagtggactgagaggggttaagaatgactgtaacctgaggaatttcccttctctagtcagccttgctttcctcatttgctcaaagaagcatttctgttagatgacctctatagtgtgttcagctctaaacatcccaagtcttggttaccttgtttagtgtaccctccaaatctctctgatggcaaataatagaagttctgattatgatgaatgaaatgaagtgggctatttctgtttacacagagaagcccggaggtgatggatggggctgttcatggctggtgtagatgcccatggttgtcatccaataccatggcttcttccattttttccggctttgtcgttcatagtatgtgactttcatcctcatgactacaagatggttgctgtgcctccaggagttgtgatcatgcccccagcagaaagaaggaggaaggaggaaagaagagaaggtgccagtattgaaaaaaaacaacaacaaaaaacagaagttttcctcagaaatccctgatagacttctgcttttgtctcagtggccagagttgggccatatgactgctcctttwtatgaaggtctgggaaaataaa

SEQ ID NO: 474848 - DNA, 600 bp, Homo sapiens
gtttgtgttttgtcaagcaccagcgtgcctccaattggacaacataggattgtcaacactgtgcgtgtggttcaagcaggaggctgcctgcctctttgtgtrgtgtggctgtgtttgttggatatgtgcgtatccagcctcatacggtggctctggacaggtgtggtagtgacggggaaggaaggcaagaagcagggatggtcagtggggaagagtcctcaaggtagttgagaggagggtagaggggaagaaactgctcctgcctccagcaggaagcctcaaatgagatccccacgtccaccaagcgaacccgtgggtgggtggctcatggatgactggtgggcggatacagattgaagggggagaaggggatgaggtgggtgaaattgagggttttccctgctgccttgacagagcctggggctgagctcgggagggtggtcttgctcccctggcatcagccacctcttgggcggctcggccttgttggaggctgcagcctgaaggagctgaaatcaccctcggccgtgagagcagcccagcccctgttttctcctgggctctggctgccttaactaccggacgccattttcccatctt

SEQ ID NO: 474849 - DNA, 487 bp, Homo sapiens
ccaacttctcaaggttaatgagttgaaaagggctagaacctctgggctttctcctgtgtgcagtctactgtgggtcttggagtctgtgaaatagctagtgagctgactaaagaaatacagtctctcttctgttctctccccattccattttttattatcgtcccttatctgcatctcatctagtctgggacaatcagatgacaaaagaattctactttaaaacaagtgcactcaggtatttatagtaaggaaatgtgactgaatgagctagctactaaaaatagaaggtctgacttaatccattcaggaagattgtggcccaatgtgtttagggataaatcagttyagatctaatatttagaaaacttatcccagatttggatggttgacctcttgtgaaaaaatgctctagaattttccagattggtagcaatgctgggatgggctttgcatgaaaaaaccttgactcttagcctgggcaccagga

SEQ ID NO: 474850 - DNA, 361 bp, Homo sapiens
ctcatgcagagcctcaggcacagtgagtgagcccattctcatttctttgtcagcgctggacagctaatcaagatccagggatttacttaagctaacagatgattattcttccctgtagaagagttaccagaatgctgaatttgctaattactcttctctttgcttctcccaaacagggatttggagagagatgagacaaagttacgttaaatgaggaccgtgattgaggaacctgggagcctgaggaagagggaggagcagccccttaccaaaaatggggtgggggctgatgmagaactgaagtggccagaaaggaagtgatgccggtaagagggaattaatgagggagtttggtccctgg

SEQ ID NO: 474851 - DNA, 504 bp, Homo sapiens
ctataaaagggatagagggaaataggttcttttttgtccttctgtctcccatgctacctatgaggaacaggccctcaccagacccctgacctgacagtgccttgatcttggagttcccagccttcaggactgtgagaaatatatttctgttatttataaattactgaggctaaggtattttattatatcagcaggaatgaactaagacaatgtgtctaggaaagagkaggagaaaggcaaatatgaggcacagttggattgaacttgccttcatggatgtagttccactccaagcctagaccgctatcagggcctaaccacacagcctggccttgccctgttcttatgtatagtaaagccttacatgagaactttggaatttaattcctcaatgaccagctttctgttcacagagattgatgttcagtgtttggaggcccagagagtcctccttgagtgagtatgttcaagctgggtgaaataaaggactttcctggaaaagaa

SEQ ID NO: 474852 - DNA, 473 bp, Homo sapiens
tatttatttaactgtcctgaaaaataaagttttcgttcttcctcaacactctgccatatgggtgttaactacagcattccccttgctgaccctccggaatgtgatttgctgtttatcgaatctcatggcttcctgttaccattcagtacctccatttcctggagtgcatgctcaagtaacttgctaaggaagtgtgggtgaggggtaaattttctgagtcgtcctgtatctgacaatgtctttattctaatctcacacttacttgctaatttggatataaaatatgatgttgaagataattattcctcaaggttttaggatcattgttctattttgttctatcacattgtgtaggtgttatactgttctgattcttttcctgttttggtgacctcctctctcccaaacttaaaaaatctctggtattctgaaatttcagtgtyttttgtttgcttatttagttttattattaa

SEQ ID NO: 474853 - DNA, 432 bp, Homo sapiens
gtgggctggagcgggacaaccctccccgtcccccccgcggtaccgcctccccctcctcctggaaaccgggccggcgccgcgggcgcgraggtagctggatgcggccctctctccccgcaggagacgcggctgttcggcggccctcgcgcgctggccatcaggtgagccgggcggtgggcgcggccgcggtcccccaggtgcccgcccgagttgccgcccacctgcccgcctttcgccccgcaggcggtgcgtgctgggcgcgctgcaggtgctgctgacgctgccgctcctcttcctggggctgtcgctgctctggacggtgctgttggaccccggcgccgtctccgcgtggctctggagcctcacctcggagacgacgctgcgccgcctgcgctacacgctgtccccgctgctggagctgcgcgctaacgg

SEQ ID NO: 474854 - DNA, 592 bp, Homo sapiens
gtttcatcccttatgaatgcacaaagccaccaacatccaaggatggtgtcaggtccacatgaatggaaggtctaggaaaacgatgacaggagctgcaaaggcagtctggttttcctgacaccaagaggatcgatccttcagagtgtggagagggcagggtgacctcaaattgtggagccatgtgctaaattccacaaatctcaggaatgaaactaagctgtgtttcctgaaactggcgtggccgtgcattctgccataccttcaagagccctgactcaccccaagcagtgcttccccacccaccctggctgtccatcagaaccaccagcagccccgctgctagagactctcattcatctggttggggccacgcacgggtatttttaaagcttcccaggcaattctgttaagctgcagggactggaacaagattccagaaggtggtttcygaagcactgcacttacttgatgatagccgacacgttggtgatcttgttaaagaaatcaaactcccgctggtaaaagtccttcgctgggcccgacaaggagcctgtgttctcctctactaactgctccaggaggtcgccgatgt

SEQ ID NO: 474855 - DNA, 592 bp, Homo sapiens
gtttcatcccttatgaatgcacaaagccaccaacatccaaggatggtgtcaggtccacatgaatggaaggtctaggaaaacgatgacaggagctgcaaaggcagtctggttttcctgacaccaagaggatcgatccttcagagtgtggagagggcagggtgacctcaaattgtggagccatgtgctaaattccacaaatctcaggaatgaaactaagctgtgtttcctgaaactggcgtggccgtgcattctgccataccttcaagagccctgactcaccccaagcagtgcttccccacccaccctggctgtccatcagaaccaccagcagccccgctgctagagactctcattcatctggttggggccacgcacgggtatttttaaagcttcccaggcaattctgttaagctgcagggactggaacaagattccagaaggtggtttctgaagcactgcacttacttgatgayagccgacacgttggtgatcttgttaaagaaatcaaactcccgctggtaaaagtccttcgctgggcccgacaaggagcctgtgttctcctctactaactgctccaggaggtcgccgatgt

SEQ ID NO: 474856 - DNA, 663 bp, Homo sapiens
gccctgtgcctacagccagctcactcccaggtatcctttgaaagcaccctccaccacctcttgcaggcagccttccccattctcccctcccttacaggatttagctacccctcccacgtgctcggacagcccttaggcataatcccaaaacgcacccaggaattactcattcatcctgctacctctcccttcagactgtcttactccaccctgcaccctgaatgcaggtacctggacctggcatggaccaggcaacgggatttgtggactaacccatttccaacttaggaaaggcaccaaccagctcgtgaatgagaagcactagactgaggctctcagcggccatacttcccctggaaaactgacctttcctgagctcacatattgctcagcacagcatacccagctagtttaattatttcccccttttacatagggaataactcagatttggagaggggtgtggtcatttagcaggttgggggcagagctgggggcccgaacccaggtgtgtccctttgaccaatgcccttatctataggattccttcccccaccctggggcagggcctgggtctagggaggaggccagagggagagataggaattcaaattggtggtgctggtsgtgggggaaggcgaggccctgggagtggccagcact

SEQ ID NO: 474857 - DNA, 619 bp, Homo sapiens
tgtcaaagcagtgacggagaatttgtggagaatctcatttactcttctggaagcacatcttttcatgcaagcaccacttcacagactgrtttgctcgagtctgtctgtgctgaatttagaaaacagagccatttgttttttccattggaaattttcctggctcatcaaataaaatctaaataataccttcatttatttgtcagcaccttgttacaaacataacctttatttgtccatgctttaccatgaagtgattacttagaaaactgttagtaggaaactttccactcttctgagttactttatttcacacagcctgatgtccgaaatcactaacattttaaatatcctgtcataaaaaaactgaaggtgatttaccagtgaaaatgtacaaaataagattctttaatatactatttctgagtatcacaaccaaaaaaattcattttttaatcttatttgtgtgtgtgtgtgtgtgtgtgtgtgtgtgtgtgtgtgtgttcataattctataattcttatggtcagaattcagggaatttttctatcccaagagaaccttcatcattatgaatgaactatctgcaatgattactaatcccatgacaaatgacagcta

SEQ ID NO: 474858 - DNA, 619 bp, Homo sapiens
tgtcaaagcagtgacggagaatttgtggagaatctcatttactcttctggaagcacatcttttcatgcaagcaccacttcacagactgatttgctcgagtctgtctgtgctgaatttagaaaacagagccatttgttttttccattggaaattttcctggctcatcaaataaaatctaaataataccttcatttatttgtcagcaccttgttacaaacataacctttatttgtccatgctttaccatgaagtgattacttagaaaaytgttagtaggaaactttccactcttctgagttactttatttcacacagcctgatgtccgaaatcactaacattttaaatatcctgtcataaaaaaactgaaggtgatttaccagtgaaaatgtacaaaataagattctttaatatactatttctgagtatcacaaccaaaaaaattcattttttaatcttatttgtgtgtgtgtgtgtgtgtgtgtgtgtgtgtgtgtgtgtgttcataattctataattcttatggtcagaattcagggaatttttctatcccaagagaaccttcatcattatgaatgaactatctgcaatgattactaatcccatgacaaatgacagcta

SEQ ID NO: 474859 - DNA, 532 bp, Homo sapiens
atttgctttattctacccaacagggtttgttttcctctaagatttttctaagttaatacttatagctttacaaatgtattctcacaatgcataattctttattatatcaacaatttaaagtgttgatttgcctgttgacaatttagggcatttatactttttttggctactataaagggtgctacaatgatcatccctgcacgtgtcagtttgaggcacacaagcaagaatgttttagcagttgcattgtttagacagtggaaacaygcatcttcagcttccatatttattgatgaacttctctaaatcaagttgggtaatttttataacctttattatgtgtatgttcaactaagtttctctttgccatatttctctccattcatcactcccagcaattccttccttttttttacgtgacttttctatgtggacgcacgtcctaaaatggctataatcattataggagtgtgtccatcctgcttgtgtgggtgagaagcaggaggtggggattagttccaaagtacaagta

SEQ ID NO: 474860 - DNA, 650 bp, Homo sapiens
taaatgtgttatgtggtttctactgcttcacaattcaactcataatatcctaattcaagtagagaataacaaaatcagcactacatattcttttgaaattcctgagcaaatttagatgacaggtgtagaaattgcatgactaattcagaggatatgagattgaaaagccgtatactagctggcacatatgatatttccatctcattsaattcagagagcgtagccctcagaatcaccttttattagcaaaacatttgaggactgatataaatttgaataagtggcaaagcaatttgtcatagatcaaaatgcctttccttctttgctactacaagcatttaaagccttcttgcatgtttacgttcattaatttcactccatgggcatactgtagcatgataaagcactggaaaacaaaatactgcattgataagtactttaaaatgcttataagcttcaaattgaattatttgtctaaataagattatctgattataaaaggaaataaatattcattgtggttaatgtggcaattacagataaacaaaataaaacatcaggagtacttccagaattcagttttaaacattcttagtaatatagaatgtatctgcaaaacatttgaaaataagtaattgttaggttaaaaa

SEQ ID NO: 474861 - DNA, 636 bp, Homo sapiens
aggtcaggatgattatttttgaaatgtataccaatcaatgtattggaataaagacataacttctacctttgataacctggaaatattttttgagacacatagttttggatgtcaaaggaagagaaaaaatgttagaggcagctatgaggatgcgacaaggaatccaggccaagttttcaggcaggaatatgaaaggggtgattaacgaatcatgagcagaccgacttgactaacccataaaggtgatggctacttaacaggcctggaagcagatgaggtgtagtctcaaaccagcttaagtattggggggcgatggggacaatattgagcacatacttattaaataataggaaagtgtcagttatgcctttggtggccagggcaaaaagagattggcaacagggggattttcatgaagctcttctacaaatgctatctgtgggtttgttcaaagcttgagctcaaacaaggtcatagatgtagaaaggagcgcacctgtgtaagggggatctactggagcattcatgccccaacctaacagtgtgcaaaacacattgtgcactctccacaagmacagtgacatgtttgaagaatactcattcattttttaaatatattgattatccttcagagtca

SEQ ID NO: 474862 - DNA, 468 bp, Homo sapiens
catctaccccaaaaatccatcttgtatcaatttgatctttgatggcaaactgaccatttctcttcctcactttaaactcccaactgccctcagcrcaaagtgtgtaatggcctctgttacttggtctctgtatcagtttcttattgccagcaaatcaccacaaacttagtggcttaaattaccacaaatatattaccttacagtgatggaggttagtaatccaaagagaatctcactgggcagaaaccagtgtattggaagtgctgtgttctttctggaagctctagatcacaacctatgttcttgccctttccagcttctagaagttgcctcttcctcacacgttaaatctggcaatgtaacatcttcaaacctctctctgactcagacctctgctccttctcttctacaattaaagaatcattgtgattacattgggcccatctaggttatccatgctaatttatc

SEQ ID NO: 474863 - DNA, 668 bp, Homo sapiens
agctgccaatgagatcagaggagtatcagaaagaggctttgtcatgggcaagtgaggcatttttctgggtggacggagtaatcaaatactcctgatcaattaatcttcaaatttatggttaagaagtgttcccagcaatgccactctatcaatgttcagtacgcccccagccttaaccattactctgtcatcagtataagacgccagtacagtgacacttgacaaagactggtttctctcctagaaactgggaaagtatccttttaattcttaacatctcttcccaaaaatatggtaattaaatcacrtttaatttgtttcagggccaatgcaagagatagaagaagcaaagaaaaacaattcatgcctggtgcacagttacaggtgctcaatgtgtattgattgaagaagtgaataaaagaaagaggttgggctacatttcccctttgattataccaaagatgggaaggataattgtgaaaagaatagttttgactacaggctattaggatggtccaaaaagtttcataaagttatacgtgatagactcttttttcattataattaggaagcaaagaaaattatcttaaacataaaattagaagttgttttagtcggttggaaaactttgcaatcctttggcatttctaattttcttgcctccataa

SEQ ID NO: 474864 - DNA, 638 bp, Homo sapiens
agaatgtaaaggagaaatagaaaataaataatgtacrttgtaatttgatgttgtgattctcatcagcgtctacagagcaaatagataaaagttggggcactgccttaagagattctgcatcaggaaagatggaaagaaaaatgctcagcaagctcttccccctgaactgattgttcaaccagtaagccaccgctgactattctgaaattaaataaaaaccttgaatattggcatttattaaatattcttttaaaattgtcttagtataaaaagatttggtgccctctcccccacaatgggtcatgcccttatgtaatcttcttttgagagcaggtgggacttgtacagacttctaaacagtagattatgacaaaggtgatgggatgtcatacccatcattaggttactttatatagcaaaggtgatactttatatttagcaggtgatgctcctaccagtatgtaatattatataagactctgacttacaaaactgaagaaggaaattctcctggtggccttaagataagctgtcatgttgtgagagggcataggaggaagctcccatagcaaggaaatgtatgaggtctctagtagctgaaagcaggccccagctaacggtgagcgataaaatggggc

SEQ ID NO: 474865 - DNA, 547 bp, Homo sapiens
aaatagatcatacaaagtaataatattttaaaataaggaggttcttgcataatgtaaaagtgcatcatagaataagcttctttgttaaaaaaagttttcttaaggtaaatatattcatcaaaaaatgtacattaataaaaggtcattgtgttattatttctaaaagctgtctccctggtagaatattcataccatatagcaaagaacaagtaggaatttgccaaatgccaatggatcaattaaaggttttggttgtgtgaaatcttgaatttgctttagacaaaaaaggaaattgatgggaatttctatgttttgaatatgggttgtccccggtactcatgtagaggcttgctcctcaatggaacagtgttaagaggtggtgggacctttaagaggcattcaggtcataagagatctcccctcatgaagggattaatacagtagtstttttggaatgaatttttgctcttgtgggaatggagtaggtcccacaagatcaggtcattataacgcaaggtaacctctggtattttgccttttttcacac

SEQ ID NO: 474866 - DNA, 547 bp, Homo sapiens
aaatagatcatacaaagtaataatattttaaaataaggaggttcttgcataatgtaaaagtgcatcatagaataagcttctttgttaaaaaaagttttcttaaggtaaatatattcatcaaaaaatgtacattaataaaaggtcattgtgttattatttctaaaagctgtctccctggtagaatattcataccatatagcaaagaacaagtaggaatttgccaaatgccaatggatcaattaaaggttttggttgtgtgaaatcttgaatttgctttagacaaaaaaggaaattgatgggaatttctatgttttgaatatgggttgtccccggtactcatgtagaggcttgctcctcaatggaacagtgttaagaggtggtgggacctttaagaggcattcaggtcataagagatctcccctcatgaagggattaatacagtagtctttttggaatgaatttttgctcttgtgggaatggagtaggtcccacaagatcaggtcattataaygcaaggtaacctctggtattttgccttttttcacac

SEQ ID NO: 474867 - DNA, 638 bp, Homo sapiens
gggattacatttcaacatgagatttggctggggacacagatccaaaccgtatcagctgcctacagaaagcttgcattcttttctgcttccctatacccaagtttcacacattyagtcacccacatcagcctagacagacagagagttgactgtgatcagagaagttaaattgacctaattctaaattcctgttaataggactatttaaatctcacttggctcctggactccatcactagtaaagttatctttgtgtccttaagttttctttattgagcaaaacctaggtatagaagaagggtgtcccttctaaaccccaacattttgttcttgaaaccccctctcccatgacttccatttttcctcccacctctcttatagttctttctttattgttcttgcgtttatttttaataattccttttcctcttcacaaggatgtcatgtttaatgtactctttctctcttccttccccctctttttccctctctacacacacatacgcacacacatacatacatatacacatctaatacatacatatacatatatatatacacacacacacgtgtgcacacacacccaaatatatagctggcccttcatatccatgggttctgcattcatggatttaacc

SEQ ID NO: 474868 - DNA, 592 bp, Homo sapiens
actctgttgggtttctgctctatgtgtagcaccaagtctctgtcaaagtagacttcatggctatatgtctgtaacaaaacacaatcatatggagtccttttcacacagccatattcactactgtgttactaaaatgtcacagtacctatgctagggatcttcaaacatacacttagaagaaaatagttgctagaaagaggtttatttttcattatttgtggatatgcagattattaacaaaaaaggcattctacaaaatatagagaataaaaagaactctggacccaggagtctaaatacccagattctattgccaacgctgctattatctatctcactgtgtgatcatttacgaggtgccaaacttcccaggttctccactgataaaacaagacctggataaaatgatgtctattgttccttacaactttgacattctataatagttgaaatatcagacaaatgtatacaagagtacctgggaatcccgcatgcttagatatggtctctagtaaataattgtggggattaccgtattctcttattttaaaaaatttttccaaatttayaattgaaagaaaatcaaagacta

SEQ ID NO: 474869 - DNA, 242 bp, Homo sapiens
ctcatagcatgttagtattttcaagatccttagagatcttccaracgttttctgtgtgcaaatgaatgaatagtcagtcccagagaggttgagtaattcataattcaaggacacacaactagtggtgagattgattgaggactggggcacaggcatattgattttgaagacggttagagaagggttatcagaatttctatatgttgcctgaacacaaagacttcaaagtttttctcctactg

SEQ ID NO: 474870 - DNA, 528 bp, Homo sapiens
tttaaagtgaatcaagaacctaaaatgtattttatgagctatctacgtgcagaattttattatttttaactaatctcttagagttgtcccacccacattctatttaacatcgatcctttttttttttttaatcaatttcccatttactggctctttcyaaagcaatcaacttgtttttttgtcaaatcaacaaccctctttgcattcatagttcacagttttgcataatatttaaataaattataactacaaccagcataaaaaggtttgggaacaaacacaattgattcttgggaagcacgcatttcaacaggtatgagtggcatgtaccagcagagaggagtgtgctagacctaagggttcatcagaacatcttgaagatagaacgagcagcatcagctatgtggccatgtgttaaggcgatgtttttggtccgtatttttacttaatttaaatttcctcaaaaatttacattgtaatggctgatctttgtatccttttctcaaaagtcaaatctgtgcaaatgaa

SEQ ID NO: 474871 - DNA, 528 bp, Homo sapiens
tttaaagtgaatcaagaacctaaaatgtattttatgagctatctacgtgcagaattttattatttttaactaatctcttagagttgtcccacccacattctatttaacatcgatcctttttttttttttaatcaatttcccatttactggctctttccaaagcaatcaacttgtttttttgtcaaatcaacaaccctctttgcattcatagttcacagttttgcataatatttaaataaattataactacamccagcataaaaaggtttgggaacaaacacaattgattcttgggaagcacgcatttcaacaggtatgagtggcatgtaccagcagagaggagtgtgctagacctaagggttcatcagaacatcttgaagatagaacgagcagcatcagctatgtggccatgtgttaaggcgatgtttttggtccgtatttttacttaatttaaatttcctcaaaaatttacattgtaatggctgatctttgtatccttttctcaaaagtcaaatctgtgcaaatgaa

SEQ ID NO: 474872 - DNA, 584 bp, Homo sapiens
cattccaagaatacattatttacattatctagctttgggttctttaaagtgaatcaagaacctaaaatgtattttatgagctatctacgtgcagaattttattatttttaactaatctcttagagttgtcccacccacattctatttaacatcgatcctttttttttttttaatcaatttcccatttactggctctttccaaagcaatcaacttgtttttttgtcaaatcaacaaccctctttgcattcatagttcacagttttgcataatatttaaataaattataactacaaccagcataaaaaggtttgggaacaaacacaattgattcttgggaagcacgcatttcaacaggtatgagtggcatgtaccagcagagaggagtgtgctagacctaagggttcatcagaacatcttgaagatagaacgagcagcatcagctatgtggccatgtgttaaggcgatstttttggtccgtatttttacttaatttaaatttcctcaaaaatttacattgtaatggctgatctttgtatccttttctcaaaagtcaaatctgtgcaaatgaatgcactggccatgc

SEQ ID NO: 474873 - DNA, 599 bp, Homo sapiens
ctcctaagccacagtttctaatcttgtggctaatgttagtcccactaaaggcagtctagttccaaggcaagaaggaggtctgctttgggaaagggctgttactatctttgttttaaactaaaaactataaactaagcttctcccggagttagttcagcctatgcccgggaatgaataaggacagcttggaggttagaagcaagayggaatcgattaagttagatctctttcgctgtctcagtcataattttgcaaaggcggtttcactaccagcttttgcagattagtgatgagagatataaatgaaatcctaagctcttcaaccaactgaatggacctcttcttggctaagagggtcccagagttaacttgaaaactgagttctagttcattactagatggaatgtcagacactcctcgttatacccttgtaggtaattctctttagacattcttccctaagggctaaacagaaaccagcccttttgaaagtctcctctacccctggtatcaaacaagcacctgactgttatccctcccttttgcagtttcaacataacaaccagccaggttcaccaaacatgcagtggttctggccc

SEQ ID NO: 474874 - DNA, 599 bp, Homo sapiens
ctcctaagccacagtttctaatcttgtggctaatgttagtcccactaaaggcagtctagttccaaggcaagaaggaggtctgctttgggaaagggctgttactatctttgttttaaactaaaaactataaactaagcttctcccggagttagttcagcctatgcccgggaatgaataaggacagcttggaggttagaagcaagacggaatcgattaagttagatctctttcgctgtctyagtcataattttgcaaaggcggtttcactaccagcttttgcagattagtgatgagagatataaatgaaatcctaagctcttcaaccaactgaatggacctcttcttggctaagagggtcccagagttaacttgaaaactgagttctagttcattactagatggaatgtcagacactcctcgttatacccttgtaggtaattctctttagacattcttccctaagggctaaacagaaaccagcccttttgaaagtctcctctacccctggtatcaaacaagcacctgactgttatccctcccttttgcagtttcaacataacaaccagccaggttcaccaaacatgcagtggttctggccc

SEQ ID NO: 474875 - DNA, 610 bp, Homo sapiens
atagttaaagtactaaagtttgtgaataattcacttttaartaaaacttagtggtagcttcaaggtaagccctataataatgccacttgaaaccaccacattctctgatatgctttactgagttggagcgaaagggttcatgttacttcaaggacccctaggatagtgcatagggatgcaatgggaatgcgtcctgcaatgtgaacatcatccatcactcatgttatggcagaaacagttgggaacctctacactcaaggtctcagtacatgtcatagttggaattgtgaggctctttctcactttttaatgtagagggatttgatttttagccattattattatataaagcaagctcacactcagaaaagcgatatttaagggttttactggccaaaagtggcattcctgtgcagtgtgatcttgtagtaaggcagaattaggaaacagtgctggcattaataaattctcctttctctctccctccctgcttctgtgtgtgtgtgtgtgtgtgtgtgtctgtgtgtgtgtgtgtgtgttcatgtgtacagttgattaattggttggttgtttagtgtagaaagtgagttactggttctgtgaaccatgg

SEQ ID NO: 474876 - DNA, 598 bp, Homo sapiens
tgcttaaaatgggtccactggtgatgtcaacacaatcatgtccccacacacagagcttggtgcaggcgcagggcttagccaaccacaggctcaagtcccaagtgccatgtccccggtttgccctggagtgtgagtgtgctgtgcctgtgtaagaagtgcacatgtctttagccataaatgttgcatggctgttataaaccatgaggtctggtaataccagcagcagcttatcaggtttcaaatgtaccactttcttctaggtttccagatgctctttattcattctgtctctctccccgccaccaccaactctcctctccttttcctcattctaaaatgccccatattgtttactttaatctaacaatttgtaattaagttgaatataacttcaagagtggggaaaaacygctagaagtgtctatttaaaggagaaacaggagtggaaatttaccacatgcctcactgtgccagaccattcattggtcacaggcagactaaatgaaggtgactcaaggctcttcaacttagaggaaagaaatggatgagaggatctgatttaatatcattacaaatttacaactcattttcaacatat

SEQ ID NO: 474877 - DNA, 387 bp, Homo sapiens
ctgcaccatgtaatgtgttctgtcggacccagcttgacacaacttgcatggtgcatttactttcttcattcaaagagattctctcttttaaggcactggctcctgaaaaatatgcaagtgacctgagggaagagacccagggcctcatctttattcagacatatctcatgttaaccccgagacggttaacccatcatgtttattggtggtattttagcagcaagatrttgattttacaagtatgttattattgggttttattattaagctacctataaaatacctgattcatgtggatatgtaacaacaagattgaattgttttttagtatttctttttaattatttagaaatatttagaaaatgttatgattttacctcccaatct

SEQ ID NO: 474878 - DNA, 387 bp, Homo sapiens
ctgcaccatgtaatgtgttctgtcggacccagcttgacacaacttgcatggtgcatttactttcttcattcaaagagattctctcttttaaggcactggctcctgaaaaatatgcaagtgacctgagggaagagacccagggcctcatctttattcagacatatctcatgttaaccccgagacggttaacccatcatgtttattggtggtattttagcagcaagatgttgattttacaagtatgttattattgggttttattattaagctacctataaaatacctgattcatgtggatatktaacaacaagattgaattgttttttagtatttctttttaattatttagaaatatttagaaaatgttatgattttacctcccaatct

SEQ ID NO: 474879 - DNA, 387 bp, Homo sapiens
ctgcaccatgtaatgtgttctgtcggacccagcttgacacaacttgcatggtgcatttactttcttcattcaaagagattctctcttttaaggcactggctcctgaaaaatatgcaagtgacctgagggaagagacccagggcctcatctttattcagacatatctcatgttaaccccgagacggttaacccatcatgtttattggtggtattttagcagcaagatgttgattttacaagtatgttattattgggttttattattaagctacctataaaatacctgattcatgtggatatgtaacarcaagattgaattgttttttagtatttctttttaattatttagaaatatttagaaaatgttatgattttacctcccaatct

SEQ ID NO: 474880 - DNA, 634 bp, Homo sapiens
tataaacgtctctctcttttttttgagacagagtgttgctctgttactcagactggagtgcagtggcataatcttggctcactgcaacctctgcctcctggattcaagtgattctcctgcctcagcctcccaagtagctgggattacaggcacctgccaccacgcctggctaatttttgtatttttattagagatggggtttcaccatgtttgtcaggctagtcttgaacttctgacctgaagcaatccacccacctcagcctcccaaagtgctgggatgacaggtgtgagacatcacactggccaaaagtctctatttttaactggagaaaattaacatgtgaagctgtaaaaggctaatatttgtaaactattaagaacttctatgagtcaatagggaaaagaccaacatcccaacataaaatgtayaaaagatatgagcaaagaattcatagaaaaagaaaatcaaatggccaataaacgtgaagtgaaaccctccttagggtgcaaattcaggaagtgcaaattaaaataacaataaaagtcatcttttgcaaaaaagaagagcaaaaaaataagataaataatcttttcaataatacaatgaataattggagcaaggatgtggagttct

SEQ ID NO: 474881 - DNA, 581 bp, Homo sapiens
aaggggaaggagaataaacagaatatttattacaaatgttagaatatatttcttatactaggaatctcatttgcatttgcatagactatacacatggggtggaaaggccaggcctgcccccatctcgttggtgtggctctgcgtatactacacactcattctcctgctcctcttttcccttagtcagtgtcctttcatcctgattcagctctgccttgcatcaccctcagcctaagggagtgggaaggaaatggggtgttttcttgctgacctgaggctatagggtcacttgccatttcctaccttctctgggggatttgagggtagaggcaggggaagatctgttgttgcagytgcttctgcccccttgatccaaatgaccatcatctctgatggagatgggttgggtacctggccttcatggcaccttcactgctagggatgctcaaggggcaggcctggggcccttccctcctgtctcttctcggtctttcctctctgagcagcctcctacctcccctgcctgagccctcactccacagccctcccaggtacctagcagaggctgtcagtccttggct

SEQ ID NO: 474882 - DNA, 528 bp, Homo sapiens
ttttttttttttttttttttttttttaagtatagtccataaataaggtttccagaactaggcactggccagtcgcaggtgtggaggcgaagcacctcagaggstgggtgtagataaactgggaatagctgttggtggcccctgctggtcattataggaagtgcaccatcactcagtgcaaagccttacctgctggaaatttgtaacacttttgagttttatttttctctgtgccttgactcccaaaactctgggctgaacaccaccataggaataccttgattttgggggaaggagatatactacctgcacctttatgacctctgaggctgaggcagggaggaaggcagagctaattacaaacctcagagaaggaggactcattcccctcttgaggtagggggcagcccttaactactaggggatgcattgccgaccttcaaacctgcttcccttcccagctactccattgccaaccattagcagctctattcctttggggaacagcttaggacacactgcaccttta

SEQ ID NO: 474883 - DNA, 512 bp, Homo sapiens
tataaattcaaactctcaaaatattaaaagtatgactatcaktcccctagtacctcttctaataattccctaatctttctccaacattttgatggtcattccattttgacttctctatatgagtgtcagtgactaatactctggattagctcacagtatggagcattaaaactacatatcccagattcctttgtagctggtgccctgcacgtgaccaggaatttagtagcagatgcaccagtgtgggaactgggaaggggaaggtctttcacaaacatgatcatgcaggcatttcatttttctttcctatacagctgtgggatagatcctggctttgtggctcttgactagcaagcagcagtagtaggatttctgctgagtcagtcctgtgatatagttaggcgtttttctggcttccttgttttaggttatataatttataagttgaaatgtcctgtaataagccaatttttatttaaaccagctggtgtagactctgtagtctgaatctt

SEQ ID NO: 474884 - DNA, 539 bp, Homo sapiens
gctgtgatgtctgcagcaccaggagaatttaagtgtctgcctgagagccaggactctgtccacgtcaagctttcagccagaccacttccctcagatcctttctagttttctccttcttcagtccattccaatgacccctggttttgatgaggcataggacgaggggctacaagatcaggagcacatctagctctggcttctgaggccacatgatcacctggggagactgagacatccaggatcctggaagcagagcaaagagccatctgtgaagaggaggaagaagacatctgaagaagaaggtttttcttcaagaaccaccacacacttgccttcagatgaagtttgaagccattaagcttccccttctwcttaaagctctccttccctatttttcctgcatgccctcgtttttatcactgacaacacatcgttccctgagtctcactgtctcccaaagaggagcttcaggttcatctttgtctccccaagtctgaaaatatcagataatatgcttgcaacttcatcttgatggctta

SEQ ID NO: 474885 - DNA, 615 bp, Homo sapiens
tactttttaaggaagctgtggctattttattttgaactgtactctcctcggcccctagccccttccccaaacatctgatacctttcacctgcttgctttttagaagcactgatgcagacaccagatatgaagtcagacgtctgaccagtgttcgtatatcaggggaaagcttgctggaatcaccagcgcacacaaaagtcaacatgcccacaaactgcgtaatgcggtgatgatgacaagacagaayctgtgcaagaattccccagatgaagcactttgctagatttacaagaaaatcacattgagttcaaaagtcaagttagtgctatctttcgtgaaaacttatcacctcaggaaagttctaactccagaaacactcctgagttgtgggatgaccaagcagagctgtggtccaagcagaccctcacctcaccagcagttccaggcacccaccagtcccaggggagcaagactttttgcaaatgagcagaaacattctagttagaaacattcagagacccctagaggcgggagaatcaaaacagaactgtatttcatgctgaaaagtgaaaaccagatcaacaaagctccctgtcacagcaactggtcagctca

SEQ ID NO: 474886 - DNA, 591 bp, Homo sapiens
acttccctattccctcttccccagcccctggcagcctccattctactttttggctctataaatttaactaatcctggaaactcatataagtgaaatcacatagtattttttttgtaactatcttatttctcttcacataatatcctcaagattcatccatgttgtagcatgtgtcaaaatttccttcctttttaagactgaataatatgccattaaatgcataccacattttctctatccatgaatctactgatggacacttgtgttgctttcactcggtggctactgtgaataatgctgttatgaatatgggtgtacamatatctttttgagtccctgctttcaattaatttgggtatacacccagaagtggagttgctggatcatacagtaattctattttaatgttttgaagaactacagtacagtattttaactctgctttcttaattatttctaaataatggaaaaaagtcatattacaaatgtagaatatgtttttaaagaattttatgatatgttaattcaaaataaaacattttatgtaaatcatttttacatatcaagcaaaaattgacaaattatcttttt

SEQ ID NO: 474887 - DNA, 620 bp, Homo sapiens
ctgagtagcccaagctgcagataatcaagaccaagtgcagcaaggaccccaggactcagcactagtgaggctggtgggcagtgaaggtcagggaaggcttcatggaagggaaggtgtttggacttggctatggaggaaagagaagggaaagcatgtagtatggcctacagcagcatttcttagagggkattccacagaataactggtatgctgcaagaagtgaggcttcaggtgaaaagtaaagaactctgttttctcatctgtaaaatggaaacaataatgacatctctattgctctgccacctgccagccgtgtgcctttgggccttttcgtctgacctctctgagccttggtctcctggtcattcatgagaacctaatgagatctctgatggccaagatctctgaggagaagggaagcccatcataggatttcctgcagctcctgccacattggtccctagaaacatctcccagggggctgggaggtacaggctggaagagatttggggagaggcagaagagcataatgccacagacccaaacttgggcatcccaggttcaaatcccagctttgccacttgcctgctgtgggactctgggcaagttactcaaactct

SEQ ID NO: 474888 - DNA, 620 bp, Homo sapiens
ctgagtagcccaagctgcagataatcaagaccaagtgcagcaaggaccccaggactcagcactagtgaggctggtgggcagtgaaggtcagggaaggcttcatggaagggaaggtgtttggacttggctatggaggaaagagaagggaaagcatgtagtatggcctacagcagcatttcttagagggtatyccacagaataactggtatgctgcaagaagtgaggcttcaggtgaaaagtaaagaactctgttttctcatctgtaaaatggaaacaataatgacatctctattgctctgccacctgccagccgtgtgcctttgggccttttcgtctgacctctctgagccttggtctcctggtcattcatgagaacctaatgagatctctgatggccaagatctctgaggagaagggaagcccatcataggatttcctgcagctcctgccacattggtccctagaaacatctcccagggggctgggaggtacaggctggaagagatttggggagaggcagaagagcataatgccacagacccaaacttgggcatcccaggttcaaatcccagctttgccacttgcctgctgtgggactctgggcaagttactcaaactct

SEQ ID NO: 474889 - DNA, 620 bp, Homo sapiens
ctgagtagcccaagctgcagataatcaagaccaagtgcagcaaggaccccaggactcagcactagtgaggctggtgggcagtgaaggtcagggaaggcttcatggaagggaaggtgtttggacttggctatggaggaaagagaagggaaagcatgtagtatggcctacagcagcatttcttagagggtattccacagaataactggtatgctgcaagaagtgaggcttcaggtgaaaagtaaagaactctgttttctcatctgtaaaatggaaacaataatgacatctctattgctctgccacctgccagccgtgtgcctttgggccttttcgtctgacctctctgagccttggtctcctggtcattcatgagaacctaatgagatctctgatggccaagatctctgaggagaagggaagcccatcataggatttcctgcagctcctgccacattggtccctagaarcatctcccagggggctgggaggtacaggctggaagagatttggggagaggcagaagagcataatgccacagacccaaacttgggcatcccaggttcaaatcccagctttgccacttgcctgctgtgggactctgggcaagttactcaaactct

SEQ ID NO: 474890 - DNA, 542 bp, Homo sapiens
caaatatttactaaacactttctacatgccaggcacaattctaaatgctgtggctacatgtacaaaacagataccaatccttccacctcactgcagtgggagaacacttactttcagcatttatatagcaggcaagcattcaataaacacaactgaacataaccacatgttatctttctcacatctagaggttgccatagccctgtggtgagctgagaacaccattggctcaaggcatcctcctttaaccgtctattttccttgtttttcaaaacaaactgctcagatcctatagttttccaaagggtcaagatgttcacgcccactgtaactacagcaactttgcttttaactattctatacaacgaactttcataagcgatttggtttggggaaaacatttcacattgtatttaaaaaaagaaaaataacyattacatgctttcaacactttgggttcataattatttcatagatttccactatgcagttgatacagctttgaaaacaaaatttaaataagaccacgagttaatttgaag

SEQ ID NO: 474891 - DNA, 542 bp, Homo sapiens
caaatatttactaaacactttctacatgccaggcacaattctaaatgctgtggctacatgtacaaaacagataccaatccttccacctcactgcagtgggagaacacttactttcagcatttatatagcaggcaagcattcaataaacacaactgaacataaccacatgttatctttctcacatctagaggttgccatagccctgtggtgagctgagaacaccattggctcaaggcatcctcctttaaccgtctattttccttgtttttcaaaacaaactgctcagatcctatagttttccaaagggtcaagatgttcacgcccactgtaactacagcaactttgcttttaactattctatacaacgaactttcataagcgatttggtttggggaaaacatttcacattgtatttaaaaaaagaaaaataaccattacatgctttcaacactttgggttcataattatttcatagatttccactatgcagttgatacagctttgaaaacaaaatttaawtaagaccacgagttaatttgaag

SEQ ID NO: 474892 - DNA, 481 bp, Homo sapiens
tgttcaacagccctatgtggtcattcctcatttgttgtaagctttcttctcctttcatacgttcagaatccctactcccttagcctgacacccttttattaaaatagaaagctcacagtaaagcaaactaaaacgagtttaacactcagtcaatgtagaagttccagaaaagattaatgtattatatcaagagttgtcagtgcatgtttcagttacatgtagaatgcatgtttgtctttcacaaaaaaaaaaacaacaacaataaatgacaagatcaaagttttaagtaagccagcatttagctaatatatgaagtactctgggatactataatcaaatacaaaagacttacataaatacaaaacttaaatatacaacataaacataatacataaacagaaaggtttaaatatgacataagaacagcytactttatacttaaacagtgaccagacccatcaaagagtcattttcttacaat

SEQ ID NO: 474893 - DNA, 520 bp, Homo sapiens
ttaccatgaaatactttaaaaggrctcatcattaaataattgtattctttttttagtattaagctttgaaaaaaacttacttttttaaacattgcatttttttgtactttaaaaatttttttctctgaaaaatgtattgaaaagggctacttgtgtttatgtgctaggaagataatgagatttagaccaatatgtatggagcacccgaagtatgttaactttctgtcctataaatattttaatatcacaataggagtagtttagaatcaaatttaaatggagtttagaatcaaatttcaattaaaaactcaaatattcctgttgagaagcagaatctagggatgttataatattggatatgtatgtgctatgtaaggggaggccagggcagatgtgtgcatatacacgttgtcacacacgtttatttatcttcacctgtcttttcttatgagagtaagcagttgaagcggctcagataaaataatggaactgtgttaattttgtcactatgttgaagctg

SEQ ID NO: 474894 - DNA, 582 bp, Homo sapiens
attatttacgtgactatataccaatatacataaccaatatattgttctytttgttgttgttgttgttgttgttgtgttttagtgtttctctgtctcaggaagcttgctatttcactcttaaaactgtgtcttcgacttaatgtcataaaactatacaagttggtacagtattctgtctcaattgccaaggtaggattttgaagatcttgtgcagtagaaatattgagaaacttcaaatctaatagaaaaatagtctgagaacagcatcacaactgagctaaaataatctcatagatatattatttgctgttaaaataatacaatgaatatagtacattaaagaacatttgaatggccattttttaaaagtagtgattaaaagtgtcacgcacatcgtatctagcattccttgtttactagaattttaaactttttccattccatgtattttcaatatttcaataggagacaagtttatttttccatcttgcagatagcataggcactaagacaatattctcagttttttatctcaatccaatcatttagtgattttggtatccccatggcacatctagtaaa

SEQ ID NO: 474895 - DNA, 574 bp, Homo sapiens
caagttcaatctaattttttttctgttgtccagccccagtcaagagcttctctcagataattcatagaggattgacggaagaatatttctctggtcaatttatctaaattccatctttttttttttttttttaagacggagtctggctctgtccccccaggctggagtgcagtggcatgatctcrgctccctgtgagctccgcctctcaggttcacgccattctcctgcctcagccccccgagtagctgggactacaggagcccgctgccacgcctggataagtgtgtgtgtgtgtgtgtgtgtgtgtgtgtgtgtgtgtgtgtgtatttttagtagagtcagaatttcaccgtgttagccaggatggtctcgatctcctgaccttgtgatctgcccacctcagcctcccaaagtgctgggattacaggcgtgagccaccatgcccggcctatctaaacttcatctctatgcaaagtccaattatggttttacctataatatgggcccagttgctcccagagtgtggtagacaagagacacactgcccagctcctccttcaaggaaggccttgt

SEQ ID NO: 474896 - DNA, 584 bp, Homo sapiens
agtggtcaaaaagcaagaccatatgtctctccacctgtccccactggcctttctcctaagggacgaaatcgaagagaactctgggttttggcttcctggatggtttattagggctgtagaaggacttcaagatgattctcataaaagctgttttccttgtgattaagttgtgtttgcctgttaactatgtggtaaacaaaccctccactccccccttatggttatagcgtagccgcctgttaattgggacttggagggtagcgggctggcaaggctgcccgggacaggaagccaagaagcccaatttggttatcagttctgttgacatgagctgagctgtatgtggttgtgcggtgtgtccagcaggtctagcttggggttttcccagctatgaaagacctgctgtttgaaacacttggactrtagtcaaacaagggattcggatcagggctccggatcagggctgtcgctgccgtcagccccatcagctctgcgagcatggtttccctcttgggcagggggaaaggcaagccaaacatgtctgatcctatacttggttcagggctgaggggagaaggcaaggc

SEQ ID NO: 474897 - DNA, 584 bp, Homo sapiens
agtggtcaaaaagcaagaccatatgtctctccacctgtccccactggcctttctcctaagggacgaaatcgaagagaactctgggttttggcttcctggatggtttattagggctgtagaaggacttcaagatgattctcataaaagctgttttccttgtgattaagttgtgtttgcctgttaactatgtggtaaacaaaccctccactccccccttatggttatagcgtagccgcctgttaattgggacttggagggtagcgggctggcaaggctgcccgggacaggaagccaagaagcccaatttggttatcagttctgttgacatgagctgagctgtatgtggttgtgcggtgtgtccagcaggtctagcttggggttttcccagctatgaaagacctgctgtttgaaacacttggactgtagtcaaacaagggattcggatcagggctccggatcagggctstcgctgccgtcagccccatcagctctgcgagcatggtttccctcttgggcagggggaaaggcaagccaaacatgtctgatcctatacttggttcagggctgaggggagaaggcaaggc

SEQ ID NO: 474898 - DNA, 496 bp, Homo sapiens
cacttattacctgggttctagaagccacctccctcagcatacccacgtgttcactcaccattgcattcaactcactccacccattcaacaaatatggtttacttgttttcaaatagattatataatatttactggtacataaattgtgtttgtaggactgtaatttccaaagttactccttttctctttttgttttccttgttcatcattttgaccacatcctctcatgagcttacaytgatttcctattacactttgaatcaaacacaattttccgagtatttctttcaaaagcctctcccagcttgacccgccctctttgttttcatctcctactgtaacctagccttcaccttccacaccaactaaatttattgtcatgtggttccttccactggttcttcctctcctggctgtgagcctttgctcaattttttccatatctatggaacaacaaccaaaccacaagtttctcctctttaaatcacagctcagg

SEQ ID NO: 474899 - DNA, 496 bp, Homo sapiens
cacttattacctgggttctagaagccacctccctcagcatacccacgtgttcactcaccattgcattcaactcactccacccattcaacaaatatggtttacttgttttcaaatagattatataatatttactggtacataaattgtgtttgtaggactgtaatttccaaagttactccttttctctttttgttttccttgttcatcattttgaccacatcctctcatgagcttacatkgatttcctattacactttgaatcaaacacaattttccgagtatttctttcaaaagcctctcccagcttgacccgccctctttgttttcatctcctactgtaacctagccttcaccttccacaccaactaaatttattgtcatgtggttccttccactggttcttcctctcctggctgtgagcctttgctcaattttttccatatctatggaacaacaaccaaaccacaagtttctcctctttaaatcacagctcagg

SEQ ID NO: 474900 - DNA, 634 bp, Homo sapiens
gctgcttcaagaagtttttccccacccatcttccaatccatcagatcatcactgacccagacttctaccaccacaaaaccttgaagtgactaaatttataagtatggtgtggctatagtccaacttctggcttacattamtaccaaaggcctaatatcagtatcaatcaatgttaaatttggaaacaaccaaaacaaatgtccgatatagttattaaatcagcactgtaaaatttagtatttttgagtgaagacaattaggtagtatatttcatttgagtttaatgaatgtattctctgccttgttctacaagggatttgagagatattacaataacaacacaaaattgttacaatgacaattaaaactaaataaataccaggatcaaggaaaacatggatggaataaaatagcaagattatggagaaaattggaatgtaaatatcaggccataactccatggatattaaagccaaactgcccatttgtttctgatcttcttggcactaagattattaattactaagccctattttttaactcaatttttaaaattaatttatcctctgagtgagtgtgaaaattatcaggtgattggtactctttggagttgatgcagtagtataacacagat

SEQ ID NO: 474901 - DNA, 634 bp, Homo sapiens
gctgcttcaagaagtttttccccacccatcttccaatccatcagatcatcactgacccagacttctaccaccacaaaaccttgaagtgactaaatttataagtatggtgtggctatagtccaacttctggcttacattactaccaaaggcctaatatcagtatcaatcaatgttaaatttggaaacaaccaaaacaaatgtccratatagttattaaatcagcactgtaaaatttagtatttttgagtgaagacaattaggtagtatatttcatttgagtttaatgaatgtattctctgccttgttctacaagggatttgagagatattacaataacaacacaaaattgttacaatgacaattaaaactaaataaataccaggatcaaggaaaacatggatggaataaaatagcaagattatggagaaaattggaatgtaaatatcaggccataactccatggatattaaagccaaactgcccatttgtttctgatcttcttggcactaagattattaattactaagccctattttttaactcaatttttaaaattaatttatcctctgagtgagtgtgaaaattatcaggtgattggtactctttggagttgatgcagtagtataacacagat

SEQ ID NO: 474902 - DNA, 605 bp, Homo sapiens
accagctgctacaaacacaacagacatgcacacgcacatgcgcgcgcacgcgcrcacacacacacacacacacacacacacacatcctccttaatcctttaaatgccttgatcttgggagagaggtttggattttgaacaaatcattagccttccatttctttcttctttccaccaaacacgaggaacactggacaatgtgtccaggcagtggctttttaattaaccactggttattttaaaaaataaaaataaaaaagaagaagcccatgtgatatatccacatctccactcagaagataaagagccaatgggtaagactgaggattttcttgaaaacaattttttattttaggggagcagcatcaatgtctctaaaaatcatggtgttcatggctatgaatgcccacttagtatttagcttgttcagtttcttccttccagatcctcctggccaaatttattgcccgtggctgaagaaaggatttttttccccatgaaacttgttttggcttgaagtaaagttcaaataatatttaccaagattattaaaaaactctaaaacttttttcttcttcagcattcagaggtggaatgtcagagagt

SEQ ID NO: 474903 - DNA, 464 bp, Homo sapiens
gatttaattccctacagactctggtagcagatttttcaagattatacaattgttgagacttttggcacatcagcctagaccttgactctaaactcacctgttgctgggcgtggtggctcacgcctgtaatcccagcactttgggaggctgaggcragtggatcacctgaggttaggggtttgagaccagcaacatggcaaaaccccatctctactaaaaatacaaaaattagctaggtgtggtggcacacacctgtaatcccagctattgggaggctgaggcatcagaatcacttgaacccgggagatggaggttgcagtgaacagagactgcaccactgcactccagcctgggcatagagtgacgctctgtctcaaaataaataaataaataaatgtacctgctttgtcctcatgagatcactggagaaagcatgagtaaacttcacattattcagaaatata

SEQ ID NO: 474904 - DNA, 316 bp, Homo sapiens
catttaccaggcacccaagtggtcgctatcatcaaaagtagccctagctggggggcctattcttttgggtgtgatatgcagttgccttaaatgcagctattctcaactgggggtaattttgacatctacaggacatttggcaacgcctgaagacmcttttggttgtcacaactggggatggggtgtgggtagtggacagcagctagggatgctatgcagtgaatggtgggtggtggccggggacgctgtgcagtgggtggtgggcggcggctgtggaggctgagggttgggtggtgggtggcggctggggaggctg

SEQ ID NO: 474905 - DNA, 491 bp, Homo sapiens
ctcacgttaggagtacagctctctaaatataagcctccagggcagaagcgaggggaggatggagggacacaatgcagatttacagcctggtgggtacggcctttgtcctctccatgtctattgtcactcttgaggtccaagcctctactgcactgcctggtttactgcacaacccaacttggctgcttgcttctggtctctccccaccaaaccatccttcacactgcttccagcttaatatttccaagacactgcatttgcaaatccactcctctgtttaaaaatgtttcagtgacttgcaacttgtctacagtgtgaagtataaatttattagcttgttgtttaaagccttctacaacsagaccccgaccgaccttcacgtcctattgagaggtgacagcctgctggcagccctcgcagccctggctcgctcttggcgcctcctcggccttggcacccactctggccgcgcttgaggagcccctcagccc

SEQ ID NO: 474906 - DNA, 179 bp, Homo sapiens
ctggcccagtttgtgcatgaggtgaagaagagcccctttggcaaggatgttcggctggtctcccttggctcccggcaggtaaacagtagccagtatttccaccaggggccatcctgctcctttcsccacaactttgtcctgctcgtccaggccttgggagacgctgggtctgtgacagg

SEQ ID NO: 474907 - DNA, 577 bp, Homo sapiens
tgaactgaagcagcacttgaaccggactctggctgagaactacgggcagcccggagccacgcagatcaccgcctcagtggaccgactccagcaggatgtaagccatgccccatatggccttgaaggccaagcccacaaggattcaaatcccgactgttctttcctttctgggtgaccctaggcaagttacttaccctctctgagcttcaaatgtcacatccttaaaatgaagcctctttagggcacatgagcattaaacctggccacatctctagatgtccccactgccatgaaaactacctgttgaagcctggttcctctccttccccgaccacctcctccaggccccacccctgctgccttccckttctggggcctctgtggccaggaagccggctgtgccaggagaactccatctcctgccaggatctgggccaggaagctcctctccaggctgcttatatccgtggggctgccttcctccttccccggggagctggctgctgtgactccgtaagagtgagctgtaaccagcggaggtatttcagttaagctgccgcaagaaccctccagtgtg

SEQ ID NO: 474908 - DNA, 552 bp, Homo sapiens
ccactacttcccagcaagtgctgatgcctcatgtcagccccaaagaccaagttgtcattgctgcctctgggtggggacgctggttcccactgcctctccatggctgaagagagagaggccacccatgggaaggagaggacatggggcaamgagccattttcttcttaaaagcaaatgcatgacaagcccctatttccttttccctctggcttcagtctctagctgaaaccctgtctggcagtggcttgagcagaaaggggaggatcctgccgggcacctggtgggggcctttgcatcaggccagaggacaagagggaaagagtgaagtgggaatccagccctttccatcagcaaggaacgtcactgcagtaaggacataacaacgtcactgcagtaaggacataataaagccagccagaggcaagaacattaatgttcccgtgatggggatgaggagcaacttccgctggacttttaaaacacactgtagttcacgaagcccaaattctactttagagaaccctgagttaggggccagaggtcaaattcaac

SEQ ID NO: 474909 - DNA, 550 bp, Homo sapiens
ggaatgggaagccattctgtaaaagaaactgagtcttgttcagacctggtctcccagtcctctccctgagcccccatgctgtgtttgctccccaaaytagacccattcacttctccgtcatagcagaagtcactctggtggttactaagtcaggtctttcaacccagtgtcctacaagtgatcctggggcaggggcaggggcagtggcagtgtcaggcatgggtcccttgatggcccaagagcgtggcatcattgtagcaggtgcacagtgggtattggttgaaagaaagtatgagagtaaccaagcatcagtctgaccttaagataccgagggcgcaaccccagcctttccaggagcctcttcttaatgacccagagaaaaagcctattcctctctgggactactgggactttgtggactgcccctttaaaaatcaaaacagccataaagcaggaaagagaaacactagctgttgccccagaagctcggcagacagaggcaggtaggggagcagatgccatttccacagccctctacagagcctcatcc

SEQ ID NO: 474910 - DNA, 591 bp, Homo sapiens
tccacatggagagacatgaaggggcagaggcatcttggtcaaagctacccagtaggcagaagggccgcagctccctggaaccacagagaggcaggtggccacacagggtctcccaggrtctgagtgttcaccctccaacaacttattccatttcttttttctttttttttttttttttgcataactttactcaagaattctttcttattacctgaagaatctacttccctgtggctaacacacatcagtcctagttttgctcaagaaatctaccaagaacaagtaaaacaggcctttaaatatttgaaggtatgcatggaacaattcaggttcctctgctgaaacttcctgtccacagtttccccagagaaacatgtccacagtcacagagctccttgtggtacagccatgcctgctcccagaacccagagccctcttccctgtccttcctcattggtgctgtgctgctgtggatggtgcctgcagccccaggctaaatgcgctaggctaaagagaccaggctgaagcagggcagccatgagtcaggagctggtagtggagagaggtgaggaggtcctgccactgccccag

SEQ ID NO: 474911 - DNA, 549 bp, Homo sapiens
aagtccacattcccaggagcagatggcagagacggtcagaggtcccaggggtcctgtccccaaatcctgggcaaacacccacatactccccatctggcaccctgaagatgctgtgcatgtgtgcatacacacacattatgcccttctgggtccaacagtcacagaaagagttacttggcttcattgcaaatagaaccagccaagccsagccatccctgctatatttcccaagtactccagtttctaaggaggcatccccctatctgcaaatcaggagggtcctatccctcccctcttctcaggaccaaaggggaatcagacaattagcaaaaaagtttctcctcctgcagtcccaggcggctccagcctgtcaagaaccctgactcttcaatcatggaggcagtgtgactgagtgggcaggccctgggctctgagttctcctcctgtctctgcccctaaccctgcccccaactacaggcaggaccttggacaatttacctttcctccgtgggtctcagtttcttcctcgtagagtagggataaaaagcc

SEQ ID NO: 474912 - DNA, 503 bp, Homo sapiens
tcccaggggtcctgtccccaaatcctgggcaaacacccacatactccccatctggcaccctgaagatgctgtgcatgtgtgcatacacacacattatgcccttctgggtccaacagtcacagaaagagttacttggcttcattgcaaatagaaccagccaagccgagccatccctgctatatttcccaagtactccagtttctaaggaggcatccccctatctgcaaatcaggagggtcctatccctcccctcttctcaggaccaaaggggaatcagacaattagcaaaaaagtttctcctcctgcagtcccaggcggctccagcctgtcaagaaccctgactcttcaatcatggaggcagtgtgactgagtgggcaggccctgggctctgagttctcctcctgtctctgcccctaaccctgcccccaactacaggcasgaccttggacaatttacctttcctccgtgggtctcagtttcttcctcgtagagtagggataaaa

SEQ ID NO: 474913 - DNA, 611 bp, Homo sapiens
tatgatgttatcaaatccaggaagtagccaaggattactcttatttgttctygtgaaatgaatcctactcaggcagctttaggactcagtagcgattctaactggaacaatgtagagaagtagagaaggttgacatggctcttctgtgtgtgtcacttcctgacctgaggagcatctgttgaatgcagttctattcagttgttcctaatttttccagtccttggaatgcacagatgcctgggatgtggcattgctgtcagctagttcaccatccagggggcagacttggggcaaatttcatggattctacctcctacaaggtagtgagggctaccctgtggccacgaataaagtattatggaaggataaagtaggaagctcttatttctgcttgttagattcagaagtgatccactaaggaagagacatgcattttctatcctgcttactccctctggatttccccccatcatgccttggaagggatctggcatagcccaaccacaacgtcccgccttcagtctctccagtgtttccagttacttctcaccgccgagcacctttgcacatgttgttccccgcctggctgaatcctgattctccttcagctt

SEQ ID NO: 474914 - DNA, 160 bp, Homo sapiens
ctgattctttaagacaatgctcaatacattctagtcaaataaatggttttaagcgtccacaaggtgccaagcctatggttcccgcattctcttaccctcagcaacttcatgtctacagatgctgagtttctcartgagtattaaaaacaaatgaaagatt

SEQ ID NO: 474915 - DNA, 567 bp, Homo sapiens
ccttggatcatctgccactgatctctggtcaacatttttatcacccaacacaaaagaagcagagatttatcaagttacttaaacaacctgaccctttcatcttttgctacacatactcttgtaattgatctctccatgaattgttttctgtttaaaatatctagaatgttttctgcttcctgacttgattctaatattgtataggtactagaaatggttctagaaatagatctttatagatgagaatctggaagtggtttgctgacctgtttcagtctgaatgaattcctgaccttgttgtcgggaggagacagaaacctgatcatctgtagtgtacggtggtatcatgattacttaaatcatcaaatgtggttattgggaatgatgtgttttttaaagtggtacatgagaggtaaaattgctattgtagttgactgttgcagttataattttgtcaacatggtctgtaagagtgcaatggaktcggcccggtgtggtggctcacgcctgtaatcccaatactttgggaggccaagatgggccgatcacgaggtcaggagatcgaga

SEQ ID NO: 474916 - DNA, 488 bp, Homo sapiens
gctgttcaccatatactccaagagactgcgaatgctaaccctttgtatttctttatttagcaaatatttataaagtgcccttatatgatgactaaaaccatactgaaaagcaggtattcaataaatattattttctccttataacgccaatctgaacaatttagacttaattttctctaggcaatgttgaaatactaaagatatttaggctggggacctttgttttagaaagtgaactctgttgacattgtaaggaaaaattagataataaacttgaaggagaaaggctggaaacaggcccatatggagactggtttaatagttcaagtaaaaaaagagagtctgaattagagcaacataaatggaggcagagaggagtccatttcagagaccacagtaggctattaaagactaactggaaagagaaagtgagaaagagggaaagccaaggataactctgaagtmtttaggtaggtaaattattgact

SEQ ID NO: 474917 - DNA, 613 bp, Homo sapiens
  misc_feature (1)...(613): n = A,T,C or G
cttttacagtatggcaaagagagggagaactctagtctcttcctcttctctttatttttatttttatttttattgagagggagtctcgccctgtctcccaggctggagtgcagcggcacaatcttggctcactgcaacctccacctcctgggttcaagcaattctcttgtctcagccttccaagtagctgagattacaggtgcctgccaccacacctggctaatttttgtatttcagtagaaatgaggtttcaccacgttggtgaggctggtcttgaastcttgacctcaaatgatccgcccacctaggcccccacaaaatgctcttcctcttataagggctgcagagccatcatggggaccacaccatcatgacgcatctaaacctacttacttcttaaaggccactcctcctaataacatcacattggaggttagggcttcaacatatgaatttggggggtacgcaaacactccattcataacatgtgagaggtcagaaaanttataggtacctcccaattttaagagacatctatgtctcaagaaatgtactacatcttagaatcaataaaacatggcagtgtagatgaagaacaaaagtaccctgttct

SEQ ID NO: 474918 - DNA, 573 bp, Homo sapiens
atctattattattataagattgtaatttgatcttgattacagaacatttcattcttaatacaatatgctatttggtaatttttctacaagccaaagaaaacagattatttaaaattcacataaatttgaaatgtgcttatattttagatgtgatgtggttagcactggtattttttctaagttccatggatgttaacaatacttcgactctttaatcaaaattcaaggtgcagtggttcaagaaagaaacattgataattttacaacaaccggttacttctatttgtgactgggaaataaactctacttttccttacttaaattaatgacaatttaacaaaaaaatgatacaagatttatgagaatagaatagttaatattactgtcaaatgtagatgagattactctagatattaaattgctatttatcattttaaaggcaacatatatattttgtattggattaccattataactattgaatatcaaataacttttcaaataaagttccagaatcaagtaatatatttcagaggaacacttaggyagagtgataacaactgatttttgtct

SEQ ID NO: 474919 - DNA, 569 bp, Homo sapiens
gctgccagtttctgatccacaaaattgagaaatgtgcaaataattgttctttaagtctaccatgtgctgtggtcatttgtaagatagcagtaaatgactggtttaccaggtaacaagtgcattcaaacactgcttttcaaattctaaacgttggcccttttttcctgcttctaatacagaaacaacaaatttaaggaaaagggaaatcatgtaagaatggttaaaaagttactattgtctgtgatcaggcaagctaatcacaagtcaagcaaataatcccagaagaaagaaatcatgaaattgtacgtctaaataaccttacactgtagcatagtcatgtagacttggaaactgaagcactagaccaagaatgaagaactgaagagaaagaaaattgtcagtgtttacagggcactaaccaacagagagagagagagcgattccaaccttagggaatgaccctaagaaacagtttctcaaaaycagggtgagtcagaaactgaactttctgtaaccctctgtaatatctgtaagaaagattcatttcactagcagctctgaaatactta

SEQ ID NO: 474920 - DNA, 556 bp, Homo sapiens
tgagtccaagtagaagaagtacatagtttcttgggaaactttcttggaaggggctgctccatggagccaagccaataacaaggtaatttggtgaaaatcaacagttagctgtgcctgacctcgtgaaaaaataaaattgcatgaaacaatgaaaaggcataaaacagaaattctaaaacacagaagtgaagaggttgttttcccattaatttgccaaggggatwactaaggtgtatttctagatgacagaatccagactttccagtcgcctgtggagaatgtgctgcattcctctccagaggagaggcagtgccagcccagctatgtgcgatctgacacctgtgcagcaatgtacctgtaatttgcatcagacaggaccgatgagagctttcacttgtgtgcaagagcagtcttctccagattgtggcattgtactttaaattactattctcccttgattgtcaaaatggccatgttcaacaaatatgttctttggtcattttcacttcttgttccacttgcttttatagttgtgtactctctccgtctctccttt

SEQ ID NO: 474921 - DNA, 649 bp, Homo sapiens
gaatggaccacaggtgaaacaacaaacagaaatacgcaaaacaaagtgaggtctacaatccaaaactgtctgtcactgagacagagttcgaacgggtcatgccgcaattcttttgtgtatacttaatttttcatacttcctgaaatcaaaaatagctgaaaatattttatgcgtatagaagaaactcgaaattatttttatatgaaaaaagctgtacatgcatttttaagagcaaaaaggcaatttttagaaagccgagggcaggttgaattcacttttttattcttcaaagtcctaacaatgtttaatcagtagtagcaataattgtgtttttttwaatttttaaattcataattgccacatggtaattgcttgtagtgtgttaaatatacagggaaaaaatgtcagtaactattaaattggaatagatcaggaacctaggacaactttggaaatcactcctagtggggggagatgaaatgaggctcaaagttttacattgtggcaatttcctgcagcaaagcaggaccaaagagggtgaaggtgaaaagtacgatttccttaatttaatttagccttgataggcattcgagatatgtatcttcagctacatcagaaactaataattacaacaaatgggtgtgtatgc

SEQ ID NO: 474922 - DNA, 656 bp, Homo sapiens
caacttctcctctcactccttcaactgctatactcaatcaactgccaagtgccatttacaaagtttcttaacatctcttgaggctattaacgtattttcatacccactgtcattctcatgactagtttcttggttaaaacctgtattatttctcactctgtctrttgaagattacattctcacctggttattctgcttcccattaatactgctatcagaacactctctctgaaatagaaaccatttttctaggttaaagcccttcaacggcttgtcataattaacagcaggtaactcatacagtccctaaacaatcttatttatcccagggtattgctgaggacttcttaatctttcactcagttcagactcactcttacagctttatttggtttacaaaggatatttacctgatatctaccaggtatctcaagctgcaagactgaaatcattaccttcaaataacctccatatctatactttgtccttcgtgttcccttgtttagaagatgttttgtcaacaactccattcctcctagaagttttgtagtaatcatccctgattttctttctcctctgcttcatcactaaccagcctccttttttctgatcagccacaacatcctattgcttcaattctcttaatgcctctcaaa

SEQ ID NO: 474923 - DNA, 647 bp, Homo sapiens
tcctttcaaatatgagatattcaataatactaatagagctgtttaccattttaccatttccctaaaatatttaagcatgttattcattggtagtgaaaattttaagtcttgaatacgtttaggaaatagaataaacatatctattagaaaagataaaaaataraaagagctgtatgccaataccattgtatgttctattaatatattttatgtttgcagtaaagtcttgctagatagtacctactactatagtacaggaattatgcaatgaaatatcaaattggctcctctactttaggaggccaactcaaaacttcacagcaacagtaatcaaaacaaacttttgagcctgtgtatcaaattgtttcccacctgttggggtgaatggtgtatttagattaggggcccttcaggatctgcaggtgctgggtcagctcctaccctctgagccttgtgataaccttcacggttacagggaacttctcgtgaaggtgagcaatggagaggagctgagaaacccaaaaagaggaaggagtgaatggatgacgtgggaccttactctgtgttgcatcccctggcagagcaattaaaggtaaggtgaagtccagactggagtgccacccaggtcaaaatcccccccaccgcat

SEQ ID NO: 474924 - DNA, 647 bp, Homo sapiens
tcctttcaaatatgagatattcaataatactaatagagctgtttaccattttaccatttccctaaaatatttaagcatgttattcattggtagtgaaaattttaagtcttgaatacgtttaggaaatagaataaacatatctattagaaaagataaaaaatagaaagagctgtatgccaataccattgtatgttctattaatatattttatgtttgcagtaaagtcttgctagatagtacctactactatagtacaggaattatgcaatgaaatatcaaattggctcctctactttaggaggccaamtcaaaacttcacagcaacagtaatcaaaacaaacttttgagcctgtgtatcaaattgtttcccacctgttggggtgaatggtgtatttagattaggggcccttcaggatctgcaggtgctgggtcagctcctaccctctgagccttgtgataaccttcacggttacagggaacttctcgtgaaggtgagcaatggagaggagctgagaaacccaaaaagaggaaggagtgaatggatgacgtgggaccttactctgtgttgcatcccctggcagagcaattaaaggtaaggtgaagtccagactggagtgccacccaggtcaaaatcccccccaccgcat

SEQ ID NO: 474925 - DNA, 506 bp, Homo sapiens
ctcttccctcactgattacagaaaaggaaatgtgtttaaatttgagcatgagcgattgaggctttgagggaagaatttcccaacaccaaggctatgtcaaaatcaaggacaaaaggagtcagaaaatgaatcagtacatgtccccaagtagcagtctcctcaaggtcgaagagaaccctataatgagcagaggagagtgcacctatattttgtttctctttctgtctctctcaacattagtctagtcttaacttaggaaaaattatagcactgtgaattgttcatatgaattcctgaagagcatggtgatttatctggaccttcgaatgcctgggttaatgctcattaatttgcatttgttaagagctaycaaagagtttatggggtgcagctcggggccactagaagaggattttaatgtgctgttacatttctatgtctctgtcgcttaagaacgaccatgtgttgtgaattgtactaattttattaattacagatgtacacac

SEQ ID NO: 474926 - DNA, 579 bp, Homo sapiens
gacagctgcggactagggcaggaagccaggcaagctggccctagactcagagtccttaatcacaaactcattctgcttcatgtgtttttattatctaattaattgcttttagagacagggtcttgctctgtcacccaggctggagtggagtggtgtgttcatagctcactgtaaccttgaactcctggctgaagccatcctcctgcctcagccttccgagtagccaggaccatagtcatgcaccacaccyctggctaattttttaaaaattttttgtagagaagaggtcttgatgtgttgcccaggctggtcttgaactcctggactcaagtgatcctcctgcctcagcctgccaaagtgctgggattacaggagtgagccatcatgcccagtctcattctgctttcatctgaggggcagaaacaggagactcaagaggagaagccggggctcgagggctggcaaagcccagcgtcgctcttccaggtcctgtgcagcatttcagatggaacccttggaagcccactgaccacatgtgtgacctggggaaggcccatcttttggaaactttgtatcacc

SEQ ID NO: 474927 - DNA, 526 bp, Homo sapiens
tgaatgttagcacttttaacccagatgtcaatactgccccacacaggacttacaagacacagacggaaaaactttatgattctgtaccgagcaccatcaccagatttctcaggaagaacttttaaggctaactccagtgaactcaccatcctcactgctgctggagtctccattgcatccctgcttcctctagtcttgcccttccaatacggtctttatcttgcagcgagagcccctttttttttttcaaacacaaatgtgatagttgtcacttcccttccgaaaacccttccgttgctttccmctgccttgaggatgaagtcagacccttccccgaccactgtgcctcacccctccccaagcctccccgtgctcctaggatttgctgggctcccttgacccacaccttgcgcagggtgctccctctccggaactcagtctgattccccctcatcccttgtttgtttgtttatttattttgagacaaggtctcaccctgtctcccaggctggagtgcagtggcata

SEQ ID NO: 474928 - DNA, 514 bp, Homo sapiens
ctaaaacaaaaaaacaacagaaacaaaaaaagaaygaaaaaaaaaccaccccatttctagggctgggcacagtggctcacaactgtaatcccagcactttgggaggccgaggcaggcggatcacgaggtcaggtgatcgagaccatcctggctaacacagtgaaactccgtctctactaaaaatacaaaaaattagctgggcgtggtggcaggtgcctgtagtcccagctactcgggaggctgaggcaggggaatggtgtgaacctgggaggcagagcttgcagtgagctgagatggcaccactgcactccaggctgggtgacagagcgagactccgtctcaaaaaaaaaaaaaaaccaaacaccccatttctaaatataaaataaaataaataataataaaaaagagaagtaacaatcagaccaaagggtacagtaaagccatcatcaaaatttcacacttttgctacaataatcaatgttactacttcacatacatgtctttgtttgaggac

SEQ ID NO: 474929 - DNA, 635 bp, Homo sapiens
cagtaattttgttgctgaaaatctatcctaaagaaaataatcctaaaacaaaagaaaaacctaaatggtaaaatattccctgcagcatgcaattgcagagaaagcatgcataggctttggcatctgatcaatctggatttgaaccccagttgctacttattatctttgatcttaatggtaacttcttagcttccgtgtccacatgtgttaaatgggaaatgatgcctatctcagggttatagtgtggaaaagtggagataagtataaggcatctagcacagcagcaaagtatttggcaggtatcaggcaaacaataatggtgattcttattacaataaatcttcccttctaagccagatgtgatctgatctctccaccctctacactttctggctcttgccctagagctttatactccacagtcctagccacttccaatcagctccctggccaggtacgcacatctcttctcatcctaaggataagaggctttatctcccttacttctgaagagcccaggtgcctctgtaccaagcctcacacacagtaggcactcataagaaagaayagagaaataaagaaggaaatgaaggaatggttagtaccagcccaggctcattaagaacataagctac

SEQ ID NO: 474930 - DNA, 422 bp, Homo sapiens
agaaccattcccccaggctggggcagtgggaccggaaaatgaatcccagggcttggccacaacagcaaggacaggatcagagggaactttaggtgcatagcttgcacctgctttccttgaactactcctaccaccaggcaagagsaatggaggcagagcaggtggaggctcagcttggttttgagtctcttgtaatagatttagtttattggtcgaggttaaccaacttcttagaagctcccgataggctcaagggagtagggagcatctgccttttctcctcctggggaagcccacccccttctcacacccattcccccagacatagggtttttccatgataggtactgtacttgactttctcaccagcacctggacaagagagagacccactgtgcttctggaagggtcataacgttcag

SEQ ID NO: 474931 - DNA, 616 bp, Homo sapiens
cggtcaccatttagttgttcctaatggtttcctgagtcttgtcacttttgctcatgtcccctgatagcctggtctaaggtagggcctgcagaagatgctgatgactagataggagctctgggtgcctggctccaacattctcccatggtcacagccactgctgtccttgctgtgagtttaggagctgactcaggccagtcctgtctggagggcagttaacacagcctttctgggctcctcttttcagttcccatctctgtcgtccctgcctgggtggaacaaggtagccagaggctgcagcagctcagacaccaggcaggttcaatgtcaaatgcactttactgggcccctgggcctcccaacactgtcctcaccaaggctggggcaccccattcccagcaccaccagctgmccaggaagcaggacggatagagggaacacatgtggaatggctgttctcctaccccagagggtgccggatgatgttgacagcacggctgcttccctctcccctgcagcttctgtccccacccagcagcttggcctttcccatagcagggaagggggatacctggggcttcaaaccagccacctgctcctgcttaaaatggggcaa

SEQ ID NO: 474932 - DNA, 616 bp, Homo sapiens
cggtcaccatttagttgttcctaatggtttcctgagtcttgtcacttttgctcatgtcccctgatagcctggtctaaggtagggcctgcagaagatgctgatgactagataggagctctgggtgcctggctccaacattctcccatggtcacagccactgctgtccttgctgtgagtttaggagctgactcaggccagtcctgtctggagggcagttaacacagcctttctgggctcctcttttcagttcccatctctgtcgtccctgcctgggtggaacaaggtagccagaggctgcagcagctcagacaccaggcaggttcaatgtcaaatgcactttactgggcccctgggcctcccaacactgtcctcaccaaggctggggcaccccattcccagcaccaccagctgcccrggaagcaggacggatagagggaacacatgtggaatggctgttctcctaccccagagggtgccggatgatgttgacagcacggctgcttccctctcccctgcagcttctgtccccacccagcagcttggcctttcccatagcagggaagggggatacctggggcttcaaaccagccacctgctcctgcttaaaatggggcaa

SEQ ID NO: 474933 - DNA, 620 bp, Homo sapiens
tgtacaatcaggcatggggctcgtgtaagtgcagggtcctgtcaagtcagcctgcctggcgcctcccgcccgcttactctctggttcattgacttcctgatcctctcctttcctttctaggctagcccaggcctcacgggtcttaggctagcccaggcctcatgggtctctcaggtggacaggctccaccctcctcgattgcctcctggcttccagcctcccagtcccagtctgtctgagaagtctcattcccaccacactcaaccaatgccattcacctggattcctgtcctcttagacttcttgtcctcaaacactccctacatttccccgtttccataccttttgttcagaattcagttcctctaaaaaattcactcctcctttagccacctcctccaggaagactgtcctgattttccagttgtaaatcttatatcacaaactatttgggtcaaagcacatagcaactttctgccttcactcacagccattcatctgcccactcccataaacttaagattctagaagacagggatggtgttaccttcatcattataactgccccagcacctaactgacaggygcatggtatgactcagtcaatacttgttgatgca

SEQ ID NO: 474934 - DNA, 573 bp, Homo sapiens
cctcttccccagtggaagagctgtatgtaggggggggcaggggagaggatattcctggttaatggcagcttgcatgcaggtggccctctgccagcttcgtgtgcacacgtgtgacatcagccaccaacatttactgcgctccccacaggctgtacaggcctgaatgtgactgtgtgttccattggcagcacagggacagccagagagtcacaatcaggccgggcgtggtggctcactcatccctgtaatcccagcattttgggaggccaaggcaggcagaccacaaggtcaggagtttgagaccagcgtggccaacatagtgaaaccccgtctctactaaaagtacaaaaaaaattagctgggcgtggtggtatgcgcttgtaatcccaggtacttgggaggctgaggcargagaatcgcgtgaacctgggaggcggaggttgcagtgaaccgagatggcaccattgcactccagcccaggtgacagtaggagactcccatctcaaaaaaaaagagtcacaatcagggctcccaggactctcagatacaaggatgttggtggagtctgcatgg

SEQ ID NO: 474935 - DNA, 415 bp, Homo sapiens
taggctggtcttgaactcctgacctcaggtgatctgtgctcccaaagtgttgggattacaggcgtgagccactgtgccccggcctctgagcacttctaatccattcacctctcccagtgtactcatgaccatcctatgaagaagayattatccctatatccccatggcagcctccctcaccagggccctgccctgaccagatcatgcccacgctgggaggagcttcctcagcttctgaaaggaggcccccgccgcaattcctatcaacaagtatgtcctgtgcaactactgtgcacccaatcctacgccacccttgtcacagccctgccacccccgcctcccattctgtgcccaacaaagcttgcagttgttgaggtctttttcacaccaaggtgtgaggtccctctcccagctc

SEQ ID NO: 474936 - DNA, 589 bp, Homo sapiens
attgggctgcccagcctctccttccctgggcccgggttcatgaggtgcctgggggtctggccagcccctgagaaccgcatgcagcctgaggtggtgctggtggtggcggggggttccagcttgggtttggtaatcaccttgctcccctcagagttgctaattgaaagcaaggggtgttgtaggcgcagcaggagagggtggggactgagagcttccctgagaggctctgcttccatggggggacgaaaacaatttctccaggcttcasctccgtctcaccaggcacccacttggcctctcctgctgctaacgaagtgcctttaattagcagcctaataaaatgctcttaattggcaagagccaatcaggaagaagagagatctcctccccttagtcattgctgatggtggcacagctataggtttaaagcagggagggattcctggcccagcctgggagtaggaaaccacggctatagggttgagacttgccagggcaggccctagaccacacccttcctggggaagagatctgacacagtttgagggtgaggtccacaaactcttaggctcagcctctgctcaggagc

SEQ ID NO: 474937 - DNA, 589 bp, Homo sapiens
attgggctgcccagcctctccttccctgggcccgggttcatgaggtgcctgggggtctggccagcccctgagaaccgcatgcagcctgaggtggtgctggtggtggcggggggttccagcttgggtttggtaatcaccttgctcccctcagagttgctaattgaaagcaaggggtgttgtaggcgcagcaggagagggtggggactgagagcttccctgagaggctctgcttccatggggggacgaaaacaatttctccaggcttcagctccgtctcaccaggcacccacttggcctctcctgctgctaacgaagtgcctttaattagcagcctaataaartgctcttaattggcaagagccaatcaggaagaagagagatctcctccccttagtcattgctgatggtggcacagctataggtttaaagcagggagggattcctggcccagcctgggagtaggaaaccacggctatagggttgagacttgccagggcaggccctagaccacacccttcctggggaagagatctgacacagtttgagggtgaggtccacaaactcttaggctcagcctctgctcaggagc

SEQ ID NO: 474938 - DNA, 465 bp, Homo sapiens
tcagctgtgttccggtcatcaggggccaaagagctcaatgctgtccactttttcctctttgtagagcagaatattctccatcagtttccttttggcctcattgatctcaatttgccacgaagtttctgtaactgatgttcaacagaaagcaaacaagagcgacttgaatgaaagttactattattataattcttaaagtcacttaaatcaggttcctgaatcaggccctgagtgtaatgagcatttcttttttttttttttcttttttttttatcgagacagggtctcactttgttgcccaggctggagtgcagtggcacaatttcagctcaaggcaaccttgacctcacaggttcaggtgatcctcccacctcagtctcckgagtagcagggactacaggcgtgcacaaccacacctggcttttttttttttttttttgagatggagtctcactctgttgctca

SEQ ID NO: 474939 - DNA, 245 bp, Homo sapiens
gctgaaggttggggatgccatggatcasgctgaaaaatgcagaagaaaccagcatcttctccaaagctgccttagagaattttcttggtgattttagagaattgctgtctacctatcttcctagaccttcaaaaaggggcatcactcctccctcctattgtcacaatccctggggtcctgaaattcactgccaagacttatgtttggccttctgaaatatgctccctccttccttgtgtgaagaa

SEQ ID NO: 474940 - DNA, 588 bp, Homo sapiens
ctatgcacacaggataattacaaagttaaaattaaaagacaatttacctatctgacttttttgtttcagtgatgtcacactcagaagcagttaaaatagcagataaggaaacccctgggtctgttgagatctaaacaacctgtttctttgttgtactatgtaccaggtaaggtggtaaacaaaagaagcacagttccaaacctcatggagcttatatagtcaaggcatggaaaggcaatattttcatataatagtatgtaagaactttcaaagagacattgcagtcaaaaaagattcaactccaagggtgaaaacttgcctccaaaaggctcctggagccaggctacggctggragtgttcagagggactgtgggaagacaagataattgaaggaaaaataagggctccaactagtttaaggtattgacatcagcaggagattgcaccgcacctaactggggttactggtgttattaagcaatacagactgcctgggcattaaaaactgactggagtgggtaccatagtggtttaatgcaaactaccttcattggtaacttgaggtaggtatatctgaactctagcag

SEQ ID NO: 474941 - DNA, 531 bp, Homo sapiens
taaagtccctaatcagttgactttaaattagtcaaaagagatattattctatgtgacttaatcagttaaaagctttttaaaagagagtctagaccaggggtgtctaagggagagagtacagtcatgggttcttagtttctgtttctcattgggccagaaaagccccttcctcatccctcttttctgcttattactagagacggaaactaaaaactatggcttcaggttgctaaaagcctaaaacaaaaacaaacagaacaacaactacaaaataaagtggtttggataagcttgatctatactctccctgaggtcggagattccaagtagtagagcagaaggaaagttgtagaacttttctacgttttgggacaaaaacactcatgttgttgctgatctgctgatttgccttgttggtgtgaagcagcagctagtytataattcctttacttttcagatgtatctacttccaatttcactgactcttgggttaagtgtatgtgtacagctccatgacaaagagccctgact

SEQ ID NO: 474942 - DNA, 551 bp, Homo sapiens
gcggctccggcatgacttggagcgagctcggctgctcgtggaattgatccgcaagcgggaaaaactcaaaagggagacggtgagtgctcctgggccagccctrttttataaaagaaaaaacaaaaaattagccaggcatggtggcaggcgcctgtagtcccagctactcgggaggctgaggcaggagaatggcgtgaacctgggaggaggggtttgcagtgagccaagatcgtgccactgtactccagcctgggcgacagagcgagactccgtctcaaaaaaaaaaaaaaaaaaagacccaggagaaggaatagcgtgtgtaccccagccagatagcagcagggctgacgctggagtcaggtctcctggtgctcggtgtgcttttagttctgctggaagcagaatgtcacaggagcgtatgaacagaatcctcagttatgtgacataggtagctggtgctggtagttcaagaaagggggaagccagaattgttggtgcaagtttccctgggtggagcctcatagaaggtagacctgtatgagtacacccag

SEQ ID NO: 474943 - DNA, 564 bp, Homo sapiens
caaccaaatcctgtatgaagctggaagtctgtactatggaaaatctgctaattgtatccatgctcccatccatccatccatccatctacccatatatccataattttatgtgaaatacaccacgaggtgctagaaacatttaggtgaacagatagaaaggttttcttaaggaaggacaagagggagctgcaattaaacagggactgacaggatcaatttgcattttagaaaggcaattctgatggcaatatggagaacaaactgtaattcagcaaattggaatgtaggagcagctcttcagaagaatggatgaccttcaggtgctcactgttcatgaggagctggtgaggtgtggcagtggtgccaggagggaacattttttattayataaagtcttcatgatgcaacagatctattttttttggcacacgaataagaaactatgcccttaaagaagataaagtctccaattgtttctttttaaaagtttcttatcctaatgtctaataggaatcattagaaattaatatttttctaactagaggcaagtgataatgtctcaaa

SEQ ID NO: 474944 - DNA, 605 bp, Homo sapiens
gctagtttccaactaacatcctttctttaccttatctttccaaggatccacttgcttcattcaccttccctgctcagaactcatctgttacaccctagcctgccatgctgtctcacgcatttgagggcaactttctttctttctttctgcaatagggccaattacggacaaacaaaaatgcttatggggctgcttctttacttaactgaagatgaaaatggttttatttagtactatggtggaaaatacatattcttaccactcggatttgtttattggatataaaaatatcaataagaaaaccagcactatatctttacgaataaaaatgttactaatatctgggtatatctgaaggcacaactaatgtaactttccagacttgcatcctaaaatgagatagaacagctctgaagctgcccaggccctataggatagaattaaactcattgacttcaacctacccacccatgagaccctacaagaaacctttatctgaattaatctggtctgtgtgctaaytctaccaggattaccttctactctaacccccctcccatccctcttagcctcaagtttggctcaagttcacttcccctgatgcc

SEQ ID NO: 474945 - DNA, 558 bp, Homo sapiens
gtagaaggtaatcttggtagggacaagcaatttcagttttattctcttacaatgaagagtactgagagctggggagggcctcctttacatgtgttcttctggttcttttttaaatgcatggacctaaaattaagcacagtggttttttctggtgatagtacatgccaagatggcatatcggaacattttccttagagcaacattgagatacatctgtgcaaatcaatcaattaccaactcaatggacttatttagcagcaatacgaaactcaaaagtcatcatagtgattgaacctcattatcactttgccattaaaaatattaarcatttctttttatccctcaccacagcatctgtaactcacacctggcattttgtgaaacttctgtttgctgggtagtatagcaggtgaaatgtcacgtgaccaaacagttcttcggtacactgagcatcagatgaataaaaagagggaaagaggaagtgaagcatttttcaagttatttttagtaaaaatcttgccactcgttattcattggcttattgccatcttaaataac

SEQ ID NO: 474946 - DNA, 654 bp, Homo sapiens
caaaatttttgatgtcattcttagtatctctttcttccaccttccacatacacactgtgagaaaatcctgttgtttctacaatcaaaataattacaggatttagccactctttattattcctactgccaccatccatgaccaagctgtcataatcttttagctattctaatggcctgctaattcccatcagtttattcccagaactttgatcccatcaggtttgtccccatctcagaagccagaattattctggtaacatttaagtcagaccatgttgctcttttgctcaaaccccttgatggcttccctttttactcagaataaaagccaaattctcactatgaccatcgggcccatgtaaactgccttaagccccattaattctcagatctaatctcctcataactttatcagttcctcatgtgtaagataagacaaatagtaatactgcagttcttcacgttattcatgaataaattgacacttagagsagtcaagcagcttacacttggtcacacagtggtagcaccatgatctgaacctaggtggtgactacagagactgcagagacaaccaccacacagatctgcctccaaaatttaggagtaatttgatggcaaacttaatgcatccatccagttcaaaatgactcc

SEQ ID NO: 474947 - DNA, 617 bp, Homo sapiens
gtgatatgcaagtatgtgatgacatacaagttttataatatgaaaacgaatctgctgaatcatcgaaagggacctagtcactgctcccagttccataaggtgagcaaccaaaaccctcttcttccaggaatatttgcattaaaaacagagatatactttttaaaattaattagctacatttaaaatgaggtaatcttcttcttcctcttacattgaactttatgccaaatcattttaagaacaatttttactttcttgctttcatttgaacatttaataaaaatgtttaggttgatatcttaaagttgtcagtgaaatctcagatttacataacagtttgcatccagtagtttttttgagtaacacaaacatcagtatagccaaatgttaactcttatcactttttgtgttaataacaaagtaatatttgtaatatagtgtccctgaataactataaaaacttcttggaattattttgtttttaaaataaaacactatttaataamtggtatcatagcccttcaaaagacacattctgaaatgctatcagtcagggggcaaaagttgttttagttcagtttattttttaatatgtcctgagttctttctgttcataa

SEQ ID NO: 474948 - DNA, 377 bp, Homo sapiens
ctctcctagtgttgatgtgaagattagatgagtgacgtccataaggagcttaagaaaatgcctggcgtatggaaagtgctcatccatctcaactctaactacctcttactttgccaatacttggtctgtgattcttgggcatattttgaggggacatgatatctacatgttttttaacataaaaatgtaaaattagatccatgagtcttaagaggggccatgccaccccatgggttattttggcacttggctcccaaatgaaataaaaaatgttttgggaattttttttactctcaaacattggaatggtggggagtactcctggcatctggggggaacctgagatgtgagwtgtgtaggatgttgtcacacaactt

SEQ ID NO: 474949 - DNA, 651 bp, Homo sapiens
ttttctgtggggcttataatggcctgtaacctggataaagactggggtctcgctgtccagaggcaatatggcaaagtgggaagtctttggctttagctttggctttaatttcttctgtgcaaacttgggcaagtatcttagcctttctaaatttcagatcttctgtaaataccattaatcatgtctactttgcaggttttgtgggaggactaaatgggatgatatgtgtagggctccttgtaataatagtagggtttttaatggtcacagctattattgtaaggtatatctcagtaaatcacttaggcctcatgtggcctggatgacaacaaaaaarttggatgtgcagggtttttctttgaggagggcactaatactctttttcaacatcagcacagagaacattgagttgctgtaaaagcctgttttctacatgtgtattttattagcagaatctcaacccaggccctatttaggcattcctcagaaaatctagaggaactaggtattgatttttgcctaccatagacagacacagacacactgaaggaagccacttcattggttttttcatgtgaattatttcaagatctacgttattctcactgaaatatggcctaccaggctatctcccactctcatcacaacctt

SEQ ID NO: 474950 - DNA, 504 bp, Homo sapiens
gtgtggtagcttcctgccttattgatttatttatttttggataaattggttggtcttcttattgggtataggccatccaggactttctaacaggatgcattatggggatccattcgtaaggccatcctttggaatgtggagcccatttttttttttcagaaacctcacagcratgggcagttctgctgcccagccgagcctggtctccagaaagcaaggtgggaaatcggagttgtccaattttgttacctagagaggttcaattccattcgtcaaactcttaataaatactgattctgtgtcaggtgctgtgctggagcaggagataaaagggaagaggttcctgccctcagggatctcatagtcagttgcttttagcttgtgaagtgaaaatatctttgaattggaagatgtggactgaccggaaggaagttgtatgacctagtgtataagagtggagacctggcatccaaaccttggttcaaatcgcagctctttcactga

SEQ ID NO: 474951 - DNA, 504 bp, Homo sapiens
gtgtggtagcttcctgccttattgatttatttatttttggataaattggttggtcttcttattgggtataggccatccaggactttctaacaggatgcattatggggatccattcgtaaggccatcctttggaatgtggagcccatttttttttttcagaaacctcacagcaatgggcagttctgctgcccrgccgagcctggtctccagaaagcaaggtgggaaatcggagttgtccaattttgttacctagagaggttcaattccattcgtcaaactcttaataaatactgattctgtgtcaggtgctgtgctggagcaggagataaaagggaagaggttcctgccctcagggatctcatagtcagttgcttttagcttgtgaagtgaaaatatctttgaattggaagatgtggactgaccggaaggaagttgtatgacctagtgtataagagtggagacctggcatccaaaccttggttcaaatcgcagctctttcactga

SEQ ID NO: 474952 - DNA, 561 bp, Homo sapiens
tctaaaaaaagcagtatcatcacaactaaaaattaataataatttcttaatattatctgatatccagcagtattaaaatttatctaaattattacatgtgtgtggaaaactcttcaccttatgaggctacacacgtattcctatgatgccatcattgcttgaagtagtttttgggcaccgctaatcaagatggtcactgggaacggcatcatatacttttgtaaactcttgcggagggcaatctmatatcttttgagggtggatttgattttgctataagccagaagtcatttgaaaccaagcctcaagaataagatggctgattcacaaataatactatttattctatttggatatttaattctgctgtaccttaaaagcagataacttagagccattgctttgtagttacataacttatgtcagtaagaaactaaaggcaggtgtgatggcaaaaatcagagggtgtcagcctttgtgctgcagcagtgtcctggaggctcctctgtggggctggaattattttttttgagttgatgggtcatggtgggggtgcgtggt

SEQ ID NO: 474953 - DNA, 539 bp, Homo sapiens
tgtgcccatgaggccagccctgatgctatgtgttaggctctatcgaacgttctaatgaaatgagtctgctcagaggcaccctggtggggtagtaggagccccagatttgagcatgggtatactgagttttagtaatagctctttgaataacttcctgttgactttgagcatgttatttaacttcttggaggttcagtttagtcatccattaaatggagagagggagaagtgggaaggtggtggactacatctgtatttctccaattccagttagttatataccacatttttagtatataaccatttaggctataaccatggcctctggccccacactccctgagttctaatcttggctctgctatattctagctatgtgacctcaggcaagtgcctcagtttcctcatctgtaaaatagagattgctgtgaggattacataaataagtaagtgaagccctcagaataatggctgatatgtgayaagcacggtacaagtgctcattattactattcctatgaatcatacggtatctgtac

SEQ ID NO: 474954 - DNA, 613 bp, Homo sapiens
aatattttcggattcatcagcttctatgcctgtggtcatgtccacggtgccgtaattggggtggttgacgttgtaggttgacttgtctgatttccctatgagcatctcattgtctcccaaggatggtaagttcttggccccacatgtgttggtggctgggccagaaaactcatccccctcactcacaggagaacaagcttccttctcacagtcagccagaatgccctccttcttcttggtgtgctcctcagacaagaacttgacaaaaccatcaatgtcactctcaggttggtatcgaaggagcaagacacagacagagaccaaggtgtaggccaggagcgtgccgatagacatcatctctatcaggtctctcaagctgaccaacagtgcgaggagcgctgccaggaaccccgacacgatgcaggccaccactggtgtctctgtgtaggagctgacgtgagccaggaacctggaggggccrggcaagcagagggttaatggtgagctacagtgaccgattccagtgcagccaacatagggagctagaactatcaataggctggtgtgattaactcctcctggtcctgctccaccaatttacttctgcattcac

SEQ ID NO: 474955 - DNA, 617 bp, Homo sapiens
gggttatgggttactgttcttccgaagaatctcacctacgtggtcctgatggattgtttctagctaagtagctcctactgaatgcaacagcaatggtgagttttgagctaaattttgaacaagagaactccagtgaatggaatagtgactcccttggatacactggggggcttcttgaaagaggctttcccaccaagaaaaatagcaagtgcccttgrctgagcttatagtattttgccacataagcactctcctaattaaaataatcttagaaatgttttcaaaggagcaggtgtttgtatctatacttcacatataagagaaactcattatattggttatttttctttagaagtcaaagaaatgataagctagggcatttataaacaaactctcaagagaaattaatatagccaagggctattgttgaatttattccaagtgggaaatgtctaaagagttaataaggtctacagatatatttgtgcaaatatgtgtatatgcatacatatgtaaatgtatacattatatatatattttcaattactttgcaagggacttttcagggccagatctatgagagtgacgagtggtgaagaatagtatataaaatgtct

SEQ ID NO: 474956 - DNA, 614 bp, Homo sapiens
aagggatcctccaaggtcacagaccagcactggggccagaacccaggtctttgacgcctatgcggttctactctagcactgaatgtggtgcttgctccaggtacctctaccttctgggaagaagctacctcccctggggctaagaaatactaaaccaattgttttttaaatattatacttgtatgatttctggaactatgcaatagaaagaacaaaaagtagatacttccactcccccattctgcctgcctcaacccctgtaattttcttgggctcttaacttctttgttcttccccagggattggcttctgtctcttggcctcttggaaacacatgcctttgcccctccacrgagctgttgggaaaggggctaggagggctcagattctgtgttcaggaggaagggttaaggaaaatgcaagtacctacaagacaaataaccctttgtcctgcaatgactgataggttattagcactctctagctgggtatgatgctgaagcaggggttcttaaagtgtgctcccagaccagcagcaagagcatgacctggggactggttagaaatgcagactctccagtcccactccagacctgctgagtcacacactctgg

SEQ ID NO: 474957 - DNA, 614 bp, Homo sapiens
aagggatcctccaaggtcacagaccagcactggggccagaacccaggtctttgacgcctatgcggttctactctagcactgaatgtggtgcttgctccaggtacctctaccttctgggaagaagctacctcccctggggctaagaaatactaaaccaattgttttttaaatattatacttgtatgatttctggaactatgcaatagaaagaacaaaaagtagatacttccactcccccattctgcctgcctcaacccctgtaattttcttgggctcttaacttctttgttcttccccagggattggcttctgtctcttggcctcttggaaacacatgcctttgcccctccacagagctgttgggaaaggggctaggagggctcagattctgtgttcaggaggaagggttaaggaaaatgcaagtacctacaagacaaataaccctttgtcctgcaatgactgataggttattagcactctctagctgggtrtgatgctgaagcaggggttcttaaagtgtgctcccagaccagcagcaagagcatgacctggggactggttagaaatgcagactctccagtcccactccagacctgctgagtcacacactctgg

SEQ ID NO: 474958 - DNA, 537 bp, Homo sapiens
ttcacatagggtgaccaaccatcaaggctcagggatggagggggttcctaggatataaggttttcagtggggaaattaggaaagtcccaggcaaatcaggatgagttgggcactccatccttctaacaccttgctttaagtaccgttgtccctattttgcagaggaggaaactcagatccagagattaaagaacaggagctgtaaccaaatgaactttgagttcagttcctgcaagccggttttataaccccatggtttctactgtttagagtcacacacctagacagtggcaacaaagaaagagagtgctttgggaagaactagatttgggttgaacctgagatctgctatccactgactctgggcaagccattgagtcctaaatctcaagtgctttagctgcaaaatcaagcaagtaatcccaactcagaggtctatcatgatcatctatgtattatagaytgggctccctgggaagcaaactcggagatgtagactaccatacaggaagtgtattaggatgtgctgttagtttc

SEQ ID NO: 474959 - DNA, 618 bp, Homo sapiens
ctgaatgccaataaccacatccattcttgtcttcaagcctgtagggttgtcaccgccactgcccccaggcatagattctttccaggccatcccaagagctgctcaacagatcagcctccaaagcactctgctcacaccagcaacgtgctcagaaataccccacggctcccctctgcctgagtattaggtccaactccwcagcatgacattcaagaccatccaccaagcagtcccaaatttcatttctcaggactttaccccaatggactctccaaaccattcaagccagtccttggaatatcagatctcacctgcctaaatgtgtgccccgtctgaaatggtggccagcgtcatttcagcatccttcagagaagtggacttcaaactggggcagaactactctggggtacacaaagacaccccacagggtatgcaagctgaggtagaagggaatcaacctgagatcctccacatccattcccactgcctgacaacgtgcctcagtctagatgcacggcccctctcctttcctacctcccctcctcacaatggtcctgttctctctttacaggaaaaagagcaactgctcactcgtccagaatctatgatgcagtgtcc

SEQ ID NO: 474960 - DNA, 602 bp, Homo sapiens
ccttggtaagacaatggagagggtgccgcaaaagtcaccactggccccactgccctgtagggagagcttagggagaggtgatgaagcatatcagagtgtgccagaccccaggaccttctctggcctcttcctacttctcacaagctctcccctcacgctagtaagaacattcagtaaaccgctattgttttaaaccrcttgcaaacctgatacactataaattaggctatgggtttctttaacagcttatgtgtcaccacaatccatttcttacttatgtctgtaacattattttagggagctagtttttgtcaaccagcagagtatgtatgaaatatgacacagtaattatcatcaaaaaaatagaaataaaactgtattcaacatctagctttatcaaaacttaagatttagcttacatgctttagatcttttttccattaaataaaacattaaagttattcattcaatacttattgagtccctgctatgagctaggcatgatctgagcactagaaatacactcctgtgagagaggcagacaacagataaacaaatagatatactgtatcagatcacactgctacaatcagaataaaatc

SEQ ID NO: 474961 - DNA, 632 bp, Homo sapiens
aaaattactgctctattgttcaactgttactattgtgaaaactgtgtgtctactgtcatcactaaacagcaatgtgtgattgtttcataactccttaacacagcatctagctcatcaaattctaaacccaaatccaagagttgttcttttactatacacattcattcatctcttcaagcacagaaacatactcttgagagtgtaaagtgatcctagacgtttctgacttctctcctgttcattaaaagacatggtgggagatgtgaggaaaagaatttacatctcaacaatgttatactctaaattcatattttagtaaaagcatgacacacagctgtatgcgtatttttgatggcacagttggcaacatttccsccccagaaagaggggaaagataggtagaggttggagcacaagcacatcgctttaattaaaaatgaaaacaacttttaaaaaatgttaagatattgtattgctctcatgtagttaccaagatctctcttttgtataagaaagaaaaatattcacagacaatattcctccatctgagagtgtagaaagctccagatctgaagtctgtattaaaaatactggtgagaagtagttttctagaagggatactgcagccctca

SEQ ID NO: 474962 - DNA, 602 bp, Homo sapiens
ccttggtaagacaatggagagggtgccgcaaaagtcaccactggccccactgccctgtagggagagcttagggagaggtgatgaagcatatcagagtgtgccagaccccaggaccttctctggcctcttcctacttctcacaagctctcccctcacgctagtaagaacattcagtaaaccgctattgttttaaaccacttgcaaacctgatacactataaattaggctatgggtttctttaacagcttatgtgtcaccacaatccatttcttacttatgtctgtaacattattttagggagctagtttttgtcaaccagcagagtatgtatgaaatatgacacagtaattatcatcaaaaaaatagaaataaaactgtattcaacatctagctttatcaaaacttaagatttagcttayatgctttagatcttttttccattaaataaaacattaaagttattcattcaatacttattgagtccctgctatgagctaggcatgatctgagcactagaaatacactcctgtgagagaggcagacaacagataaacaaatagatatactgtatcagatcacactgctacaatcagaataaaatc

SEQ ID NO: 474963 - DNA, 602 bp, Homo sapiens
ccttggtaagacaatggagagggtgccgcaaaagtcaccactggccccactgccctgtagggagagcttagggagaggtgatgaagcatatcagagtgtgccagaccccaggaccttctctggcctcttcctacttctcacaagctctcccctcacgctagtaagaacattcagtaaaccgctattgttttaaaccacttgcaaacctgatacactataaattaggctatgggtttctttaacagcttatgtgtcaccacaatccatttcttacttatgtctgtaacattattttagggagctagtttttgtcaaccagcagagtatgtatgaaatatgacacagtaattatcatcaaaaaaatagaaataaaactgtattcaacatctagctttatcaaaacttaagatttagcttacatgctttagatcttttttccattaaataaaacattaaagttattcattcaatacttattgagtccctgctatgagctaggcatgatctgagcactagaaatacactcctgtgagagaggcagacaacagataarcaaatagatatactgtatcagatcacactgctacaatcagaataaaatc

SEQ ID NO: 474964 - DNA, 564 bp, Homo sapiens
gttgtattataagatagtaaagacaagagtggcaccgtcatcttcacaactgtccactgcccctcctcctgctgggcaggaaacccaagaggatgggaatgaggtctcttagagtcaccatgtgccaccctgtcgccaccacagagcctggcaccaagcaggtgctagacaaagatagggtgactgagcattgaacctgggaccccacaggcccacaccrttgtccatgccccagtgccaggcctcacaagtcctccttcctggaggcagcaagatagaaagccctgtaccaggggcctagagacttggcagtttcattcactcattctttctgatccttcactcatgtgacgggctgtgcggcgttccatggggaaccccagaggtgagcaagatgctggccctgcctgttctgtaggggacagaggcaagacccaaagccaaggcatattcttgatctgatcaagggctgcccaggggagggggcagcttaactagccaggggcccagaacccagtgcctggcaggtcgcctggtaagagttccccacagtccaggcagggg

SEQ ID NO: 474965 - DNA, 633 bp, Homo sapiens
ccatgtccagccttgcccaaccttctgtggctccctatggctgcaggagaaagcagcgcccatcctcggaatggcctgggccaggcctccctgccttcagcttgtcctctagatacacgtgccctgtgtgtacttttctcaaagctgcccggctcgccccagcctctttgctcacgcagggacccccaggatgcccccagcccacaggccgggtttgaagccgtcacctcctgagctattcttgcctgttctgtgtctgtctgtccccrctgtcatccatgtccccaggcagcgactggatttttacctgggcactgagaaggcgtgaagctcagtgtgtgtccattccatgagtgaatgactgaaccaatgaacaaatgcatgaatgaggatactgacagggaaagagaaggatggggtagagcatgtctggctatccccacccggctcccctgcccagcccatcctgcctggtggaggaccttgagggacctggctccccagggtcccctccttctggctcacaggaatcaggggctgtgcccctctccccgctccaggttgttaccgctacagctacgtgggccagggccaggtcctccggctgaaggggcctgaccacctggcctccag

SEQ ID NO: 474966 - DNA, 260 bp, Homo sapiens
gtggctgttttcagaggggcttcatccttccaaggcctgtgtggagcagaagcctccatggactgggtgcccggagactcagcatgcaggccctgccctgccagtctcctcccgatcttgrggaacttgctgctctgtggaggtctcagtcttcttgtctgatagatggggacaataaccttccctctggagttaggtcaggagtgctgtggctggaggacgcagcacccgcccaccccaggcatcggcacatagtagat

SEQ ID NO: 474967 - DNA, 429 bp, Homo sapiens
tgtggctgttttcagaggggcttcatccttccaaggcctgtgtggagcagaagcctccatggactgggtgcccggagactcagcatgcaggccctgccctgccagtctcctcccgatcttgaggaacttgctgctctgtggaggtctcagtcttcttgtctgatagatggggacaataaccttccctctggagttaggtcaggagtgctgtggctggaggacgcagcacccgcccaccccaggcatcggcacatagtagatgttgagtgaagtatagttcctgtccctccttccttgttccaggtcaccatggkgacagccgccctgggtcccgtctgggcagcgctcctgctctttctcctgatgtgtgagatccgtatggtggagctcacctttgacagagctgtggccagcggctgccaacggtgc

SEQ ID NO: 474968 - DNA, 424 bp, Homo sapiens
caaacttcctgcagctgctttggttttcttcagggcctttctgcygtgttctggccttcctgaaagagtcttattattctgtccatccacatccactgtctgtccatccgtctgtctgttcatcccttcatccatccatccatccatccatccatccatccatccttccttccttccttctcccccatcattccttctctccctccatcattccctccatgatccccccattcatccttcttctgttcatccatcagtccattttccattcacccattaaccacccttctatccacatcacaatgactaagcacctcctatgctccaggcacataccaggcagcataaagaaatgcagaatgaatgggattcagttcctgcccttggggagcacccactttagttggggagagaaggaaggcct

SEQ ID NO: 474969 - DNA, 556 bp, Homo sapiens
gatgattgagcgccttttgcatgcaaagtcccgaggtaggcatgaagtagttgggcagtccagatgggggagaaggtgtcgtggatgtggagcccagggtgtcactctacgcgctcccgatccctcccaaggcctaggcgtcctccctccaccgcgggaacggagcaggggtggcacagaactctggtggctgcaatgagggttcaacggttgaatgcgtggagtgcatcttagcttcacttctggcccaggaagcgcaggctccgtgtacaacacacgcagcggtgcagtgccttcaaagggggcgtgtggctgtgtgtgtggatgtgccagttttgggcttcctctcggcaggaggtgggggggcggggaggctctggcgctgagtgccccctttccattgcggtcctttggtgcagtggagggtccccccagtagcaggggcatttccaaggagccaggacttcaagggcctaaggctggaggggccctgtccagtgcaacagagagaccttgagcatgggcggtgaggtcrcctctcctggcccagctatca

SEQ ID NO: 474970 - DNA, 558 bp, Homo sapiens
aacttcatcctaactgggacactgttgtacagtggaggcggtgatggcagcaygcgggtgagctgaggtggaagttcaaggggtcttggttaacacaggtcagaatgatggcagggtgcaagtgcaggcctgggtgtgggactggtatggagcagttcagagggaacaggaggctggaggctacagtgtggaccctgacatctcctgggaggcggagtggagagggaggctgagcgcaagggccaagcactccagtgagcagagggaggacgggtagggcgtttggcagataccaggactgaggaggatgcagtctggcttggccccaaaaaagacagcccaaggacatcagggctggaagaccccaatatgcccttgtcccatggcccctgtgaaagaggggtctgggtccagtggtgggagggctgtgggactgggtgcatggaaacagagggtatgaggcggtttgttcccagtgggacccatgaagatgcagcgcagagggtcaggtggggatgtggaagacgtaagagaagtagttataggagcaaggcgtgg

SEQ ID NO: 474971 - DNA, 669 bp, Homo sapiens
gagcctcgtggaggaggctgggtccaaaccccagcactcctgagacccaggtctgggtaggcccgagtgggctctgtcagggctctgccatcagagaagcttctggattacatctcaggttgcctcagagagaatcggatgtcctctgggacagacctaggttctaatcctggctctgccacattctggtaggatgactcatgaggcctggtttcctggcctgtaaaatggcaagggaagagcaggctcagcatgcacraagccctgacagagtgagaaagcacaggaggcagggtcagagatgaagatggggcagtccctgtaggacatgtgggtcaagactgagagtttggattttactgtgaatgcactgggaaggtttgagtgtgtatgatggggagtggctggggggtgaaatgacgtgatttgagtttgggaaaggttgctctggccgctgagtggagaacagaccagagagtcaggagtattaatagaaacagggagaccagggcggaggccaccatgggcctgctgaggtgggagatgacacggctctgagcagggcaggggctgaagaaagcaggtgcacctctctgcacacccctgctggccacccatgcctctgggcttctgctggcgtactgtctcacccctcctcacctggtttta

SEQ ID NO: 474972 - DNA, 653 bp, Homo sapiens
ctgtagcacctgggggacagactgtatgagtcagagaaaacagaaacagcagtccccaggtctcagaggcccaacaatagaggtttatttttcattcaagttatagcccagtgtgaattgtctgaggaggggtgagggccygtccttcaagggactccagcccctctacccaaaacttcactggattctggcaggggaggggagagagagaaagagatagagggatggccggccgtggtggctaacgtctgtaatcccagcacttagggaggccaaggcaggcagatcacgaggtcaggagatcgagaccgtcctggccaacatggtgaaaccccatctctactgaaaatacaaaaattagctgggtgtggtggtgtgtgcctgtaatcccagctactcgggaagctgaggcaggagaattgtttgaaccggggaggcggagcttgcaatgagccgagatcgcgccactgcactccagcctggctacagagcaagattccgtctaaaaaacaaaaaaaaaaaaagaaaaaaaaagagagatagagggattaagagacacaggagatcataggtgagattttttttaggcctagaagtagaataaatcacttcctcccacatcccattagccagacttggttctggagccccag

SEQ ID NO: 474973 - DNA, 591 bp, Homo sapiens
tgtggcctgggccaatttctccgccagacactgtgtcctgatgggtgtgaatgtgtaggtgtgtgtgggctccgtgcaccctggcctgttcgggtgtgacctcccagagtccaggtccttcagggaacatggaagatacccttgatggggctgagcccacatccttatagaccttgatccaaaagcagtagatgtcctttctccctattatccaaatagcagatttcagggaagaaagtggattggctccaactaggtcacatgatggtcccttgggccaatcaccaaagacgtggtgatagggtgccatggttggccaggtgcgggtcatgtgcctacatttccagccagagagaaggtagggcactgtgatggacactctggcctggcctgtggggcaggggtgggtcagggacagcctactaatggctaggggaggtgggccaggcaccagcaaccaacaacatgcgggtctgggtgtgtgtggggtttgctgtgtgtggctgcctttgctgggtgtgatattgtgtgtccaggtttgtgtgagcccagtgcagggtgcayagtaggtggtcgggacatcttagctgc

SEQ ID NO: 474974 - DNA, 606 bp, Homo sapiens
atgtgcttgtccccccacacacgtgtgtctggcagccttgtgttccccgggcctggcagtgctgccgtggcctttcttaggagtatctggaatgaatgaacaaagggggccactgcatgtcacaactgcagggggtactgtacacgctgttcctgtaacctcctgtgaagctacagcatggtgcctctgaataaatgagtgataaggggcaggggtactgaaggagcttgtatggggttggggctagaatctgtgggttaggggagccattggggctgtagggtgaggggaggctctgcagttgtgagcaggagcagggagggaggagtgatgataacgcaccttgcccactcctctcctcctcctccagccattgaagttgctcagaccagaggctttaccttgaacttgtctctcagaggcggttgccaggcaacagcccttggccaccaggctctggaccaggacttcctgcatcagcatcagcattatcagaggggagctgggaacccgcagggcctggggcaggaaagaccacggcccccagatctttgggatcctctttacctagaagsgatggggcaggtgaggccactgacccatggg

SEQ ID NO: 474975 - DNA, 647 bp, Homo sapiens
gttcccaccacagtgtaagcggagaccctgggtcccagctctgccgcctgctggtctgtgatcrgggccagggcatgtcccgtctctgggcatctgtagggtgaacaggctgtgctctcagtgcccttctgctttggcatgggtggatcgattcccacacttgtgctagtgcccactagacagtctgaggattctctcctttcctgggtccccagcatctagaacggtgccaggctcatagcaggtgtccaataaacagtcactcttgagcaatcagacattcctgggcactactggcagccaggcaggcctgtgctgggctgtgggtcaggcagtgtccctgggctggtggcccagagggcccccaagccagtgggtgggttgggggagtgcggggctataatcagggagagcttcctggatggggcagccctgggccaactgcttcaggacgaggaggagttaggagctgttgagagtccagaggaaggggtggagggtgaaggaagcccccactcacccacccctggcctttctcccaccagaagtggctctcttcgcccttcccctcatcgtccttcagccctggcggcctggcacctgagatctcgccactagaagtgctggagagggacaaggtgacgcag

SEQ ID NO: 474976 - DNA, 570 bp, Homo sapiens
atgtcccgtctctgggcatctgtagggtgaacaggctgtgctctcagtgcccttctgctttggcatgggtggatcgattcccacacttgtgctagtgcccactagacagtctgaggattctctcctttcctgggtccccagcatctagaacggtgccaggctcatagcaggtgtccaataaacagtcactcttgagcaatcagacattcctgggcactactggcagccaggcaggcctgtgctgggctgtgggtcaggcagtgtccctgggctggtggcccagagggcccccaagccagtgggtgggttgggggagtgcggggctataatcagggagagcttcctggatggggcagccctgggccaactgcttcaggasgaggaggagttaggagctgttgagagtccagaggaaggggtggagggtgaaggaagcccccactcacccacccctggcctttctcccaccagaagtggctctcttcgcccttcccctcatcgtccttcagccctggcggcctggcacctgagatctcgccactagaagtgctggagagggacaaggtgacg

SEQ ID NO: 474977 - DNA, 622 bp, Homo sapiens
gaggcctcagagtgcttggctgctgtatctttaatgctggggcccaagtaagggcacagatccccccacaaagtggatgcctgctgcatcttcccacagtggcttcacagacccacaagagaagctgatggggagtaaaccctggagtccgaggcccaggcagcagccccgcctagtggtgggccctgatgctgccaggcctgggacctcccactgccccctccactggaggggtctcctctgcagctcagggactggcacactggcctccagragggcagctccacagggcagggcctcattatttttcactgccccagacacagtgcccaacaccccgtcgtataccctggatgaacgaattaattacctggcaccacctcgtctgggctccctgcgcctgacattcacacagagaggcagagtcccgtgcccattaggtctggcatgccccctcctgcaaggggctcaaccccctaccccgacccctccacgtatctttcctaggcagatcacgttgcaatggctcaaacaaccttccaccccagcaggacagtgaccccagtcccagctaactctgacctgggagccctcaggcacctgcacttacaggccttgctca

SEQ ID NO: 474978 - DNA, 384 bp, Homo sapiens
ctctgcagctcagggactggcacactggcctccaggagggcagctccacagggcagggcctcattatttttcactgccccagacacagtgcccaacaccccgtcgtataccctggatgaacgaattaattacctggcaccacctcgtctgggctccctgcgcctgacattcacacagagaggcagagtcccgtgcccattaggtctggcatgccccctcctgcaaggggctcaaccccctaccccgacccctccacgtatctttcctaggcagatcacgttgcaatggctcaaacaacmttccaccccagcaggacagtgaccccagtcccagctaactctgacctgggagccctcaggcacctgcacttacaggccttgctca

SEQ ID NO: 474979 - DNA, 329 bp, Homo sapiens
ctgcacacacctctcatgctccatacacacctcacaccatacgtacctcaaagacacacacaccttacactgcacattcccagcacccacactgcacacacatgcacagtccatatgcccacacaacacacttcacacaccccccaccccacaccatacaaacctcacagacacaccyctcacacaaatcttataccccacacacaatccctacgctccacacacacacacacacacacacacacacacgcaccttctacacatacataatctacacacacaaattccagactgtctctcttacacacacactctgggacccatatgcc

SEQ ID NO: 474980 - DNA, 651 bp, Homo sapiens
gcacacacctctcatgctccatacacacctcacaccatacgtacctcaaagacacacacaccttacactgcacattcccagcacccacactgcacacacatgcacagtccatatgcccacacaacacacttcacacaccccccaccccacaccatacaaacctcacagacacacccctcacacaaatcttataccccacacacaatccctacgctccacacacacacacacacacacacacacacacgcacmttctacacatacataatctacacacacaaattccagactgtctctcttacacacacactctgggacccatatgcccacagcacacagcatctcaggcgtgcaccccgcattctggcctcaggatgtagactcgctgaaagtcagccttgtctgagacagacgcccgctgccctgcacgcaccctagagagccctggctcccatccggcacttcggcacgcatatggctcaaacccatctccacagcaacgctgttccatagaacaacaacgcaggtcacacttgtgacttaacctgtctaatacccacatgcaacaaggggtgtggtggcccacgcctgtaatcccagctacttgggaggctgaagcaggaggatcatgtgggcccaggagctccagac

SEQ ID NO: 474981 - DNA, 651 bp, Homo sapiens
gcacacacctctcatgctccatacacacctcacaccatacgtacctcaaagacacacacaccttacactgcacattcccagcacccacactgcacacacatgcacagtccatatgcccacacaacacacttcacacaccccccaccccacaccatacaaacctcacagacacacccctcacacaaatcttataccccacacacaatccctacgctccacacacacacacacacacacacacacacacgcaccttctacacatacataatctacacacacaaattccagactgtctctcttacacacacactctgggacccatatgcccacagcacacagcatctcaggcgtgcaccccgcattctggcctcaggatgtagactcgctgaaagtcagccttgtctgagacagaygcccgctgccctgcacgcaccctagagagccctggctcccatccggcacttcggcacgcatatggctcaaacccatctccacagcaacgctgttccatagaacaacaacgcaggtcacacttgtgacttaacctgtctaatacccacatgcaacaaggggtgtggtggcccacgcctgtaatcccagctacttgggaggctgaagcaggaggatcatgtgggcccaggagctccagac

SEQ ID NO: 474982 - DNA, 651 bp, Homo sapiens
gcacacacctctcatgctccatacacacctcacaccatacgtacctcaaagacacacacaccttacactgcacattcccagcacccacactgcacacacatgcacagtccatatgcccacacaacacacttcacacaccccccaccccacaccatacaaacctcacagacacacccctcacacaaatcttataccccacacacaatccctacgctccacacacacacacacacacacacacacacacgcaccttctacacatacataatctacacacacaaattccagactgtctctcttacacacacactctgggacccatatgcccacagcacacagcatctcaggcgtgcaccccgcattctggcctcaggatgtagactcgctgaaagtcagccttgtctgagacagacgcccgctgccctgcacgcaccctagaragccctggctcccatccggcacttcggcacgcatatggctcaaacccatctccacagcaacgctgttccatagaacaacaacgcaggtcacacttgtgacttaacctgtctaatacccacatgcaacaaggggtgtggtggcccacgcctgtaatcccagctacttgggaggctgaagcaggaggatcatgtgggcccaggagctccagac

SEQ ID NO: 474983 - DNA, 651 bp, Homo sapiens
gcacacacctctcatgctccatacacacctcacaccatacgtacctcaaagacacacacaccttacactgcacattcccagcacccacactgcacacacatgcacagtccatatgcccacacaacacacttcacacaccccccaccccacaccatacaaacctcacagacacacccctcacacaaatcttataccccacacacaatccctacgctccacacacacacacacacacacacacacacacgcaccttctacacatacataatctacacacacaaattccagactgtctctcttacacacacactctgggacccatatgcccacagcacacagcatctcaggcgtgcaccccgcattctggcctcaggatgtagactcgctgaaagtcagccttgtctgagacagacgcccgctgccctgcacgcaccctagagagccctggctcccatccggcacttcggcacgcatatggctcaaacccatctccacagcaacgctgttccatagaacaacaacgcaggtcacacttgtgacttaacctgtctaatayccacatgcaacaaggggtgtggtggcccacgcctgtaatcccagctacttgggaggctgaagcaggaggatcatgtgggcccaggagctccagac

SEQ ID NO: 474984 - DNA, 538 bp, Homo sapiens
ggcattaagggaattgagccagaactaactggaggagcctaaagccctggctgagaacagggcagtgaaagggaactgggtgacaactatggggacgaatgagagtgatatgcggccagttgatccracagcaacagagtatccacttagtgcggagtcctgaattcaactggagaaaacagacacaaaatctagaaaaatctagactcgagggaattcttagtctggtaggggagctagggcacacacatgagaaaagaaaagttgacatgtgctaactctggtccgaaggctcacagagacctgaaatgatcgctactgtgtagggctgatgggagggattcctcttagaggcaagtcagaatggggttgaagatggttaaaaagcacttgtgggctgggcgtggtggctcacgcctgtaatcccagcactttgggaggctgaggcaggtggattactcaaagtcaggagttcgagaccagtctggccaacatggtgaaaccccatctctactaaaaatacaaaaattagctgggc

SEQ ID NO: 474985 - DNA, 499 bp, Homo sapiens
tagggtcccagtccctgggtgtgaggggttcctgccccaggggtgaggcctctgccagcaaatctctcctctctctcgcaggaccgggcagttcctagtgagtggcagcacgagcggggctgtctctgtgtgggacacggacgggcctggcaatgatgggaagccggagcccgtgttgagttttctgccccagaaggactgcaccaatggcgtgaggtcctcagttcaattccagagatgttggggcttgggttggggagggaggtgaatcccagagggagcaagtgtcctcactgaaggcactgatagaccctccccatctctccctcagcctgcaccctagcctgcctctcctggccactgcctccggtcagcgtgtgtttcctgagcccacagagagtggggacgaaggagaggagctgggccttyccttgctctccacgcgccacgtccaccttgaatgtcggcttcagctctggtggtgtgggggggcgccaga

SEQ ID NO: 474986 - DNA, 431 bp, Homo sapiens
gacttcttaggctgagatcccagcaaaaaccccgacagacagacatactctggatacaggtcactttctggaagccaggacccacctggttccgcagaagctactccctttgagaccagtttcctgcctctgtggctggtccagagagatcaggaggaagggaagagatgggattytgacatctcagtcatctggtccttggactggccattgctgcccagggaagaagcagcagggggcgtgagagggtcacagagagatgtgggtaggggttctggaaaaaggggtggaggcagggagaaagaaaaagggaggagagcagagggagaaagtcgcgtctctctctctctctcctagtcttggtccacttgctgccttcccagacaaatttgtctctactccattaagcaagaactggcttgtgctggtcc

SEQ ID NO: 474987 - DNA, 593 bp, Homo sapiens
cagttggggacgtaggcctgttagtgacagtgagtgactcccaagccgagccctggagaggggcccgtgccagctccattatgtttaygtccctggcttggcggtttcctctgggcctgctccacagcgtgtgctcacgggggtggctgtgtgtcagtgggggttgggggaggtgcctccgtgtggggaatgggaggccagagaaggagaagggtggcgaaggggaggggcagaaggaaagtgagagtataagaactaagccctggccggaagactgtgtttcttttattttaaagaaaggataaagggatgttgtgaaagaaaagaagagagggaggaagagaaaaacagaataatagaaagagggacagggacatatggaagagagataggaggggacaggttaggggaccaggaattcacaagtgccaggcaccactggtggtggtgagcctcagaggtggggaatcacccaggtctcaaaggacggttctgaatggggacctccgagctgaaagaccaagctctttcaccacagtgacaaggttgggggctggggaccatgggggcagttcaggggacctgaatttaag

SEQ ID NO: 474988 - DNA, 410 bp, Homo sapiens
aggtgaggtgatggggtcactgtctcagagcccatgggactacagaatcagaaagaagagtaatgtttggtctaatatgctttttctttcttttcttttcttttcttttttttttttttttttkgggacagactttcattcttgttgtccaggctggatggagtgcagtggctgatctcgactcactgcaacctctgcctcccaggttcaagtgattctcatgcctcagcctcccgagtagctgggattacagatgcccgccaccatgcctggctaaatttttttgcatttttagtagagacagggtttcaccatgttggccaggctggtctcaaacttctgacctcaggcaatctgcccgcctcgacctcccaaagtgctaggattataggcatgagccaccacgcctg

SEQ ID NO: 474989 - DNA, 499 bp, Homo sapiens
actgattcctgacagctcgtgagcagccactgaaggctggccaccagcctgggcaacatagcaagagcttgtctctaccaaaaaaaaaaaaaaaaaaattagctgggcctggtagtgcatgcctgtaatcccagctactcaggaggctgaggtgggaagatggctygagccccggcgatcaaggctgcagtgagccatgattgtgccactgcactccagctccagcctgggtgacagtgagaccttgtctcaaaaaaacaaaaacaccacacacacacacacacacacacacacacacacacacacacacacccctctgtgagacatcgttctgccttcatagtgcctgggttgtcattattactatttagtgctcttttgggtcttttctgtgcttcccagaagccctgtgttctcctcccacttacccttaccacttgcccttatcattctgacagcagcccaggtgtggggtctggacttgggggaaggtttagga

SEQ ID NO: 474990 - DNA, 455 bp, Homo sapiens
ttactggattttctacttgtaaaatttatcgtaaatttttaatcataaaatttgttctatggcttgcctacaaacggaacttacggcttccctggagggaaaytgctggaatcggttttcttcttgttttttgagtcccacgtttttccctctctagccatctccctgtttgccgtcgctttttgaaagtaggtgtcaagagtttcttaagttcattagctaattctgccaagacctttcggtttgcatgccatagggccccttgatttatgtatctctctagcatttaatttttctaagtgaccctttacctgttttttattatgacttactaattgcacccatttcctaactttatttttcttattaaagacaggttttaataggtagttcatttctcagccacttaaagaccttgattaattttactagcctcctggtcactcaggaataga

SEQ ID NO: 474991 - DNA, 535 bp, Homo sapiens
ctgagcctctgtaataccaacttcctgggtttttatgaggattaaatgcaagactgaatacaaattgcttattatagtacctggcacatggcgaacactcagtargtgttagctgctatcgtcatcatcatcatcgtcatcattattgtgtaccactctgtcattgagctaatcctagaaggtctttcccggttggcctttcattttgttttatatattaaactttttttaaaaatgtatgtatgtacgtatgtatttatttattgagatggagtcttgctctgttgcccaggcaggggtgcaatggtgcgatctcggctcactgcaacttctgcttcctgggtatatattgaactttttaaagtagggtcttggtctttaatctgcctcatcacacttgctgaacaaggcccactctcagcagtggacagcgatggctggagaagggaacagcccacacagagtctgggaattactgttttagactcatgcttcttttaacaagaaaacactccatcaagaaggagctgagtca

SEQ ID NO: 474992 - DNA, 538 bp, Homo sapiens
gttaaagaacatttgtatttgttagatcctttctgtgataggctgaatgacgcccccctacaaatgttcatgtcttaatccccagaagctgtaaatatctcactstacattgcagaggggttttcagagttgtgattaaatcaagggtcttgagatacagagattatcctggattatctgagtggattcagtatgatcacaagcatccttataagagaaaggcaggagggtcagagttggagaagaagatagaataacagaagcagcagaagttgaagcgaggaagggaccatggaaccatgactacaggcagccactagaagctggaaaaggcaagacaatgggttctcctttagagccttcagaaggaatgctgccctgccaaccccttgcagacttcttaagccactacattcttggtaatttgtcttgttagagcagtaataggatgtgccttccaattcccaaaccactggattctacatagctcttaacttttaaaccagacagacctaggttcaaatccaagctttgccac

SEQ ID NO: 474993 - DNA, 518 bp, Homo sapiens
tcttggcgggcaggcctcagcctcgggagcgttctctgagcacctagggaagtcacagccctcacctcagcttcttcactcttgatcctgtggcaacatgtgcatcccctcaggccctgctgctcccttgcacctcctgtctgtgtcccctgcgggtcagcaggtcagcctggaggaccgggaccctgcctacctcactggcagtgcatctccccattccaagctgggactggcactcggaaggagctcagataatgcctcttaacaatcattaactaggcrttttcctaggtacccatgcagcctctcttttcctttcctttggcttccgcctgtcctacagggatcactaagggagcagtcaaggttggggagcatgggtggagggggaggcggatggcccttcagatcagttccatagcgcagctcgcagatgacaggggacagatgggagctcaccgcgggcttgccaggccagacagcgagtgaggacgccagggacaagttagcaaggccag

SEQ ID NO: 474994 - DNA, 510 bp, Homo sapiens
  misc_feature (1)...(510): n = A,T,C or G
ctgtgcatggcattggtggtgacaatgacaataacttaagaggctcttaaaccttgaggtcattaaaatctsctggtgagactgttaaaaatgcaaattatctggccacatccccagggatctgatttaagagatatgagcccagaaagctgtattattattattattattactacccatggttattattattttgaggtggaatcttgttctgttgcccaggctaaagtgcagtggaacgatcttggctcactgcaacctccgcctcctggactcaagcgactcttctgcctcagcctcctgagtagctgagattacaggtatccgccaccacgcccagctaattttttgtattttcagtagagacagggtttcgcctttttttccaggctggtctcaaacttgtgggggggggtgatccgcacgcctcatagtcccaaagtgcttntattacaggtgtgagccactacgcccggccggaaggctgtatttttaacaaatactttccat
